United States Patent Application Publication US 2024/0301379 A1 - sequence listing, part 10

SEQ ID NO: 18961 - protein, 1121 aa, unidentified
  REGION 1..1121: note = Cas Enzyme sequence
MSDLVLGLDIGIGSVGVGILNKVTGEIIHKNSRIFPAAQAENNVVRRTNRQGRRLTRRKKHRRVRLNHLFEESGLITDFTKVSINLNPYQIRVKGLIDELSNEELFIALKNMVKHRGISYLDDASDDGNSSVGDYAQIVKENSKQLETKTPGQIQLERYQKYGQLRGDFTVEEDGKKHRLINVFPTSAYRAEALRILQTQQEFNPQITDEFINRYLEILTGKRKYYYGPGNEKSRTDYGRYRTSGETLDNIFGILIGKCTFYPEEFRAAKASYTAQEFNLLNDLNNLTVPTETKKLSEEQKNQIINYVKNEKAMGPAKLFKYIAKLLSCDVADIKGYRIDKSDKAEIHTFEAYRKMKTLETLDVKKMVREELDKLAYVLTLNTEKEGIQEAIEHEFADGTFNQEQVDELVQFRKANSSIFGKSWHNFSVKLMMELIPELYATSEEQMTILKRLGKQKTTSSSNKTKYIDEKQLTEEIYNPVVAKSVRQAIKIVNAAIKEYGDFDNIVIEMARETNEDDEKKAIQKIQKANKDEKGAAMLKAANQYNGKAELPHSVFHGHKQLATKIRLWHQQGERCLYTGKTISIHDLINNPNQFEIDHILPLSITFDDSLANKVLVYATANQEKGQRTPYQALDSMDDAWSFRELKAFVRDSKALSNKKKEYLLTEEDISKFDVRKKFIERNLVDTRYASRVVLNALQEHFRAHKTDTKVSVVRGQFTSQLRRHWGIEKTRDTYHHHAVDALIIAASSQLNLWKKQKNTLVSYSEDQLLDIETGELISDDEYKESVFKAPYQHFVDTLKSKEFEDSILFSYQVDSKFNRKISDATIYATRQAKVGKDKKDETYVLGKIKDIYSQTGYDAFIKIYKKDKSKFLMYRHDPQTFEKVIEPILENYPNKELNEKGKEVPCNPFLKYKEDHGYIRKYSKKGNGPEIKSLKYYDSKLGNRIDITPKNSNNKVVLQSVSPWRADVYFNKTTGKYEILGLKYADLKFEKGTGTYKISEEKYNDIKIKEGVDSDSEFKFTLYKNDLLLIKDTETKEQQLFRFLSRTMPNVKHYVELKPYDKQKFDDNEELIKILGIVAKGGQCKKGVSKPNISIYKIRTDVLGNQHIIKNEGDKPKLDF

SEQ ID NO: 18962 - protein, 1214 aa, unidentified
  REGION 1..1214: note = Cas Enzyme sequence
METNKKKRILGLDTGTNSIGWAVVDRLGDQCALVDSGVHIFTEGVKEEKGNEVSKAAERTSHRAMRRGFYRRKLRKIRLLRILSELGWCPYLSPELLSQWRLKKVYPATPEFMQWLGTDDDNAITPYRYRVICLHEKLDLTQEAQRYILGRALYHMAQRRGFRSNRKDQSNDDEKGKVKEAISDLSHKMKEEGCEYLAEYFEKLYNKGKRIRNQYTSRDNHYVEEFHAICRRQELDEDTIKRLEHVLFDQRPLKSQKHTVGHCLFEPSKSRCQMSHPDFEEMRMLQTINQIRMKTPDDDMLRPLWEDERELIVPLFLRKSKSNFDFEDIAKELAKPYIKMYGKKCYGYYKTDGDKDILFNYPMDMGIAGSPFTAGMVAALGSDWEAVIDAQYVKGDDKGLDDKVNDVWHTLSFFDNDDKLEAWLETNLGLDADTAKKVAGIKMVSAYASLSHKVIRKILPFMRGGMLYSYAVMLANIDAVLPAYVRDNDYMRQAAVDMAVGCLNEYDKKTCECTMYQWLKNFLAEKYHIGHKTLNRLYHPSDLETYPHVRPDDQGRMHLGSPRISAIRNPMAMRSLHRIRHVVNALLDKGLIDHDTEVHIELGRELNDANMRAAIRQQNKHNESERAKAKAVLKDYGVNNVSDDDIAKYILWEEQGKKCLYTGKQIGFECIFGPDPKYDIEHTIPRSRGGDSTMENLTLCDSRFNREVKKTKLPSELANADEVMQRVAFMKEKADDLQKQIRRCRTNASMDKSQKDRIIQKRHSLELQQVYWRNKYRRFEMTEVPEDFSRRQGATAGIVARYARLFLKSLFDDVSIVKGAATADFRKAWKLQSVDEKKSRDNHTHHQVDAVVIACIGRGDYQRLAASYHLNGYADRERPSVPEPWEGFVDDMRRIQAETLVSYDFTDNAPKQVRRRIRFTGSHHIKGHKPSHISESDTARLSLHMDTNYGAIEHDGEVKYVIRKPITELTSQSDIERIVDPIVREKVQAATRGLDKAPEIKTALANPIWMNEAKGIQIKKVRCFTPDVTRPLNVRKNRDISRHEYKRTGHFKNDGNYCIAIYEQVLPQGSTAKAKRSFRIINNLAAASHFKVGNRANRAELYPPVDENGYRLKAILHQGDSVLLYENSPEEVYNATAAELCRRLYVVTMIKTDGRINLKHSQQAKAKEGLAGDYKTGEVLRPYILVSSSKFKALIQNRDFTIDVLGKIKFLKHD

SEQ ID NO: 18963 - protein, 1214 aa, unidentified
  REGION 1..1214: note = Cas Enzyme sequence
METNKKKRILGLDTGTNSIGWAVVDRLGDQCALVDSGVHIFTEGVKEEKGNEVSKAAERTSHRAMRRGFYRRKLRKIRLLRILSELGWCPYLSPELLSQWRLKKIYPATPEFMQWLGTDDDNAITPYRYRVICLHEKLDLTQEAQRYILGRALYHMAQRRGFRSNRKDQSNDDEKGKVKEAISDLSHKMKEEGCEYLAEYFEKLYNKGKRIRNQYTSRDNHYVEEFHAICRRQELDEDTIKRLEHVLFDQRPLKSQKHTVGHCLFEPSKSRCQMSHPDFEEMRMLQTINQIRMKTPDDDMLRPLWEDERELIVPLFLRKSKSNFDFEDIAKELAKPYIKMYGKKCYGYYKTDGDKDILFNYPMDMGIAGSPFTAGMVAALGSDWEAVIDAQYVKGDDKGLDDKVNDVWHTLSFFDNDDKLEAWLETNLGLDADTAKKVAGIKMVSAYASLSHKVIRKILPFMRGGMLYSYAVMLANIDAVLPAYVRDNDYMRQAAVDMAVGCLNEYDKKTCECTMYQWLKNFLAEKYHIGHKTLNRLYHPSDLETYPHVRPDDQGRMHLGSPRISAIRNPMAMRSLHRIRHVVNALLDKGLIDHDTEVHIELGRELNDANMRAAIRQQNKHNESERAKAKAVLKDYGVNNVSDDDIAKYILWEEQGKKCLYTGKQIGFECIFGPDPKYDIEHTIPRSRGGDSTMENLTLCDSRFNREVKKTKLPSELANADEVMQRVAFMKEKADDLQKQIRRCRTNASMDKSQKDRIIQKRHSLELQQVYWRNKYRRFEMTEVPEDFSRRQGATAGIVARYARLFLKSLFDDVSIVKGAATADFRKAWKLQSVDEKKSRDNHTHHQVDAVVIACIGRGDYQRLAASYHLNGYADRERPSVPEPWEGFVDDMRRIQAETLVSYDFTDNAPKQVRRRIRFTGSHHIKGHKPSHISESDTARLSLHMDTNYGAIEHDGEVKYVIRKPITELTSQSDIERIVDPIVREKVQAATRGLDKAPEIKTALANPIWMNEAKGIQIKKVRCFTPDVTRPLNVRKNRDISRHEYKRTGHFKNDGNYCIAIYEQVLPQGSTAKAKRSFRIINNLAAASHFKVGNRANRAELYPPVDENGYRLKAILHQGDSVLLYENSPEEVYNATAAELCRRLYVVTMIKTDGRINLKHSQQAKAKEGLAGDYKTGEVLRPYILVSSSKFKALIQNRDFTIDVLGKIKFLKHD

SEQ ID NO: 18964 - protein, 1222 aa, unidentified
  REGION 1..1222: note = Cas Enzyme sequence
METNKKKRILGLDTGTNSIGWAVVDRLGDQCALVDSGVHIFTEGVKEEKGNEVSKAAERTSHRAMRRGFYRRKLRKIRLLRILSELGWCPYLSPELLSQWRLKKIYPATPEFMQWLGTDDDNAITPYRYRVICLHEKLDLTQEAQRYILGRALYHMAQRRGFRSNRKDQSNDDEKGKVKEAISDLSHKMKEEGCEYLAEYFEKLYNKGKRIRNQYTSRDNHYVEEFHAICRRQELDEDTIKRLEHVLFDQRPLKSQKHTVGHCLFEPSKSRCQMSHPDFEEMRMLQTINQIRMKTPDDDMLRPLWEDERELIVPLFLRKSKSNFDFEDIAKELAKPYIKRYGKKCYGYYKTDGDKDILFNYPMDMGIAGSPFTAGMVAALGSDWEAVIDAQYVKGDDKGLDDKVNDVWHTLSFFDNDDKLEAWLETNLGLDADTAKKVAGIKMVSAYASLSHKVIRKILPFMRGGMLYSYAVMLANIDAVLPAYVRDNDYMRQAAVDMAVGCLNEYDKKTCECTMYQWLKNFLAEKYHIGHKTLNRLYHPSDLETYPHVRPDDQGRMHLGSPRISAIRNPMAMRSLHRIRHVVNALLDKGLIDHDTEVHIELGRELNDANMRAAIRQQNKHNESERAKAKVVLKDYGVNNVSDDDIAKYILWEEQGKKCLYTGKQIGFECIFGPDPKYDIEHTIPRSRGGDSTMENLTLCDSRFNREVKKTKLPSELANADEVMQRVAFMKEKADDLQKQIRRCRTNASMDKSQKDRIIQKRHSLELQQVYWRNKYRRFEMTEVPEDFSRRQGAPAGIVARYARLFLKSLFDDVSIVKGAATADFRKAWKLQSVDEKKSRDNHTHHQVDAVVIACIGRGDYQRLAASYHLNGYADRERPSVPEPWEGFVDDMRRIQAETLVSYDFTDNAPKQVRRRIRFTGSHHIKGHKPSHISESDTARLSLHMDTNYGAIEHDGEVKYVIRKPITELTSQSDIERIVDPIVREKVQAATRGLDKAPEIKTALANPIWMNEAKGIQIKKVRCFTPDVTRPLNVRKNRDISRHEYKRTGHFKNDGNYCIAIYEQVLPQGSTAKAKRSFRIINNLAAASHFKVGNRANRAELYPPVDENGYRLKAILHQGDSVLLYENSPEEVYNASAAELCRRLYVVSGISSMVITNNKYGVLQLRHSQKAGKYEKGKNGAYVVGENLRSTITMLHTQFKALIQNQDFTIDVLGKIKFLKHD

SEQ ID NO: 18965 - protein, 1205 aa, unidentified
  REGION 1..1205: note = Cas Enzyme sequence
MESNEKKRILGLDTGTNSIGWAVIDRLGDQCSLVDSGVHIFTEGVKEEQGKEVSKAAERTSYRAMRRGFYRRKLRKIRLLRILSELGWCPALSPELLSQWRLKKVYPATPEFMQWLGTDDDNAITPYRYRVICLHEKLDLTQEAQRYILGRALYHIAQRRGFRSNRKDQSNDDEKGKVKEAISGLSQKIKDEGCEYLAEYFEKLYKEGKRIRNQYTSRDNHYVEEFYAICRRQELDEDTVNRLEHVLFDQRPLKSQKHTVGHCLFEPAKSRCQASHPDFEEMRMLQTLNQIRMKTPDDDMLRPLWDEEREAIIPLFQRKSKSNFDFEDIAKELVKPYIKRYGKKCYGYYKTDGDKDILFNYPMDMGISGSPFTAGMVAALGPDWKAVIDAQYAKGEGKKLDDKVNDVWHALSFFDNDDKLEVWLETNLGIEADTAKKVAGIKMVSAYASLSHKVIRKILPYMRGGMIYSYAVMLANIDAVLPAYVRDNDDMRKAAVDMAVECLNEYDKKTCECTMYQWLKNFLAEKYHIDHKTLNRLYHPSDLETYPHVRPDEQDRMRLGSPRISSIRNPMAMRSLHRIRHVVNALLDKGIIDRGTEVHIELGRELNDANMRAAIRRQNKLNESERAKAKAALKEQGINNASETDIDKYILWDEQHKKCLYTGKQIGFCDIFGPDSKYDIEHTIPRSRGGDSTMENLTLCDSRFNRDVKKTRLPSELANADEVMQRVAFMKEKADDLQKQIRRCRTNASMDKSQKDRIIQKRHSLELQQTYWRNKYHRFEMTEVPEDFSRRQGATAGIVARYARLFLKSLFDDVSIVKGAATADFRKAWKLQSTDEKKSRDNHTHHQVDAVVIACIGRGDYQRLAASYHLNGYADRERPSVPEPWEGFVDDMRRIQAETLISYDFTDNAPKQVRRRIRFTGSHHIKGPKPSHISESDTARLRLHMDTNYGAIEHDGEVKYVVRNSIGSLKQKDIKNIVDSVVRQKVQEAYDAKGDVAFSEPIWMNEAKGIQIKKVRCYAPNVTRPLNIRKHRDISRHEYKRTGHFTNDGNYCIAIYEQVLPEGSTAKAKRSFRIVNNLAAASHFKLGNRTELYPPVDENGYRLKAVLRQGDSVLLYEKSPEEIYNASAAELCRRLYVVTMIKTDGRVNLRYSQYTRAGKGVAGDYKTGELLRPHIMVSSSKFKALIQNQDFTIDVLGKIKFLKHD

SEQ ID NO: 18966 - protein, 1215 aa, unidentified
  REGION 1..1215: note = Cas Enzyme sequence
MTKILGIDTGTNSLGWAIVEKQADEYHLLDKGVNIFQEGVKIEKGIESSKAAERTAHKAARVRNYRIKLRKIRLLRILSDAHLCPPLSKAELSAWRLKKEYPKNELFMQWQATDDKSDKTPYAYRHKCLHESLDFSSITDRHILGRAFYHMIQRRGFLSNRKDQSGDDTGMVKENISNLTQEMHDAGYEYLGDYFYYLYNNGEKIRNHYTARNEHYLAEFKAICEKQDLDKNLGSEVVRQIEKAIFDQRPLKSQKGQVGKCVFEKNKTRCPSSHPMFEEFRMLSFINNIKIQTPNDGALRSLSAEERELIMPLFFRKSIIKKKQFVFEDIAKKLARREQYGFYKKSTDVEMPYLFNFPMDTSVSGCPVTAALIDIFGENWIDALCETYTLAEGKSRLDIVNDIWHVLFFYTDEAKLAEFGKNRLQLNDEDAKKFSKITLQNGYGRLCLKVICKILPYLRRGLVKDHAILLGNLCEVMPQYEWDIKEMRIAAIDNIIREINKTDTKDESTSEKRIKLEKRIKEYLKNQYHVSEEKLKKLYHPSKMDKYPRVLRTNDHGVYQLGSPRIDSVRNPMAMRSIFRLRKLVNRLLEEGKIDLDTEVHIEFARELNDANKRRAIAKFAKDNQKKNDEARKKIIDIMGEDYDVKDDDIKKYILWEEQGHICLYTGRQIAISDFIGNSQNFDIEHTIPRSVDGDSTRMNLTLCDSRFNREIKKTKLPAELPNHDEIMARINDWREKYESLDGQIRKLRGKSKGATTKKLKDDIIYNRHLLELQRNYWRGKYLRFTMEIVPEGFSRRQGTDIGVISKYARLYLKSLFKHVYTVNGIATSDFRKIWGVQDVYGKKERVNHVHHCIDAIVVACISRDEYDKLSAYYHNEENHKWYGMSKAYFKKPWPTFVEDLKNVQDEILVYHYTPDNMPKQGRRKILLDVEVDGIKKKKKVLCKGDAARGLLHSDTYYGAIENDGVVRYVKRINLASMKVTDVKNIVDDAVRGIVEAAIREKGFKEAMAGTIWMNEEKQIPIKKVRCYTSIKNPISFDKKKQRDLSDKEYKRNYYVTTKGNYIVALYVGSTKTGKRKTFYEFVNMMEAAGYYKTSNDKSVVGHNIVPLEKDDCQLAFILKKGTMVIFYKETKEEVWDYSQKETVRNLYYVSGIESDGRVTFKYHQEARRDEELPRNASDTSDIKPKIRVGLASAKILVQGYDFEINELGEIKRLR

SEQ ID NO: 18967 - protein, 1220 aa, unidentified
  REGION 1..1220: note = Cas Enzyme sequence
MTKILGIDTGTNSLGWAIVEKNADDYHLLEKGVNIFQEGVKIEKGIESSKAAERTAHKAARVRNYRIKLRKIRLLRILSDAHLCPPLSKAELSAWRLKKEYPKNELFMQWQATDDDSEKTPYAYRHICLHENLDFCSMTDRYILGRAFYHMIQRRGFLSNRKDQNGDETGKVNESISSLTQQMHDAGYEYLGDYFFFLYNKGEKIRNHYTARNEHYLAEFKAICEKQDLDKNLGPEVVRQIEKAIFDQRPLKSQKGQVGKCVFEKNKTKCPSSHPMYEEFRMLSFINNIKIQTPNDDALRPLTTEERELIMPLFYRKSKKQFDFEDIAKKLAPKKQYGFYKKSTDVAMPYLFNYPMDTSVSGSPVTASLKDIFGEDWINGLCETYTLAEGKTHLDVVNDIWHALSFYTDNAKLAEFAKNRLQLNDDEAKKFCDISLPGDYAALSLKAICKILPYLRRGLIYSHAVFLGNLCEVMPQYEWNIEEMRNAAIDNIIHEMNQIDSKDERTFEVCIKEYLKEQYHVSDERLKKLYHPSMMEMYPKVQRTNNHGVYQLGSPRIDSVRNPMAMRSMFRLRKLVNRLLEEGKIDQDTEIHIEFARELNDANKRNAIAAYTKENQNKNDEARKKIKSLFKDETGKDIEPSDIDVLKYVLWEEQKHICLYTGKQICISDFIGSNPKFDIEHTIPRSVGGDSTKMNLTLCDSHFNRDIKKTQLPTELSNHDEIMARINDWKEKYESLDGQIRRQKKLSKGASSKEQKDGIIRKRHLLELQRDYWRGKYLRFTMESVPEGFSRRQGTDISVISKYARLYLKSLFKHVYTVKGIATSDFRKIWGIQSIYSKKERVNHVHHCIDAIVIACIGLDEYNKLGAYYHDEENHEWYGKSKAYFKKPWPTFVEDIEKVQDEILVYHYTPDNMPKQGRRRILLDVEINGRKKKKRVLCKGDAARGSLHNDTYYGAIEDDGVVKYVKRINLSTMKESDVKNIVDETVRGIIEAAIKEKGFKEAMAGTIWMNEEKQIPIKKVRCYTPSVTKPLNIRKQRDVSPKEYKLQYHVVNDSNYMLALYIGKDKKGKEKREFEIVNMLQTAQYFRTSNDKEAAGGNIVPVKSEHDYPFAYSLKIGTMVLLYEKSPDEVWDASGLVLGHRLYKITGLSSMTINGCSYATIVMRNHEEARLSKEVKAKNGSYKQGEVFRPAIVMLHTQINALVQGYDFEINELGEIKRLR

SEQ ID NO: 18968 - protein, 1220 aa, unidentified
  REGION 1..1220: note = Cas Enzyme sequence
MTKILGIDTGTNSLGWAIVEKQADEYHLLDKGVNIFQEGVKMEKGIESSKAAERTAHKAARVRNYRIKLRKIRLLRILSDAHLCPPLSKAELSEWRLKKKYPKNELFMQWQSTDDESEKTPYAYRHKCLHESLDFTSMTDRYILGRSFYHMIQRRGFLSNRKDQSGDDTGKVKESISNLTQEMHDAGYEYLGDYFYSLYNKGEKIRNHYTARNEHYLAEFKAICEKQDLDKNLGPEVVRQIEKAIFDQRPLKSQKGQVGKCVFEKNKTKCPSSHPMYEEFRMLSFINNIKIQTPNDDVLRPLSPEERALIMPLFFRKSKKLFDFEDIAKKLAPKKQYGFYKKSSDAEMPYLFNYPMDTSVSSCPVTTALKDIFGDDWIDSLCETYTLAEGKSRLNVVNDIWHVLCFYTDDTKLAEFAKNRLQLNDEEAKKFCEISLPGDYASLSLKAICKILPYLRRGLIYSHAVFLGNLCEVMPQYEWEIEEMRNAAIEHIIHEMNLIDSKDARTFEVCIKEYLKEQYHVSEEKLKKLYHPSMMEVYPRVQRTNNHGVYQLGSPRIDSVRNPMAMRSMFRLRKLVNRLLEEGKIDQDTEIHIEFARELNDANKRNAIAAYTKENQNKNDEARKKIKSLFKDETGKDIEPSDIDVLKYVLWEEQKHICLYTGKQICISDFIGSNPKFDIEHTIPRSVGGDSTKMNLTLCDSHFNRDIKKTQLPTELSNHDEIMARINDWKEKYESLDGQIRRQKKLSKGASSKEQKDGIIRKRHLLELQRDYWRGKYLRFTMESVPEGFSRRQGTDISVISKYARLYLKSLFKHVYTVKGIATSDFRKIWGIQSIYSKKERVNHVHHCIDAIVIACIGLDEYNKLGAYYHDEENHEWYGKSKAYFKKPWPTFVEDIEKVQDEILVYHYTPDNMPKQGRRRILLDVEINGRKKKKRVLCKGDAARGSLHNDTYYGAIEDDGVVKYVKRINLSTMKESDVKNIVDETVRGIIEAAIKEKGFKEAMAGTIWMNEEKQIPIKKVRCYTPSVTKPLNIRKQRDVSPKEYKLQYHVVNDSNYMLALYIGKDKKGKEKREFEIVNMLQTAQYFRTSNDKEAAGGNIVPVKSEHDYPFAYSLKIGTMVLLYEKSPDEVWDASGLVLGHRLYKITGLSSMTINGCSYATIVMRNHEEARLSKEVKAKNGSYKQGEVFRPAIVMLHTQINALVQGYDFEINELGEIKRLR

SEQ ID NO: 18969 - protein, 1204 aa, unidentified
  REGION 1..1204: note = Cas Enzyme sequence
MDEKILGIDTGTNSLGWAIVEKHDDSYTLVDKGVNIFQEGVKVEKGIESSKAADRTSHRSARVRYYRIKVRKIRLLKVLSDNHLCPPVTSNELSLWRLRNIYPDNELLRQWERTDDKSDDNPYTYRYRCLTEKLDLTDLTQRYILGRALYHINQRRGFLSNRKSEGGDDDGTVKAGISNLTKDMEAANCHYLGEYFYKLYHNGEKIRNHYTARNEHYLSEFMAICNKQHLDDELIKKLKDVIFFQRPLKSQKGLVGHCVFEPKKPKCPASHPLFEEFRMLSFLNNIKIQTPKDEVLRPLNEDERKRILPKFYRKSKPSFDFEDIAKELSGKGKYAYYKKPMGKPYLFNYHMDTSVPGCPVTAGLRDIFGDNWVDGICEVYDKGKGKTRLQIVNDIWHVLFDFTDEENLIAFGKHHLQLCDDEAKKFGNIKVSTDYASLSLKAILKILPYLRQGMIYSLSTFFANLEEVVPNEVWSVESNRPKIINGILAAIADKDNNAVDNRTTERCIKDYLIARFGIEEKVADKLYHPSMIESYPHVPENVNRLGSPRIDSVRNPMAMRSLFRLRHVVNTLLAEGKIDRNTTIHIEFARELNDANKRQALARFVKENENERKKIRAEIIKVYKDETGLTIEPTDTDILKYQLWEEQKHRCVYTDEQIGIADFLGENPKYDIEHTIPRSVGGDSTKMNLTLCNSKFNRDVKQTLLPSQLDNHEQILQRIKDWKDKYEELDKRIRKIRTSSSMSKEQKDRKIQERNLLKLRRDYWYGKYQRFVMTEVPEGFSRRQGTDISVISKYGRLYLKSFFNRVFIVKGLATSDFRKIWGIQDIYAKKERVNHVHHCIDAIVIACIGPGEYSKLAQYYHDEENHEWYGASKGHIAAPWQTFQEDMSKIQKEIVVSHSSADNIGKSGRHRIRLKGKKIWADGDSARASLHNDTYYGAIEHDGKVKYVVRKPLDGNFKESDVDKIVDDTVKSIVKEAIIKCGGLKEAVAQGIWMNKEKGIAIRKVRCFTPSVTRPLNIRHHRDVSVKEYKRQFHVMNDTNYAMAIYVGYDKKGKERSVFEIISNLDACNYFKESNDKETVGNNLFPLSKNDYPLKYVLKKGTLVLLYEDTPEEIRQCTKDELVRCLYKVTGMSSMVVGGNEYGTLVLLHSQEARPSGEVKAKNGAYKQNEEFRSSIKLLHTQFKALVAGYDFEINDLGEIKWLR

SEQ ID NO: 18970 - protein, 1085 aa, unidentified
  REGION 1..1085: note = Cas Enzyme sequence
MTKNYSIGIDMGVNNIGWSILNNDTKKLENYGVRLFPTSNDAKERREVRNTRRRLKRKETRLDDTLYLLKKYGFNEDNTIEENLIEKRVKGLNEKLEKQDIVNILCYMIKHRGYIPFGDEEVTLVDLNGKYPCEFYYEMYKNGGKYRNRKMTVRITDNEKEIKKILETQSKYYKNINQDFINKYLNILTRKRKYWEGPGSINDLTPFGRFKTQEDVENYLEEKRKNPSYEKYIYEDLIKKCDYELEERCCCKLNIYYELFNMYQDFINVSFKNIEELENKDCFYETKNGLYKLNKKGLLMVKDYCMNNFKLKYTDILKKLFNTDKDNISGYRIDKDHKPEFSTLNSYRKIMLEFTEKGFDTTWVSDYNCYNEIMEKMTLTPGGVEFIKEIENNKLVPYKFNEEEKSLFKELKEYFNKKTLLSYGSLSQKILQKAINDMLDLEKNFMQVSRIKDYGKEARENFIKQYKKTSNKLEINASFVDDIIASPQVKKSLRQAIKIINAIIEKEGCLPVSIAIESTKELNSDKKKKEIEKEQKIQENLRKQASNYLSTVFGDSSVTETNILKVMLYNETNGHCAYCNKPLSINDIFADNIQVDHILPISKSFNDSFNNKIISCKKCNDDKKNNTPYQFLKNKNYFEEFEKRVLENKNISDYKKDNLLYKDDLDKYKTRFFNRNLRDTAYATTELINQIEIFNNYLEILDKKRINTLSVPGQITSSIRNRYVKNEDKTSLEKNRDAGVFHHAVDASIVVSVSDTHIGQIMLKAQNDKEYWIKNKSNYDDIYKYLINLRIDDTINQIEKINNENIKVSKQVSKNPQGKLANSNIYKMIKKDNEQYIINQIDNIYTFDFKKDENKKLFEKLLNEENNEFTLLCYDNDKNTFNYIKKIYNEYKNEKGNPFVNYLIDKGEIPDGNSFDYDITGIRMVTKKGNGPIIKRLRYYSKKNDLYILNKKNINKKDSNYLALDSLKQFCVKVYVDNDNKKFVFLPIYTISLDPKTKKVNENDEFYKLFYNKYIGNKNVTFFADIYNGNKLEITKKDGTIVSGYYSTFNKANNKLILNNGDTFTLSDKKISIIHTDILGNEKKG

SEQ ID NO: 18971 - protein, 1195 aa, unidentified
  REGION 1..1195: note = Cas Enzyme sequence
MERILGIDTGTNSLGWAIVEKNDSEYKLLEKGTNIFAEGVKIEKGIESSKAAERTEHRSVRKHYWRRKVRKIRLLAVLVDNDLCPPLGQNDLRLWRLKKKYPMNDDFMAWQRTDDKGCVNPYRFRYICLTQKLDLSDQTQRYILGRALYHLNQRRGFLSNRKEAAKESEGAVKEGISDLTAAMEEAGCTYLGEYFYQLYNRGEKIRSHYTSRKDHYLKEFHAICKKQELDAPLVEKMERAIFTQRPLKSQKGTVGVCTFEKGKARCPVSHPLYEDFRMLSFLNSIKMQTPQDYQLRYLTKEEKSLVVPLFKRKSKKSFLFEDIAKKLAGKNNYCYDGDEAAKPYRFNYQMDVSVAGSVVNAQLEDIFGPDWLDAVCEVYTLADGKSRTDILNDIWHALFFFDDEEKLKGFAKSRLQLDDTQAEKFSKITLPSDYAALSLKAIKKILPYLKDYGLIYSQAVFLANLVEVLPSHVWGIRETREAAIENVINVMLSYDKRTDSRTLEGCIKDYLRERYHVEEQKLKKLYHPSMIDLYPHVQPDEDGVYQLGSPRISSVRNPMAMHSMFRLRKVVNLLLKEGKIDENTVVHIEFSRYLNDANRRKAIQDYQRENERDREACRKKIEEFGQKEVSDTDILKYQLWEEQNHKCLYTGEEIKLADFLGANPKYDIEHTVPQSAGGDSTKANLTLCNSKFNREVKKAQLPSDLANHEEILQRIAAWKETYEELDRRIRRLKGSRASSKEEKDGIIRRRHLLSLQRDYWRGKYQRFTMTQVPEGFSRRQGTDISVISRYARLYLKSVFKHVYIVKGIATSDFRKIWGIQEEYSKKERVNHVHHCIDAITIACIGKSEYDRLAQYYHQDEAHRWGQSIDKAQFPKPWPTFVSDIKNIQNELLIAHYSKDNMKKHTRKRGDKGYMQGDTARASLHNDTYYGAIDVDGEVKYVVRKSLDSLSEKDVKNIVDDAVRQKVDDAILKHGSLKKALEHTIWMNEELQIPIRKVRIFTGSVTRPIHIRQQRDLSRHEYKRQFHVQNDRNYMMAIYIGRDKKGKEKREFEIVNNIDAAKFFKRSNGTTDGLIPQKSVKNGYPLAYCLKIGTMVLLYENSPEEVWELDRQNLVKRLYKVTGLSSMIVSGNPYGTIALVFQQDARQSTEIKLKNGAYNANEELRPGIKMLHTQFKALVQGVDFELNDLGEIRRLI

SEQ ID NO: 18972 - protein, 1203 aa, unidentified
  REGION 1..1203: note = Cas Enzyme sequence
MENVIKQRILGLDTGTNSLGWAVVDRLPLGGYELVDKGVQIFQEGVNIEKGTQEKSRAAERTSHRSLRKIYWRRKVRKIRLLAVLSNAGLCPSLTSEELHAWRMDGKYPVNNTAFMRWQQTDEQKGINPYAARCKCVEEELDMSNSYDRYLVGRALYHIAQRRGFLSNRKDQTDEKDKESGAVKAGIKELTQKIHDAGCEYLCQYFYQLYQKGERIRSCYTDRKEHYEQEFDAICTKQHLDEALVQQLRKAIFEQRPLKSQRRGVAKCPFEPSKHCAPISHPLFEEFRMWSFIRNIKIQTPEDANLRVLTDEEIEKVKHLWFRKSKANFSFEDIAKTLAGKGKYCYYKSAEDKPYRFNYYMDTSVAGCPVSAQLREVFGAELLKDRAQVDTIWLTLDFFDDDLKLREWAIKHYNLTDEQADAFVKIRLPQGYASLSLKAMENIVPLMRDHGMIYPNATLVAKLRDLTKEYSFEKDFDEDVEAYLKADIEEYLTIPTDKNGKPLMSREERKEALDVKWMQHYNLSVKDIKKLYHPSMIEEYRHVEHTTNGVYLLGSPRISALKNPMAMRSLFRMKAVVNQLLKDGTIDENAIVHIEFARELNDANRRAALRRYQAALRKEREDAVEAIKEFISNPSDDDILKYLLWKDQEGKCFYTGKSISLSAMYNGTEFDVEHTVPRSMGGDTTRENLTICDAKFNREVKKNRLPSQLSEQAQELVQANIQTWKENYEALDKQLRKMKNATSGLSTKEAKDSVIAKRHLLEMQRDFWRNKYKAFTIEEKDVQGFTRRQGTDISVISRYGRLYLLSLFNRVDVVKGSMTAAFRKIWGIQTAYEKKNRENHVHHCIDAITIACMGKREYDELSAYYHADEENKYHSSDILMPKPWKTFTEDIKDIEQEILVAHYTSNPMGKQTKKKLRDSRGRIIRDANKQPLFAKGDTARGALHMDTNYGAIQQEGQIKYVLRMAIDDDRLKVENIVDAAVQQKLQAAINQYGSITKALENGPIWMNEDKRIAIKKVRVIQDRVQNPMHIRSHRDLSKHEYKRQVHVKNETNYMIAIYEDEQTGLRTFKAISNLDAAKMLNKKQSLFANVDENGSRLITCLKIGDLVLLYEKSPNELYNAPQQELVRHLYKVIGLALSGGIQIKLNYHQEARPSGELHQVNGNYVFDEPIAGRRMLTQSQFNALVQGQDFDISDTGKITFKTC

SEQ ID NO: 18973 - protein, 1199 aa, unidentified
  REGION 1..1199: note = Cas Enzyme sequence
MEKILGIDTGTNSLGWAIVEKQDDEYKLIDRGVNIFQEGVKIEKGKELSKAAEKTSYKSTRVRYYRIKLRKIKLMKILSAYHLCPPVSQEEFSVWRHRSIYPKNELLLKWESTDEDSNKNPYYYRFKCLTKKLDLDDVEQRYLLGRALYHINQRRGFLSNRKNIGDDSGVVKTGISDLTKEMHEAGCQYLGEYFYKLYQQKAKIRNHYTDRNEHYLKEFKAICAKQELDYDLVSKLEHAIFDQRPLKSQKGLVGHCPFERKKTKCPSSHPLFEEFRMLEFINNIKIQTPHDDTLRPLNEEERKAILPKFYRKSKPSFNFEDIAKELAGHNKYAFYKKPQGKPYLFNYSMDTSVSGCPITAGLKEIFGEDWLISVSEVYDKADGKSALQIMNDIWHVLFDFSDKEHIVKFGKEHLQLDEENAKKLSNIKVYSDYASLSLKAICKILPYLRRGLIYPIATFLAKLEDIIPAEIWKGGSASDQIVSDILAAIDAKDNNPADDRTTERCIKDYLMKTYHLAENEVNSLYHPSMIEVYPHVPEDKNKLGSPRISSVRNPMAMRSLFRLRHVINALLREGKIDRNTTIHIEFARELNDANKRKAISRMVKDNEKERSKAKNEIIRLYKEETDNTIEPTDNDILKYLLWEEQNHRCIYTDKQIGIVDFLGKNPKFDIEHTVPRSVGGDTTKMNLTLCDSSFNRNIKQTCLPSELSNHEEILNRIAPWKEKYENLDKQIRKKRTSATMDKEQKDKIIQDRNLLKLKRDYWYGKYQRFVMTTVPEGFSRRQGTDISLISKYARLYLKSFFNRVFTVKGIATSDFRKIWGIQDVYTKKARVNHVHHCIDAIVIACLGPSEYSKLAQYYRDEENHEWYGSSKPHIAAPWPSFVADMNTIQKELIVAHHTSDNLVKQGKRRILLKGKNVLAMGDAARASLHNETYYGAIERNGKIEYVVRKALNEEFKDSDVKNIVDDTVRNKVEDAIKQYKTLKEAIANTIWMNKEKGIAIKKVRCYAPKVTRPVDIRYQRDLSPKKYKQRYHVTNDSNYAMAIYIGHDKKGKPKNAFEMINNLDACSYFKQSNDKEIVGKSMVPLTKKDYPLAYILKKGTMVMVYEISPEELDCQETMVKRLYKIVGISSCEKSGIEYGIINMVHLQEARSSGEIIGRYGAFKKSDEFRNRIIMYHTQFKALVEGYDFDINDLGEIKMR

SEQ ID NO: 18974 - protein, 1212 aa, unidentified
  REGION 1..1212: note = Cas Enzyme sequence
MTKILGIDTGTNSLGWAIVEKQTDGYHLLDKGVNIFQEGVKIEKGIESSKAAERTAHKAARVRNYRIKLRKIRLLRILSDAHLCPPLSKAELSAWRLKKEYPKNELFMQWQGTDDDSEKTPYAYRHICLHESLDFCSMTDRYILGRAFYHMIQRRGFLSNRKDQSGDDTGKVKESISNLTQEMHDAGYEYLGDYFYSLYKRGEKIRNHYTARNEHYLSEFKAICEKQDLAKNLGQEVVSQIEKAIFDQRPLKSQKGQVGKCVFEKNKTKCPSSHPMYEEYRMLSFINNIKILTPKDDALRPLSAEERELIMPLFFRKSKKQFDFEDIAKKLAPKKQYGFFKKSADAGMPYLFNYPMDTSVSGCPVTAALKDIFGDNWIDGLCETYTLAEGKSSLDIINDIWHALFFYTDDTKLAEFAKNRLQLSDEEAKKFCEISLPADYASLSLKAICKILPYLRRGLIYSHAVFLGNLCEVMPQYEWNIEEMREAAIDNIIHEMNQIDSKDARTFEVCIKEYLREQYHVSDEKLKKLYHPSMMEVYPRVQHTNNHGVYQLGSPRIDSVRNPMAMRSMFRLRKLVNRLLEEGKIDSDTEIHIEFARELNDANKRNAIAAFTKENQNANDDARKQIIALFKKETGKDIAPTDNDVLKYVLWKEQKHICLYTGKQIAISDFVGANPKFDIEHTIPRSVGGDSTKMNLTLCDSRFNREVKKTKLPTELSNYDEIMTRIQDWKDEYESLEAQIRKQKKLSKGATTKEQKDNIIRKRHLLELRRDYWKGKYLRFTMESVPEGFSRRQGTDISVISKYARLYLKSLFKHVYTVKGIATSDFRKIWGIQDIYSKKERVNHVHHCIDAIVIACTGLDEYNKLGAYYHDEENHEWYGKSKAYFKKPWPTFVEDIKKVQDEILVYHYTPDNMPKQGRRRIKINGQKVLCKGDAARGSLHNDTCYGAIENDGQVKYVKRIDLTSLKESDVKNIVDDTVREIIKTAIREKGFKDAMAGTIWMNEEKQIPIKKVRCFTPSVTKPLNIRHQRDASTKEYKQQYHVANDSNYMLALYIGKDKKGKEKREFEIVNMLQAAQYFRTSNDKNAAEGHLVPVKSEHDYPFVYSLKIGTSVLLYESSPEEIWESSMKEQARRMYKVTGMSTSTISNSVYARTTFVHNEEARSSKDFKAKNGAYKQGEELRPSIIMLHTQLNALVQGYDFEINELGEIKRLR

SEQ ID NO: 18975 - protein, 1208 aa, unidentified
  REGION 1..1208: note = Cas Enzyme sequence
MKRILGIDTGTNSLGWAIVEKEDDDYQLLDKGVNIFQEGVKIEKGIEASKAADRTSHRSIRIRYYRIKLRKIRLLRILSDNHLCPPLSTSELSLWRQKKEYPNTNELFMQWQRTDDHEGKNPYADRHRCLHEKLDMDNINDRYVLGRAFYHIIQRRGFLSNRKEQGGDDSGKVKEGINSLTQEMEEAGCQYLGDYFYSLYNKGEKIRNHYTDRIEHYLTEFIAICKQQNLDDDLKEKIGKAIFDQRPLKSQKGQVGKCVFEKNKTKCPSSHPLFEEFRMLSFVNNIKIKTPKDDVMRSLNKEERESISPLFYRKSKKHFEFEDIAKKLAPKKQYGFYKKSSDVEMPYLFNYPMDTPVSGCPVTAALKDIFGENWIDAVCEVYTNANGKSRLEIINDIWHVLFFYSDSDKLALFARTKLQLGEKEAKAFSDISIPADYASLSLKAICKILPYLRKGLIYSHAVFLGNLCEVIPSYIWKVKEMREAAIDSVIKEMDTYDSRDKRTFELCIKEYLKEQYHLTDEIVEKLYHPSMMEVYPKVRLNHQGIYQLQSPRIESVRNPMAMRSMFRLRKLINRLLEMGKIDEETEIHIEFARELNDANKRQAIAELVKNNFAENEKARKAIKELYKEETGTEVEPTDVDILKYTLWKEQNSVCPYTGKNIRISDFIGANPMFDIEHTIPQSVGGDSTKMNLTLCDSRFNREIKKTKLPAELSNHDEVLQRIKGWKERYENLNQKIRKQKKLSKGATTKEQKDSIIKKRHLLELERDYWRGKYERFTMTNVPEGFSRRQGTDISVISKYARLYLKSIFKHVYTVKGIATSDFRKIWGIQEIYSKKERVNHVHHCIDAIVIACIGLDEYNKLGAYYHDEENKKWYGMSGASFPKPWSTFVEDIKNIQNELLVYHYTPDNMPKQGRRRIMIDGKKVLSKGDAARGSLHKDTYYGAIEKEGEVKYVKRIAIEELDEKSVDAIVDETVKAIVKKAIAAKGLKEAKASTIWMNEEKQIPIKKVRCYTPSVTKPLNIRKQRDLSTKEYKQQYHVVNDDNYLLALYAGQDKKGKEKRDFEIVNMLEAAQYYKTSNDKETTGYNMVPFKSKHDYPFAYSLKIGTMVLLYENSPEEVWDASKREMVKRLYKIVGMSSMVVSGCSYATITMRHHEEARSSKNLKAKNGTYKQNEEFRPVIVMLHTQIKALVQGYDFDINELGEIKRLR

SEQ ID NO: 18976 - protein, 1203 aa, unidentified
  REGION 1..1203: note = Cas Enzyme sequence
EKILGIDTGTNSLGWAIVEKRDEEYKLLEKGVNIFQEGVKIEKGIELSKAAERTEHRSTRVRYYRIKIRKIRLLKILSDHQLCPSVSSQELSLWRHRNIYPKNELLLQWESTDDKVDKNPYTFRYKCLTEKLDLTDPTQRYILGRALYHINQRRGFLSNRKSEDSEEDGTVKTGINDLTQAIENAGCKYLGEYFYHLYHKGEKIRNHYTARNEHYLKEFKAICEKQQLDDSLVKELENAIFFQRPLKSQKGLVGHCVFEPKKTKCPASHPLFEEFRMLQFVNNIKIQTHDNELRPLNEEEREKILPKFFRKTKTSFAFEDIAKELAGKNKYAYYKDPKGKPYLFNYHMDTSVSGCPLTAGLKDIFGEDWINAVSEVYDKAEGKSQQQIMNDIWHVLFDFSDKEHIEAFGRNHLQLNEEDAKKFSNIKVHSDYASLSLKAICKILPYLRMGLIYPIATFFGNLEEVIPADIWGIKENRKQIVEELLVAISDKDNNPADQRTTEQCIKDYLINNDHWRVNKEATNKLYHPSMIESYPHVPENENKLGSPRINSVRNPMAMRSLFRMRHVINTLLAEGKIDRDTTIHIEFARELNDANKRQALYRYNRENENERKKAKDEIIKLYKEATNKDIEPTDTDILKYLLWEEQKHKCIYTDEEIGISDFIGENPKYDIEHTIPRSVGGDSTMMNLTLCNSKFNREIKQTSLPSQLSNHEDILLRIEEWKKKYEDLDKRIRKTRTSSSMSKEQKDRKIQERNYLKLRRDYWYGKYQRFVMSNVPEGFSRRQGANIGVISKYGRLYLKSYFNKVFVVKGLATSDFRKIWGIQDIYSKKERVNHIHHCIDAIVIACIGPGEYNKLAEYYHDEENHKWYGASKGRFNTPWPTFATDINKIQQEIIVAHHTADNMAKKGKHKILLKGKKVWANGDTARTSLHLDTYYGAIEQDGVVKYVVRKPLDENFKESDVKNIVDETVKEIVQDAISEHGNLKKAIAAGIWMNKEKGIAIKKVRCFTPSVTRPLHIRQQRDLSPKEYKKQFHVMNDTNYAMAIYIGQDKKGKEKRAFEMINNLDASRYFRSSNDKEAVGHNLVPLSKKDYPLAYVLKKGTMVLLYENTPEEIQECTKEELIKRLYKITGLSSMVVSGCEYGSITMQYSQEARPSGELKAKNGTYKRQEDFRSKITMLHTQINALVESYDFKINDIGEIKMLR

SEQ ID NO: 18977 - protein, 1204 aa, unidentified
  REGION 1..1204: note = Cas Enzyme sequence
MEKILGIDTGTNSLGWAIVEKRDEEYKLLEKGVNIFQEGVKIEKGIELSKAAERTEHRSTRVRYYRIKIRKIRLLKILSDHQLCPSVSSQELSLWRHRNIYPKNELLLQWESTDDKVDKNPYTFRYKCLTEKLDLTDPTQRYILGRALYHINQRRGFLSNRKSEDSEEDGTVKTGINDLTQAIENAGCKYLGEYFYHLYHKGEKIRNHYTARNEHYLKEFKAICEKQQLDDSLVKELENAIFFQRPLKSQKGLVGHCVFEPKKTKCPASHPLFEEFRMLQFVNNIKIQTHDNELRPLNEEEREKILPKFFRKTKTSFAFEDIAKELAGKNKYAYYKDPKGKPYLFNYHMDTSVSGCPLTAGLKDIFGEDWINAVSEVYDKAEGKSQQQIMNDIWHVLFDFSDKEHIEAFGRNHLQLNEEDAKKFSNIKVHSDYASLSLKAICKILPYLRMGLIYPIATFFGNLEEVIPADIWGIKENRKQIVEELLVAISDKDNNPADQRTTEQCIKDYLINNDHWRVNKEATNKLYHPSMIESYPHVPENENKLGSPRINSVRNPMAMRSLFRMRHVINTLLAEGKIDRDTTIHIEFARELNDANKRQALYRYNRENENERKKAKDEIIKLYKEATNKDIEPTDTDILKYLLWEEQKHKCIYTDEEIGISDFIGENPKYDIEHTIPRSVGGDSTMMNLTLCNSKFNREIKQTSLPSQLSNHEDILLRIEEWKKKYEDLDKRIRKTRTSSSMSKEQKDRKIQERNYLKLRRDYWYGKYQRFVMSNVPEGFSRRQGANIGVISKYGRLYLKSYFNKVFVVKGLATSDFRKIWGIQDIYSKKERVNHIHHCIDAIVIACIGPGEYNKLAEYYHDEENHKWYGASKGRFNTPWPTFATDINKIQQEIIVAHHTADNMAKKGKHKILLKGKKVWANGDTARTSLHLDTYYGAIEQDGVVKYVVRKPLDENFKESDVKNIVDETVKEIVQDAISEHGNLKKAIAAGIWMNKEKGIAIKKVRCFTPSVTRPLHIRQQRDLSPKEYKKQFHVMNDTNYAMAIYIGQDKKGKEKRAFEMINNLDASRYFRSSNDKEAVGHNLVPLSKKDYPLAYVLKKGTMVLLYENTPEEIQECTKEELIKRLYKITGLSSMVVSGCEYGSITMQYSQEARPSGELKAKNGTYKRQEDFRSKITMLHTQINALVESYDFKINDIGEIKMLR

SEQ ID NO: 18978 - protein, 1225 aa, unidentified
  REGION 1..1225: note = Cas Enzyme sequence
MENVIKQRILGLDTGTNSLGWAVVDRLPLGGYELVDKGVQIFQEGVNIEKGTQEKSRAAERTSHRSLRKIYWRRKVRKIQLLKLLSGSGLCPELSKEELRAWRMNGKYPLNNIAFMRWQLTDEQKGINPYAARCRCVEEELDMSSPDNRYLVGRAMYHIAQRRGFLSNRKDQTDDKDKESGAVKAGIKELTQKIHDAGCEYLCQYFYQLYQKGERIRSCYTDRKEHYEHEFDAICAKQHLDESLVQQLRKAIFEQRPLKSQRRGVAKCPFEPSKHCAPVSHPLFEEFRMWSFIRNIKMQTPEDAELRILTNEEIDKVKHLWFRKSKANFPFEDIAKTLAGKGKYCYYKSAEDKPYRFNYYMDTSVAGCPVSAQLRDVFGEDLLKDRAQVDSIWLALDFFDDDLKLREWAIKHYNLADEQADAFVKIRLPQGYASLSLKAMENIVPLMRDHQMIYPNATLVAKLRDLTKDYPFEKDFDEDVEAYLKADIEEYLTIPTDKNGKPLMSREERKEALDVKWMQHYNLSAKEIKKLYHPSMIEEYRHVEHTTNGVYQLGSPRISALKNPMAMRSLFRMKAVVNQLLKDGTIDENTIIHIEFARELNDANRRAALRRYQAALRKEREDAVEAIKEFIPNPSDDDVLKYLLWKDQEGKCVYTGKSISLSALYNGTEFDIEHTVPRSMGGDTTRENLTICDAKFNREIKKNRLPSQLSEQAQELLQANIQTWKENCEALDKQLRKMKNATSGLSTKEAKDSVIAKRHLLEMQRDFWRNKYKAFTIEEKDVQGFTRRQGTDISVISRYGRLYLLSLFNRVDVVKGSMTAAFRKIWGIQTAYEKKNRENHVHHCIDAITIACMGKREYDELSAYYHADEENKYHSSDILMPKPWKTFTEDIKDIEQEILVAHYTSNPMGKQTKKKLRDSRGHIIRDANKRPRFAQGDTARGALHNDMIYGMIVNSQNVDDKHKVGNLCAVKRIILSSVASKDEEKMAASIVDPIIKKTVNDARAKYGSLSAAIEAEQENGDGSIWLNKEKNVKIKKVRCFQDFAINASPIRSLRDQSKKEYKRSHYSMTNGNFMSAIYEGIDAKGKKKRSFVIISLYEAAQAYGKHEPLVPTVSEEGYALIKTIRLGDLVLLYENSPEEIYNASQEELVKRMYEIIGMSDSKGLQIRLKHQQEARPNGELQQINGAFKNGDSAPIRMLLHTQFNALVQGQDFDISDTGKITFKSC

SEQ ID NO: 18979 - protein, 1225 aa, unidentified
  REGION 1..1225: note = Cas Enzyme sequence
MENVIKQRILGLDTGTNSLGWAVVDRLPLGGYELVDKGVQIFQEGVNIEKGTQEKSRAAERTSHRSLRKLYWRRKVRKIRLLTVLSNAGLCPSLTSQELRAWRMNGKYPLNNIAFMRWQLTDEQKGINPYAARCRCVEEELDMSSPDNRYLVGRAMYHIAQRRGFLSNRKDQTDDKDKESGAVKAGIKELTQKIHDAGCEYLCQYFYQLYQKGERIRSCYTDRKEHYEHEFDAICAKQHLDESLVQQLRKAIFEQRPLKSQRRGVAKCPFEPSKHCAPVSHPLFEEFRMWSFIRNIKMQTPEDAELRMLTNEEIDKVKHLWFRKSKANFPFEDIAKTLAGKGKYCYYKSAEDKPYRFNYYMDTSVAGCPVSAQLRDVFGEDLLKDRAQVDSIWLALDFFDDDLKLREWAIKHYNLADEQADAFVKIRLPQGYASLSLKAMENIVPLMRDHGMNYPNATLLAKLRDLTKDYPFEKDFDEDVEAYLKADIEEYLTIPTDKNGKPLMSREERKEALDVKWMQHYNLSAKEIKKLYHPSMIEEYRHVEHTTNGVYQLGSPRISALKNPMAMRSLFRMKAVVNQLLKDGTIDENTIIHIEFARELNDANRRAALRRYQAALRKEREDAVEAIKEFIPNPSDDDVLKYLLWKDQEGKCVYTGKSISLSALYNGTEFDIEHTVPRSMGGDTTRENLTICDAKFNREIKKNRLPSQLSEQAQELLQANIQTWKENCEALDKQLRKMKNATSGLSTKEAKDSVIAKRHLLEMQRDFWRNKYKAFTIEEKDVQGFTRRQGTDISVISRYGRLYLLSLFNRVDVVKGSMTAAFRKIWGIQTAYEKKNRENHVHHCIDAITIACMGKREYDELSAYYHADEENKYHSSDILMPKPWKTFTEDIKDIEQEILVAHYTSNPMGKQTKKKLRDSRGHIIRDANKQPRFAQGDTARGALHNDMIYGMIVNSQNVDDKHKVGNLCAVKRIILSSVASKDEEKMAASIVDPIIKKTVNDARAKYGSLSAAIEAEQENGDGSIWLNKEKNVKIKKVRCFQDFAINASPIRSLRDQSKKEYKRSHYSMTNGNFMSAIYEGTDAKGKKKRSFVIISLYEAAQAYGKHEPLVPTVSEEGYALIKTIRLGDLVLLYENSPEEIYTASQEELVKRMYEIIGMSDSKGLQIRLKHQQEARPNGELQQINGAFKNGDSAPIRMLLHTQFNALVQGQDFDISDTGKITFKSC

SEQ ID NO: 18980 - protein, 1202 aa, unidentified
  REGION 1..1202: note = Cas Enzyme sequence
MTKILGIDTGTNSLGWAIVEKQADEYHLLDKGVNIFQEGVKMEKGIESSKAAERTAHKAARVRNYRIKLRKIRLLRILSDAHLCPPLSKAELSEWRLKKKYPKNELFMHWQSTDDESEKTPYAYRHKCLHESLDFTSMTDRYILGRSFYHMIQRRGFLSNRKDQSGDDTGKVKESISNLTQEMHDAGYEYLGDYFYSLYNKGEKIRNHYTARNEHYLTEFKAICEKQDLDKNLGPEVVRQIEKAIFDQRPLKSQKGQVGKCVFEKNKTKCPTSHPMYEEFRMLSFINNIKIQTPNDDVLRPLSAEERSLIMPLFFRKSKKQFDFEDIAKKLAPKKHYGFYKKSSDAEMPYLFNYPMDTSVSGCPVTAALKDIFGQNWIDALCETYTVAEGKSRLDVINDIWHALFFYTDDTKLAEFGKNRLQLNDEEAKKFCEISLPSDYASLSLKAICKILPYLRRGLIYSHAVFLGNLCEVMPQYEWNIEEMRNAAIDNIIYEMNQIDSKDARTFEVCIKEYLKKQYHVSDEKLKKLYHPSMMEMYPRVQRTNNFGVYQLGSPRIDSVRNPMAMRAMFRLRKLVNRLLDEGKIDQDTEIHIEFARELNDANKRNAIAAFTKENQNKNDEARKKIKNLFKAETGKDIEPTDVDVLKYVLWEEQGHICLYTGKQIEISDFIGPDPKFDIEHTIPRSVGGDSTRMNLTLCDSRFNRETKKTKLPTELPNHDDIMARINDWREKYESLDGQIRRQKKMSKGATTKDQKDAIIRKRHLLELQRDYWRGKYLRFTMESVPDGFSRRQGTDISVISKYARLYLKSLFKHVYTVKGIATSDFRKIWGIQKTYSKKERVNHVHHCIDAIVIACIGLDEYNKLGSYYHDEENHEWYGMSKAYFKKPWPTFVEDIKKVQDEILVYHYTPDNMPKQGRRRILIDGKKVLSKGDAARGSLHNDTYYGAIENDGVVRYVKRINLASMKESDVKNIVDDVVRGIVEATIREKGFKEAMAGTIWMNEEMQIPIKKVRCYTSIKNPLSFDKKKQRDLSDKEYKRNYYVTTDGNYMVALYVGSAKTGKKKTFYEFVNMMEAADYYKTSYDKSVIGHNIVPLEKDNCQLAFILKKGTMVIFYKETKEEVWDYSQKEKDRNLYYVSVIESDGRVTFKYHQEARQDKELPRNASDTSDIRPKIRVGLASAKILVQGYDFEINELGEIKRLK

SEQ ID NO: 18981 - protein, 1214 aa, unidentified
  REGION 1..1214: note = Cas Enzyme sequence
MTKILGIDTGTNSLGWAIVEKKADEYRLLDKGVNIFQEGVKIEKGIESSKAADRTAHKAARVRNYRIKLRKIRLLRILSDAHLCPPLSKAELSAWRLKKEYPKNELFMQWQGTDDESEKTPYAYRHKCLHECLDFNSMTDRYVLGRVFYHIIQRRGFLSNRKDQSADDTGKVKESISNLTQEMHDAGYEYLGDYFYSLYNKGEKIRNHYTARNEHYLAEFKAICEKQKLDKNLGPEIVRQIEKAIFDQRPLKSQKGQVGKCVFEKNKTKCPSSHPMYEEFRMLSFINNIKIQTPNDSALRPLSAEERELIMPLFFRKSKKQFDFEDIAKKLAPKKHYGFYKKSSDAEMPYLFNYPMDTSVSGCPVTAALKDIFGDNWIDSLCETYTLAEGKSRLNVVNDIWHALFFYTDETKLAEFGKNRLQLDDEEAKKFCEISLPSDYASLSLKAICKILPYLRRGLIYSHAVFLGNLCEVMPQYEWNMEEMRNAAIDNIIYEMNQIDSKDARTFEVCIKEYLKEQYHVSDEKLQKLYHPSMMEMYPRVQRTNNHGVYQLGSPRIDSVRNPMAMRSMFRLRKLVNRLLEEGKIDQDTEIHIEFARELNDANKRNAIAAYTKENQNKNDEARKKIRNLFKAETGNDIEPTDADVLKYVLWEEQGHICLYTGKQIRISDFVGANPKFDIEHTIPRSVGGDSTKMNLTLCDSRFNREVKKTKLPTELPNHDEIMARINDWREKYESLDGQIRRQKKMSKGATTKDQKDAIIRKRHLLELQRDYWRGKYLRFTMESVPDGFSRRQGTDISVISKYARLYLKSLFKHVYTVKGIATSDFRKIWGIQKVYSKKERVNHVHHCIDAIVIACIGLDEYNKLGAYYHDEENHEWYGMSKAYFKKPWSTFVEDIEKVQDEILVYHYTPDNMPKQGRRRILIDGKKVLSKGDAARGSLHNDTYYGAIESDGVVKYVKRINLASMKENDVKNIVDDTVRGIIEAAINEKGFKEAMSSTIWMNEEKQIPIKKVRCYTPSVTKPLNIRQQRDVSSKEYKQQYHVTNDSNYLLALYIGKDKKGKEKREFEIINMLQTAQYFKTSNDKVAVGKNIVPLKSEHDYPFAYSLKIGTMVLLYEKSPNEIWDASLMDNNKRLYKVVGLSAMRMKGRNVDYATIKLKHHEEARLSTELKAKNGAFKQGEELRPSIIMLHTQLNALVQGYDFEINELGKIKRLR

SEQ ID NO: 18982 - protein, 1214 aa, unidentified
  REGION 1..1214: note = Cas Enzyme sequence
MTKILGIDTGTNSLGWAIVEKTAGDYNLLDKGVNIFQEGVKIEKGIESSKAAERTEHRATRVRYYRIKLRKIRLLRILSDNHLCPPLSHEELSAWRLKKVYPKNELFMQWQRTDDDTEKTPYAYRHKCLHEKLDLSDITDRYILGRAFYHIIQRRGFLSNRKEQGGEDSGKVKEGISTLTQEMNEAGYEYLGDYFYALYNKGEKIRKHYTARNEHFLSEFKAICEKQDLERELGVEVVRNIEKAIFDQRPLKSQKGQVGKCVFEKNKTKCSSSHPMYEEFRMLTFINNIKVKTPNDDALRPLNMEERESIMPLFFRKSKKQFDFEDIAKKLAPKKMHGFYKKDEDAEMPYLFNYPLDTSVSGCPVTAALKDVFGADWIDAICETYTLGEGKSRFDIVNDVWHALYFYSDKDKLAEFAINRLQLSEDEAKRFSEISLPSDYASLSLKAICKILPYLRRGLIYSHAVFLGNLCEVMPKYEWSIKEMRETIIDNIIMEMNRYDTKDKRTFEVCIKEYLKEQYAVSDDSLKKLYHPSMIETYPRVQYTNEHGVYQLGSPRIDSVRNPMAMRSMFRLRKLVNRLLAEGKIDQDTEVHIEFARELNDANKRNAIALFVKENQSANDEARKQIITLFKKETGTDIEPTDKDILKYVLWEEQNHICLYTGKQIRISDFIGANPKFDIEHTIPRSVGGDSTKMNLTICDSRFNREVKKTKLPIELPNHDEIMERINDWKKKYELLDIQIRKLKKQSKGATTKEQKDTIIRKRHLLELRRDYWRGKYERFTMESVPEGFSRRQGTDISVISKYARLYLMSLFNRVYTVKGIATSDFRKIWGIQDIYSKKERINHVHHCIDAIVIACIGLDEYNKLGAYYHDEENNKWYGLSKASFKKPWATFVEDIKKIQDEILVYHYTPDNMPKQGRRRIKIDGKKILCKGDAARGSLHNDTYYGAIENDGAVKYVKRIDLASMKESDVKNIVDDTVRGIIEAAIKEKGFKDAMASTIWMNEEKQIPIKKVRCFTPSITKPLNIRKQRDVSTKEYKQQYHVANDSNYLLALYIGTDNKGKEKREFEIVNMLQAAQYYRTSNDKEVVDRHIVPIKSEHDYPFAYTLKIGTMVLLYEKSPNEVWKATIKERNRRLYKVTGMSAMRMKGRNVDYATIKLLHNEEARQSKDIKAKNGEYKQGEELRPAIIMLHTQLNALVQGYDFEINELGEIKRLR

SEQ ID NO: 18983 - protein, 1214 aa, unidentified
  REGION 1..1214: note = Cas Enzyme sequence
MTKILGIDTGTNSLGWAIVEKKADEYHLLDKGVNIFQEGVKIEKGIESSKAADRTAHKASRVRNYRIKLRKIRLLRILSDAHLCPPLSKVELSAWRLKKEYPKNDLFMQWQGTDDESEKTPYAYRHKCLHECLDFNSMTDRYILGRAFYHMIQRRGFLSNRKDQSGDDTGKVKESISNLTQEMHDDGYEYLGDYFYSLYNKGEKIRNHYTARNEHYLAEFKAICEKQKLDKNLGPEIVRQIEKAIFDQRPLKSQKGQVGKCVFEKNKTKCPSSHPMYEEFRMLSFINNIKIQTPNDSALRPLSAEERELIMPLFFRKSKKQFDFEDIAKKLAPKKHYGFYKKSSDAEMPYLFNYPMDTSVSGCPVTAALKDIFGDNWIDSLCETYTLAEGKSRLNVVNDIWHALFFYTDETKLAEFGKNRLQLDDEEAKKFCEISLPSDYASLSLKAICKILPYLRKGLIYSHAVFLGNLCEVMPQYEWNMEEMRNAAIDNIIYEMNQIDSKDARTFEVCIKEYLKEQYHVSDEKLQKLYHPSMMEMYPRVQRTNNHGVYQLGSPRIDSVRNPMAMRSMFRLRKLVNRLLEEGKIDQDTEIHIEFARELNDANKRNAIAAYTKENQNKNDEARKKIRNLFKAETGNDIEPTDADVLKYVLWEEQGHICLYTGKQIRISDFVGANPKFDIEHTIPRSVGGDSTRMNLTLCDSRFNREVKKTKLPTELPNHDEIMARINDWREKYESLDGQIRRQKKMSKGATTKDQKDAIIRKRHLLELQRDYWRGKYLRFTMESVPDGFSRRQGTDISVISKYARLYLKSLFKHVYTVKGIATSDFRKIWGIQKVYSQKERVNHVHHCIDAIVIACIGLDEYNKLGAYYHDEENHEWYGMSKAYFKKPWSTFVEDVEKVQDEIMVYHYTPDNMPKQGRRRILIDGKKVLAKGDAARGSLHNDTYYGAIESDGVVKYVKRINFASMKENDVKNIVDDTVRGIIEAAINEKGFKEAMSGTIWMNEEKQIPIKKVRCYTPSVTKPLNIRQQRDVSSKEYKQQYHVTNDSNYLLALYIGKDKKGKEKREFEIINMLQTAQYFKTSNDKVAVGKNIVPLKSEHDYPFAYSLKIGTMVLLYEKSPNEIWDASLMDNNKRLYKVVGLSAMRMKGRNVDYATIKLKHHEEARLSTELKVKNGAFKQGEELRPSIIMLHTQLNALVQGYDFEINELGEIKRLR

SEQ ID NO: 18984 - protein, 1214 aa, unidentified
  REGION 1..1214: note = Cas Enzyme sequence
MTKILGIDTGTNSLGWAIVEKKADEYHLLDKGVNIFQEGVKIEKGIESSKAADRTAHKASRVRNYRIKLRKIRLLRILSDAHLCPPLSKVELSAWRLKKEYPKNDLFMQWQGTDDESEKTPYAYRHKCLHECLDFNSMTDRYILGRAFYHMIQRRGFLSNRKDQSGDDTGKVKESISNLTQEMHDDGYEYLGDYFYSLYNKGEKIRNHYTARNEHYLAEFKAICEKQKLDKNLGPEIVRQIEKAIFDQRPLKSQKGQVGKCVFEKNKTKCPSSHPMYEEFRMLSFINNIKIQTPNDSALRPLSAEERELIMPLFFRKSKKQFDFEDIAKKLAPKKHYGFYKKSSDAEMPYLFNYPMDTSVSGCPVTAALKDIFGDNWIDSLCETYTLAEGKSRLNVVNDIWHALFFYTDETKLAEFGKNRLQLDDEEAKKFCEISLPSDYASLSLKAICKILPYLRKGLIYSHAVFLGNLCEVMPQYEWNMEEMRNAAIDNIIYEMNQIDSKDARTFEVCIKEYLKEQYHVSDEKLQKLYHPSMMEMYPRVQRTNNHGVYQLGSPRIDSVRNPMAMRSMFRLRKLVNRLLEEGKIDQDTEIHIEFARELNDANKRNAIAAYTKENQNKNDEARKKIRNLFKAETGNDIEPTDADVLKYVLWEEQGHICLYTGKQIRISDFVGANPKFDIEHTIPRSVGGDSTRMNLTLCDSRFNREVKKTKLPTELPNHDEIMARINDWREKYESLDGQIRRQKKMSKGATTKDQKDAIIRKRHLLELQRDYWRGKYLRFTMESVPDGFSRRQGTDISVISKYARLYLKSLFKHVYTVKGIATSDFRKIWGIQKVYSQKERVNHVHHCIDAIVIACIGLDEYNKLGAYYHDEENHEWYGMSKAYFKKPWSTFVEDVEKVQDEIMVYHYTPDNMPKQGRRRILIDGKKVLAKGDAARESLHNDTYYGAIESDGVVKYVKRINFASMKENDVKNIVDDTVRGIIEAAINEKGFKEAMSGTIWMNEEKQIPIKKVRCYTPSVTKPLNIRQQRDVSSKEYKQQYHVTNDSNYLLALYIGKDKKGKEKREFEIINMLQTAQYFKTSNDKVAVGKNIVPLKSEHDYPFAYSLKIGTMVLLYEKSPNEIWDASLMDNNKRLYKVVGLSAMRMKGRNVDYATIKLKHHEEARLSTELKVKNGAFKQGEELRPSIIMLHTQLNALVQGYDFEINELGEIKRLR

SEQ ID NO: 18985 - protein, 1214 aa, unidentified
  REGION 1..1214: note = Cas Enzyme sequence
MTKILGIDTGTNSLGWAIVEKKADEYHLLDKGVNIFQEGVKIEKGIESSKAADRTAHKASRVRNYRIKLRKIRLLRILSDAHLCPPLSKVELSAWRLKKEYPKNDLFMQWQGTDDESEKTPYAYRHKCLHECLDFSSMTDRYILGRAFYHMIQRRGFLSNRKDQSGDDTGKVKESISNLTQEMHDDGYEYLGDYFYSLYNKGEKIRNHYTARNEHYLAEFKAICEKQKLDKNLGPEIVRQIEKAIFDQRPLKSQKGQVGKCVFEKNKTKCPSSHPMYEEFRMLSFINNIKIQTPNDSALRPLSAEERELIMPLFFRKSKKQFDFEDIAKKLAPKKHYGFYKKSSDAEMPYLFNYPMDTSVSGCPVTAALKDIFGDNWIDSLCETYTLAEGKSRLNVVNDIWHALFFYTDETKLAEFGKNRLQLDDEEAKKFCEISLPSDYASLSLKAICKILPYLRKGLIYSHAVFLGNLCEVMPQYEWNMEEMRNAAIDNIIYEMNQIDSKDARTFEVCIKEYLKEQYHVSDEKLQKLYHPSMMEMYPRVQRTNNHGVYQLGSPRIDSVRNPMAMRSMFRLRKLVNRLLEEGKIDQDTEIHIEFARELNDANKRNAIAAYTKENQNKNDEARKKIRNLFKAETGNDIEPTDADVLKYVLWEEQGHICLYTGKQIRISDFVGANPKFDIEHTIPRSVGGDSTRMNLTLCDSRFNREVKKTKLPTELPNHDEIMARINDWREKYESLDGQIRRQKKMSKGATTKDQKDAIIRKRHLLELQRDYWRGKYLRFTMESVPDGFSRRQGTDISVISKYARLYLKSLFKHVYTVKGIATSDFRKIWGIQKVYSQKERVNHVHHCIDAIVIACIGLDEYNKLGAYYHDEENHEWYGMSKAYFKKPWSTFVEDVEKVQDEIMVYHYTPDNMPKQGRRRILIDGKKVLAKGDAARGSLHNDTYYGAIESDGVVKYVKRINFASMKENDVKNIVDDTVRGIIEAAINEKGFKEAMSGTIWMNEEKQIPIKKVRCYTPSVTKPLNIRQQRDVSSKEYKQQYHVTNDSNYLLALYIGKDKKGKEKREFEIINMLQTAQYFKTSNDKVAVGKNIVPLKSEHDYPFAYSLKIGTMVLLYEKSPNEIWDASLMDNNKRLYKVVGLSAMRMKGRNVDYATIKLKHHEEARLSTELKVKNGAFKQGEELRPSIIMLHTQLNALVQGYDFEINELGEIKRLR

SEQ ID NO: 18986 - protein, 1214 aa, unidentified; identical to SEQ ID NO: 18982
  REGION 1..1214: note = Cas Enzyme sequence

SEQ ID NO: 18987 - protein, 1212 aa, unidentified
  REGION 1..1212: note = Cas Enzyme sequence
MTKILGIDTGTNSLGWAIVDKTADNYNLLDKGVNIFQEGVKIEKGIESSKAAERTEHRATRVRYYRIKLRKIRLLRILSDNHLCPPLSQEELSIWRLKKIYPKNELFMQWQRTDDDTEKTPYAYRHKCIHEKLDLSDVTDRYILGRAFYHIIQRRGFLSNRKEQGGEDSGKVKEGISTLTQEMNEAGYEYLGDYFYALYNKGEKIRKHYTARNEHFLSEFKAICEKQDLEKELGSEVVRNIEKAIFDQRPLKSQKGQVGKCVFEKNKTKCPSSHPMYEEFRMLTFINNIKIKTPNDDVLRPLNTGEREKIMPLFFRKSKKQFDFEDITKKLAPKKMYGFYKKEEDAEMPFLFNYPMDTSVSGCPVTAALKDVFGDDWITAICETYTLGEGKSRFDIVNDIWHALYFYSDKDKLAEFAINRLQLSEDEAKIFSEISLPADYASLSLKAICKILPYLRRGLIYSHAVFLGNLCEVMPKYEWSIKEMRETIIDNIIMEMDRCDTKDKRTFEVCIKDYLKEHYNVSDNSLKKLYHPSMIETYPRVQYTNEHGVYQLGSPRIDSVRNPMAMRSMFRLRKLVNRLLVEGKIDQNTEVHIEFARELNDANKRNAIALFVKENQSANDEARKQIITLFKKETGTDIEPTDKDILKYVLWEEQNHICLYTGKQIRISDFIGANPKFDIEHTIPRSVGGDSTKMNLTLCDSRFNREVKKTKLPVELPNHDEIMERIKEWKKKYELLDIQIRKNKKLSKGATTKEQKDTIIRKRHLLELRRDYWRGKYERFTMESVPEGFSRRQGTDISVISKYARLYLKSLFNRVYTVKGIATSDFRKIWGIQDIYSKKERINHVHHCIDAIVIACIGLDEYNKLGAYYHDEENNKWYGMSKASFKKPWATFVEDIKKIQDEILVYHYTPDNMPKQGRRRIKIDGKKILCKGDAARGSLHNDTYYGAIENDGAVKYVKRIDLASLEEKDVKNIVDDTVRSIIEAAIKEKGFKDAMASTIWMNEEKRIPIKKVRCFTPSITKPLNIRKQRDVSTKEYKQQYHVANDSNYLLTLYIGTDNKGKEKREFEIVNMLQAAQYYRTSNDKEVVDRHIVPIKSKHDYPFAYTLKIGTMVLLYEKSPNEVWDATIKERNRRLYKVTGMSTSTIGNCVYARITMVYNEEARPSKDIKAKNGAYKQGEELRPAIIMLHTQLNALVQGYDFEINELGEIRRLR

SEQ ID NO: 18988 - protein, 1211 aa, unidentified
  REGION 1..1211: note = Cas Enzyme sequence
MTKILGIDTGTNSLGWAIVEKQADEYHLLDKGVNIFQEGVKIEKGIESSKAAERTAHKAARVRNYRIKLRKIRLLRILSDAHLCPPLSKVELSAWRLKKEYPKNELFMQWQSTDDESEKTPYAYRHKCLHDCLDFSSVTDRYILGRAFYHMIQRRGFLSNRKDQSADDTGKVKESISNLTQEMHDAGYEYLGDYFYSLYNKGEKIRNHYTARNEHYLAEFKAICEKQDLDKNLGPEVVRQIEKAIFDQRPLKSQKGQVGKCVFEKNKTKCPSSHPMYEEFRMLSFINNIKIQTPNDDVLRPLSPEERALIMPLFFRKSKKLFDFEDIAKKLAPKKQYGFYKKSSDAEMPYLFNYPMDTSVSSCPVTTALKDIFGDDWIDSLCETYTLAEGKSRLNVVNDIWHVLCFYTDDTKLAEFAKNRLQLNDEEAKKFCEISLPGDYASLSLKAICKILPYLRRGLIYSHAVFLGNLCEVMPQYEWDIEEMRNAAIDHIIHEMNLIDSKDARTFEVCIKEYLKEQYHVSEEKLKKLYHPSMMEVYPRVQRTNSHGVYQLGSPRIDSVRNPMAMRSMFRLRKLVNRLLEEGKIDSDTEIHIEFARELNDANKRNAIAAFTKENQNKNDEARKKIKNLFKAETGKDIEPTDVDVLKYVLWEEQGHICLYTGKQICISDFIGGNPKFDIEHTIPRSVGGDSTKMNLTLCDSRFNRDVKKTKLPTELPNHEEIMARINDWREKYESLDGQIRRQKKMSKGATTKDQKDAIIRKRHLLELQRDYWRGKYLRFTMESVPEGFSRRQGTDISVISKYARLYLKSLFKHVYTVKGIATSDFRKIWGIQKAYSKKERVNHVHHCIDAIVIACIGLDEYNKLGAYYHDEENHEWYGMSKAYFKKPWPTFVEDIEKVQDEILVYHYTPDNMPKQGRRRIMVEVKANGRRKKTKLLCKGDAARGSLHKDTYYGAIMQSGEDTPYYVVRKNVDNHLSDQDIKNIVDDVVRGIIQNAVAKGGKEALNGTIWMNEEKQIPIKKVRCITSVKKPLSFEHRKPRDISNKCYKNDYYVAPDDNYLMAVYKGVTSKGKVKYMYEFINMLDAARFYKQSNDKVLVDGNIVQLNKDGLNLYYTLKKGTMVLLYVDNPDEIWENNGDWSRRLYKVTELWKDGRIVVTKHTEARPSSEVPKVTKGFCVGDSKGLYSYSKFSALVQGYDFEINELGEIKRLK

SEQ ID NO: 18989 - protein, 1215 aa, unidentified
  REGION 1..1215: note = Cas Enzyme sequence
MTKILGIDTGTNSLGWAIVEKKADEYHLLDKGVNIFQEGVKIEKGIESSKAADRTAHKAARVRNYRIKLRKIRLLRILSDAHLCPPLSKAELSAWRLKKEYPKNELFMQWQSTDDESEKTPYAYRHKCLHDCLDFSSITDRYILGRAFYHMIQRRGFLSNRKDQSGDDTGMVKESISNLTQEMHDAGYEYLGDYFYSLYNKGEKIRNHYTARNEHYLAEFKAICEKQELDKNLGHEVVHQIEKAIFYQRPLKSQKGQVGKCVFEKNKTRCPSSHPMYEEFRMLSFINNIKIQTPNDDVLRPLSSEERALIMPLFFRKLIIKKKQFDFEDIAKKLAPKKQYGFYKKSSDAEMPYLFNYPMDTSVSGCPVTTALKDIFGDNWIDSLCETYTLAEGKSRLNVLNDIWHALFFYTDETKLAEFGKNRLQLDDEEAKKFCEISLPSDYASLSLKAICKILPYLRRGLIYSHAVFLGNLCEVMPQYEWNMEEMRNAAIDNIIYEMNQIDSKDARTFEVCIKEYLKEQYHVSDEKLQKLYHPSMMEMYPRVQHTNNHGVYQLGSPRIDSVRNPMAMRSMFRLRKLVNRLLEEGKIDQDTEIHIEFARELNDANKRNAIAAYTKENQNKNDEARKKIRNLFKAETGNDIEPTDADVLKYVLWEEQGHICLYTGKQIRISDFVGANPKFDIEHTIPRSVGGDSTKMNLTLCDSRFNRDVKKTKLPTELSNHDEIMTRINEWKEKYESLEGQIRKQKKLSKGASSKEQKDGIIRKRHLLELQRDYWRGKYLRFTMESVPEGFSRRQGTDISVISKYARLYLKSLFKHVYTVKGIATSDFRKIWGIQKVYSKKERVNHVHHCIDAIVIACIGLDEYNKLGAYYHDEENHEWYGMSKAYFKKPWSTFVEDIKRVQDEILVYHYTPDNMPKQGRRRILLDVEINGRKKKKKVLCKGDAARGSLHKDTYYGAIMRSGEDTPYYVVRKNVDNHLSDQDIKNIVDDVVRGIIQNAVAKGGKDALNGTIWMNEEKQIPIKKVRCITSVKNPLSFEHRKPRDISNKCYKNDYYVAPGDNNYLMAVYKGVTSKGKVKYMYEFINMLDAAKFYKQSNDKVLVDGNIVQLNKDGLNLYYTLKKGTMVLLYVDNPDEIWENNGDWSRRLYKVTELWKAGRIVVTKHTEARPSSEVPKVTKGFCIGDSKGLYSYSKFSALVQGYDFEINELGEIKRLR

SEQ ID NO: 18990 - protein, 1216 aa, unidentified
  REGION 1..1216: note = Cas Enzyme sequence
MTKILGIDTGTNSHGWAIVEKQADEYHLLDKGVDIFQEGVLKTEKGKEYSKAAERTAHKAARVRNYRIKLRKIRLLRILSDAHLCPPLSKVELSAWRLKKEYPKNELFMQWQSTDDESEKTPYAYRHKCLHESLDFSSITDRHILGRAFYHMIQRRGFLSNRKDQSGDDTGMVKENISNLTQEMHDAGYEYLGDYFYYLYNNGKKIRNHYTARNEHYLAEFKAICEKQDLDKNLGSEVVRQIEKAIFYQRPLKSQKGQVGKCVFEKNKTRCPSSHPMFEEFRMLSFINNIKIQTPNDGALRSLSAEERELIMPLFFRKSIIKKKQFVFEDIAKKLARREQYGFYKKSTDVEMPYLFNFPMDTSVSGCPVTAALIDIFGENWIDALCETYTLAEGKSRLDIVNDIWHVLFFYTDEAKLAEFGKNRLQLNDEDAKKFSKITLQNGYGRLCLKVICKILPYLRRGLVKDHAILLGNLCEVMPQYEWDIKEMRIAAIDNIIREINKTDSKDESTLEKRTKLEKRIKEYLKNQYHVSDDKLKKLYHPSKMDKYPRVLRTNDHGVYQLGSPRIDSVRNPMAMRSIFRLRKLVNRLLEEGKIDLDTEIHIEFARELNDANKRRAIAKFAKDNQKKNDEARKKIIDKMGEKYNVKDDDILKCILWEEQGHICLYTGRQIAIPDFVGTSQKFDIEHTIPRSVDGDSTRMNLTLCDSRFNREIKKTKLPAELPNHDEIMARINDWREKYEFLDGQIRKLRGKSKGATTKKLKDDIIYNRHLLELQRDYWRGKYLRFTMEIVPEGFSRRQGTDIGVISKYARLYLKSLFKHVYTVNGIATSDFRKIWGVQDVYGKKERVNHVHHCIDAIVVACISRDEYDKLSAYYHNEENHKWYGMSKAYFKKPWPTFVEDLKNVQDEILVYHYTPDNMPKQGRRKILLDVEVDGIKKKKKVLCKGDAARGLLHSDTYYGAIENDGVVRYVKRINLASMKVTDVKNIVDDAVRGIVEAAIREKGFKEAMAGTIWMNEEKQIPIKKVRCYTSIKNPISFDKKKQRDLSDKEYKRNYYVTTKGNYIVALYVGSTKTGKRKTFYEFVNMMEAAGYYKTSNDKSVVGHNIVPLEKDDCQLAFILKKGTMVIFYKETKEEVWDYSQKKTVRNLYYVSGIESDGRVTFKYHQEARRDEELPRNASDTSDIKPKIRVGLASAKILVQGYDFEINELGEIKRLR

SEQ ID NO: 18991 - protein, 1212 aa, unidentified
  REGION 1..1212: note = Cas Enzyme sequence
MTKILGIDTGTNSLGWAIVEKKADEYHLLDKGVNIFQEGVKIEKGIEASKAADRTAHKASRVRNYRIKLRKIRLLRILSDAHLCPPLSKVELSAWRLKKEYPKNDLFMQWQGTDDESEKTPYAYRHKCLHECLDFNSMTDRYILGRAFYHMIQRRGFLSNRKDQSGDDTGKVKESISNLTQEMHDDGYEYLGDYFYSLYNKGEKIRNHYTARNEHYLAEFKAICEKQKLDKNLGPEIVRQIEKAIFDQRPLKSQKGQVGKCVFEKNKTKCPSSHPMYEEFRMLSFINNIKIQTPNDSALRPLSAEERELIMPLFFRKSKKQFDFEDIAKKLAPKKHYGFYKKSSDAEMPYLFNYPMDTSVSGCPVTAALKDIFGDNWIDSLCETYTLAEGKSRLNVVNDIWHALFFYTDETKLAEFGKNRLQLDDEEAKKFCEISLPSDYASLSLKAICKILPYLRKGLIYSHAVFLGNLCEVMPQYEWNMEEMRNAAIDNIIYEMNQIDSKDARTFEVCIKEYLKEQYHVSDEKLQKLYHPSMMEMYPRVQRTNNHGVYQLGSPRIDSVRNPMAMRSMFRLRKLVNRLLEEGKIDQDTEIHIEFARELNDANKRNAIAAYTKENQNKNDEARKKIRNLFKAETGNDIEPTDADVLKYVLWEEQGHICLYTGKQIRISDFVGANPKFDIEHTIPRSVGGDSTRMNLTLCDSRFNREVKKTKLPTELPNHDEIMARINDWREKYESLDGQIRKLKGKSKGATTKKQKDDIISKRHLLELQRDYWRGKYLRFTMESVPDGFSRRQGTDICVISKYARLYLKSLFKHVYTVKGIATSDFRKIWGIQKVYSKKERVNHVHHCIDAIVIACIGLDEYNKLGTYYHDEENHEWYGMSKAYFKKPWSTFVEDIKRVQDEILVYHYTPDNMPKQGRRRILLDVEINGRKKKKKVLCKGDAARGSLHKDTYYGAIMRSGEDTPYYVVRKNVDNHLSDQDIENIVDDVVRGIIQNAVAKGGKDALNGTIWMNEEKQIPIKKVRCITSVKNPLSFEHRKPRDISNKCYKNDYYVAPGDNNYLMAVYKGVTSKGKVKYMYEFINMLDAAKFYKQSNDKVLVDGNIVQLNKDGLNLYYTLKKGTMVLLYVDNPDEIWENNDDWSRRLYKVTELWKAGRIVVTKHTEARPSSEVPKVTKGFCIGDSKGLYSYSKFSALVQGYDFEINELGEIKRLR

SEQ ID NO: 18992 - protein, 1217 aa, unidentified
  REGION 1..1217: note = Cas Enzyme sequence
MTKILGIDTGTNSLGWAIVEKKADEYHLLDKGVNIFQEGVKIEKGIESSKAADRTAHKASRVRNYRIKLRKIRLLRILSDAHLCPPLSKVELSAWRLKKEYPKNDLFMQWQGTDDESEKTPYAYRHKCLHECLDFNSMTDRYILGRAFYHMIQRRGFLSNRKDQSGDDTGKVKESISNLTQEMHDDGYEYLGDYFYSLYNKGEKIRNHYTARNEHYLAEFKAICEKQKLDKNLGPEIVRQIEKAIFDQRPLKSQKGQVGKCVFEKNKTKCPSSHPMYEEFRMLSFINNIKIQTPNDSALRPLSAEERELIIPLFFRKSIIKKKQFDFEDIAKKLAPKKHYGFYKKSSDAEMPYLFNYPMDTSVSGCPVTAALKDIFGDNWIDSLCETYTLAEGKSRLNVVNDIWHALFFYTDDTKLAEFAKNRLQLNDEEARKFCEISLPGDYASLSLKAICKILPYLRRGLIYSHAVFLGNLCEVMPQYEWNMEEMRNAAIDNIIYEMNQIDSKDARTFEVCIKEYLKEQYHVSDEKLQKLYHPSMMEMYPRVQRTNNHGVYQLGSPRIDSVRNPMAMRSMFRLRKLVNRLLEEGKIDQDTEIHIEFARELNDANKRNAIAAYTKENQNKNDEARKKIRNLFKAETGNDIEPTDADVLKYVLWEEQGHICLYTGKQIRISDFVGANPKFDIEHTIPRSVGGDSTRMNLTLCDSRFNREVKKTKLPTELPNHDEIMARINDWREKYESLDGQIRRQKKMSKGATTKDQKDAIIRKRHLLELQRDYWRGKYLRFTMESVPDGFSRRQGTDISVISKYARLYLKSLFKHVYTVKGIATSDFRKIWGIQKVYSQKERVNHVHHCIDAIVIACIGLDEYNKLGAYYHDEENHEWYGMSKAYFKKPWSTFVEDVEKVQDEIMVYHYTPDNMPKQGRRRILIDGKKVLAKGDAARGSLHNDTYYGAIESDGVVKYVKRINFASMKENDVKNIVDDTVRGIIEAAINEKGFKEAMSGTIWMNEEKQIPIKKVRCYTPSVTKPLNIRQQRDVSSKEYKQQYHVTNDSNYLLALYIGKDKKGKEKREFEIINMLQTAQYFKTSNDKVAVGKNIVPLKSEHDYPFAYSLKIGTMVLLYEKSPNEIWDASLMDNNKRLYKVVGLSAMRMKGRNVDYATIKLKHHEEARLSTELKVKNGAFKQGEELRPSIIMLHTQLNALVQGYDFEINELGEIKRLR

SEQ ID NO: 18993 - protein, 1224 aa, unidentified
  REGION 1..1224: note = Cas Enzyme sequence
MKKVLGLDLGVGSIGWCLIEKDDKNVPIRIIRMGSRIVPISSDEETGYTKGNAISKNADRTAKRTARKCYDRYQLRRHALVNLLKQLGMEPNKYLMFEQTPMELWQKRADAAYQEVSLEELGRVLLHVNQKRGYKHSRLSNSDSKETAYVQEVNSRYDDLKAEGLTIGQHFAAKLKENEQTSTDGKKYYNYRIKEQVYPRHAYEEEVEKILEVQSRFHSDKLTPDVCKEIKNIIFYQRDLKSCKDLVSLCEFESYTITKNGKEITIGPKVAPRTSPLAQLSSILEIANNITIRNKRNDELYILPEQRKAIADFLDNHEVMKLTDLYKILNIGRKGGWWAGKAIGKGLKGNTTKCQIREALSALPKEQVDSLTAFQLEYEEYVDEETGEVRKRINNTKAEKQPLYRLWHLLYSIKDVDELSGALRHLGIEDEDSIEKLCKLDFRTAGYANKSAKAIGRILPYLMEGMMYSNACERAGFDHSRRINPDRVLLTHLPQIQKNELRQPVVEKILNQLVNIVNALLEKEGAIDEIRVELARELKQSKDERNEAFKRNNQNERKNKEYAEHIKEYGLTPTRNRIMKMKMWEESEYTCMYCGQPINVTEFLKGADVEREHIIPRGLLFDNSFTNQVCSCRRCNSKKGMRTAYDFIADEKGQEGLNAYIEHINDLFDKKKISRSKLNRLLVSHKAYISRKAYGKETDEDKELWENFIDRQLRQSQYIAKKSVEMLQQVCKNVYTTSGSVTDFVRHQWGYDELLHDLNFERFKKTGLTEMVKQLHSGKEVEVERIKDWTKRLDNRHHAVDALAIACTTQGMIQRLNTLNASRDEMLEELNTNEQRMVDPERSMLEKWLFVQPHISYAEAKNEIDKIVISQRPNTRITVPGKRYVTKNGKRTLVQTGIIVPRGALHAEFVYGRIMKQEADGVTIKPQYVRKYKLGIGAQGFLFNGKEFYKEELKKDSKTGLSKIVVTDKIMDVLEKIVDGGIRQRILERLNRGFEEGTDYRANVAQALANLKNLDEDPIYSDDAKTRPIRTVRKYVSSSTMVVVRKDANGKPMSFVEPDGNHHVAFYKDENEVIMETIVTKWQAVQRKLNHIPIIIDNPSQTWSEVMGRNDVPDELLQSLPKDSSIFLLSLQIGEAFIMGMEDADYHKALEEKDMRSLAEHLYFVQNISSNNYRMRRHVESSFDTTDMNKEDQRFLNIKSVSSFFNSNPHKVKITILGDIIADV

SEQ ID NO: 18994 - protein, 1519 aa, unidentified
  REGION 1..1519: note = Cas Enzyme sequence
MSADILGDFDKGNSISQTSERTRLRMVRRLRERNLLRRERLLRTLKTMGFLPEYFALKIDETGKFIDDSEPKLAWRKTKEGNSVFLFQKSFEEMLADFAQHQPQFVADGRKVPYDWTIYYLRKKALTERITKEELAWILLQFNQKRGYYQLRGEEEEEKANETIEIISATILSVERREKDKKYDKYWYEMTLDNGMVYRATFYNDVSDWKGETKDFVLKSTILKDGSTKHDLSFLPTTDEIEGMPPQRKAKMYAKIKLRTEKEIENSKKTVGCYIYDSLLQKPDQKIIGKLVRTVERKFYKDELTRILKVQQELISELQDEALYNKCIEELYPSNEAHRHNMAKPDFVNLFVNDILFYQRPLKSKKSLIDNCPYEFHFDKDGNAHPLKCIAKSNPLFQEFRLWQFVQNLRIYQREKLVSDGQLDLFSSAPTGKLQTDVDVTDEFLKSEEDYVRLFDWLNCRASIKQDTLLNSFFKIKKERGKEKYPYRWNYVEDKEYPCNKTRADILSGLAKSNISPDFLTHEKEMALWHVLYSVEDKIEIGKAIRTFAAKNNLGEDFAEVFSKLKPFEKEYGSYSEKAIRKLLPLMRMGKYWSAGRIDTKTLDRIDKIITGEYDESIKNRVREKAIRLTETTHFKGLPVWLACYIVYDRHSEAKEIEKWEKPEDIDRYLSGFKQHSLRNPIVEQVITETLRVVRDIWKKEGHIDEIHVELGREMKNPADKRRQMTERIQQNENTNLRIKAMLMEFANPDMKIENVRPYSPSQQDILRIYEENALDNLTREDEEYDFVSKVSKMAQPSKSDIVRYKCWLEQKYQSPYTGRMIPLSKLFTSAYEIEHIIPQSRYFDDSFSNKVICEAEVNKLKDRQLGYEFIKNHAGEKVPVSLGEPVEILSVEKYERLVRERYATNRTKMKKLLMDDIPDGFIERQMNDSRYISKVVKSLLSNIVREKLDNGEYEQEAVSKNLISCNGSITDRLKKDWGMNDVWNRIILPRFQRLNQLTGKSCFTTLNREGHEIPSMPIELQKGFSKKRIDHRHHAMDAIVIACATRDHVNLLNNEAAHSKHNANRYQLQRKLRRFETIVVDGKEREVAREFILPWPSFATDAWQTLQNIIVSFKQNLRVINKTTNFYLHYDESGKKKLCKQVKGDSWAVRKSMHKDTVFGEVNLRKKKTVSLNDAIKKPTCIVNKEFKKKVIELLNDGRDAKFIKKYVDENKDVWSDINTAKIEVYYFTKDEKKRNGEPKERYFATRKPLDSSYDQKRIQESVTDTGIQKILLAHLEAKDNNPEQAFSPDGIEEMNRNIVALNNGKFHQPILKVRVYEKADKFAVGQTGNKAKKFVEAAKGTNLFWAILGSEKTNKETGDTEIVRSYLTIPLNVMVDCQKKYGAKWKDNVEAYLKEKELIESETQLLFILSPNDLVYLPTEEDPHNVSIDRQRIYKFIDPNLNKGNFVPYSSANVIFSVKFTDQKKVGLSYPIQDEFGIGSQASKSPRAITGEMIKETCVPIKVDRLGNVIELNGLKV

SEQ ID NO: 18995 - protein, 983 aa, unidentified
  REGION 1..983: note = Cas Enzyme sequence
MIKHRGYIPFGDEEVTLVDLNGKYPCEFYYEMYKNGGKYRNRKMTVRITDNEKEIKKILETQSKYYKNINQDFINKYLNILTRKRKYWEGPGSINDLTPFGRFKTQEDVENYLEEKRKNPSYEKYIYEDLIKKCDYELEERCCCKLNIYYELFNMYQDFINVSFKNIEELENKDCFYETKNGLYKLNKKGLLMVKDYCMNNFKLKYTDILKKLFNTDKDNISGYRIDKDHKPEFSTLNSYRKIMLEFTEKGFDTTWVSDYNCYNEIMEKMTLTPGGVEFIKEIENNKLVPYKFNEEEKSLFKELKEYFNKKTLLSYGSLSQKILQKAINDMLDLEKNFMQVSRIKDYGKEARENFIKQYKKTSNKLEINASFVDDIIASPQVKKSLRQAIKIINAIIEKEGCLPVSIAIESTKELNSDKKKKEIEKEQKIQENLRKQASNYLSVVFGDSNATETNILKVMLYNETNGHCAYCNKPLNINDIFTDNIQVDHILPISKSFNDSFNNKIISCKKCNDDKKNNTPYQFLKNKNYFEEFEKRVLENKNISDYKKDNLLYKDDLDKYKTRFFNRNLRDTAYATTELINQIEIFNNYLEILDKKRINTLSVPGQITSSIRNRYVKNEDKTSLEKNRDAGVFHHAVDASIVVSVSDTHIGQIMLKAQNDKEYWIKNKSGYDDIYKYLINLRIDDTINQIEKINNENIKISKQVSKNPQGKLANSNIYKMIKKDNEQYIINQIDNIYTFDFKKDENKKLFEKLLNEENNEFTLLCYDNDKNTFNYIKKIYNEYKNEKGNPFVNYLIDKGEISDGNSLDYDITGIKMITKKGNGPIIKRLRYYSKKNDLYILNKKNINKKDSNYLALDSLKQFCVKVYVDNDNKKFVFLPIYTISLDPKTKKVNENDEFYKLFYNKYIGNKNVTFFSDIYNGNKLEITKKDGTIVSGYYSTFDKSSNRLETQNGHKFVCSDKKISIVHTDILGNEKKRLTKEL

SEQ ID NO: 18996 - protein, 1217 aa, unidentified
  REGION 1..1217: note = Cas Enzyme sequence
MTKVLGLDLGTNSIGWAVVEESENGYRLLDQGVDIFQEGVARDKNNEKPAVQDRTTARASRRHYFRRRLRKIALLKVLIAHDLCPPLSDEQLQTWRTRQIYPLTEAFLQWQRTDDNRDKNPYHDRYRALTERLDLNLQSDRYTLGRALYHLAQRRGFLSNRKEAGNEKEDGQVKSSIKELTVQMHDAGCHYLGEYFYKLYQRKEKIRNHYTARNEHYLAEFQAICDRQQLPETWVAALKKAIFFQRPLKSQKGQVGHCTFEHRKSRCPLSHPRYEEFRMLAFINNIRVTTPQDDQPRPLNDAEVAAIRPLFLRKSKPHFDFEEIARKIAGKGMYACKDDRNEAPYGFNFSRTATVSGCPVTAALASLFGDEWLTTIASLYTLASAKNEEQILNDIWHALFFFDDEERLQAWAAEKLQLSAAEAATFAAIRLPQGYASLSLNAISKMLPYLRRGYRYDEAVFLANLKAVLPATLYADPQKLQTIEAEIASIIDDYRSDPMNRHLTKEQCVKDYLQNSWDIDATRLERLYHPSMIETYPAAQPDAAGQFRLGSPRTASVRNPMAMRALFRLRALINALLREGAIDRTTKIRIEFSRNLNDANKRKAIEQYQREREREHQKFADEIRRLYAEATGRTIEPSDDDVLKYRLWEEQKHTCPYTGKRIGITDFIGGATSFDIEHTVPRSREGDDSQMNKTLCENRFNRDVKQAKLPAELANHAEIMARIEDFGWQERITTLQNQIEGQIRKSKNAATKAERDTAIQRRHYLKLQLDYWRGKCDRFTMTEIPEGFSNRQGVDIGIIGRYARQYLHTVFEHIYTVKGATTSDFRQMWGIQEEYTKKERSNHVHHCIDAITIACIGPRTYAQWTRYAAQEEYYRRSRATRPVVEKPWPTFTEDVKAIADTLLISHHTPDNMAKQSRKLLRLRGKVKLNARGEKVYVQGDTARGRLHQETFYGAIRRDDEIRYVIRKSINSLQPTDVDKIVDEAVRHRVQQAIEKVGFKEATDPTRYTIWMNEAKRVPIRKVRIFTPGVTQPIELKQQRDLSEHAYKQHYHVVNDSNYCMAIYEGTDAKGRTKRSFEIVNLLAAAAYFKASTDRMSRPDLVPLTDAKGYPLKYLLKTGTMVLFYEQSPAELYECSPRELAKRLYKMTSISTEGRAQFLFHQEARDQGAIKEECGQGASTFNATHPAPKLRLSYSNFNMYVEGYDFELSVTGKITFKH

SEQ ID NO: 18997 - protein, 1215 aa, unidentified
  REGION 1..1215: note = Cas Enzyme sequence
MAERVLGIDMGTNSLGWAVVEKDENNCKLLDKGVVIFQEGVARDQGNEKPAVQGRTDARALRRHYFRRRLLKIELLKVLVKYGLCPELSEQQLMDWKTKRSYPLDKDFIEWQRTDDNCDKNPYHDRYISLTQKLDLTQIQHRYILGRALYHLAQRRGFLSNRKDSTQEQDGTVKQAIGDLSTKIEQAGCKYLGEYFYKCYQSGEKIRGTYTSRNQHIRAEFDAICNKQELSGELRKALIRAIFYQRPLKSQKGSVGKCTFECNKSRCPISHPSFEEFRMLQFINNIKVKTADDNDYRQLNATEREAIKPLFLRKSKTSFTFEDIAKKLAGKAINYSHLDDNPNAAFKFNFDLSTSVSNSPVTSCLTEIFGTDWRNALRQRYKKAGHKTQTEVVNDVWHALFSFDDDEKLRQWGIDNLALTDEQAEAFVKCPIHQGYASLSLNAINKMLPYLRQGIRYDTAVFLANIEAVLPIAVKEDADQLDGIKQQVIDLLNEYDNNPILKNYTKVELINDMLLGIPGVEYRDIQKLYHPSQLQTYPEAQLNAKGELLLGSPRTSAIRNPMAMRALFQLRHLVNTLLREKKIDRTTKINIEFSRNLNDANMRKAISRYQRDNETARKKIVDRLITEYKSSTGQDIIPSDDDILKYQLWDEQKHRCIYTGKRIDISDFIGSNPTYDIEHTVPRSRGGDDSTMNKTLCECTFNRKIKRAKLPAELAQHDEILANIDALGWKEKIESFRKQINSTKGHYFATKEQKDANIQRRHYLELQLKYWQGKYSRFTITEVPKGFSNRQGVDIGIIGRYAREFLATVFRAPNRNLIYTVKGATTADFRKMWGLQDEYTSKERVNHSHHCIDAIVIACIGKAQYDQWAQYCQQRDLASWDGAAKPSFPKPWETFTQDVKAITSELLITHHTPDNTLKQSKKALRIRGKIQKTSSGKIIYQQGDTARAQLHLQTYYGAIKRNGEIKYVIRKQVDSLEQKDIKKIVDDTVKAIIEKEIAAKGFANAIAGPIWMNKEKRIPIKKVRLYAPDVTKPIHLKKQRDLSIYNYKQDYHVDNLGNYCLAIYEGCDAKGKTKRSFKLINNLSAIKSHKSGEIIPLSDDNEYPLKWTLKVGRMVLLYEKSPKEVYEASLQELVRRLYKVTGLSINSTGPGYGSIELRYHQEARPKKEFKAKNGAWKTGEAIRPGIIMLNTQFNALIQGQDFEISDSGEITFLRQ

SEQ ID NO: 18998 - protein, 1000 aa, unidentified
  REGION 1..1000: note = Cas Enzyme sequence
HIRAEFDAICNKQELSGELRKALIRAIFYQRPLKSQKGSVGKCTFECNKSRCPISHPSFEEFRMLQFINNIKVKTADDNDYRQLNATEREAIKPLFLRKSKTSFTFEDIAKKLAGKAINYSHLDDNPNAAFKFNFDLSTSVSNSPVTSCLTEIFGTDWRNALRQRYKKAGHKTQTEVVNDVWHALFSFDDDEKLRQWGIDNLALTDEQAEAFVKCPIHQGYASLSLNAINKMLPYLRQGIRYDTAVFLANIEAVLPIAVKEDADQLDGIKQQVIDLLNEYDNNPILKNYTKVELINDMLLGIPGVEYRDIQKLYHPSQLQTYPEAQLNAKGELLLGSPRTSAIRNPMAMRALFQLRHLVNTLLREKKIDRTTKINIEFSRNLNDANMRKAISRYQRDNETARKKIVDRLITEYKSSTGQDIIPSDDDILKYQLWDEQKHRCIYTGKRIDISDFIGSNPTYDIEHTVPRSRGGDDSTMNKTLCECTFNRKIKRAKLPAELAQHDEILANIDALGWKEKIESFRKQINSTKGHYFATKEQKDANIQRRHYLELQLKYWQGKYSRFTITEVPKGFSNRQGVDIGIIGRYAREFLATVFRAPNRNLIYTVKGATTADFRKMWGLQDEYTSKERVNHSHHCIDAIVIACIGKAQYDQWAQYCQQRELASWDGAAKPSFPKPWETFTQDVKAITSELLITHHTPDNTLKQSKKALRIRGKIQKTSSGKIIYQQGDTARAQLHLQTYYGAIKRNGEIKYVIRKQVDSLEQKDIKKIVDDTVKAIIEKEIAAKGFANAIAGPIWMNKEKRIPIKKVRLYAPDVTKPIHLKKQRDLSIYNYKQDYHVDNLGNYCLAIYEGCDAKGKTKRSFKLINNLSAIKSHKSGEIIPLSDDNEYPLKWTLKVGRMVLLYEKSPKEVYEASLQELVRRLYKVTGLSINSTGPGYGSIELRYHQEARPKKEFKAKNGAWKTGEAIRPGIIMLNTQFNALIQGQDFEISDSGEITFLRQ

SEQ ID NO: 18999 - protein, 1461 aa, unidentified
  REGION 1..1461: note = Cas Enzyme sequence
GIGSRIIPMSQDILGNFAVGNSVSQTAERTAFRSVRRLRERHLLRRERLLRVLHLIGFLPAHYDASIGWDKTDYRTFAKFKNVAEPKIAWKSEEQGNRTFIFGDTFKEMLSDFMREHPDLVAGDKKVPYDWTIYYLRKKALEKPIAKEELAWIILNFNQKRGYYQLRGEDEEQETNKSVDYYELKVVDVQAEEPQKGKKDIWYNVILENGWIYRRSSKVSLSEWIGKTKEFIVTTELNADGTPKKDKEGNDKRSFRAPMEGDWMLLKKRTETNIEKSRKTVGCYIYDTLLQNPDQKIKGKLIRTIERKFYKRELLEILQKQSEFHPEFQDKDVYRACLEELYPQNENRRLNLANGNLVHLLLEDILFFQRPLKSKKSLISNCRFEYRIFVKDGQKQIVPLKCIAKSNPLFQEFRLWQFIQDLRIYQREKEVGGKLQTDVDVTSEFLPTEDAFVELFEWLNTRKEINQKVLLKYLVKKKPELYRWNYVEDKNYPCNETRALILERLEKCSLSVDFLTKENEMSLWHILYSVNDLGELTQALKSYALKHGLNDEFVRIFRKFPPFKNEYGAYSEKAIKKLLPLMRMGKYWNKDKIDGQTLQRIEKLLTGEYDEKIRDRVREKAIHLTEISSFKGLPAWLASYIVYDRHAEIGGIRHWKTPQDIEHYLVTEFKQYSLRNPIVEQVITETLRTVKDIWQQYGDFAEIHIELGRDMKNTAERRAQLAKQNAKNEDTNLRLKALLMELQNDPEIESVRPYSPSQLEILKIYEEGVLAAENELPVDIEKISKMNQPTQSELIRYKLWLEQKYRSPYTGEIIPLSKLFTPAYEIEHVIPQSRYFDNSLSNKVICESEINKLKDNALGYEFIRDHEGEIVQSNFGKRLRVFTLGEYEQFVKKNYSRNGNKMKKLLMEDIPDSFIQRQLNDTRYISKEVRTLLSNIVREEDEQEISKNVISCSGGITDRLKKDWGLNDVWNKIITPRFVRLNRMTESSKFGEWKNGHFQIQMPLELQKGFNKKRIDHRHHAMDALVIACATRNHINYLNNESALKDAKISRYDLKHSLCEKSEPDANGNYSWPLRKPWKTFTQDTGEALKSVVVSFKKNVRIINKTTNYYQAYEYGKKVMKKQVKGDSWAIRKSLHKASVFGKVSLRRQKEVRLGVALENWSMLVDKELKEKIKQLITQYGREDVKLFLKYFKDRENKFNGKDISKVSIYYWDTENAAIRKPLDSSFTEKEIKTITDTGIQQILLNHLQAKGGQSDIAFSPEGLDEMNKNLIQLNEGKGHKPIYKVRIFEPIGNKFQVGETGNKSKKFVEADKGTNLYFAVYRTEDGKRTYSTVPLNEVAERQKQRLSPVPETDVKNSASLLFWLSPNDLVYVPTIEERENLQGFDWKNLTEEQTGRIYKMVSCTGDQAFFIQMSVANPIINKYEFSSLNKMGKTIDGEMVKELCWKLKVDRLGHIIECIR

SEQ ID NO: 19000 - protein, 1215 aa, unidentified
  REGION 1..1215: note = Cas Enzyme sequence
MKEKVLGIDLGTNSIGWAIVEKEDENCKLLDKGVVIFQEGVARDKGNEKPMVQTRTDARASRRHYFRRRLRKIELLRVLISNNLCPNLSEQQLIDWKTKHSYPLDKEFIEWQRTDDNCDRNPYHDRYIALTKKLDLSDVNQRYILGRALYHLCQRRGFLSNRKDSTKELDGTVKQAISDLSTKMEQAGCKYLGEYFYKCYQSGEKIRGLYTSRNQHIRAEFDAICDKQDLPDELRNAIARAIFYQRPLKSQKGLVGKCTFEHDKSRCPISHPSYEEFRMLQFVNNIKVKTLYDTEYRQLDESERAQIAPLFFRKSKLSFDFEDIAKKLAGKPMYYSHLEEKPNATHKFNFAMSTSINNCPVISCFVEIFGNDWCNELKSRYKKAGNKSENEIINDVWHALFSFDDDDKLRQWAIDNLSLDEDQADTFIKCPIHQGYASLSLNAINKMLPYLRQGLRYDTAVFLANIEAVLPIQVKEDADQLDGIKSQVVDLINDYESNPILQKYTKAELINDMLLGIPGVEYNDIQKLYHPSQLQTYPEAQLNKNGELLLGSPRTSSIRNPMAMRALFQLRHLINTLLREHKIDRTAKINIEFARSLNDANMRKAIERYQRENEAKRKQYKDRLIKEYKGITGRDIFPSDDDILKYQLWEEQDHKCIYTNTQIDISEFLGANPKYDIEHTVPRSRGGDDSMMNKTLCECRYNRAEKRAKLPAELADHEIILAHVDALGWKDKIEDLRKQINRTKGRYFASKEQKDNNTQYRHYLELQLKYWQGKYSRFTMTEIPKGFSNRQGVDIGIIGRYAKEYLASVFHTPDHNLIYTVKGATTADFRKMWGLQEEYTSKERINHCHHCIDAIVIACIGKAQYDQWAHYCNQKELASWDCTEKPTFPKPWDTFTQDVKNIASELLVTHHTADNTLKQSKKALRIRGKIQRTPDGKTIYQQGDTARAQLHLQTFYGAIKRDGELKYVIRKQVDALEPKDIKNIVDDTVKSIIEEQISAKGFAKAIAEPIWMNEAKQIPIKKVRLYAANVTKPIHLKKQRDLSVKDYKQDYHVSNDGNYCLAIYEGYNAKGKVKRSYKLINNLSAVRSRKNSSLIPLSDDNEYPLKWTLKVGMMVLLYEKSPDEVYNAPQNELVRRLYKVTGLSTLPVGPGYGSIVLRYHQEARPAGEYKNKNGAWVIGEEIRPSIFVYHTQFNALVQGQDFEITDSGEIKFFKI

SEQ ID NO: 19001 - protein, 1215 aa, unidentified
  REGION 1..1215: note = Cas Enzyme sequence
MKEKVLGIDLGTNSIGWAIVEKEDENCKLLDKGVVIFQEGVARDKGNEKPMVQTRTDARASRRHYFRRRLRKIELLRVLISNNLCPNLSEQQLIDWKTKHSYPLDKEFIDWQRTDDNCDRNPYHDRYIALTKKLDLSDVNQRYILGRALYHLCQRRGFLSNRKDSTKELDGTVKQAISDLSTKMEQAGCKYLGEYFYKCYQSGEKIRGLYTSRNQHIRAEFDAICDKQDLPDELRNAIARAIFYQRPLKSQKGLVGKCTFEHDKSRCPISHPSYEEFRMLQFVNNIKVKTLYDTEYRQLDESERAQIAPLFFRKSKLSFDFEDIAKKLAGKPMYYSHLEEKPNAAYKFNFAMSTSINNCPVISCFVEIFGNDWRNELKSRYKKAGNKSENEIINDVWHALFSFDDDDKLRQWAIDNLSLDEDQADTFIKCPIHQGYASLSLNAINKMLPYLRQGLRYDTAVFLANIEAVLPIQVKEDADQLDGIKSQVVDLINDYESNPILQKYTKAELINDMLLGIPGVEYNDIQKLYHPSQLQTYPEAQLNKNGELLLGSPRTSSIRNPMAMRALFQLRHLINTLLREHKIDRTAKINIEFARSLNDANMRKAIERYQRENEAKRKQYKDRLIKEYKGITGRDIFPSDDDILKYQLWEEQDHKCIYTNTQIDISEFLGANPKYDIEHTVPRSRGGDDSMMNKTLCECRYNRAEKRAKLPAELADHEIILAHVDALGWKDKIEDLRKQINRTKGRYFASKEQKDNNTQYRHYLELQLKYWQGKYSRFTMTEIPKGFSNRQGVDIGIIGRYAKEYLASVFHTPDHNLIYTVKGATTADFRKMWGLQEEYTSKERINHCHHCIDAIVIACIGKAQYDQWAHYCNQKELASWDCTEKPTFPKPWDTFTQDVKNIASELLVTHHTADNTLKQSKKALRIRGKIQRTPDGKTIYQQGDTARAQLHLQTFYGAIKRDGELKYVIRKQVDALEPKDIKNIVDDTVKSIIEEQISAKGFAKAIAEPIWMNEAKQIPIKKVRLYAANVTKPIHLKKQRDLSVKDYKQDYHVSNDGNYCLAIYEGYNAKGKVKRSYKLINNLSAVRSRKNSSLIPLSDDNEYPLKWTLKVGMMVLLYEKSPDEVYNAPQNELVRRLYKVTGLSTLPVGPGYGSIVLRYHQEARPAGEYKNKNGAWVIGEEIRPSIFVYHTQFNALVQGQDFEITDSGEIKFFKI

SEQ ID NO: 19002 - protein, 1216 aa, unidentified
  REGION 1..1216: note = Cas Enzyme sequence
MSERTLGLDLGTNSIGWAIVERTGEICKLLDRGVTIFSEGVARDKTGEHPMVETRTNARATRRHYFRRRLKKIELLKVLVKYKLCPELTPEQLETWKKYKEYPLDKDFIEWQRTNDNCGKNPYHDRYVALNQKLDLATERDRYVLGRALYHLCQRRGFLSNRKDKSADTDGVVKSEIDNLTKKIKEEGCEYAGEYFYKLYQKGDKIRNTYMSRTEHVIKEFDAICDKQNLSDDLRKELNDAMFYQRPLKSQKGAVGKCTFEKNKARCPISHPSYEEFRMLSFMNNIRIKTLQDVDYRSLNDFERKLIAPLFFRKSKDTFEFEDIAKAIAGKKAIYCTRESNADAAYRFNFDMTTSVSNSPVTAVMRDVFGEDWIGTLRSSYAKAGKKTDEQIINDVWHALFDFDSDEKLKQWAMDNLGLDEDKAGTFVKCPIHQGYASLSLNAINKMLPYLRCGERYDRAVFMANLEKILPETVLEDADSFDDVKNQIRLTLDEYNTNSDLKKYTKYELVKDVLSGIAGVEYKDLEKLYHPSMIETYPEATLNNHGELLLGSPRIAAIKNPMAMRALFRLRHLINTLLRERKIDKCTKINIEFSRNLNNANERKAIERYQRENEKERKDAIERIKEHLKEQGYDIEPSEDDILKYQLWKEQGEQCIYTGKQIDISDFIGDNPKCDIEHTLPRSIGGDDSRMNKTLCDAYFNRSVKRAQLPAQLSNHDEIMARIEQLGWKDKIIDLKKRINRTKGGNFATKEAKDRNIQLRHFLTMQLKYWQGKYDRFTMTEVPSGFSNRQGVDIGIIGRYAREYLATVFHEPNRNLIYTVKGATTAEFRKMWGLQDEYAKKERINHSHHCIDAIVIACIGKAQYDQWAVYKQKQEQTEWDNAARFTIEKPWETFTQDVKAISDELLVVHNTPDNTLKQSKKKLRKRGKVQKTASGKAIMQQGDTARASLHKQTFYGAIERNGEIKYVIRKRIDELDAKDIKNVVDESVRQIIEQQISDKGFAKAMAEPIWMNEEKGIQIKKVRMYVPSVTKPINLKPQRDLSIKDYKQFYHVSNDSNYCLAIYEGTTNKGKIKRSYKLVNNLDAVSAPKGESIVPSSDDNDYPLKWLLKVGQMVLLYEKTADEIYEANKRELVRRLYKVVGLSYLPVGTGYGSIVLRYHQEARPAGELKIQKGAWHAGEELRPSLFLYHTQFNALAQGQDFEISDDGEITFKRVKI

SEQ ID NO: 19003 - protein, 1220 aa, unidentified
  REGION 1..1220: note = Cas Enzyme sequence
MAKVLGLDLGTNSLGWALVDESENEYTLIDKGVDIFQEGVARDKNNEKPAVQDRTSARALRRHYFRRRLRKIELLKILIRYDLCPPLPEELLTAWQKEKRYPQDNEFLRWQRTDDNGDRNPYHDRYVALSERLDLGNRTQRWLLGRALYHLAQRRGFLSNRKEAGNEKEDGTVKECIKNLSAEIAAAGCRYLGEYFYGLYQHKERIRDKYTSRNEHYLAEFNAICDRQQLPDEWRKALHRAIFFQRDLKSQKGSVGRCTFEPTKSRCPVSHPRFEEFRMLSFVNNIRITGPGDNAPRPLTQEEFETIRSLFFRKSKPYFDFEEIARRIAGKGKYACKEERTEAPYRFNFARTATVSGCPVTASLQAIFGDDWITEIRSLYLLGAGKNEDQMLNDVWHALFSFNDEGRLRSWACEKLQLTDEQAKAFAAIKLPQDYAALSLNAIGKILVYLRCGYRYDEAVFLANLRAALPKEVYADESRRHEIEQDIASLLLDYKRNPYNKFDSKEHRIADYFSDHGLDASRLMRLYHPSKIETYPDAQPKANGILQLGSPRTATIRNPMAMRALFRLRNLINTLLREGRIDRDTKIRIEFARGLNDANRRKAIEQYQREREVENRKYAEEIHSQYAAETGREIKPSDDEVLKYRLWEEQQHVCPYTGRQIRISDFVGSAPDFDIEHTLPQARGGDDSQMNKTLCENRFNRETKRAKLPAELSNHVEIMERIESFGWREKMESLQKQIEAQVRRSKSAAIKSEKDDAIQRRHYLQMQLDYWRGKYERFTMAEIPEGFSNRQGVDIGIIGKYARLYLKTVFDRIYTVKGSTTAAFRKMWGLQEEYARKERTNHVHHCIDAITIACIGRREYDRWAQYVADEERYGYGESGKPRFEKPWPTFTEDVKAAADELLVAHHTPDNMTKQTRRKLRVRGRIKLNADGEPIYQQGDTARCRLHQDTFYGAIKQDGEIRYVIRKSLAQLQPTDIDKIIDDAVRDRVREAIDEVGFKTAMNPDEYTIWMNREKGIPIRKVRIFTPSVKHPIALKKQRDLSAKEYKRDYHVVNEGNYCTVIYEGQDKKGKTKRTFELVSNLEAAQYFKASADREARPDLVPQTDTNGFPLKYILKTGTMVLFYENSPAELYDCSHKELTKRLYKVTAMAAEGRVQFLFHQEARDQKTLTSLYGAGTSQFCQSNPSPKLRLSVSNFNMLVEGYDFELTVTGEIKFKDDRPC

SEQ ID NO: 19004 - protein, 1220 aa, unidentified
  REGION 1..1220: note = Cas Enzyme sequence
MAKVLGLDLGTNSLGWALVDESENEYTLIDKGVDIFQEGVARDKNNEKPAVQDRTSARALRRHYFRRRLRKIELLKILIRYDLCPPLPEELLTAWQKEKRYPQDNEFLRWQRTDDNGDRNPYHDRYVALSERLDLGNRTQRWLLGRALYHLAQRRGFLSNRKEAGNEKEDGTVKECIKNLSAEIAAAGCRYLGEYFYGLYQHKERIRDKYTSRNEHYLAEFNAICDRQQLPDEWRKALHRAIFFQRDLKSQKGSVGRCTFEPTKSRCPVSHPRFEEFRMLSFVNNIRITGPGDNAPRPLTQEEFETIRSLFFRKSKPYFDFEEIARRIAGKGKYACKEERTEAPYRFNFARTATVLGCPVTASLQAIFGDDWITEIRSLYLLGAGKNEDQMLNDVWHALFSFNDEGRLRSWACEKLQLTDEQAKAFAAIKLPQDYAALSLNAIGKILVYLRCGYRYDEAVFLANLRAALPKEVYADESRRHEIEQDIASLLLDYKRNPYNKFDSKEHRIADYFSDHGLDASRLIRLYHPSKIETYPDAQPKANGILQLGSPRTATIRNPMAMRALFRLRNLINTLLREGRIDRDTKIRIEFARGLNDANRRKAIEQYQREREVENRKYAEEIHSQYAAETGREIKPSDDEVLKYRLWEEQQHVCPYTGRQIRISDFVGSAPDFDIEHTLPQARGGDDSQMNKTLCENRFNRETKRAKLPAELSNHVEIMERIESFGWREKMESLQKQIEAQVRRSKSAAIKSEKDDAIQRRHYLQMQLDYWRGKYERFTMAEIPEGFSNRQGVDIGIIGKYARLYLKMVFDRIYTVKGSTTAAFRKMWGLQEEYARKERTNHVHHCIDAITIACIGRREYDRWAQYVADEERYGYGESGKPRFEKPWPTFTEDVKAAADELLVAHHTPDNMAKQTRRKLRVRGRIKLNADGEPIYQQGDTARCRLHQDTFYGAIKQDGEIRYVIRKSLAQLQPTDIDKIIDDAVRDRVREAIDEVGFKTAMNPDEYTIWMNREKGIPIRKVRIFTPSVKHPIALKKQRDLSAKEYKRDYHVVNEGNYCTVIYEGQDKKGKTKRTFELVSNLEAAQYFKASADREARPDLVPQTDTNGFPLKCILKTGTMVLFYENTPAELYECTRKELVKRLYKVTAMAAEGRVQFLFHQEARDQKTLTSLYGAGTSQFCQSNPSPKLRLSVSNFNMLVEGYDFELTVTGEIKFKDDRPC

SEQ ID NO: 19005 - protein, 1220 aa, unidentified
  REGION 1..1220: note = Cas Enzyme sequence
MAKVLGLDLGTNSLGWALVDESENEYTLIDKGVDIFQEGVARDKNNEKPAVQDRTSARALRRRYFRRRLRKIELLKILIRYDLCPPLPEELLTAWQKEKRYPQDNEFLRWQRTDDNGDRNPYHDRYVALSERLDLGNRTQRWLLGRALYHLAQRRGFLSNRKEAGNEKEDGTVKECIKNLSAEIAAAGCRYLGEYFYGLYQHKERIRDKYTSRNEHYLAEFNAICDRQQLPDEWRKALHRAIFFQRDLKSQKGSVGRCTFEPTKSRCPVSHPRFEEFRMLSFVNNIRITGPGDNAPRPLTQEEFETIRSLFFRKSKPYFDFEEIARRIAGKGKYACKEERTEAPYRFNFARTATVSGCPVTASLQAIFGDDWITEIRSLYLLGAGKNEDQMLNDVWHALFSFNDEGRLRSWACEKLQLTDEQAKAFAAIKLPQDYAALSLNAIGKILVYLRCGYRYDEAVFLANLRAALPKEVYADESRRHEIEQDIASLLLDYKRNPYNKFDSKEHRIADYFSDHGLDASRLMRLYHPSKIETYPDAQPKANGILRLGSPRTATIRNPMAMRALFRLRNLINTLLREGRIDRDTKIRIEFARGLNDANRRKAIEQYQREREVENRKYAEEIHSQYAAETGREIKPSDDEVLKYRLWEEQQHVCPYTGRQIRISDFVGSAPDFDIEHTLPQARGGDDSQMNKTLCENRFNRETKRAKLPAELSNHVEIMERIESFGWREKMESLQKQIEAQVRRSKSAAIKSEKDDAIQRRHYLQMQLDYWRGKYERFTMAEIPEGFSNRQGVDIGIIGKYARLYLKTVFDRIYTVKGSTTAAFRKMWGLQEEYARKERTNHVHHCIDAITIACIGRREYDRWAQYVADEERYGYGESGKPRFEKPWPTFTEDVKAAADELLVAHHTPDNMTKQTRRKLRVRGRIKLNADGEPIYQQGDTARCRLHQDTFYGAIKQDGEIRYVIRKSLAQLQPTDIDKIIDDAVRDRVREAIDEVGFKTAMNPDEYTIWMNREKGIPIRKVRIFTPSVKHPIALKKQRDLSAKEYKRDYHVVNEGNYCTVIYEGQDKKGKTKRTFELVSNLEAAQYFKASADREARPDLVPQTDTNGFPLKYILKTGTMVLFYENSPAELYDCSHKELTKRLYKVTAMAAEGRVQFLFHQEARDQKILTSLYGAGTSQFCQSNPSPKLRLSVSNFNMLVEGYDFELTVTGEIKFKDDRPC

SEQ ID NO: 19006 - protein, 1220 aa, unidentified
  REGION 1..1220: note = Cas Enzyme sequence
MAKVLGLDLGTNSLGWALVDESENEYTLIDKGVDIFQEGVARDKNNEKPAVQDRTSARALRRHYFRRRLRKIELLKILIRYDLCPPLPEELLTAWQKEKRYPQDNEFLRWQRTDDNGDRNPYHDRYVALSERLDLGNRTQRWLLGRALYHLAQRRGFLSNRKEAGNEKEDGTVKECIKNLSAEIAAAGCRYLGKYFYGLYQHKERIRDKYTSRNEHYLAEFNAICDRQQLPDEWRKALHRAIFFQRDLKSQKGSVGRCTFEPTKSRCPVSHPRFEEFRMLSFVNNIRITGPGDNAPRPLTQEEFETIRSLFFRKSKPYFDFEEIARRIAGKGKYACKEERTEAPYRFNFARTATVSGCPVTASLQAIFGDDWITEIRSLYLLGAGKNEDQMLNDVWHALFSFNDEGRLRSWACEKLQLTDEQAKAFAAIKLPQDYAALSLNAIGKILVYLRCGYRYDEAVFLANLRAALPKEVYADESRRHEIEQDIASLLLDYKRNPYNKFDSKEHRIADYFSDHGLDASRLIRLYHPSKIETYPDAQPKANGILQLGSPRTATIRNPMAMRALFRLRNLINTLLREGRIDRDTKIRIEFARGLNDANRRKAIEQYQREREVENRKYAEEIHSQYAAETGREIKPSDDEVLKYRLWEEQQHVCPYTGRQIRISDFVGSAPDFDIEHTLPQARGGDDSQMNKTLCENRFNRETKRAKLPAELSNHVEIMERIESFGWREKMESLQKQIEAQVRRSKSAAIKSEKDDAIQRRHYLQMQLDYWRGKYERFTMAEIPEGFSNRQGVDIGIIGKYARLYLKTVFDRIYTVKGSTTAAFRKMWGLQEEYARKERTNHVHHCIDAITIACIGRREYDRWAQYVADEERYGYGESGKPRFEKPWPTFTEDVKAAADELLVAHHTPDNMTKQTRRKLRVRGRIKLNADGEPIYQQGDTARCRLHQDTFYGAIKQDGEIRYVIRKSLAQLQPTDIDKIIDDAVRDRVREAIDEVGFKTAMNPDEYTIWMNREKGIPIRKVRIFTPSVKHPIALKKQRDLSAKEYKRDYHVVNEGNYCTVIYEGQDKKGKTKRTFELVSNLEAAQYFKASADREARPDLVPQTDTNGFPLKYILKTGTMVLFYENTPAELYECTRKELVKRLYKVTAMAAEGRVQFLFHQEARDQKTLTSLYGAGTSQFCQSNPSPKLRLSVSNFNMLVEGYDFELTVTGEIKFKDDRPC

SEQ ID NO: 19007 - protein, 1171 aa, unidentified
  REGION 1..1171: note = Cas Enzyme sequence
TREKRPPGPPRRHYFRRRLRKIELLKILIRYDLCPPLPEELLTAWQKEKRYPQDNEFLRWQRTDDNGDRNPYHDRYVALSERLDLGNRTQRWLLGRALYHLAQRRGFLSNRKEAGNEKEDGTVKECIKNLSAEIAAAGCRYLGEYFYGLYQHKERIRDKYTSRNEHYLAEFNAICDRQQLPDEWRKALHRAIFFQRDLKSQKGSVGRCTFEPTKSRCPVSHPRFEEFRMLSFVNNIRITGPGDNAPRPLTQEEFETIRSLFFRKSKPYFDFEEIARRIAGKGKYACKEERTEAPYRFNFARTATVSGCPVTASLQAIFGDDWITEIRSLYLLGAGKNEDQMLNDVWHALFSFNDEGRLRSWACEKLQLTDEQAKAFAAIKLPQDYAALSLNAIGKILVYLRCGYRYDEAVFLANLRAALPKEVYADESRRHEIEQDIASLLLDYKRNPYNKFDSKEHRIADYFSDHGLDASRLIRLYHPSKIETYPDAQPKANGILQLGSPRTATIRNPMAMRALFRLRNLINTLLREGRIDRDTKIRIEFARGLNDANRRKAIEQYQREREVENRKYAEEIHSQYAAETGREIKPSDDEVLKYRLWEEQQHVCPYTGRQIRISDFVGSAPDFDIEHTLPQARGGDDSQMNKTLCENRFNRETKRAKLPAELSNHVEIMERIESFGWREKMESLQKQIEAQVRRSKSAAIKSEKDDAIQRRHYLQMQLDYWRGKYERFTMAEIPEGFSNRQGVDIGIIGKYARLYLKTVFDRIYTVKGSTTAAFRKMWGLQEEYARKERTNHVHHCIDAITIACIGRREYDRWAQYVADEERYGYGESGKPRFEKPWPTFTEDVKAAADELLVAHHTPDNMAKQTRKKLRVRGRIKLNADGEPIYQQGDTARCRLHQDTFYGAIKQDGEIRYVIRKSLAQLQPTDIDKIIDDAVRDRVREAIDEVGFKTAMNPDEYTIWMNREKGIPIRKVRIFVRKTTLIPLGNKQHRDRSDKEYKRKYLVANEGNYCMAVYEGKDKKGRTDHSFEIISNLQAAEYFKRSTDRNERHDLAPVADTNGYPLKYLLKTGSMVLFYENTPAELYECTRKELVKRLYKVTAMAAEGRVQFLFHQEARDQKTLTSLYGAGTSQFCQSNPSPKLRLSVSNFNMLVEGYDFELTVTGEIKFKDDRPC

SEQ ID NO: 19008 - protein, 1220 aa, unidentified
  REGION 1..1220: note = Cas Enzyme sequence
MAKVLGLDLGTNSLGWALVDESENEYTLIDKGVDIFQEGVARDKNNEKPAVQDRTSARALRRHYFRRRLRKIELLKILIRYDLCPPLPEELLTAWQKEKRYPQDNEFLRWQRTDDNGDRNPYHDRYVALSERLDLGNRTQRWLLGRALYHLAQRRGFLSNRKEAGNEKEDGTVKECIKNLSAEIAAAGCRYLGEYFYGLYQHKERIRDKYTSRNEHYLAEFNAICDRQQLPDEWRKALHRAIFFQRDLKSQKGSVGRCTFEPTKSRCPVSHPRFEEFRMLSFVNNIRITGPGDNAPRPLTQEEFETIRSLFFRKSKPYFDFEEIARRIAGKGKYACKEERTEAPYRFNFARTATVSGCPVTASLQAIFGDDWITEIRSLYLLGAGKNEDQMLNDVWHALFSFNDEGRLRSWACEKLQLTDEQAKAFAAIKLPQDYAALSLNAIGKILVYLRCGYRYDEAVFLANLRAALPKEVYADESRRHEIEQDIVSLLLDYKRNPYNKFDSKEHRIADYFSDHGLDASRLMRLYHPSKIETYPDAQPKANGILQLGSPRTATIRNPMAMRALFRLRNLINTLLREGRIDRDTKIRIEFARGLNDANRRKAIEQYQREREVENRKYAEEIHSQYAAETGREIKPSDDEVLKYRLWEEQQHVCPYTGRQIRISDFVGSAPDFDIEHTLPQARGGDDSQMNKTLCENRFNRETKRAKLPAELSNHVEIMERIESFGWREKMESLQKQIEAQVRRSKSAAIKSEKDDAIQRRHYLQMQLDYWRGKYERFTMAEIPEGFSNRQGVDIGIIGKYARLYLKTVFDRIYTVKGSTTTAFRKMWGLQEEYARKERTNHVHHCIDAITIACIGRREYDRWAQYVADEERYGYGESGKPRFEKPWPTFTEDVKAAADELLVAHHTPDNMAKQTRKKLRVRGRIKLNADGEPIYQQGDTARCRLHQDTFYGAIKQDGEIRYVIRKSLAQLQPTDIDKIIDDAVRDRVREAIDEVGFKTAMNPDEYTIWMNREKGIPIRKVRIFTPSVKHPIALKKQRDLSAKEYKRDYHVVNEGNYCTVIYEGQDKKGKTKRTFELVSNLEAAQYFKASADREARPDLVPQTDTNGFPLKYILKTGTMVLFYENTPAELYECTRKELVKRLYKVTAMAAEGRVQFLFHQEARDQKTLTSLYGAGTSQFCQSNPSPKLRLSVSNFNMLVEGYDFELTVTGEIKFKDDRPC

SEQ ID NO: 19009 - protein, 1221 aa, unidentified
  REGION 1..1221: note = Cas Enzyme sequence
MAKVLGLDLGTNSLGWALVDESENEYTLIDKGVDIFQEGVARDKNNEKPAVQDRTSARALRRHYFRRRLRKIELLKILIRYDLCPPLPEELLTAWQKEKRYPQDNEFLRWQRTDDNGDRNPYHDRYVALSERLDLGNRTQRWLLGRALYHLAQRRGFLSNRKEAGNEKEDGTVKECIKNLSAEIAAAGCRYLGEYFYGLYQHKERIRDKYTSRNEHYLAEFNAICDRQQLPDEWRKALHRAIFFQRDLKSQKGSVGRCTFEPTKSRCPVSHPRFEEFRMLSFVNNIRITGPGDNAPRPLTQEEFETIRSLFFRKSKPYFDFEEIARRIAGKGKYACKEERTEAPYRFNFARTATVSGCPVTASLQAIFGDDWITEIRSLYLLGAGKNEDQMLNDVWHALFSFNDEGRLRSWACEKLQLTDEQAKAFAAIKLPQDYAALSLNAIGKILVYLRCGYRYDEAVFLANLRAALPKEVYADESRRHEIEQDIASLLLDYKRNPYNKFDSKEHRIADYFSDHGLDASRLIRLYHPSKIETYPDAQPKANGILQLGSPRTATIRNPMAMRALFRLRNLINTLLREGRIDRDTKIRIEFARGLNDANRRKAIEQYQREREVENRKYAEEIHSQYAAETGREIKPSDDEVLKYRLWEEQQHVCPYTGRQIRISDFVGSAPDFDIEHTLPQARGGDDSQMNKTLCENRFNRETKRAKLPAELSNHVEIMERIESFGWREKMESLQKQIEAQVRRSKSAAIKSEKDDAIQRRHYLQMQLDYWRGKYERFTMAEIPEGFSNRQGVDIGIIGKYARLYLKTVFDRIYTVKGSTTAAFRKMWGLQEEYARKERTNHVHHCIDAITIACIGRREYDRWAQYVADEERYGYGESGKPRFEKPWPTFTEDVKAAADELLVAHHTPDNMAKQTRKKLRVRGRIKLNADGEPIYQQGDTARCRLHQDTFYGAIKQDGEIRYVIRKSLAQLQPTDIDKIIDDAVRDRVREAIDEVGFKTAMNPDEYTIWMNREKGIPIRKVRIFVRKTTLIPLGNKQHRDRSDKEYKRKYLVANEGNYCMAVYEGKDKKGRTDHSFEIISNLQAAEYFKRSTDRNERHDLAPVADTNGYPLKYLLKTGSMVLFYENTPAELYECTRKELVKRLYKVTAMAAEGRVQFLFHQEARDQKTLTSLYGAGTSQFCQSNPSPKLRLSVSNFNMLVEGYDFELTVTGEIKFKDDRPC

SEQ ID NO: 19010 - protein, 1220 aa, unidentified
  REGION 1..1220: note = Cas Enzyme sequence
MAKVLGLDLGTNSLGWALVDESENEYTLIDKGVDIFQEGVARDKNNEKPAVQDRTSARALRRHYFRRRLRKIELLKILIRYDLCPPLPEELLTAWQKEKRYPQDNEFLRWQRTDDNGDRNPYHDRYVALSERLDLGNRTQRWLLGRALYHLAQRRGFLSNRKEAGNEKEDGTVKECIKNLSAEIAAAGCRYLGEYFYGLYQHKERIRDKYTSRNEHYLAEFNAICDRQQLPDEWRKALHRAIFFQRDLKSQKGSVGRCTFEPTKSRGPVSHPRFEEFRMLSFVNNIRITGPGDNAPRPLTQEEFETIRSLFFRKSKPYFDFEEIARKIAGKGKYACKEERTEAPYRFNFARTATVSGCPVTASLQAIFGDDWITEIRSLYLLGAGKNEDQMLNDVWHALFSFNDEGRLRSWACEKLQLTDEQAKAFAAIKLPQDYAALSLNAIGKILVYLRCGYRYDEAVFLANLRAALPKEVYADESRRHEIEQDIASLLLDYKRNPYNKFDSKEHRIADYFSDHGLDASRLIRLYHPSKIETYPDAQPKANGILQLGSPRTATIRNPMAMRALFRLRNLINTLLREGRIDRDTKIRIEFARGLNDANRRKAIEQYQREREVENRKYAEEIHSQYAAETGREIKPSDDEVLKYRLWEEQQHVCPYTGRQIRISDFVGSAPDFDIEHTLPQARGGDDSQMNKTLCENRFNRETKRAKLPAELSNHVEIMERIESFGWREKMESLQKQIEAQVRRSKSAAIKSEKDDAIQRRHYLQMQLDYWRGKYERFTMAEIPEGFSNRQGVDIGIIGKYARLYLKTVFDRIYTVKGSTTAAFRKMWGLQEEYARKERTNHVHHCIDAITIACIGRREYDRWAQYVADEERYGYGESGKPRFEKPWPTFTEDVKAAADELLVAHHTPDNMTKQTRRKLRVRGRIKLNADGEPIYQQGDTARCRLHQDTFYGAIKQDGEIRYVIRKSLAQLQPTDIDKIIDDAVRDRVREAIDEVGFKTAMNPDEYTIWMNREKGIPIRKVRIFTPSVKHPIALKKQRDLSAKEYKRDYHVVNEGNYCTVIYEGQDKKGKTKRTFELVSNLEAAQYFKASADREARPDLVPQTDTNGFPLKCILKTGTMVLFYENSPAELYECTRKELVKRLYKVTAMAAEGRVQFLFHQEARDQKTLTSLYGAGTSQFCQSNPSPKLRLSVSNFNMLVEGYDFELTVTGEIKFKDDRPC

SEQ ID NO: 19011 - protein, 994 aa, unidentified
  REGION 1..994: note = Cas Enzyme sequence
RQQLPDEWRKALHRAIFFQRDLKSQKGSVGRCTFEPTKSRGPVSHPRFEEFRMLSFVNNIRITGPGDNAPRPLTQEEFETIRSLFFRKSKPYFDFEEIARRIAGKGKYACKEERTEAPYRFNFARTATVSGCPVTASLQAIFGDDWITEIRSLYLLGAGKNEDQMLNDVWHALFSFNDEGRLRSWACEKLQLTDEQAKAFAAIKLPQDYAALSLNAIGKILVYLRCGYRYDEAVFLANLRAALPKEVYADESRRHEIEQDIASLLLDYKRNPYNKFDSKEHRIADYFSDHGLDASRLMRLYHPSKIETYPDAQPKANGILQLGSPRTAAIRNPMAMRALFRLRNLINTLLREGRIDRDTKIRIEFARGLNDANRRKAIEQYQREREVENRKYAEEIHSQYAAETGREIKPSDDEVLKYRLWEEQQHVCPYTGRQIRISDFVGSAPDFDIEHTLPQARGGDDSQMNKTLCENRFNRETKRAKLPAELSNHVEIMERIESFGWREKMESLQKQIEAQVRRSKSAAIKSEKDDAIQRRHYLQMQLDYWRGKYERFTMAEIPEGFSNRQGVDIGIIGKYARLYLKTVFDRIYTVKGSTTAAFRKMWGLQEEYARKERTNHVHHCIDAITIACIGRREYDRWAQYVADEERYGYGESGKPRFEKPWPTFTEDVKAAADELLVAHHTPDNMAKQTRRKLRVRGRIKLNADGEPIYQQGDTARCRLHQDTFYGAIKQDGEIRYVIRKSLAQLQPTDIDKIIDDAVRDRVREAIDEVGFKTAMNPDEYTIWMNREKGIPIRKVRIFTPSVKHPIALKKQRDLSAKEYKRDYHVVNEGNYCTVIYEGQDKKGKTKRTFELVSNLEAAQYFKASADREARPDLVPQTDTNGFPLKYILKTGTMVLFYENTPAELYECTRKELVKRLYKVTAMAAEGRVQFLFHQEARDQKTLTSLYGAGTSQFCQSNPSPKLRLSVSNFNMLVEGYDFELTVTGEIKFKDDRPC

SEQ ID NO: 19012 - protein, 1220 aa, unidentified
  REGION 1..1220: note = Cas Enzyme sequence
MAKVLGLDLGTNSLGWALVDESENEYTLIDKGVDIFQEGVARDKNNEKPAVQDRTSARALRRHYFRRRLRKIELLKILIRYDLCPPLPEELLTAWQKEKRYPQDNEFLRWQRTDDNGDRNPYHDRYVALSERLDLGNRTQRWLLGRALYHLAQRRGFLSNRKEAGNEKEDGTVKECIKNLSAEIAAAGCRYLGEYFYGLYQHKERIRDKYTSRNEHYLAEFNAICDRQQLPDEWRKALHRAIFFQRDLKSQKGSVGRCTFEPTKSRCPVSHPRFEEFRMLSFVNNIRITGPGDNAPRPLTQEEFETIRSLFFRKSKPYFDFEEIARRIAGKGKYACKEERTEAPYRFNFARTATVSGCPVTASLQAIFGDDWITEIRSLYLLGAGKNEDQMLNDVWHALFSFNDEGRLRSWACEKLQLTDEQAKAFAAIKLPQDYAALSLNAIGKILVYLRCGYRYDEAVFLANLRAALPKEVYADESRRHEIEQDIVSLLLDYKRNPYNKFDSKEHRIADYFSDHGLDASRLMRLYHPSKIETYPDAQPKANGILQLGSPRTATIRNPMAMRALFRLRNLINTLLREGRIDRDTKIRIEFARGLNDANRRKAIEQYQREREVENRKYAEEIHSQYAAETGREIKPSDDEVLKYRLWEEQQHVCPYTGRQIRISDFVGSAPDFDIEHTLPQARGGDDSQMNKTLCENRFNRETKRAKLPAELSNHVEIMERIESFGWREKMESLQKQIEAQVRRSKSAAIKSEKDDAIQRRHYLQMQLDYWRGKYERFTMAEIPEGFSNRQGVDIGIIGKYARLYLKTVFDRIYTVKGSTTAAFRKMWGLQEEYARKERTNHVHHCIDAITIACIGRREYDRWAQYVADEERYGYGESGKPRFEKPWPTFTEDVKAAADELLVAHHTPDNMTKQTRRKLRVRGRIKLNADGEPIYQQGDTARCRLHQDTFYGAIKQDGEIRYVIRKSLAQLQPTDIDKIIDDAVRDRVREAIDEVGFKTAMNPDEYTIWMNREKGIPIRKVRIFTPSVKHPIALKKQRDLSAKEYKRDYHVVNEGNYCTVIYEGQDKKGKTKRTFELVSNLEAAQYFKASADREARPDLVPQTDTNGFPLKYILKTGTMVLFYENSPAELYDCSHKELTKRLYKVTAMAAEGRVQFLFHQEARDQKTLTSLYGAGTSQFCQSNPSPKLRLSVSNFNMLVEGYDFELTVTGEIKFKDDRPC

SEQ ID NO: 19013 - protein, 1220 aa, unidentified
  REGION 1..1220: note = Cas Enzyme sequence
MAKVLGLDLGTNSLGWALVDESENEYTLIDKGVDIFQEGVARDKNNEKPAVQDRTSARALRRHYFRRRLRKIELLKILIRYDLCPPLPEELLTAWQKEKRYPQDNEFLRWQRTDDNGDRNPYHDRYVALSERLDLGNRTQRWLLGRALYHLAQRRGFLSNRKEAGNEKEDGTVKECIKNLSAEIAAAGCRYLGEYFYGLYQHKERIRDKYTSRNEHYLAEFNAICDRQQLPDEWRKALHRAIFFQRDLKSQKGSVGRCTFEPTKSRCPVSHPRFEEFRMLSFVNNIRITGPGDNAPRPLTQEEFETIRSLFFRKSKPYFDFEEIARRIAGKGKYACKEERTEAPYRFNFARTATVSGCPVTASLQAIFGDDWITEIRSLYLLGAGKNEDQMLNDVWHALFSFNDEGRLRSWACEKLQLTDEQAKAFAAIKLPQDYAALSLNAIGKILVYLRCGYRYDEAVFLANLRAALPKEVYADESRRHEIEQDIASLLLDYKRNPYNKFDSKEHRIADYFSDHGLDASRLIRLYHPSKIETYPDAQPKANGILQLGSPRTATIRNPMAMRALFRLRNLINTLLREGRIDRDTKIRIEFARRLNDANRRKAIEQYQREREVENRKYAEEIHSQYAAETGREIKPSDDEVLKYRLWEEQQHVCPYTGRQIRISDFVGSAPDFDIEHTLPQARGGDDSQMNKTLCENRFNRETKRAKLPAELSNHVEIMERIESFGWREKMESLQKQIEAQVRRSKSAAIKSEKDDAIQRRHYLQMQLDYWRGKYERFTMAEIPEGFSNRQGVDIGIIGKYARLYLKTVFDRIYTVKGSTTAAFRKMWGLQEEYARKERTNHVHHCIDAITIACIGRREYDRWAQYVADEERYGYGESGKPRFEKPWPTFTEDVKAAADELLVAHHTPDNMTKQTRRKLRVRGRIKLNADGEPIYQQGDTARCRLHQDTFYGAIKQDGEIRYVIRKSLTQLQPTDIDKIIDDAVRDRVREAIDEVGFKTAMNPDEYTIWMNREKGIPIRKVRIFTPSVKHPIALKKQRDLSAKEYKRDYHVVNEGNYCTVIYEGQDKKGKTKRTFELVSNLEAAQYFKASADREARPDLVPQTDTNGFPLKCILKTGTMVLFYENSPAELYDCSHKELTKRLYKVTAMAAEGRVQFLFHQEARDQKTLTSLYGAGTSQFCQSNPSPKLRLSVSNFNMLVEGYDFELTVTGEIKFKDDRPC

SEQ ID NO: 19014 - protein, 1220 aa, unidentified
  REGION 1..1220: note = Cas Enzyme sequence
MAKVLGLDLGTNSLGWALVDESENEYTLIDKGVDIFQEGVARDKNNEKPAVQDRTSARALRRHYFRRRLRKIELLKILIRYDLCPPLPEELLTAWQKEKRYPQDNEFLRWQRTDDNGDRNPYHDRYVALSERLDLGNRTQRWLLGRALYHLAQRRGFLSNRKEAGNEKEDGTVKECIKNLSAEIAAAGCRYLGEYFYGLYQHKKRIRDKYTSRNEHYLAEFNAICDRQQLPDEWRKALHRAIFFQRDLKSQKGSVGRCTFEPTKSRCPVSHPRFEEFRMLSFVNNIRITGPGDNAPRPLTQEEFETIRSLFFRKSKPYFDFEEIARRIAGKGKYACKEERTEAPYRFNFARTATVSGCPVTASLQAIFGDDWITEIRSLYLLGAGKNEDQMLNDVWHALFSFNDEGRLRSWACEKLQLTDEQAKAFAAIKLPQDYAALSLNAIGKILVYLRCGYRYDEAVFLANLRAALPKEVYADESRRHEIEQDIASLLLDYKRNPYNKFDSKEHRIADYFSDHGLDASRLMRLYHPSKIETYPDAQPKANGILQLGSPRTATIRNPMAMRALFRLRNLINTLLREGRIDRDTKIRIEFARGLNDANRRKAIEQYQREREVENRKYAEEIHSQYAAETGREIKPSDDEVLKYRLWEEQQHVCPYTGRQIRISDFVGSAPDFDIEHTLPQARGGDDSQMNKTLCENRFNRETKRAKLPAELSNHVEIMERIESFGWREKMESLQKQIEAQVRRSKSAAIKSEKDDAIQRRHYLQMQLDYWRGKYERFTMAEIPEGFSNRQGVDIGIIGKYARLYLKTVFDRIYTVKGSTTAAFRKMWGLQEEYARKERTNHVHHCIDAITIACIGRREYDRWAQYVADEERYGYGESGKPRFEKPWPTFTEDVKAAADELLVAHHTPDNMTKQTRRKLRVRGRIKLNADGEPIYQQGDTARCRLHQDTFYGAIKQDGEIRYVIRKSLAQLQPTDIDKIIDDAVRDRVREAIDEVGFKTAMNPDEYTIWMNREKGIPIRKVRIFTPSVKHPIALKKQRDLSAKEYKRDYHVVNEGNYCTVIYEGQDKKGKTKRTFELVSNLEAAQYFKASADREARPDLVPQTDTNGFPLKYILKTGTMVLFYENTPAELYECTRKELVKRLYKVTAMAAEGRVQFLFHQEARDQKTLTSLYGAGTSQFCQSNPSPKLRLSVSNFNMLVEGYDFELTVTGEIKFKDDRPC

SEQ ID NO: 19015 - protein, 936 aa, unidentified
  REGION 1..936: note = Cas Enzyme sequence
NIRITGPGDNAPRPLTQEEFETIRSLFFRKSKPYFDFEEIARRIAGKGKYACKEERTEAPYRFNFARTATVSGCPVTASLQAIFGDDWITEIRSLYLLGAGKNEDQMLNDVWHALFSFNDEGRLRSWACEKLQLTDEQAKAFAAIKLPQDYAALSLNAIGKILVYLRCGYRYDEAVFLANLRAALPKEVYADESRRHEIEQDIASLLLDYKRNPYNKFDSKEHRIADYFSDHGLDASRLIRLYHPSKIETYPDAQPKANGILQLGSPRTATIRNPMAMRALFRLRSLINTLLREGRIDRDTKIRIEFARGLNDANRRKAIEQYQREREVENRKYAEEIHSQYAAETGREIKPSDDEVLKYRLWEEQQHVCPYTGRQIRISDFVGSAPDFDIEHTLPQARGGDDSQMNKTLCENRFNRETKRAKLPAELSNHVEIMERIESFGWREKMESLQKQIEAQVRRSKSAAIKSEKDDAIQRRHYLQMQLDYWRGKYERFTMAEIPEGFSNRQGVDIGIIGKYARLYLKTVFDRIYTVKGSTTAAFRKMWGLQEEYARKERTNHVHHCIDAITIACIGRREYDRWAQYVADEERYGYGESGKPRFEKPWPTFTEDVKAAADELLVAHHTPDNMTKQTRRKLRVRGRIKLNADGEPIYQQGDTARCRLHQDTFYGAIKQDGEIRYVIRKSLAQLQPTDIDKIIDDAVRDRVREAIDEVGFKTAMNPDEYTIWMNREKGIPIRKVRIFTPSVKHPIALKKQRDLSAKEYKRDYHVVNEGNYCTVIYEGQDKKGKTKRTFELVSNLEAAQYFKASADREARPDLVPQTDTNGFPLKYILKTGTMVLFYENTPAELYECTRKELVKRLYKVTAMAAEGRVQFLFHQEARDQKTLTSLYGAGTSQFCQSNPSPKLRLSVSNFNMLVEGYDFELTVTGEIKFKDDRPC

SEQ ID NO: 19016 - protein, 1221 aa, unidentified; identical to SEQ ID NO: 19009
  REGION 1..1221: note = Cas Enzyme sequence

SEQ ID NO: 19017 - protein, 1220 aa, unidentified
  REGION 1..1220: note = Cas Enzyme sequence
MAKVLGLDLGTNSLGWALVDESENEYTLIDKGVDIFQEGVARDKNNEKPAVQDRTSARALRRHYFRRRLRKIELLKILIRYDLCPPLPEELLTAWQKEKRYPQDNEFLRWQRTDDNGDRNPYHDRYVALSERLDLGNRTQRWLLGRALYHLAQRRGFLSNRKEAGNEKEDGTVKECIKNLSAEIAAAGCRHLGEYFYGLYQHKERIRDKYTSRNEHYLAEFNAICDRQQLPDEWRKALHRAIFFQRDLKSQKGSVGRCTFEPTKSRCPVSHPRFEEFRMLSFVNNIRITGPGDNAPRPLTQEEFETIRSLFFRKSKPYFDFEEIARRIAGKGKYACKEERTEAPYRFNFARTATVSGCPVTASLQAIFGDDWITEIRSLYLLGAGKNEDQMLNDVWHALFSFNDEGRLRSWACEKLQLTDEQAKAFAAIKLPQDYAALSLNAIGKILVYLRCGYRYDEAVFLANLRAALPKEVYADESRRHEIEQDIASLLLDYKRNPYNKFDSKEHRIADYFSDHGLDASRLIRLYHPSKIETYPDAQPKANGILQLGSPRTATIRNPMAMRALFRLRNLINTLLREGRIDRDTKIRIEFARGLNDANRRKAIEQYQREREVENRKYAEEIHSQYAAETGREIKPSDDEVLKYRLWEEQQHVCPYTGRQIRISDFVGSAPDFDIEHTLPQARGGDDSQMNKTLCENRFNRETKRAKLPAELSNHVEIMERIESFGWREKMESLQKQIEAQVRRSKSAAIKSEKDDAIQRRHYLQMQLDYWRGKYERFTMAEIPEGFSNRQGVDIGIIGKYARLYLKTVFDRIYTVKGSTTAAFRKMWGLQEEYARKERTNHVHHCIDAITIACIGRREYDRWAQYVADEERYGYGESGKPRFEKPWPTFTEDVKAAADELLVAHHTPDNMTKQTRRKLRVRGRIKLNADGEPIYQQGDTARCRLHQDTFYGAIKQDGEIRYVIRKSLAQLQPTDIDKIIDDAVRDRVREAIDEVGFKTAMNPDEYTIWMNREKGIPIRKVRIFTPSVKHPIALKKQRDLSAKEYKRDYHVVNEGNYCTVIYEGQDKKGKTKRTFELVSNLEAAQYFKASADREARPDLVPQTDTNGFPLKYILKTGTMVLFYENTPAELYECTRKELVKRLYKVTAMAAEGRVQFLFHQEARDQKTLTSLYGAGTSQFCQSNPSPKLRLSVSNFNMLVEGYDFELTVTGEIKFKDDRPC

SEQ ID NO: 19018 - protein, 1220 aa, unidentified
  REGION 1..1220: note = Cas Enzyme sequence
MAKVLGLDLGTNSLGWALVDESENEYTLIDKGVDIFQEGVARDKNNEKPAVQDRTSARALRRHYFRRRLRKIELLKILIRYDLCPPLPEELLTAWQKEKRYPQDNEFLRWQRTDDNGDRNPYHDRYVALSERLDLGNRTQRWLLGRALYHLAQRRGFLSNRKEAGNEKEDGTVKECIKNLSAEIAAAGCRYLGEYFYGLYQHKERIRDKYTSRNEHYLAEFNAICDRQQLPDEWRKALHRAIFFQRDLKSQKGSVGRCTFEPTKSRCPVSHPRFEEFRMLSFVNNIRITGPGDNAPRPLTQEEFETIRSLFFRKSKPYFDFEEIARRIAGKGKYACKEERTEAPYRFNFARTATVSGCPVTASLQAIFGDDWITEIRSLYLLGAGKNEDQMLNDVWHALFSFNDEGRLRSWACEKLQLTDEQAKAFAAIKLPQDYAALSLNAIGKILVYLRCGYRYDEAVFLANLRAALPKEVYADESRRHEIEQDIASLLLDYKRNPYNKFDSKEHRIADYFSDHGLDASRLIRLYHPSKIETYPDAQPKANGILQLGSPRTATIRNPMAMRALFRLRNLINTLLREGRIDRDTKIRIEFARGLNDANRRKAIEQYQREREVENRKYAEEIHSQYAAETGREIKPSDDEVLKYRLWEEQQHVCPYTGRQIRISDFVGSAPDFDIEHTLPQARGGDDSQMNKTLCENRFNRETKRAKLPAELSNHVEIMERIESFGWREKMESLQKQIEAQVRRSKSAAIKSEKDDAIQRRHYLQMQLDYWRGKYERFTMAEIPEGFSNRQGVDIGIIGKYARLYLKTVFDRIYTVKGSTTAAFRKMWGLQEEYARKERTNHVHHCIDAITIACIGRREYDRWAQYVADEERYGYGESGKPRFEKPWPTFTEDVKAAADELLVAHHTPDNMAKQTRKKLRVRGRIKLNADGEPIYQQGDTARCRLHQDTFYGAIKQDGEIRYVIRKSLAQLQPTDIDKIIDDAVRDRVREAIDEVGFKTAMNPDEYTIWMNREKGIPIRKVRIFTPSVKHPIALKKQRDLSAKEYKRDYHVVNEGNYCTVIYEGQDKKGKTKRTFELVSNLEAAQYFKASADREARPDLVPQTDTNGFPLKYILKTGTMVLFYENTPAELYECTRKELVKRLYKVTAMAAEGRVQFLFHQEARDQKTLTSLYGAGTSQFCQSNPSPKLRLSVSNFNMLVEGYDFELTVTGEIKFKDDRPC

SEQ ID NO: 19019 - protein, 1220 aa, unidentified
  REGION 1..1220: note = Cas Enzyme sequence
MAKVLGLDLGTNSLGWALVDESENEYTLIDKGVDIFQEGVARDKNNEKPAVQDRTSARALRRHYFRRRLRKIELLKILIRYDLCPPLPEELLTAWQKEKRYPQDNEFLRWQRTDDNGDRNPYHDRYVALSERLDLGNRTQRWLLGRALYHLAQRRGFLSNRKEAGNEKEDGTVKECIKNLSAEIAAAGCRYLGEYFYGLYQHKERIRDKYTSRNEHYLAEFNAICDRQQLPDEWRKALHRAIFFQRDLKSQKGSVGRCTFEPTKSRCPVSHPRFEEFRMLSFVNNIRITGPGDNAPRPLTQEEFETIRSLFFRKSKPYFDFEEIARRIAGKGKYACKEERTEAPYRFNFARTATVSGCPVTASLQAIFGDDWITEIRSLYLLGAGKNEDQMLNDVWHALFSFNDEGRLRSWACEKLQLTDEQAKAFAAIKLPQDYAALSLNAIGKILVYLRCGYRYDEAVFLANLRAALPKEVYADESRRHEIEQDIASLLLDYKRNPYNKFDSKEHRIADYFSDHGLDASRLMRLYHPSKIETYPDAQPKANGILQLGSPRTATIRNPMAMRALFRLRNLINTLLREGRIDRDTKIRIEFARGLNDANRRKAIEQYQREREVENRKYAEEIHSQYAAETGREIKPSDDEVLKYRLWEEQQHVCPYTGRQIRISDFVGSAPDFDIEHTLPQARGGDDSQMNKTLCENRFNRETKRAKLPAELSNHVEIMERIESFGWREKMESLQKQIEAQVRRSKSAAIKSEKDDAIQRRHYLQMQLDYWRGKYERFTMAEIPEGFSNRQGVDIGIIGKYARLYLKTVFDRIYTVKGSTTAAFRKMWGLQEEYARKERTNHVHHCIDAITIACIGRREYDRWAQYVADEERYGYGESGKPRFEKPWPTFTEDVKAAADELLVAHHTPDNMTKQTRRKLRVRGRIKLNADGEPIYQQGDTARCRLHQDTFYGAIKQDGEIRYVIRKSLAQLQPTDIDKIIDDAVRDRVREAIDEVGFKTAMNPDEYTIWMNREKGIPIRKVRIFTPSVKHPIALKKQRDLSAKEYKRDYHVVNEGNYCTVIYEGQDKKGKTKRTFELVSNLEAAQYFKASADREARPDLVPQTDTNGFPLKYILKTGTMVLFYENTPAELYECTRKELVKRLYKVTAMAAEGRVQFLFHQEARDQKTLTSLYGAGTSQFCQSNPSPKLRLSVSNFNMLVEGYDFELTVTGEIKFKDDRPC

SEQ ID NO: 19020 - protein, 1220 aa, unidentified
  REGION 1..1220: note = Cas Enzyme sequence
MAKVLGLDLGTNSLGWALVDESENEYTLIDKGVDIFQEGVARDKNNEKPAVQDRTSARALRRHYFRRRLRKIELLKILIRYDLCPPLPEELLTAWQKEKRYPQDNEFLRWQRTDDNGDRNPYHDRYVALSERLDLGNRTQRWLLGRALYHLAQRRGFLSNRKEAGNEKEDGTVKECIKNLSAEIAAAGCRYLGEYFYGLYQHKERIRDKYTSRNEHYLAEFNAICDRQQLPDEWRKALHRAIFFQRDLKSQKGSVGRCTFEPTKSRCPVSHPRFEEFRMLSFVNNIRITGPGDNAPRPLTQEEFETIRSLFFRKSKPYFDFEEIARRIAGKGKYACKEERTEAPYRFNFARTATVSGCPVTASLQAIFGDDWITEIRSLYLLGAGKNEDQMLNDVWHALFSFNDEGRLRSWACEKLQLTDEQAKAFAAIKLPQDYAALSLNAIGKILVYLRCGYRYDEAVFLANLRAALPKEVYADESRRHEIEQDIASLLLDYKRNPYNKFDSKEHRIADYFSDHGLDASRLIRLYHPSKIETYPDAQPKANGILQLGSPRTATIRNPMAMRALFRLRNLINTLLREGRIDRDTKIRIEFARGLNDANRRKAIEQYQREREVENRKYAEEIHSQYAAETGREIKPSDDEVLKYRLWEEQQHVCPYTGRQIRISDFVGSAPDFDIEHTLPQARGGDDSQMNKTLCENRFNRETKRAKLPAELSNHVEIMERIESFGWREKMESLQKQIEAQVRRSKSAAIKSEKDDAIQRRHYLQMQLDYWRGKYERFTMAEIPEGFSNRQGVDIGIIGKYARLYLKTVFDRIYTVKGSTTAAFRKMWGLQEEYARKERTNHVHHCIDAITIACIGRREYDRWAQYVADEERYGYGESGKPRFEKPWPTFTEDVKAAADELLVAHHTPDNMAKQTRRKLRVRGRIKLNADGEPIYQQGDTARCRLHQDTFYGAIKQDGEIRYVIRKSLAQLQPTDIDKIIDDAVRDRVREAIDEVGFKTAMNPDEYTIWMNREKGIPIRKVRIFTPSVKHPIALKKQRDLSAKEYKRDYHVVNEGNYCTVIYEGQDKKGKTKRTFELVSNLEAAQYFKASADREARPDLVPQTDTNGFPLKCILKTGTMVLFYENSPAELYECTRKELVKRLYKVTAMAAEGRVQFLFHQEARDQKTLTSLYGAGTSQFCQSNPSPKLRLSVSNFNMLVEGYDFELTVTGEIKFKDDRPC

SEQ ID NO: 19021 - protein, 1220 aa, unidentified
  REGION 1..1220: note = Cas Enzyme sequence
MAKVLGLDLGTNSLGWALVDESENEYTLIDKGVDIFQEGVARDKNNEKPAVQDRTSARALRRHYFRRRLRKIELLKILIRYDLCPPLPEELLTAWQKEKRYPQDNEFLRWQRTDDNGDRNPYHDRYVALSERLDLGNRTQRWLLGRALYHLAQRRGFLSNRKEAGNEKEDGTVKECIKNLSAEIAAAGCRYLGEYFYGLYQHKERIRDKYTSRNEHYLAEFNAICDRQQLPDEWRKALHRAIFFQRDLKSQKGSVGRCTFEPTKSRGPVSHPRFEEFRMLSFVNNIRITGPGDNAPRPLTQEEFETIRSLFFRKSKPYFDFEEIARRIAGKGKYACKEERTEAPYRFNFARTATVSGCPVTASLQAIFGDDWITEIRSLYLLGAGKNEDQMLNDVWHALFSFNDEGRLRSWACEKLQLTDEQAKAFAAIKLPQDYAALSLNAIGKILVYLRCGYRYDEAVFLANLRAALPKEVYADESRRHEIEQDIASLLLDYKRNPYNKFDSKEHRIADYFSDHGLDASRLMRLYHPSKIETYPDAQPKANGILQLGSPRTAAIRNPMAMRALFRLRNLINTLLREGRIDRDTKIRIEFARGLNDANRRKAIEQYQREREVENRKYAEEIHSQYAAETGREIKPSDDEVLKYRLWEEQQHVCPYTGRQIRISDFVGSAPDFDIEHTLPQARGGDDSQMNKTLCENRFNRETKRAKLPAELSNHVEIMERIESFGWREKMESLQKQIEAQVRRSKSAAIKSEKDDAIQRRHYLQMQLDYWRGKYERFTMAEIPEGFSNRQGVDIGIIGKYARLYLKTVFDRIYTVKGSTTAAFRKMWGLQEEYARKERTNHVHHCIDAITIACIGRREYDRWAQYVADEERYGYGESGKPRFEKPWPTFTEDVKAAADELLVAHHTPDNMAKQTRRKLRVRGRIKLNADGEPIYQQGDTARCRLHQDTFYGAIKQDGEIRYVIRKSLAQLQPTDIDKIIDDAVRDRVREAIDEVGFKTAMNPDEYTIWMNREKGIPIRKVRIFTPSVKHPIALKKQRDLSAKEYKRDYHVVNEGNYCTVIYEGQDKKGKTKRTFELVSNLEAAQYFKASADREARPDLVPQTDTNGFPLKYILKTGTMVLFYENTPAELYECTRKELVKRLYKVTAMAAEGRVQFLFHQEARDQKTLTSLYGAGTSQFCQSNPSPKLRLSVSNFNMLVEGYDFELTVTGEIKFKDDRPC

SEQ ID NO: 19022 - protein, 1220 aa, unidentified
  REGION 1..1220: note = Cas Enzyme sequence
MAKVLGLDLGTNSLGWALVDESENEYTLIDKGVDIFQEGVARDKNNEKPAVQDRTSARALRRHYFRRRLRKIELLKILIRYDLCPPLPEELLTAWQKEKRYPQDNEFLRWQRTDDNGDRNPYHDRYVALSERLDLGNRTQRWLLGRALYHLAQRRGFLSNRKEAGNEKEDGTVKECIKNLSAEIVAAGCRYLGEYFYGLYQHKERIRDKYTSRNEHYLAEFNAICDRQQLPDEWRKALHRAIFFQRDLKSQKGSVGRCTFEPTKSRCPVSHPRFEEFRMLSFVNNIRITGPGDNAPRPLTQEEFETIRSLFFRKSKPYFDFEEIARRIAGKGKYACKEERTEAPYRFNFARTATVSGCPVTASLQAIFGDDWITEIRSLYLLGAGKNEDQMLNDVWHALFSFNDEGRLRSWACEKLQLTDEQAKAFAAIKLPQDYAALSLNAIGKILVYLRCGYRYDEAVFLANLRAALPKEVYADESRRHEIEQDIASLLLDYKRNPYNKFDSKEHRIADYFSDHGLDASRLIRLYHPSKIETYPDAQPKANGILQLGSPRTATIRNPMAMRALFRLRNLINTLLREGRIDRDTKIRIEFARGLNDANRRKAIEQYQREREVENRKYAEEIHSQYAAETGREIKPSDDEVLKYRLWEEQQHVCPYTGRQIRISDFVGSAPDFDIEHTLPQARGGDDSQMNKTLCENRFNRETKRAKLPAELSNHVEIMERIESFGWREKMESLQKQIEAQVRRSKSAAIKSEKDDAIQRRHYLQMQLDYWRGKYERFTMAEIPEGFSNRQGVDIGIIGKYARLYLKTVFDRIYTVKGSTTAAFRKMWGLQEEYARKERTNHVHHCIDAITIACIGRREYDRWAQYVADEERYGYGESGKPRFEKPWPTFTEDVKAAADELLVAHHTPDNMTKQTRRKLRVRGRIKLNADGEPIYQQGDTARCRLHQDTFYGAIKQDGEIRYVIRKSLAQLQPTDIDKIIDDAVRDRVREAIDEVGFKTAMNPDEYTIWMNREKGIPIRKVRIFTPSVKHPIALKKQRDLSAKEYKRDYHVVNEGNYCTVIYEGQDKKGKTKRTFELVSNLEAAQYFKASADREARPDLVPQTDTNGFPLKYILKTGTMVLFYENTPAELYECTRKELVKRLYKVTAMAAEGRVQFLFHQEARDQKTLTSLYGAGTSQFCQSNPSPKLRLSVSNFNMLVEGYDFELTVTGEIKFKDDRPC

SEQ ID NO: 19023 - protein, 1220 aa, unidentified
  REGION 1..1220: note = Cas Enzyme sequence
MAKVLGLDLGTNSLGWALVDESENEYTLIDKGVDIFQEGVARDKNNEKPAVQDRTSARALRRHYFRRRLRKIELLKILIRYDLCPPLPEELLTAWQKEKRYPQDNEFLRWQRTDDNGDRNPYHDRYVALSERLDLGNRTQRWLLGRALYHLAQRRGFLSNRKEAGNEKEDGTVKECIKNLSAEIAAAGCRYLGEYFYGLYQHKERIRDKYTSRNEHYLAEFNAICDRQQLPDEWRKALHRAIFFQRDLKSQKGSVGRCTFEPTKSRCPVSHPRFEEFRMLSFVNNIRITGPGDNAPRPLTQEEFETIRSLFFRKSKPYFDFEEIARRIAGKGKYACKEERTEAPYRFNFARTATVSGCPVTASLQAIFGDDWITEIRSLYLLGAGKNEDQMLNDVWHALFSFNDEGRLRSWACEKLQLTDEQAKAFAAIKLPQDYAALSLNAIGKILVYLRCGYRYDEAVFLANLRAALPKEVYADESRRHEIEQDIVSLLLDYKRNPYNKFDSKEHRIADYFSDHGLDASRLIRLYHPSKIETYPDAQPKANGILQLGSPRTATIRNPMAMRALFRLRNLINTLLREGRIDRDTKIRIEFARGLNDANRRKAIEQYQREREVENRKYAEEIHSQYAAETGREIKPSDDEVLKYRLWEEQQHVCPYTGRQIRISDFVGSAPDFDIEHTLPQARGGDDSQMNKTLCENRFNRETKRAKLPAELSNHVEIMERIESFGWREKMESLQKQIEAQVRRSKSAAIKSEKDDAIQRRHYLQMQLDYWRGKYERFTMAEIPEGFSNRQGVDIGIIGKYARLYLKTVFDRIYTVKGSTTAAFRKMWGLQEEYARKERTNHVHHCIDAITIACIGRREYDRWAQYVADEERYGYGESGKPRFEKPWPTFTEDVKAVAEELLVAHHTPDNMAKQTRKKLRVRGRIKLNADGEPIYQQGDTARCRLHQDTFYGAIKQDGEIRYVIRKSLAQLQPTDIDKIIDDAVRDRVREAIDEVGFKTAMNPDEYTIWMNREKGIPIRKVRIFTPSVKHPIALKKQRDLSAKEYKRDYHVVNEGNYCTVIYEGQDKKGKTKRTFELVSNLEAAQYFKASADREARPDLVPQTDTNGFPLKYILKTGTMVLFYENTPAELYECTRKELVKRLYKVTAMAAEGRVQFLFHQEARDQKTLTSLYGAGTSQFCQSNPSPKLRLSVSNFNMLVEGYDFELTVTGEIKFKDDRPC

SEQ ID NO: 19024 - protein, 1220 aa, unidentified
  REGION 1..1220: note = Cas Enzyme sequence
MAKVLGLDLGTNSLGWALVDESENEYTLIDKGVDIFQEGVARDKNNEKPAVQDRTSARALRRHYFRRRLRKIELLKILIRYDLCPPLPEELLTAWQKEKRYPQDNEFLRWQRTDDNGDRNPYHDRYVALSERLDLGNRTQRWLLGRALYHLAQRRGFLSNRKEAGNEKEDGTVKECIKNLSAEIAAAGCRYLGEYFYGLYQHKERIRDKYTSRNEHYLAEFNAICDRQQLPDEWRKALHRAIFFQRDLKSQKGSVGRCTFELTKSRCPVSHPRFEEFRMLSFVNNIRITGPGDNAPRPLTQEEFETIRSLFFRKSKPYFDFEEIARRIAGKGKYACKEERTEAPYRFNFARTATVSGCPVTASLQAIFGDDWITEIRSLYLLGAGKNEDQMLNDVWHALFSFNDEGRLRSWACEKLQLTDEQAKAFAAIKLPQDYAALSLNAIGKILVYLRCGYRYDEAVFLANLRAALPKEVYADESRRHEIEQDIASLLLDYKRNPYNKFDSKEHRIADYFSDHGLDASRLMRLYHPSKIETYPDAQPKANGILQLGSPRTATIRNPMAMRALFRLRNLINTLLREGRIDRDTKIRIEFARGLNDANRRKAIEQYQREREVENRKYAEEIHSQYAAETGREIKPSDDEVLKYRLWEEQQHVCPYTGRQIRISDFVGSAPDFDIEHTLPQARGGDDSQMNKTLCENRFNRETKRAKLPAELSNHVEIMERIESFGWREKMESLQKQIEAQVRRSKSAAIKSEKDDAIQRRHYLQMQLDYWRGKYERFTMAEIPEGFSNRQGVDIGIIGKYARLYLKTVFDRIYTVKGSTTAAFRKMWGLQEEYARKERTNHVHHCIDAITIACIGRREYDRWAQYVADEERYGYGESGKPRFEKPWPTFTEDVKAAADELLVAHHTPDNMTKQTRRKLRVRGRIKLNADGEPIYQQGDTARCRLHQDTFYGAIKQDGEIRYVIRKSLAQLQPTDIDKIIDDAVRDRVREAIDEVGFKTAMNPDEYTIWMNREKGIPIRKVRIFTPSVKHPIALKKQRDLSAKEYKRDYHVVNEGNYCTVIYEGQDKKGKTKRTFELVSNLEAAQYFKASADREARPDLVPQTDTNGFPLKYILKTGTMVLFYENTPAELYECTRKELVKRLYKVTAMAAEGRVQFLFHQEARDQKTLTSLYGAGTSQFCQSNPSPKLRLSVSNFNMLVEGYDFELTVTGEIKFKDDRPC

SEQ ID NO: 19025 - protein, 1124 aa, unidentified
  REGION 1..1124: note = Cas Enzyme sequence
  REGION 1113..1121: note = misc_feature - Xaa can be any naturally occurring amino acid
MAKVLGLDLGTNSLGWALVDESENEYTLIDKGVDIFQEGVARDKNNEKPAVQDRTSARALRRRYFRRRLRKIELLKILIRYDLCPPLPEELLTAWQKEKRYPQDNEFLRWQRTDDNGDRNPYHDRYVALSERLDLGNRTQRWLLGRALYHLAQRRGFLSNRKEAGNEKEDGTVKECIKNLSAEIAAAGCRYLGEYFYGLYQHKERIRDKYTSRNEHYLAEFNAICDRQQLPDEWRKALHRAIFFQRDLKSQKGSVGRCTFEPTKSRCPVSHPRFEEFRMLSFVNNIRITGPGDNAPRPLTQEEFETIRSLFFRKSKPYFDFEEIARRIAGKGKYACKEERTEAPYRFNFARTATVSGCPVTASLQAIFGDDWITEIRSLYLLGAGKNEDQMLNDVWHALFSFNDEGRLRSWACEKLQLTDEQAKAFAAIKLPQDYAALSLNAIGKILVYLRCGYRYDEAVFLANLRAALPKEVYADESRRHEIEQDIVSLLLDYKRNPYNKFDSKEHRIADYFSDHGLDASRLMRLYHPSKIETYPDAQPKANGILQLGSPRTATIRNPMAMRALFRLRNLINTLLREGRIDRDTKIRIEFARGLNDANRRKAIEQYQREREVENRKYAEEIHSQYAAETGREIKPSDDEVLKYRLWEEQQHVCPYTGRQIRISDFVGSAPDFDIEHTLPQARGGDDSQMNKTLCENRFNRETKRAKLPAELSNHVEIMERIESFGWREKMESLQKQIEAQVRRSKSAAIKSEKDDAIQRRHYLQMQLDYWRGKYERFTMAEIPEGFSNRQGVDIGIIGKYARLYLKTVFDRIYTVKGSTTAAFRKMWGLQEEYARKERTNHVHHCIDAITIACIGRREYDRWAQYVADEERYGYGESGKPRFEKPWPTFTEDVKAVAEELLVAHHTPDNMAKQTRKKLRVRGRIKLNADGEPIYQQGDTARCRLHQDTFYGAIKQDGEIRYVIRKSLAQLQPTDIDKIIDDAVRDRVREAIDEVGFKTAMNPDEYTIWMNREKGIPIRKVRIFVRKTTLIPLGNKQHRDRSDKEYKRKYLVANEGNYCMAVYEGKDKKGRTDHSFEIISNLQAAEYFKRSTDRNERHDLAPVADTNGYPLKXXXXXXXXXPVL

SEQ ID NO: 19026 - protein, 1220 aa, unidentified
  REGION 1..1220: note = Cas Enzyme sequence
MAKVLGLDLGTNSLGWALVDESENEYTLIDKGVDIFQEGVARDKNNEKPAVQDRTSARALRRHYFRRRLRKIELLKILIRYDLCPPLSEELLTAWQKEKRYPQDNEFLRWQRTDDNGDRNPYHDRYVALSERLDLGNRTQRWLLGRALYHLAQRRGFLSNRKEAGNEKEDGTVKECIKNLSAEIAAAGCRYLGEYFYGLYQHKERIRDKYTSRNEHYLAEFNAICDRQQLPDEWRKALHRAIFFQRDLKSQKGSVGRCTFEPTKSRCPVSHPRFEEFRMLSFVNNIRITGPGDNAPRPLTQEEFETIRSLFFRKSKPYFDFEEIARRIAGKGKYACKEERTEAPYRFNFARTATVSGCPVTASLQAIFGDDWITEIRSLYLLGAGKNEDQMLNDVWHALFSFNDEGRLRSWACEKLQLTDEQAKAFAAIKLPQDYAALSLNAIGKILVYLRCGYRYDEAVFLANLRAALPKEVYADESRRHEIEQDIASLLLDYKRNPYNKFDSKEHRIADYFSDHGLDASRLIRLYHPSKIETYPDAQPMANGILQLGSPRTATIRNPMAMRALFRLRNLINTLLREGRIDRDTKIRIEFARGLNDANRRKAIEQYQREREVENRKYAEEIHSQYAAETGREIKPSDDEVLKYRLWEEQQHVCPYTGRQIRISDFVGSAPDFDIEHTLPQARGGDDSQMNKTLCENRFNRETKRAKLPAELSNHVEIMERIESFGWREKMESLQKQIEAQVRRSKSAAIKSEKDDAIQRRHYLQMQLDYWRGKYERFTMAEIPEGFSNRQGVDIGIIGKYARLYLKTVFDRIYTVKGSTTAAFRKMWGLQEEYARKERTNHVHHCIDAITIACIGRREYDRWAQYVADEERYGYGESGKPRFEKPWPTFTEDVKAAADELLVAHHTPDNMTKQTRRKLRVRGRIKLNADGEPIYQQGDTARCRLHQDTFYGAIKQDGEIRYVIRKSLAQLQPTDIDKIIDDAVRDRVREAIDEVGFKTAMNPDEYTIWMNREKGIPIRKVRIFTPSVKHPIALKKQRDLSAKEYKRDYHVVNEGNYCTVIYEGQDKKGKTKRTFELVSNLEAAQYFKASADREARPDLVPQTDTNGFPLKYILKTGTMVLFYENTPAELYECTRKELVKRLYKVTAMAAEGRVQFLFHQEARDQKTLTSLYGAGTSQFCQSNPSPKLRLSVSNFNMLVEGYDFELTVTGEIKFKDDRPC

SEQ ID NO: 19027 - protein, 1167 aa, unidentified
  REGION 1..1167: note = Cas Enzyme sequence
DRHQYYNDFSTRNDLYAKIELLKILIRYDLCPPLPEELLTAWQKEKRYPQDNEFLRWQRTDDNGDRNPYHDRYVALSERLDLGNRTQRWLLGRALYHLAQRRGFLSNRKEAGNEKEDGTVKECIKNLSAEIAAAGCRYLGEYFYGLYQHKERIRDKYTSRNEHYLAEFNAICDRQQLPDEWRKALHRAIFFQRDLKSQKGSVGRCTFEPTKSRCPVSHPRFEEFRMLSFVNNIRITGPGDNAPRPLTQEEFETIRSLFFRKSKPYFDFEEIARRIAGKGKYACKEERTEAPYRFNFARTATVSGCPVTASLQAIFGDDWITEIRSLYLLGAGKNEDQMLNDVWHALFSFNDEGRLRSWACEKLQLTDEQAKAFAAIKLPQDYAALSLNAIGKILVYLRCGYRYDEAVFLANLRAALPKEVYADESRRHEIEQDIASLLLDYKRNPYNKFDSKEHRIADYFSDHGLDASRLIRLYHPSKIETYPDAQPKANGILQLGSPRTATIRNPMAMRALFRLRNLINTLLREGRIDRDTKIRIEFARGLNDANRRKAIEQYQREREVENRKYAEEIHSQYAAETGREIKPSDDEVLKYRLWEEQQHVCPYTGRQIRISDFVGSAPDFDIEHTLPQARGGDDSQMNKTLCENRFNRETKRAKLPAELSNHVEIMERIESFGWREKMESLQKQIEAQVRRSKSAAIKSEKDDAIQRRHYLQMQLDYWRGKYERFTMAEIPEGFSNRQGVDIGIIGKYARLYLKTVFDRIYTVKGSTTAAFRKMWGLQEEYARKERTNHVHHCIDAITIACIGRREYDRWAQYVADEERYGYGESGKPRFEKPWPTFTEDVKAAADELLVAHHTPDNMTKQMRRKLRVRGRIKLNADGEPIYQQGDTARCRLHQDTFYGAIKQDGEIRYVIRKSLAQLQPTDIDKIIDDAVRDRVREAIDEVGFKTAMNPDEYTIWMNREKGIPIRKVRIFTPSVKHPIALKKQRDLSAKEYKRDYHVVNEGNYCTVIYEGQDKKGKTKRTFELVSNLEAAQYFKASADREARPDLVPQTDTNGFPLKYILKTGTMVLFYENTPAELYECTRKELVKRLYKVTAMAAEGRVQFLFHQEARDQKTLTSLYGAGTSQFCQSNPSPKLRLSVSNFNMLVEGYDFELTVTGEIKFKDDRPC

SEQ ID NO: 19028 - protein, 1220 aa, unidentified
  REGION 1..1220: note = Cas Enzyme sequence
MAKVLGLDLGTNSLGWALVDESENEYTLIDKGVDIFQEGVARDKNNEKPAVQDRTSARALRRHYFRRRLRKIELLKILIRYDLCPPLPEELLTAWQKEKRYPQDNEFLRWQRTDDNGDRNPYHDRYVALSERLDLGNRTQRWLLGRALYHLAQRRGFLSNRKEAGNEKEDGTVKECIKNLSAEIAAAGCRYLGEYFYGLYQHKERIRDKYTSRNEHYLAEFNAICDRQQLPDEWRKALHRAIFFQRDLKSQKGSVGRCTFEPTKSRCPVSHPRFEEFRMLSFVNNIRITGPGDNAPRPLTQEEFETIRSLFFRKSKPYFDFEEIARRIAGKGKYACKEERTEAPYRFNFARTATVSGCPVTASLQAIFGDDWITEIRSLYLLGAGKNEDQMLNDVWHALFSFNDEGRLRSWACEKLQLTDEQAKAFAAIKLPQDYAALSLNAIGKILVYLRCGYRYDEAVFLANLRAALPKEVYADESRRHEIEQDIASLLLDYKRNPYNKFDSKEHRIADYFSDHGLDASRLIRLYHPSKIETYPDAQPKANGILQLGSPRTATIRNPMAMRALFRLRNLINTLLREGRIDRDTKIRIEFARGLNDANRRKAIEQYQREREVENRKYAEEIHSQYAAETGREIKPSDDEVLKYRLWEEQQHVCPYTGRQIRISDFVGSAPDFDIEHTLPQARGGDDSQMNKTLCENRFNRETKRAKLPAELSNHVEIMERIESFGWREKMESLQKQIEAQVRRSKSAAIKSEKDDAIQRRHYLQMQLDYWRGKYERFTMAEIPEGFSNRQGVDIGIIGKYARLYLKTVFDRIYTVKGSTTAAFRKMWGLQEEYARKERTNHVHHCIDAITIACIGRREYDRWAQYVADEERYGYGESGKPRFEKPWPTFTEDVKAAADELLVAHHTPDNMAKQTRKKLRVRGRIKLNADGEPIYQQGDTARCRLHQDTFYGAIKQDGEIRYVIRKSLAQLQPTDIDKIIDDAVRDRVREAIDEVGFKTAMNPDEYTIWMNREKGISIRKVRIFTPSVKHPIALKKQRDLSAKEYKRDYHVVNEGNYCTVIYEGQDKKGKTKRTFELVSNLEAAQYFKASADREARPDLVPQTDTNGFPLKYILKTGTMVLFYENTPAELYECTRKELVKRLYKVTAMAAEGRVQFLFHQEARDQKTLTSLYGAGTSQFCQSNPSPKLRLSVSNFNMLVEGYDFELTVTGEIKFKDDRPC

SEQ ID NO: 19029 - protein, 1220 aa, unidentified
  REGION 1..1220: note = Cas Enzyme sequence
MAKVLGLDLGTNSLGWALVDESENEYTLIDKGVDIFQEGVARDKNNEKPAVQDRTSARALRRHYFRRRLRKIELLKILIRYDLCPPLPEELLTAWQKEKRYPQDNEFLRWQRTDDNGDRNPYHDRYVALSERLDLGNRTQRWLLGRALYHLAQRRGFLSNRKEAGNEKEDGTVKECIKNLSAEIAAAGCRYLGEYFYGLYQHKERIRDKYTSRNEHYLAEFNAICDRQQLPDEWRKALHRAIFFQRDLKSQKGSVGRCTFEPTKSRGPVSHPRFEEFRMLSFVNNIRITGPGDNAPRPLTQEEFETIRSLFFRKSKPYFDFEEIARKIAGKGKYACKEERTEAPYRFNFARTATVSGCPVTASLQAIFGDDWITEIRSLYLLGAGKNEDQMLNDVWHALFSFNDEGRLRSWACEKLQLTDEQAKAFAAIKLPQDYAALSLNAIGKILVYLRCGYRYDEAVFLANLRAALPKEVYADESRRHEIEQDIASLLLDYKRNPYNKFDSKEHRIADYFSDHGLDASRLIRLYHPSKIETYPDAQPKANGILQLGSPRTATIRNPMAMRALFRLRNLINTLLREGRIDRDTKIRIEFARGLNDANRRKAIEQYQREREVENRKYAEEIHSQYAAETGREIKPSDDEVLKYRLWEEQQHVCPYTGRQIRISDFVGSAPDFDIEHTLPQARGGDDSQMNKTLCENRFNRETKRAKLPAELSNHVEIMERIESFGWREKMESLQKQIEAQVRRSKSAAIKSEKDDAIQRRHYLQMQLDYWRGKYERFTMAEIPEGFSNRQGVDIGIIGKYARLYLKTVFDRIYTVKGSTTAAFRKMWGLQEEYARKERTNHVHHCIDAITIACIGRREYDRWAQYVADEERYGYGESGKPRFEKPWPTFTEDVKAAADELLVAHHTPDNMTKQTRRKLRVRGRIKLNADGEPIYQQGDTARCRLHQDTFYGAIKQDGEIRYVIRKSLAQLQPTDIDKIIDDAVRDRVREAIDEVGFKTAMNPDEYTIWMNREKGIPIRKVRIFTPSVKHPIALKKQRDLSAKEYKRDYHVVNEGNYCTVIYEGQDKKGKTKRTFELVSNLEAAQYFKASADREARPDLVPQTDTNGFPLKYILKTGTMVLFYENTPAELYECTRKELVKRLYKVTAMAAEGRVQFLFHQEARDQKTLTSLYGAGTSQFCQSNPSPKLRLSVSNFNMLVEGYDFELTVTGEIKFKDDRPC

SEQ ID NO: 19030 - protein, 985 aa, unidentified
  REGION 1..985: note = Cas Enzyme sequence
ALHRAIFFQRDLKSQKGSVGRCTFEPTKSRCPVSHPRFEEFRMLSFVNNIRITGPGDNAPRPLTQEEFETIRSLFFRKSKPYFDFEEIARRIAGKGKYACKEERTEAPYRFNFARTATVSGCPVTASLQAIFGDDWITEIRSLYLLGAGKNEDQMLNDVWHALFSFNDEGRLRSWACEKLQLTDEQAKAFAAIKLPQDYAALSLNAIGKILVYLRCGYRYDEAVFLANLRAALPKEVYADESRRHEIEQDIASLLLDYKRNPYNKFDSKEHRIADYFSDHGLDASRLIRLYHPSKIETYPDAQPKANGILQLGSPRTATIRNPMAMRALFRLRNLINTLLREGRIDRDTKIRIEFARGLNDANRRKAIEQYQREREVENRKYAEEIHSQYAAETGREIKPSDDEVLKYRLWEEQQHVCPYTGRQIRISDFVGSAPDFDIEHTLPQARGGDDSQMNKTLCENRFNRETKRAKLPAELSNHVEIMERIESFGWREKMESLQKQIEAQVRRSKSAAIKSEKDDAIQRRHYLQMQLDYWRGKYERFTMAEIPEGFSNRQGVDIGIIGKYARLYLKTVFDRIYTVKGSTTAAFRKMWGLQEEYARKERTNHVHHCIDAITIACIGRREYDRWAQYVADEERYGYGESGKPRFEKPWPTFTEDVKAAADELLVAHHTPDNMAKQTRKKLRVRGRIKLNADGEPIYQQGDTARCRLHQDTFYGAIKQDGEIRYVIRKSLAQLQPTDIDKIIDDAVRDRVREAIDEVGFKTAMNPDEYTIWMNREKGIPIRKVRIFVRKTTLIPLGNKQHRDRSDKEYKRKYLVANEGNYCMAVYEGKDKKGRTDHSFEIISNLQAAEYFKRSTDRNERHDLAPVADTNGYPLKYLLKTGSMVLFYENTPAELYECTRKELVKRLYKVTAMAAEGRVQFLFHQEARDQKTLTSLYGAGTSQFCQSNPSPKLRLSVSNFNMLVEGYDFELTVTGEIKFKDDRPC

SEQ ID NO: 19031 - protein, 1215 aa, unidentified
  REGION 1..1215: note = Cas Enzyme sequence
MSKKRILGLDTGTNSLGWAVVDQEENGQYTLIDKGVVIFQEGVKIEKGVESSKAAERTEHRALRRHYFRRRLRKIEVLRVLVKYNLCPTITEEDLNLWKLHKTYPRKDEFMVWQHTNDNEDINPYHCRYTCLNENLDLDRQQDRYILGRALYHMAQRRGFLSNRLDATEEDENGAVKSSIANLNKEIEENGCKYLGEYFYKLYKEKGNTVRIRTRYTDREQHYKKEFFAICEKQNLPKEMVEALTRALYFQRPLKSQRQNVGKCTFEKGKPRCSDSHPTYEIYRMLSFLNNVKIQGPWDEDLRPLNEEELKQIDKLFYRKSKPNFDFEEIAKKIAGKGKYQWKGDTKTDLPYKFNYRMSQGVPGCPTIAQLKEIFGENWKENIAETYTLNTKKDGTHKSADEMVDDIWNVLFFFDSKDKVKEYGIKHLQLDEDQADKFSKIRLSRNYASLSLKAIRYILPFLHKGMIYSDAVFFAKIPVIIGQSLWQKRQHEIMEDLSYAIHMAMKEKQRIDDAVKDYLQNNFDLKPGAADMLYHPSMIETYPDAQPDKNGVVLLGSPRTNAIKNPMAMRSLHEIRKVINTLIKEGKVAPDTEIHIEYARELNNANMRAAIHDLQREKDKKHKEYSENIRKLYKEATGKDIEATETDILKFQLWEEQGHICLYTGDEIGIADFIGANPSFDIEHTIPRSVGGDSTQMNMTLCNTHYNRFVKKAYIPTQLADHEFIMTRIEPWKEKIEDLTKQINQIRTSNIWDKAAKDAKIRKKNRLLEELKYWKGKYDRFTMTEVPEGFARRQGAGIGLISKYAALYLKSYFHDTLHPEHRQVYSIKGTITSDFRKMWGIQEEDEKKSRDSHTHHCIDAIVIACIGKNEFNMMGQYYHVQEKFEKGEGEKPEFKKPWPTFTQDLKKIKEELVVVHDTPDNMPKKATKTIEISKGRKVVAKGDCARGSLHQDTYYGAIERDGNIKYVVRKPLSSFTSIKDLDNIVDDAVRQAILNAIEGKDFKKALAEPIYMNKDKGILIKKVRCYTPSITKPLHIRTHRDISQKEYKQQFHVALDSNYCMAIYEGEVKGKTKRTYEIINMLDAAAYFKKSSNLAKQHPIAPENKNELKYRCSVHTGTQVLLLQSDGENINLENKDDIARRLYHVAVMRSDGRIVLRYNQDARDATTLKKERKSGAYKVGEQYRSEIMLSLSDFHALVEGYDFTITPLGEIKLKH

SEQ ID NO: 19032 - protein, 1232 aa, unidentified
  REGION 1..1232: note = Cas Enzyme sequence
MAKVLGLDAGTNSLGWAIVEETETGYILEDKGVHIFQEGVARDKNNEKPAVQDRTDARALRRRYFRRRLRKIELLRVLVRYGLCPPLTEEQLEAWREKKRYPLDAAFLRWQRTDDNAERNPYHDRYRALTETLDLSDERHRHALGRALYHLAQRRGFLSNRKEAGNGKEEGAVQSGIENLSAEMEKAGCRYLGEYFYQLYRRKEKIRKRYTSRNKHYLAEFNAICERQCLPEEWRKALHRAIFFQRPLKSQKGSVGKCTFERKKSRCPVSHPRFEEFRMRSFINNIRLTAPGDDTPRPLTRLETETILPLFLRKSKPHFDFEEIARRIAGKGQYGCQGDRNEAPYRFNFARTATVSGCPVTASLIALFGDDWLPEICRLYRLGEGKSEEQVLNDIWHALFSFDDEERLRAWAADKLRLADEQAKAFAAIRLPQDYAALSLNAINKILPYLRRGYRYDEAVFLANLKAVLPPATYADETRRLRIERDIAELTLESRREPYVKYDSKERRIDDYLTDQGVPPARLNRLYHPSMIETYRAARPDAQGLLLLGSPRTASIRNPMAMRALFRLRTLVNRLLREDKIDPDTKIRIEFARGLNDANQRKAIEQYQREREAENRKYADEIRAQYAAETGLTIEPSEDDILKYRLWEEQKHVCPYTGKQIRVSDFIGSAPGFDIEHTLPRARGGDDSQMNKTLCESRFNRESKRTKLPAELSNRAEILERIESFGWREKVESLQKQIEAQFRKGRNAPTKEERDSAIQRRHYLRMQRDYWRGKYERFAMTEIPEGFSNRQGVDIGIIGKYARLYLKTVFRRIYIVKGSTTDAFRKMWGLQEEYARKERINHVHHCIDAITIACIGPKEYDRWARYAADEERYRYGAGARPRFDKPWPTFTEDVKAVADELLVSHHTPDNMAKQTRKKLRVRGRVKLDAAGRPIRQQGDTARGRLHQDTFYGAIRHQDKLRYVIRKSIGDLQPADVEKIVNETVKARIKEAIGEVGFKTAMNPDEHTIWMNREKGVPIRRVRIFANITQPLPWDKMQRDLSVHEYKRRYHVANDGNYCMAIYEGTDSKGRTKRSFEIVNLLDAAGYFKASADRTARPDLVPRTNANGHPLKYLLKTGTMVLFYENSPAELYDCPPKELAKRLYKVTKMAKNGQTAFMFHQEARNDDKLKTDYAEKFGTTAPKALTNGYSSVDYQQPHPKLLLSPSSFDMYVEGYDFELTVTGQIIFKHETPC

SEQ ID NO: 19033 - protein, 1220 aa, unidentified
  REGION 1..1220: note = Cas Enzyme sequence
MAKVLGLDLGTNSLGWALVDESENEYTLIDKGVDIFQEGVARDKNNEKPAVQDRTSARALRRHYFRRRLRKIELLKILIRYDLCPPLPEELLTAWQKEKRYPQDNEFLRWQRTDDNGDRNPYHDRYVALSERLDLGNRTQRWLLGRALYHLAQRRGFLSNLKEAGNEKEDGTVKECIKNLSAEIAAAGCRYLGEYFYGLYQHKERIRDKYTSRNEHYLAEFNAICDRQQLPDEWRKALHRAIFFQRDLKSQKGSVGRCTFEPTKSRCPVSHPRFEEFRMLSFVNNIRITGPGDNAPRPLTQEEFETIRSLFFRKSKPYFDFEEIARRIAGKGKYACKEERTEAPYRFNFARTATVSGCPVTASLQAIFGDDWITEIRSLYLLGAGKNEDQMLNDVWHALFSFNDEGRLRSWACEKLQLTDEQAKAFAAIKLPQDYAALSLNAIGKILVYLRCGYRYDEAVFLANLRAALPKEVYADESRRHEIEQDIASLLLDYKRNPYNKFDSKEHRIADYFSDHGLDASRLIRLYHPSKIETYPDAQPKANGILQLGSPRTATIRNPMAMRALFRLRNLINTLLREGRIDRDTKIRIEFARGLNDANRRKAIEQYQREREVENRKYAEEIHSQYAAETGREIKPSDDEVLKYRLWEEQQHVCPYTGRQIRISDFVGSAPDFDIEHTLPQARGGDDSQMNKTLCENRFNRETKRAKLPAELSNHVEIMERIESFGWREKMESLQKQIEAQVRRSKSAAIKSEKDDAIQRRHYLQMQLDYWRGKYERFTMAEIPEGFSNRQGVDIGIIGKYARLYLKTVFDRIYTVKGSTTAAFRKMWGLQEEYARKERTNHVHHCIDAITIACIGRREYDRWAQYVADEERYGYGESGKPRFEKPWPTFTEDVKAAADELLVAHHTPDNMAKQTRKKLRVRGRIKLNADGEPIYQQGDTARCRLHQDTFYGAIKQDGEIRYVIRKSLAQLQPTDIDKIIDDAVRDRVREAIDEVGFKTAMNPDEYTIWMNREKGIPIRKVRIFTPSVKHPIALKKQRDLSAKEYKRDYHVVNEGNYCTVIYEGQDKKGKTKRTFELVSNLEAAQYFKASADREARPDLVPQTDTNGFPLKYILKTGTMVLFYENTPAELYECTRKELVKRLYKVTAMAAEGRVQFLFHQEARDQKTLTSLYGAGTSQFCQSNPSPKLRLSVSNFNMLVEGYDFELTVTGEIKFKDDRPC

SEQ ID NO: 19034 - protein, 1220 aa, unidentified
  REGION 1..1220: note = Cas Enzyme sequence
MAKVLGLDLGTNSLGWALVDESENEYTLIDKGVDIFQEGVARDKNNEKPAVQDRTSARALRRHYFRRRLRKIELLKILIRYDLCPPLPEELLTAWQKEKRYPQDNEFLRWQRTDDNGDRNPYHDRYVALSERLDLGNRTQRWLLGRALYHLAQRRGFLSNRKEAGNEKEDGTVKECIKNLSAEIAAAGCRYLGEYFYGLYQHKERIRDKYTSRNEHYLAEFNAICDRQQLPDEWRKALHRAIFFQRDLKSQKGSVGRCTFEPTKSRCPVSHPRFEEFRMLSFVNNIRITGPGDNAPRPLTQEEFETIRSLFFRKSKPYFDFEEIARRIAGKGKYACKEERTEAPYRFNFARTATVSGCPVTASLQAIFGDDWITEIRSLYLLGAGKNEDQMLNDVWHALFSFNDEGRLRSWACEKLQLTDEQAKAFAAIKLPQDYAALSLNAIGKILVYLRCGYRYDEAVFLANLRAALPKEVYADESRRHEIEQDIASLLLDYKRNPYNKFDSKEHRIADYFSDHGLDASRLIRLYHPSKIETYPDAQPKANGILQLGSPRTAAIRNPMAMRALFRLRNLINTLLREGRIDRDTKIRIEFARGLNDANRRKAIEQYQREREVENRKYAEEIHSQYAAETGREIKPSDDEVLKYRLWEEQQHVCPYTGRQIRISDFVGSAPDFDIEHTLPQARGGDDSQMNKTLCENRFNRETKRAKLPAELSNHVEIMERIESFGWREKMESLQKQIEAQVRRSKSAAIKSEKDDAIQRRHYLQMQLDYWRGKYERFTMAEIPEGFSNRQGVDIGIIGKYARLYLKTVFDRIYTVKGSTTAAFRKMWGLQEEYARKERTNHVHHCIDAITIACIGRREYDRWAQYVADEERYGYGESGKPRFEKPWPTFTEDVKAAADELLVAHHTPDNMAKQTRRKLRVRGRIKLNADGEPIYQQGDTARCRLHQDTFYGAIKQDGEIRYVLRKSLAQLQPTDIDKIIDDAVRDRVREAIDEVGFKTAMNPDEYTIWMNREKGIPIRKVRIFTPSVKHPIALKKQRDLSAKEYKRDYHVVNEGNYCTVIYEGQDKKGKTKRTFELVSNLEAAQYFKASADREARPDLVPQTDTNGFPLKYILKTGTMVLFYENTPAELYECTRKELVKRLYKVTAMAAEGRVQFLFHQEARDQKTLTSLYGAGTSQFCQSNPSPKLRLSVSNFNMLVEGYDFELTVTGEIKFKDDRPC

SEQ ID NO: 19035 - protein, 1220 aa, unidentified
  REGION 1..1220: note = Cas Enzyme sequence
MAKVLGLDLGTNSLGWALVDESENEYTLIDKGVDIFQEGVARDKNNEKPAVQDRTSARALRRRYFRRRLRKIELLKILIRYDLCPPLPEELLTAWQKEKRYPQDNEFLRWQRTDDNGDRNPYHDRYVALSERLDLGNRTQRWLLGRALYHLAQRRGFLSNRKEAGNEKEDGTVKECIKNLSAEIAAAGCRYLGEYFYGLYQHKERIRDKYTSRNEHYLAEFNAICDRQQLPDEWRKALHRAIFFQRDLKSQKGSVGRCTFEPTKSRCPVSHPRFEEFRMLSFVNNIRITGPGDNAPRPLTQEEFETIRSLFFRKSKPYFDFEEIARRIAGKGKYACKEERTEAPYRFNFARTATVSGCPVTASLQAIFGDDWITEIRSLYLLGAGKNEDQMLNDVWHALFSFNDEGRLRSWACEKLQLTDEQAKAFAAIKLPQDYAALSLNAIGKILVYLRCGYRYDEAVFLANLRAALPKEVYADESRRHEIEQDIASLLLDYKRNPYNKFDSKEHRIADYFSDHGLDASRLMRLYHPSKIETYPDAQPKANGILQLGSPRTATIRNPMAMRALFRLRNLINTLLREGRIDRDTKIRIEFARGLNDANRRKAIEQYQREREVENRKYAEEIHSQYAAETGREIKPSDDEVLKYRMWEEQQHVCPYTGRQIRISDFVGSAPDFDIEHTLPQARGGDDSQMNKTLCENRFNRETKRAKLPAELSNHVEIMERIESFGWREKMESLQKQIEAQVRRSKSAAIKSEKDDAIQRRHYLQMQLDYWRGKYERFTMAEIPEGFSNRQGVDIGIIGKYARLYLKTVFDRIYTVKGSTTAAFRKMWGLQEEYARKERTNHVHHCIDAITIACIGRREYDRWAQYVADEERYGYGESGKPRFEKPWPTFTEDVKAAADELLVAHHTPDNMAKQTRRKLRVRGRIKLNADGEPIYQQGDTARCRLHQDTFYGAIKQDGEIRYVIRKSLAQLQPTDIDKIIDDAVRDRVREAIDEVGFKTAMNPDEYTIWMNREKGIPIRKVRIFTPSVKHPIALKKQRDLSAKEYKRDYHVVNEGNYCTVIYEGQDKKGKTKRTFELVSNLEAAQYFKASADREARPDLVPQTDTNGFPLKYILKTGTMVLFYENTPAELYECTRKELVKRLYKVTAMAAEGRVQFLFHQEARDQKTLTSLYGAGTSQFCQSNPSPKLRLSVSNFNMLVEGYDFELTVTGEIKFKDDRPC

SEQ ID NO: 19036 - protein, 1221 aa, unidentified
  REGION 1..1221: note = Cas Enzyme sequence
MAKVLGLDLGTNSLGWALVDESENEYTLIDKGVDIFQEGVARDKNNEKPAVQDRTSARALRRHYFRRRLRKIELLKILIRYDLCPPLPEELLTAWQKEKRYPQDNEFLRWQRTDDNGDRNPYHDRYVALSERLDLGNRTQRWLLGRALYHLAQRRGFLSNRKEAGNEKEDGTVKECIKNLSAEIAAAGCRYLGEYFYGLYQHKERIRDKYTSRNEHYLAEFNAICDRQQLPDEWRKALHRAIFFQRDLKSQKGSVGRCTFEPTKSRCPVSHPRFEEFRMLSFVNNIRITGPGDNAPRPLTQEEFETIRSLFFRKSKPYFDFEEIARRIAGKGKYACKEERTEAPYRFNFARTATVSGCPVTASLQAIFGDDWITEIRSLYLLGAGKNEDQMLNDVWHALFSFNDEGRLRSWACEKLQLTDEQAKAFAAIKLPQDYAALSLNAIGKILVYLRCGYRYDEAVFLANLRAALPKEVYADESRRHEIEQDIVSLLLDYKRNPYNKFDSKEHRIADYFSDHGLDASRLMRLYHPSKIETYPDAQPKANGILQLGSPRTATIRNPMAMRALFRLRNLINTLLREGRIDRDTKIRIEFARGLNDANRRKAIEQYQREREVENRKYAEEIHSQYAAETGREIKPSDDEVLKYRLWEEQQHVCPYTGRQIRISDFVGSAPDFDIEHTLPQARGGDDSQMNKTLCENRFNRETKRAKLPAELSNHVEIMERIESFGWREKMESLQKQIEAQVRRSKSAAIKSEKDDAIQRRHYLQMQLDYWRGKYERFTMAEIPEGFSNRQGVDIGIIGKYARLYLKTVFDRIYTVKGSTTAAFRKMWGLQEEYARKERTNHVHHCIDAITIACIGRREYDRWAQYVADEERYGYGESGKPRFEKPWPTFTEDVKAAADELLVAHHTPDNMAKQTRKKLRVRGRIKLNADGEPIYQQGDTARCRLHQDTFYGAIKQDGEIRYVIRKSLAQLQPTDIDKIIDDAVRDRVREAIDEVGFKTAMNPDEYTIWMNREKGISIRKVRIFVRKTTLIPLGNKQHRDRSDKEYKRKYLVANEGNYCMAVYEGKDKKGRTDHSFEIISNLQAAEYFKRSTDRNERHDLAPVADTNGYPLKYLLKTGSMVLFYENTPAELYECTRKELVKRLYKVTAMAAEGRVQFLFHQEARDQKTLTALYGAGASQFCQSNPSPKLRLSVSNFNMLVEGYDFELTATGEIKFKDDRPC

SEQ ID NO: 19037 - protein, 1070 aa, unidentified
  REGION 1..1070: note = Cas Enzyme sequence
LAQRRGFLSNRKEAGNEKEDGTVKECIKNLSAEIAAAGCRYLGEYFYGLYQHKKRIRDKYTSRNEHYLAEFNAICDRQQLPDEWRKALHRAIFFQRDLKSQKGSVGRCTFEPTKSRCPVSHPRFEEFRMLSFVNNIRITGPGDNAPRPLTQEEFETIRSLFFRKSKPYFDFEEIARRIAGKGKYACKEERTEAPYRFNFARTATVSGCPVTASLQAIFGDDWITEIRSLYLLGAGKNEDQMLNDVWHALFSFNDEGRLRSWACEKLQLTDEQAKAFAAIKLPQDYAALSLNAIGKILVYLRCGYRYDEAVFLANLRAALPKEVYADESRRHEIEQDIASLLLDYKRNPYNKFDSKEHRIADYFSDHGLDASRLMRLYHPSKIETYPDAQPKANGILQLGSPRTAAIRNPMAMRALFRLRNLINTLLREGRIDRDTKIRIEFARGLNDANRRKAIEQYQREREVENRKYAEEIHSQYAAETGREIKPSDDEVLKYRLWEEQQHVCPYTGRQIRISDFVGSAPDFDIEHTLPQARGGDDSQMNKTLCENRFNRETKRAKLPAELSNHVEIMERIESFGWREKMESLQKQIEAQVRRSKSAAIKSEKDDAIQRRHYLQMQLDYWRGKYERFTMAEIPEGFSNRQGVDIGIIGKYARLYLKTVFDRIYTVKGSTTAAFRKMWGLQEEYARKERTNHVHHCIDAITIACIGRREYDRWAQYVADEERYGYGESGKPRFEKPWPTFTEDVKAAADELLVAHHTPDNMAKQTRRKLRVRGRIKLNADGEPIYQQGDTARCRLHQDTFYGAIKQDGEIRYVIRKSLAQLQPTDIDKIIDDAVRDRVREAIDEVGFKTAMNPDEYTIWMNREKGIPIRKVRIFTPSVKHPIALKKQRDLSAKEYKRDYHVVNEGNYCTVIYEGQDKKGKTKRTFELVSNLEAAQYFKASADREARPDLVPQTDTNGFPLKYILKTGTMVLFYENTPAELYECTRKELVKRLYKVTAMAAEGRVQFLFHQEARDQKTLTSLYGAGTSQFCQSNPSPKLRLSVSNFNMLVEGYDFELTVTGEIKFKDDRPC

SEQ ID NO: 19038 - protein, 1216 aa, unidentified
  REGION 1..1216: note = Cas Enzyme sequence
MKRVFGIDLGTNSIGWSIVEQLENGKYRHIKSGVDIFKDGVDHDKSGEHPCVQLRTNARGLRRHYFRRRLHKIELLKILIEERMCPPLTDEDLKRWRFKKIYPKEDNFMEWQRTNDNLEKNPYHDRYVALTRKLDLSIESDRYILGRAFYHLSQRRGFLSNRKDSTKEQEGEVKAAISELSDKIKEAGCGYLCEYFYKLYQAGDKIRGHYTARNEHYLKEFQAICDKQSLGADLCKRLNNAIFYQRPLKSQKGNIGRCTFELGKQRCSTSHPAYEEYRMLCFINNIRLHRQGEDSDFRVLTKEEVDAIIPKFVCKSQFKFEKLAKVLAHKKENYGFKYDSDESTLKFNYRKETSIAGSPVTAGLKEIFGEEWKSEICSVYMKSEGKTEDRIIDDVWHVLYSFDNDENIRDWAKKNLQLDDEQAEKFAKIKIERDYASLSLNAIRKILPYLRRGLRYDEAVFCANIPAALGNVEDVDEYRKIEDDIVACVRNFKSCEVAGRKNTLEKEVAELLEEKYGVDKRHLGKIYHPSKTETYPTAQPDNNGLRLLGSPRTASVRNPMAMRALFRLRALTNELLKKGEINSETVVNIEFARGLNDANMRKAIENYQREIADRHQKYAKEIKDCYLKETGKNIEPTENEILKYQLWEEQNHQCLYTGKMISVADFIGANPKFDIEHTLPRAAGGDDSQVNKTLCDSRFNREVKKAHLPSELANHAEILLKAKNLWQKKIYELTKQIEGTKGYAADKNAKDGKIQRRHLLKMKRDYYIGKLQRFEMKEVPAGFSNRQGVDIGIIGKYAKLYLHTVFDKIFVVKGATTAAFRKVWGLQSVYEKKERINHVHHCVDAITIACIGKKQYDDWKCYQEAEDMYYRGETGRPSMDKPWSTFTEDVKQLTEGLLIHHYVPDNAGKASKKKLRVRGRIQRNAEGRVLYATGDCARLSLHQQTFYGAIKQDDEIRYVVRKPLDSLEKKDIEKIVDPEVRQKVKEAVDAKGMKDAVADGIWMNEEKRIPIKKVRIYTSIANPLRLKRQRDLSVHDYKRDYYVANDGNYCMGIYEGTDAKGKKKKTFKIVNNMDAANYFKARQRGEDVELLPMSDGNDFPLKCVLKTGSVVLFYQDTPKELKECSKKELAKRLYRVVGMSEMRITRKKGKIDCYGMLSLTFHQEARPSIDLKDKNGEWRIGEDVRPKIKLTHNQTNFLVEGIDFRLTLSGDVEWLK

SEQ ID NO: 19039 - protein, 1200 aa, unidentified
  REGION 1..1200: note = Cas Enzyme sequence
MEKILGIDTGTNSLGWAIIEKDEKGTRLIDRGTNIFTEGVKIEKTGIESSKAAERTGYRAMRKHYWRRKVRKIHLLTLLVENKLCPPLDYNELREWRLKGIYPHNDDFMAWQRTEDKKNINPYHFRHICLTEKLDLSNLTQRYILGRALYHLNQRRGFLSNRKETSKASEGTVSKDISALTAEMRDAGCEYLGEYFYQLYQKGEKIRQHYTARNEHYLREFHAICEKQELPQELSQELVNDLERAIFYQRPLKSQKGTVGTCTFEKGKPRCPSSHPLFEEFRMYSFLNNIKIQTPIDSELRYLSGDEKSKILPLFKRKSKHTFSFEDIAKKLAGKNKYKYYRDKEDKPFRFNYQMDTQIPMCTVTAQLEDIFGQNWLEGACEVYTLAEGKTPYEILNDVWHALFFYDDEEKLKGFAKSRLQLTEDQAEKFSKISMPNDYAALSLKAIRKILPYLKDYGLIYSHAVFLANIDAVLPPFYSRFEKEHQRAVDIIINALLDYDKKHDERPLEFYLKDFIRDNFDDVDTEDLKKLYHPSMMEHYPRAVPNADGIYQLGSPRTSSVRNPMAMRSMFRLRKVVNLLLAKGYIDENTKVHIEFSRDLNDANRRWAIQSWQRTQEKERDECRKRMQDDLIIANPTDTDILKYQLWEEQNHRCIYTGEQIGITDFLGANPKYDIEHTIPRSAGGDSTRMNLTLCNSRYNRDIKKTKLPVELAEHEAILQRIEHWNERAEELNKQIRRLKGNRATTREEKDKIIRRRHLLSLERDYWSGKYKRFTMTEVPEGFSRRQGTDISVISRYARLFLKSVFRHVYIVKGIATSDFRKMWGIQEEYTAKERVNHVHHCIDAITIACIDNVQYAKLAQFYHDDDAYKQGNGSKPQFEKPWPTFVTDIKHIQDELLIAHHSKDNMPKHTRKREGNVIVQGDTARGSLHNETYYGAIERDGDIKYVVRKSLDSLESKDIKNIVDDEVRRKVEEAIAQHGSLKKALELGIWMNEEKQIPIKKVRIFANSVTRPINIRQHRDKSRHEHKRQFHVQNDRNYMMAIYVGNDGRGKEKRAFEIVSNIKAASFYRRSNQEPGGQPLVPKSKIGLPIKHQLKIGSMVLLYEKNPEEVWKLSKHEIERRLYKIIGLNSFAAKTSNYGRISLVHHQEARPSSEIKLKNGAYQSGENFRSGIILLHTQFKALVAGEDFEINDLGEITRL

SEQ ID NO: 19040 - protein, 1219 aa, unidentified
  REGION 1..1219: note = Cas Enzyme sequence
MDKILGLDLGTNSIGWGIVERDEISGQYTLIDKGVDIFQEGVKIEKGIESSKAAERTEFRSARKRLYRRRLRKIETLRILSENGMCPALTKEQLLLWRYKDKYPATEEFIKWLRTDDNSDKNPYCDRHAALHQKLNPDNISDRYRLGRALYHIAQRRGFLSNRLEATKEKENGKVKESIAALDKAMKEEGCQYLGDYFYLLYGKDRVRNHYTARKEHYKAEFDAICAIQELPKELTIALEKAIFFQRPLRSQKGSVGKCTFEPTKSRCAVSHPRFEEFRMLCFINSIKVQTPYDETPRPLSEQEKELVYPLFTRKSKRQFEFEDIAKKLGGKGNYAYIKDPGDKPYKFNYRMHTSVSGCPVTAGLKDIFGEDWQKEICERYAAVETRNGRKSCEEVINDVWHALVSFSDDDKLVVWAKNRLNLSDEEAESFTKIYLAQDYASLSLGAINKILPFLRNGLLYSHSVFLANMSKVVPQETWNNAVERQNIIDAVASIINDYTPEDGTLVNCIGDFLSSNFELAPGALDKLYHPSANGADDIFADVQPDAKGLYQLGSPRTPSVKNPMAMRALFRLRALINTLLRDGSIDRKTKIHIEFARQLNNANMRKAIEAYQRDREKENSGYRQEIIEQYRQATGNEIEPNDTDILKYRLWIEQDKICPYTGRSIGIAQFIGSSPQFDIEHTIPQSVGGDNSIANKTLCECRFNRDIKKAKIPQQLDNIGDILVRIAGWKEKYEELYAQMDKTRGSFSTKEIKDSMIQKRNKLSLENNYWRDKYGRFLMKEVPEGFRKNQDIDNSIIAKYGRLYLKSVFPSVYTIKGVSTSEFRKIWGLQDTDTRKERTNHVHHCIDAITIACIGRDEYDRLARFYHNREDFENYANSNRPSMLKPWPTFTEDVKAIEQELLVSHHTPDNMHKATRKKMRVRGRIQYTSDGKPKYIQGDSARGSLHQDTYYGAIMRDGQIKYVVRKSLGALKETDVDKIVDEAVREKVAAVVRQKGFKQAMAEPIWMNEERGIAIKKVRCFTPSVTKPIHLKKHRDLSAHEYKQDYHVANDSNYVMALYEGIDGRGKIKRDFELISNKDAAEYYKRSCDRHALPDLVPITKNNLPLKYVIKTGTMVLFYENSPEELYESDHKELSKRLYKVIGMSEQVVSDIYHYGTLSLKYHQEARPSKELNIKGGLYKISEGYRPMIGIKHTQFNALVAGYDFELTVTGKIIFKHN

SEQ ID NO: 19041 - protein, 1220 aa, unidentified
  REGION 1..1220: note = Cas Enzyme sequence
MAKVLGLDLGTNSLGWALVDESENEYTLIDKGVDIFQEGVARDKNNEKPAVQDRTSARALRRHYFRRRLRKIELLKILIRYDLCPPLPEELLTAWQKEKRYPQDNEFLRWQRTDDNGDRNPYHDRYVALSERLDLGNRTQRWLLGRALYHLAQRRGFLSNRKEAGNEKEDGTVKECIKNLSAEIAAAGCRYLGEYFYGLYQHKERIRDKYTSRNEHYLAEFNAICDRQQLPDEWRKALHRAIFFQRDLKSQKGSVGRCTFEPTKSRGPVSHPRFEEFRMLSFVNNIRITGPGDNAPRPLTQEEFETIRSLFFRKSKPYFDFEEIARRIAGKGKYACKEERTEAPYRFNFARTATVSGCPVTASLQAIFGDDWITEIRSLYLLGAGKNEDQMLNDVWHALFSFNDEGRLRSWACEKLQLTDEQAKAFATIKLPQDYAALSLNAIGKILVYLRCGYRYDEAVFLANLRAALPKEVYADESRRHEIEQDIASLLLDYKRNPYNKFDSKEHRIADYFSDHGLDASRLMRLYHPSKIETYPDAQPKANGILQLGSPRTAAIRNPMAMRALFRLRNLINTLLREGRIDRDTKIRIEFARGLNDANRRKAIEQYQREREVENRKYAEEIHSQYAAETGREIKPSDDEVLKYRLWEEQQHVCPYTGRQIRISDFVGSAPDFDIEHTLPQARGGDDSQMNKTLCENRFNRETKRAKLPAELSNHVEIMERIESFGWREKMESLQKQIEAQVRRSKSAAIKSEKDDAIQRRHYLQMQLDYWRGKYERFTMAEIPEGFSNRQGVDIGIIGKYARLYLKTVFDRIYTVKGSTTAAFRKMWGLQEEYARKERTNHVHHCIDAITIACIGRREYDRWAQYVADEERYGYGESGKPRFEKPWPTFTEDVKAAADELLVAHHTPDNMTKQTRRKLRVRGRIKLNADGEPIYQQGDTARCRLHQDTFYGAIKQDGEIRYVIRKSLAQLQPTDIDKIIDDAVRDRVREAIDEVGFKTAMNPDEYTIWMNREKGIPIRKVRIFTPSVKHPIALKKQRDLSAKEYKRDYHVVNEGNYCTVIYEGQDKKGKTKRTFELVSNLEAAQYFKASADREARPDLVPQTDTNGFPLKYILKTGTMVLFYENTPAELYECTRKELVKRLYKVTAMAAEGRVQFLFHQEARDQKTLTSLYGAGTSQFCQSNPSPKLRLSVSNFNMLVEGYDFELTVTGEIKFKDDRPC

SEQ ID NO: 19042 - protein, 1220 aa, unidentified
  REGION 1..1220: note = Cas Enzyme sequence
MAKVLGLDLGTNSLGWALVDESENEYTLIDKGVDIFQEGVARDKNNEKPAVQDRTSARALRRHYFRRRLRKIELLKILIRYDLCPPLPEELLTAWQKEKRYPQDNEFLRWQRTDDNGDRNPYHDRYVALSERLDLGNRTQRWLLGRALYHLAQRRGFLSNRKEAGNEKEDGTVKECIKNLSAEIAAAGCRYLGEYFYGLYQHKERIRDKYTSRNEHYLAEFNAICDRQQLPDEWRKALHRAIFFQRDLKSQKGSVGRCTFEPTKSRCPVSHPRFEEFRMLSFVNNIRITGPGDNAPRPLTQEEFETIRSLFFRKSKPYFDFEEIARRIAGKGKYACKEERTEAPYRFNFARTATVSGCPVTASLQAIFGDDWITEIRSLYLLGAGKNEDQMLNDVWHALFSFNDEGRLRSWACEKLQLTDEQAKAFAAIKLPQDYAALSLNAIGKILVYLRCGYRYDEAVFLANLRAALPKEVYADESRRHEIEQDIASLLLDYKRNPYNKFDSKEHRIADYFSDHGLDASRLIRLYHPSKIETYPDAQPKANGILQLGSPRTATIRNPMAMRALFRLRNLINTLLREGRIDRDTKIRIEFARGLNDANRRKAIEQYQREREVENRKYAEEIHSQYAAETGREIKPSDDEVLKYRLWEEQQHVCPYTGRQIRISDFVGSAPDFDIEHTLPQARGGDDSQMNKTLCENRFNRETKRAKLPAELSNHVEIMERIESFGWREKMESLQKQIEAQVRRSKSAAIKSEKDDAIQRRHYLQMQLDYWRGKYERFTMAEIPEGFSNRQGVDIGIIGKYARLYLKTVFDRIYTVKGSTTAAFRKMWGLQEEYARKERTNHVHHCIDAITIACIGRREYDRWAQYVADEERYGYGESGKPRFEKPWPTFTEDVKAAADELLVAHHTPDNMTKQTRRKLRVRGRIKLNADGEPIYQQGDTARCRLHQDTFYGAIKQDGEIRYVIRKSLTQLQPTDIDKIIDDAVRDRVREAIDEVGFKTAMNPDEYTIWMNREKGIPIRKVRIFTPSVKHPIALKKQRDLSAKEYKRDYHVVNEGNYCTVIYEGQDKKGKTKRTFELVSNLEAAQYFKASADREARPDLVPQTDTNGFPLKCILKTGTMVLFYENSPAELYDCSHKELTKRLYKVTAMAAEGRVQFLFHQEARDQKTLTSLYGAGTSQFCQSNPSPKLRLSVSNFNMLVEGYDFELTVTGEIKFKDDRPC

SEQ ID NO: 19043 - protein, 1220 aa, unidentified
  REGION 1..1220: note = Cas Enzyme sequence
MAKVLGLDLGTNSLGWALVDESENEYTLIDKGVDIFQEGVARDKNNEKPAVQDRTSARALRRHYFRRRLRKIELLKILIRYDLCPPLPEELLTAWQKEKRYPQDNEFLRWQRTDDNGDRNPYHDRYVALSERLDLGNRTQRWLLGRALYHLAQRRGFLSNRKEAGNEKEDGTVKECIKNLSAEIAAAGCRYLGEYFYGLYQHKERIRDKYTSRNEHYLAEFNAICDRQQLPDEWRKALHRAIFFQRDLKSQKGSVGRCTFEPTKSRCPVSHPRFEEFRMLSFVNNIRITGPGDNAPRPLTQEEFETIRSLFFRKSKPYFDFEEIARRIAGKGKYACKEERTEAPYRFNFARTATVSGCPVTASLQAIFGDDWITEIRSLYLLGAGKNEDQMLNDVWHALFSFNDEGRLRSWACEKLQLTDEQAKAFAAIKLPQDYAALSLNAIGKILVYLRCGYRYDEAVFLANLRAALPKEVYADESRRHEIEQDIASLLLDYKRNPYNKFDSKEHRIADYFSDHGLDASRLIRLYHPSKIETYPDAQPKANGILQLGSPRTATIRNPMAMRALFRLRNLINTLLREGRIDRDTKIRIEFARGLNDANRRKAIEQYQREREVENRKYAEEIHSQYAAETGREIKPSDDEVLKYRLWEEQQHVCPYTGRQIRISDFVGSAPDFDIEHTLPQARGGDDSQMNKTLCENRFNRETKRAKLPAELSNHVEIMERIESFGWREKMESLQKQIEAQVRRSKSAAIKSEKDDAIQRRHYLQMQLDYWRGKYERFTMAEIPEGFSNRQGVDIGIIGKYARLYLKTVFDRIYTVKGSTTAAFRKMWGLQEEYARKERTNHVHHCIDAITIACIGRREYDRWAQYVADEERYGYGESGKPRFEKPWPTFTEDVKAAADELLVAHHTPDNMTKQTRRKLRVRGRIKLNADGEPIYQQGDTARCRLHQDTFYGAIKQDGEIRYVIRKSLTQLQPTDIDKIIDDAVRDRVREAIDEVGFKTAMNPDEYTIWMNREKGIPIRKVRIFTPSVKHPIALKKQRDLSAKEYKRDYHVVNEGNYCTVIYEGQDKKGKTKRTFELVSNLEAAQYFKASADREARPDLVPQTDTNGFPLKYILKTGTMVLFYENTPAELYECTRKELVKRLYKVTAMAAEGRVQFLFHQEARDQKTLTSLYGAGTSQFCQSNPSPKLRLSVSNFNMLVEGYDFELTVTGEIKFKDDRPC

SEQ ID NO: 19044 - protein, 1220 aa, unidentified
  REGION 1..1220: note = Cas Enzyme sequence
MAKVLGLDLGTNSLGWALVDESENEYTLIDKGVDIFQEGVARDKNNEKPAVQDRTSARALRRHYFRRRLRKIELLKILIRYDLCPPLPEELLTAWQKEKRYPQDNEFLRWQRTDDNGDRNPYHDRYVALSERLDLGNRTQRWLLGRALYHLAQRRGFLSNRKEAGNEKEDGTVKECIKNLSAEIAAAGCRYLGEYFYGLYQHKERIRDKYTSRNEHYLAEFNAICDRQQLPDEWRKALHRAIFFQRDLKSQKGSVGRCTFEPTKSRCPVSHPRFEEFRMLSFVNNIRITGPGDNAPRPLTQEEFETIRSLFFRKSKPYFDFEEIARRIAGKGKYACKEERTEAPYRFNFARTATVSGCPVTASLQAIFGDDWITEIRSLYLLGAGKNEDQMLNDVWHALFSFNDEGRLRSWACEKLQLTDEQAKAFAAIKLPQDYAALSLNAIGKILVYLRCGYRYDEAVFLANLRAALPKEVYADESRRHEIEQDIASLLLDYKRNPYNKFDSKEHRIADYFSDHGLDASRLIRLYHPSKIETYPDAQPKANGILQLGSPRTATIRNPMAMRALFRLRNLINTLLREGRIDRDTKIRIEFARGLNDANRRKAIEQYQREREVENRKYAEEIHSQYAAETGREIKPSDDEVLKYRLWEEQQHVCPYTGRQIRISDFVGSAPDFDIEHTLPQARGGDDSQMNKTLCENRFNRETKRAKLPAELSNHVEIMERIESFGWREKMESLQKQIEAQVRRSKSAAIKSEKDDAIQRRHYLQMQLDYWRGKYERFTMAEIPEGFSNRQGVDIGIIGKYARLYLKTVFDRIYTVKGSTTAAFRKMWGLQEEYARKERTNHVHHCIDAITIACIGRREYDRWAQYVADEERYGYGESGKPRFEKPWPTFTEDVKAAADELLVAHHTPDNMAKQTRRKLRVRGRIKLNADGEPIYQQGDTARCRLHQDTFYGAIKQDGEIRYVIRKSLAQLQPTDIDKIIDDAVRDRVREAIDEVGFKTAMNPDEYTIWMNREKGIPIRKVRIFTPSVKHPIALKKQRDLSAKEYKRDYHVVNEGNYCTVIYEGQDKKGKTKRTFELVSNLEAAQYFKASADREARPDLVPQTDTNGFPLKYILKTGTMVLFYENTPAELYECTRKELVKRLYKVTAMAAEGRVQFLFHQEARDQKTLTSLYGAGTSQFCQSNPSPKLRLSVSNFNMLVEGYDFELTVTGEIKFKDDRPC

SEQ ID NO: 19045 - protein, 1221 aa, unidentified
  REGION 1..1221: note = Cas Enzyme sequence
MAKVLGLDLGTNSLGWALVDESENEYTLIDKGVDIFQEGVARDKNNEKPAVQDRTSARALRRHYFRRRLRKIELLKILIRYDLCPPLPEELLTAWQKEKRYPQDNEFLRWQRTDDNGDRNPYHDRYVALSERLDLGNRTQRWLLGRALYHLAQRRGFLSNRKEAGNEKEDGTVKECIKNLSAEIAAAGCRYLGEYFYGLYQHKERIRDKYTSRNEHYLAEFNAICDRQQLPDEWRKALHRAIFFQRDLKSQKGSVGRCTFEPTKSRCPVSHPRFEEFRMLSFVNNIRITGPGDNAPRPLTQEEFETIRSLFFRKSKPYFDFEEIARRIAGKGKYACKEERTEAPYRFNFARTATVSGCPVTASLQAIFGDDWITEIRSLYLLGAGKNEDQMLNDVWHALFSFNDEGRLRSWACEKLQLTDEQAKAFAAIKLPQDYAALSLNAIGKILVYLRCGYRYDEAVFLANLRAALPKEVYADESRRHEIEQDIASLLLDYKRNPYNKFDSKEHRIADYFSDHGLDASRLIRLYHPSKIETYPDAQPKANGILQLGSPRTATIRNPMAMRALFRLRNLINTLLREGRIDRDTKIRIEFARRLNDANRRKAIEQYQREREVENRKYAEEIHSQYAAETGREIKPSDDEVLKYRLWEEQQHVCPYTGRQIRISDFVGSAPDFDIEHTLPQARGGDDSQMNKTLCENRFNRETKRAKLPAELSNHVEIMERIESFGWREKMESLQKQIEAQVRRSKSAAIKSEKDDAIQRRHYLQMQLDYWRGKYERFTMAEIPEGFSNRQGVDIGIIGKYARLYLKTVFDRIYTVKGSTTAAFRKMWGLQEEYARKERTNHVHHCIDAITIACIGRREYDRWAQYVADEERYGYGESGKPRFEKPWPTFTEDVKAAADELLVAHHTPDNMTKQTRRKLRVRGRIKLNADGEPIYQQGDTARCRLHQDTFYGAIKQDGEIRYVIRKSLTQLQPTDIDKIIDDAVRDRVREAIDEVGFKTAMNPDEYTIWMNREKGIPIRKVRIFVRKTTLIPLGNKQHRDRSDKEYKRKYLVANEGNYCMAVYEGKDKKGRTDHSFEIISNLQAAEYFKRSTDRNERHDLAPVADTNGYPLKYLLKTGSMVLFYENTPAELYECTRKELVKRLYKVTAMAAEGRVQFLFHQEARDQKTLTSLYGAGTSQFCQSNPSPKLRLSVSNFNMLVEGYDFELTVTGEIKFKDDRPC

SEQ ID NO: 19046 - protein, 1220 aa, unidentified
  REGION 1..1220: note = Cas Enzyme sequence
MTKVLGLDLGTNSLGWALVDESENGYALLDKGVAIFQEGVARDKNNEKPAVQDRTDARALRRHYFRRRLRKIDLLRVLVRYDLCPPLTDEQLSTWRQKKQYPLDKEFLRWQRTDDNEDRNPYHDRYVALTERLDLENRAQRWLLGRAFYHLAQRRGFLSNRKEAGNEKEDGTVKESIKNLSAEMEAAGCRYLGEYFYGLYQHKERIRGKYTSRNEHYLTEFNAICDRQQLPDKWRRALHRAIFFQRDLKSQKGSVSRCTFEPTKSRCPVSHPRFEEFRMWSFINNIRVTGPDDGTPRPLTPKEIETIRPLFFRKSKSYFDFEEIARRIAGKGKYACREERIEAPYRFNFARTATVSGCPVTASLMDIFGKEWLREIRGLYLLGDGKTEEQVLNDIWHALFSFKDEERLRDWACEKLQLSEEQAKAFAAIKLPQDYAAMSLNAINKILPYLRCGYRYDEAVFLANLRAALPKEVYADEDRRHNIEQEIASLLLDYKRNPYDKFDSKERRIANYFSDHGLDMSRLDRLYHPSKIETYPDAKPNAEGIMQLGSPRTSAIRNPMAMRALFRLRDLINTLLREGRIDRDTKIRIEFARGLNDANRRKAIEQYQREREAENRKFVEEIRRQYTAETGREIEPSDDEVLKYRLWEEQQHICPYTGRQIRISDFIGANPGFDIEHTLPRALGGDDSQMNKTLCENRFNRETKRAKLPAELSNHAEIMERIESFGWREKVESLQKQIEAQVRRSKGAATKPEKDSAIQRRHYLQMQLDYWRGKCERFTMTEIPEGFSNRQGIDIGIIGKYARLYLKTVFDRIYTVKGSTTAAFRKMWGLQEEYTRKERVNHIHHCIDAITIACIGRREYDRWAQYAADEERFNYGETDKPRFEKPWPTFTEDVKAVADELLVTHHTPDNMAKQTRKKLRVRGRVKLSADGKPIYQQGDTARCRLHQETFYGAIKREDEIRYVVRKSIKLLQPSDIDKIVDDAVRDRVRMAIDEVGFKTAINPDEYTIWMNREKGIPIRKVRIFTPGVTQPIALKKQRDLSDKEYKQDYHVANDGNYCMAVYEGKDKKGKLKRSFELVSNLEAAQYFKASADREACPDLVPQADANGFPLKCILKAGTLVLFYENSPAELCDCTPKELTKRLYKVTAMAAEGRVQFLFHQEARDQKTLTALYGAGASQFRQSNPSPKLRLSVSNFNMLVEGYDFELTVTGEIKFKHGRPC

SEQ ID NO: 19047 - protein, 1220 aa, unidentified
  REGION 1..1220: note = Cas Enzyme sequence
MAKVLGLDLGTNSLGWALVDESENEYTLIDKGVDIFQEGVARDKNNEKPAIQDRTSARALRRHYFRRRLRKIELLKILIRYDLCPPLPEELLTAWQKEKRYPQDNEFLRWQRTDDNGDRNPYHDRYVALSERLDLGNRTQRWLLGRALYHLAQRRGFLSNRKEAGNEKEDGTVKECIKNLSAEIAAAGCRYLGEYFYGLYQHKERIRDKYTSRNEHYLAEFNAICDRQQLPDEWRKALHRAIFFQRDLKSQKGSVGRCTFEPTKSRCPVSHPRFEEFRMLSFVNNIRITGPGDNAPRPLTQEEFETIRSLFFRKSKPYFDFEEIARRIAGKGKYACKEERTEAPYRFNFARTATVSGCPVTASLQAIFGDDWITEIRSLYLLGAGKNEDQMLNDVWHALFSFNDEGRLRSWACEKLQLTDEQAKAFAAIKLPQDYAALSLNAIGKILVYLRCGYRYDEAVFLANLRAALPKEVYADESRRHEIEQDIASLLLDYKRNPYNKFDSKEHRIADYFSDHGLDASRLIRLYHPSKIETYPDAQPKANGILQLGSPRTATIRNPMAMRALFRLRNLINTLLREGRIDRDTKIRIEFARGLNDANRRKAIEQYQREREVENRKYAEEIHSQYAAETGREIKPSDDEVLKYRLWEEQQHVCPYTGRQIRISDFVGSAPDFDIEHTLPQARGGDDSQMNKTLCENRFNRETKRAKLPAELSNHVEIMERIESFGWREKMESLQKQIEAQVRRSKSAAIKSEKDDAIQRRHYLQMQLDYWRGKYERFTMAEIPEGFSNRQGVDIGIIGKYARLYLKTVFDRIYTVKGSTTAAFRKMWGLQEEYARKERTNHVHHCIDAITIACIGRREYDRWAQYVADEERYGYGESGKPRFEKPWPTFTEDVKAAADELLVAHHTPDNMTKQTRRKLRVRGRIKLNADGEPIYQQGDTARCRLHQDTFYGAIKQDGEIRYVIRKSLAQLQPTDIDKIIDDAVRDRVREAIDEVGFKTAMNPDEYTIWMNREKGIPIRKVRIFTPSVKHPIALKKQRDLSAKEYKRDYHVVNEGNYCTVIYEGQDKKGKTKRTFELVSNLEAAQYFKASADREARPDLVPQTDTNGFPLKYILKTGTMVLFYENTPAELYECTRKELVKRLYKVTAMAAEGRVQFLFHQEARDQKTLTSLYGAGTSQFCQSNPSPKLRLSVSNFNMLVEGYDFELTVTGEIKFKDDRPC

SEQ ID NO: 19048 - protein, 1220 aa, unidentified
  REGION 1..1220: note = Cas Enzyme sequence
MAKVLGLDLGTNSLGWALVDESENEYTLIDKGVDIFQEGVARDKNNEKPAVQDRTSARALRRRYFRRRLRKIELLKILIRYDLCPPLPEELLTAWQKEKRYPQDNEFLRWQRTDDNGDRNPYHDRYVALSERLDLGNRTQRWLLGRALYHLAQRRGFLSNRKEAGNEKEDGTVKECIKNLSAEIAAAGCRYLGEYFYGLYQHKERIRDKYTSRNEHYLAEFNAICDRQQLPDEWRKALHRAIFFQRDLKSQKGSVGRCTFEPTKSRCPVSHPRFEEFRMLSFVNNIRITGPGDNAPRPLTQEEFETIRSLFFRKSKPYFDFEEIARRIAGKGKYACKEERTEAPYRFNFARTATVSGCPVTASLQAIFGDDWITEIRSLYLLGAGKNEDQMLNDVWHALFSFNDEGRLRSWACEKLQLTDEQAKAFAAIKLPQDYAALSLNAIGKILVYLRCGYRYDEAVFLANLRAALPKEVYADESRRHEIEQDIASLLLDYKRNPYNKFDSKEHRIADYFSDHGLDASRLMRLYHPSKIETYPDAQPKANGILQLGSPRTAAIRNPMAMRALFRLRNLINTLLREGRIDRDTKIRIEFARGLNDANRRKAIEQYQREREVENRKYAEEIHSQYAAETGREIKPSDDEVLKYRLWEEQQHVCPYTGRQIRISDFVGSAPDFDIEHTLPQARGGDDSQMNKTLCENRFNRETKRAKLPAELSNHVEIMERIESFGWREKMESLQKQIEAQVRRSKSAAIKSEKDDAIQRRHYLQMQLDYWRGKYERFAMAEIPEGFSNRQGVDIGIIGKYARLYLKTVFDRIYTVKGSTTAAFRKMWGLQEEYARKERTNHVHHCIDAITIACIGRREYDRWAQYVADEERYGYGESGKPRFEKPWPTFTEDVKAAADELLVAHHTPDNMTKQTRRKLRVRGRIKPNADGKPIYQQGDTARCRLHQDTFYGAIKQDGEIRYVIRKSLAQLQPTDIDKIIDDAVRDRVREAIDEVGFKTAINSDEYTIWMNREKGIPIRKVRIFTPSVKHPIALKKQRDLSAKEYKRDYHVVNEGNYCTVIYEGQDKKGKTKRTFELVSNLEAAQYFKASADREARPDLVPQTDTNGFPLKCILKTGTMVLFYENSPAELYECSHKELTKRLYKVTAMAAEGRVQFLFHQEARDQKTLTSLYGAGTSQFCQSNPSPKLRLSVSNFNMLVEGYDFELTVTGEIKFKDDRPC

SEQ ID NO: 19049 - protein, 1220 aa, unidentified
  REGION 1..1220: note = Cas Enzyme sequence
MAKVLGLDLGTNSLGWALVDESENEYTLIDKGVDIFQEGVARDKNNEKPAVQDRTSARALRRRYFRRRLRKIELLKILIRYDLCPPLPEELLTAWQKEKRYPQDNEFLRWQRTDDNGDRNPYHDRYVALSERLDLGNRTQRWLLGRALYHLAQRRGFLSNRKEAGNEKEDGTVKECIKNLSAEIAAAGCRYLGEYFYGLYQHKERIRDKYTSRNEHYLAEFNAICDRQQLPDEWRKALHRAIFFQRDLKSQKGSVGRCTFEPTKSRCPVSHPRFEEFRMLSFVNNIRITGPGDNAPRPLTQEEFETIRSLFFRKSKPYFDFEEIARRIAGKGKYACKEERTEAPYRFNFARTATVSGCPVTASLQAIFGDDWITEIRSLYLLGAGKNEDQMLNDVWHALFSFNDEGRLRSWACEKLQLTDEQAKAFAAIKLPQDYAALSLNAIGKILVYLRCGYRYDEAVFLANLRAALPKEVYADESRRHEIEQDIASLLLDYKRNPYNKFDSKEHRIADYFSDHGLDASRLMRLYHPSKIETYPDAQPKANGILQLGSPRTAAIRNPMAMRALFRLRNLINTLLREGRIDRDTKIRIEFARGLNDANRRKAIEQYQREREVENRKYAEEIHSQYAAETGREIKPSDDEVLKYRLWEEQQHVCPYTGRQIRISDFVGSAPDFDIEHTLPQARGGDDSQMNKTLCENRFNRETKRAKLPAELSNHVEIMERIESFGWREKMESLQKQIEAQVRRSKSAAIKSEKDDAIQRRHYLQMQLDYWRGKYERFTMAEIPEGFSNRQGVDIGIIGKYARLYLKTVFDRIYTVKGSTTAAFRKMWGLQEEYARKERTNHVHHCIDAITIACIGRREYDRWAQYVADEERYGYGESGKPRFEKPWPTFTEDVKAAADELLVAHHTPDNMTKQTRRKLRVRGRIKPNADGKPIYQQGDTARCRLHQDTFYGAIKQDGEIRYVIRKSLAQLQPMDIDKIIDDTVRDRVREAIDEVGFKTAMNPDEYTIWMNREKGIPIRKVRIFTPSVKHPIALKKQRDLSAKEYKRDYHVVNEGNYCTVIYEGQDKKGKTKRTFELVSNLEAAQYFKASADREARPDLVPQTDTNGFPLKCILKTGTMVLFYENSPAELYECSHKELTKRLYKVTAMAAEGRVQFLFHQEARDQKTLTSLYGAGTSQFCQSNPSPKLRLSVSNFNMLVEGYDFELTVTGEIKFKDDRPC

SEQ ID NO: 19050 - protein, 1220 aa, unidentified
  REGION 1..1220: note = Cas Enzyme sequence
MEKILGVDLGTNSIGWAIVEDTDKGYILKDRGVDIFQEGVARDKNNEKPSVQDRTEARALRRHYFRRRLRKIELLRLLVKYGLCPYLTDEQLDLWRMKKHYPLDDGFLQWQRTDDNKDKNPYHDRYVALTQTLNLEKMEHRYMLGRAIYHLAQRRGFISNRKEVGKDKEDGVVKDGIKSLSTEMEKAGCHYIGEYFYKLYQHKGKIRGRHTSRNEHYRAEFDAICERQQLPEEWRKNMYRAIFYQRPLKSQKGLVGKCTFEPKKSRCPVSHPRFEEFRMLSLMNNVRVTSPGEIEPRPLSQSEITTITPLFLRKSKPYFDFEEIARKIAGKGKYACRNDRNEAPYRFNYARTATVSGCPVTAAIVAVFGSDWISEICSLYRLGEGKTEEQVINDVWHALFSFDDETRLKTWAQENLQLTEEQAEDFASIRLPQDYAALSLNAINKILPYLRRGYRYDEAVFLANLKAALPHYIYEDGQRRGEIENDIANLLSSYRRNPYDKYDTKERRITDYFSDQGLDTSRIDRLYHPSMIDTYRRVMPDAEGCMQLGSPRTSSIRNPMAMRSLFRLRALINRLLRDGKIDRDTKINIEFARGLNDANRRKAIEQYQREREVENRRYADEIRKQYLTESGREIVPSEDDILKYRLWEEQQHICPYTGRQIGISDFIGSSPVFDIEHTVPRARGGDDSQMNKTLCDSRFNRERKRAKLPSELSSHVDILERIESLGWLKRVEDLQKQIEAQVRKSKGAATKTEKDGAIQRRHYLQMQLDYWRGKCERFTMTEVPDGFSNRQGVDIGIIGRYARLYLKTVFDRIYTVKGATTAAFRKMWGLQDEYSKKERTNHVHHCIDAITIACIGRKEYDRWAQYASDEERYSYGESGKPRFEKPWPTFTEDVKAVADELLVSHNTPDNMEKQTRKKMRVRGKVKFNSEGNPIYIQGDTARRKLHQDTFYGAIKRDDEVKYVVRKSLGQLQQSDVDKIVDDVVKSRVKEAIREVGFAKAMDPEEYTIWMNEAKRIPIRKVRIFTPSITQPIALRKQRDLSDKEYKQDYHVANDGNYCMAVYEGQDKRGKTKRTFEIISNLEAAKYFKRSADRADRPDLVPMSDSNGYPLKCILKIGTMVLFYEKSPAELYECSRKDLVKRLYKVTAMAAEGRVQFLFHQEARDQVTLKDICGQGASQFRLSEPSPKLRLCVSNFNILVEGCDFELTVTGEIKFKHAMPC

SEQ ID NO: 19051 - protein, 1220 aa, unidentified
  REGION 1..1220: note = Cas Enzyme sequence
MAKVLGLDLGTNSLGWALVDESENEYTLIDKGVDIFQEGVARDKNNEKPAVQDRTSARALRRHYFRRRLRKIELLKILIRYDLCPPLPEELLTAWQKEKRYPQDNEFLRWQRTDDNGDRNPYHDRYVALSERLDLGNRTQRWLLGRALYHLAQRRGFLSNRKEAGNEKEDGTVKECIKNLSAEIAAAGCRYLGEYFYGLYQHKERIRDKYTSRNEHYLAEFNAICDRQQLPDEWRKALHRAIFFQRDLKSQKGSVGRCTFEPTKSRCPVSHPRFEEFRMLSFVNNIRITGPGDNAPRPLTQEEFETIRSLFFRKSKPYFDFEEIARRIAGKGKYACKEERTEAPYRFNFARTATVSGCPVTASLQAIFGDDWITEIRSLYLLGAGKNEDQMLNDVWHALFSFNDEGRLRSWACEKLQLTDEQAKAFAAIKLPQDYAALSLNAIGKILVYLRCGYRYDEAVFLANLRAALPKEVYADESRRHEIEQDIASLLLDYKRNPYNKFDSKEHRIADYFSDHGLDASRLIRLYHPSKIETYPDAQPKANGILQLGSPRTATIRNPMAMRALFRLRNLINTLLREGRIDRDTKIRIEFARGLNDANRRKAIEQYQREREVENRKYAEEIHSQYAAETGREIKPSDDEVLKYRLWEEQQHVCPYTGRQIRISDFVGSAPDFDIEHSLPQARGGDDSQMNKTLCENRFNRETKRAKLPAELSNHVEIMERIESFGWREKMESLQKQIEAQVRRSKSAAIKSEKDDAIQRRHYLQMQLDYWRGKYERFTMAEIPEGFSNRQGVDIGIIGKYARLYLKTVFDRIYTVKGSTTAAFRKMWGLQEEYARKERTNHVHHCIDAITIACIGRREYDRWAQYVADEERYGYGESGKPRFEKPWPTFTEDVKAAADELLVAHHTPDNMTKQTRRKLRVRGRIKLNADGEPIYQQGDTARCRLHQDTFYGAIKQDGEIRYVIRKSLAQLQPTDIDKIIDDAVRDRVREAIDEVGFKTAMNPDEYTIWMNREKGIPIRKVRIFTPSVKHPIALKKQRDLSAKEYKRDYHVVNEGNYCTVIYEGQDKKGKTKRTFELVSNLEAAQYFKASADREARPDLVPQTDTNGFPLKYILKTGTMVLFYENTPAELYECTRKELVKRLYKVTAMAAEGRVQFLFHQEARDQKTLTSLYGAGTSQFCQSNPSPKLRLSVSNFNMLVEGYDFELTVTGEIKFKDDRPC

SEQ ID NO: 19052 - protein, 1237 aa, unidentified
  REGION 1..1237: note = Cas Enzyme sequence
MEICNILFNFTRNNFFHMAKVLGLDLGTNSLGWALADEYEQGYALLDKGVEIFQEGVARDKNNEKPAVQDRTDARALRRHYFRRRLRKIDLLRVLVRYDLCPPLTEEQLSTWRQKKQYPLDEEFLRWQRTDDNEDRNPYHDRYVALTERLDLENRAQRWLLGRAFYHLAQRRGFLSNRKEAGNEKEDGTVKESIKNLSAEMEAAGCRYLGEYFYGLYQHKERIRGKYTSRNEHYLAEFNAICDRQQLPDKWRKELHRAIFFQRDLKSQRGSVGRCTFEPRKSRCPVSHPRFEEFRMWSFINNIRVTGPDDGTPRPLTPKEIETIRPLFFRKSKSYFDFEEIARRIAGKGKYACREERIEAPYRFNFARTTTVSGCPVTASLMDIFGKEWLREIRSLYLLGDGKTEEQVLNDIWHALFSFKDEERLRDWACEKLQLSEEQAKAFAAIKLPQDYAAMSLNAINKILPYLRCGYRYDEAVFLANLRAALPKEVYADENRRHNIEQEIASLLLDYKRNPYDKFDSKERRIADYFSDHGLDMSRLDRLYHPSKIETYPDAKPNAEGIMQLGSPRTSAIRNPMAMRALFRLRDLINTLLREGRIDRDTKIRIEFARGLNDANRRKAIEQYQREREAENRKFAEEIRRQYTAETGREMEPSDDEVLKYRLWEEQQHICPYTGRQIRISDFIGANPGFDIEHTLPRALGGDDSQMNKTLCENRFNRETKRAKLPAELSNHAEIMERIESFGWREKVESLQKQIEAQVRRSKGAATKPEKDSAIQRRHYLQMQLDYWRGKYERFTMTEIPEGFSNRQGVDIGIIGKYARLYLKTVFDRIYTVKGSTTAAFRKMWGLQEEYIRKERVNHIHHCIDAITIACIGRREYDRWAQYAGDEERFNYGESDKPRFEKPWPTFTEDVKAVADELLVAHHTPDNMTKQTRKKLRVRGRVKLSADGKPIYQQGDTARCRLHQETFYGAIKREDEIRYVVRKSIKLLQPTDIDKIVDDAVRDRVRMAIDEVGFKTAINPDEYTIWMNREKGIPIRKVRIFTPGVTQPIALKKQRDLSDKEYKQDYHVANNGNYCMAVYEGKDKKGKLKRSFELVSNLEAAQYFKASADRETYPDMVPLADANGFPLKCILKTGTMVLFYENSPAELYECSRKELVKRLYKVTAMAAEGRVQFLFHQEARDQKTLTALYGAGTSQFCQSNPSPKLRLSISNFNMLVEGYDFELTVTGEIKFKGDRPC

SEQ ID NO: 19053 - protein, 1220 aa, unidentified
  REGION 1..1220: note = Cas Enzyme sequence
MAKVLGLDLGTNSLGWALADEYEQGYALLDKGVEIFQEGVARDKNNEKPAVQDRTDARALRRHYFRRRLRKIDLLRVLVRYDLCPPLTEEQLSTWRQKKQYPLDEEFLRWQRTDDNEDRNPYHDRYVALTERLDLENRAQRWLLGRAFYHLAQRRGFLSNRKEAGNEKEDGTVKESIKNLSAEMEAAGCRYLGEYFYGLYQHKERIRGKYTSRNEHYLAEFNAICDRQQLPDKWRRALHRAIFFQRDLKSQKGSVGRCTFEPTKSRCPVSHPRFEEFRMWSFINNIRVTGPDDGRPRPLTPKEIETIRPLFFRKSKSYFDFEEIARRIAGKGKYACREERIEAPYRFNFARTTTVSGCPVTASLMDIFGKEWLREIRSLYLLGDGKTEEQVLNDIWHALFSFKDEERLRDWACEKLQFSEEQAKAFAAIKLPQDYAAMSLNAINKILPYLRCGYRYDEAVFLANLRAALPKEVYADENRRHNIEQDIASLLLDYKRNPYDKFDSKERRIADYFSDHGLDMSRLDRLYHPSKIETYPDAKPNAEGIMQLGSPRTSAIRNPMAMRALFRLRDLINTLLREGRIDRDTKIRIEFARGLNDANRRKAIEQYQREREAENRKFAEEIRRQYTAETGREMEPSDDEVLKYRLWEEQQHICPYTGRQIRISDFIGANPGFDIEHTLPRALGGDDSQMNKTLCENRFNRETKRAKLPAELSNHAEIMERIESFGWREKVESLQKQIEAQVRRSKGAATKPEKDSAIQRRHYLQMQLDYWRRKYERFTMTEIPEGFSNRQGVDIGIIGKYARLYLKTVFDRIYTVKGSTTAAFRKMWGLQEEYIRKERVNHIHHCIDAITIACIGRREYDRWAQYAGDEERFNYGESDKPRFEKPWPTFTEDVKAVADELLVAHHTPDNMTKQTRKKLRVRGRVKLSADGKPIYQQGDTARCRLHQETFYGAIKREDEIRYVVRKSIKLLQPTDIDKIVDDAVRDRVRMAIDEVGFKTAINPDEYTIWMNREKGIPIRKVRIFTPGVTQPIALKKQRDLSDKEYKQDYHVANNGNYCMAVYEGKDKKGKLKRSFELVSNLEAAQYFKASADRETYPDMVPLADANGFPLKCILKTGTMVLFYENSPAELYECSRKELVKRLYKVTAMAAEGRVQFLFHQEARDQKTLTALYGAGTSQFCQSNPSPKLRLSISNFNMLVEGYDFELTVTGEIKFKGDRPC

SEQ ID NO: 19054 - protein, 1046 aa, unidentified
  REGION 1..1046: note = Cas Enzyme sequence
MATILGLDLGTNSLGWAVVEETEHGYTLKEQGVDIFQEGVAREKNNEKPAVQDRTNARALRRQYFRRRLRKIDLLRVLVRYDLCPPLSGEQLTAWRKEKRYPLDEAFLQWQRTDDNADRNPYHDRYVALSEQLDLGNRQHRHLLGRALYHLAQRRGFISNRKEAGKEQEEGTVKSSIRSLTAEMEAAGCRYLGEYFYQLYQHKEKIRGKYTSRNEHYLAEFEAICERQQLPDEWRKALHRAIFFQRDLKSQKGAVGRCTFEPRKSRCPVSHPRFEEFRMLQFINNIRITSPQDAAPRPLTQEEVDAIHPLFYRKSKPHFEFEEIARKIAGKGKYACGEERIEAPYRFNFARTTTVSGCPVTASLIAVFGSDWLREMCSLYLLGEGKNEEQVLNDVWHALFFFKDEECLRTWALEKLQLTAEQAKAFAAIRLPQDYAALSLNAINKILPYLRLGYRYDEAVFLANLKAVLPKEAYDNEERRHEIEHDIAELLLGYKRDLDDKYDSKEHRIANYFSDHGLDLSRFDRLYHPSMIETYRKAQPDAAGLLQLGSPRTPAVRNPMAMRALFRLRALVNRLLRDGKIDCNTKLRIEFARELNNANLRKAIEQYQRERETENRKFAEEIRSQYAAETGRTVDPTDDEVLKYRLWEEQQHVCPYTGRQIRISDFIGANPGFDIEHTIPRARGGDDSQMNKTLCENRYNRVVKRSKLPTELSDHAEIMACIESFGWQEKVETLQKQIDAQIRKSKAAATKTEKDSAIQRRHYLKLQQDYWRGKYDRFTMTEVPEGFSNRQGVDIGIIGRYARLYLKTVFDRIYTVKGATTSDFRKIWGLQAEYEKKARVNHVHHCIDAITIACIGHREYLAWKRYAEEAERYQLGEGDRPDIEKPWPTFTEDVKAVADELLVSHHTADNMAKQTRKKLRVRGLVRLNDAGKPIYMQGDTARALLHKDTFYGAIEREGEIRYVVRKSLGQLQPGDEDKIVDDAVRERVREAIKAVGFKTAMNADEYTIWMNREKGVPIRKVRIYTPSVTQPVALKKQRDLSEKEYK

SEQ ID NO: 19055 - protein, 1220 aa, unidentified
  REGION 1..1220: note = Cas Enzyme sequence
MATILGLDLGTNSLGWAVVEETEHGYTLKEQGVDIFQEGVAREKNNEKPAVQDRTNARALRRQYFRRRLRKIDLLRVLVRYDLCPPLSGEQLTAWRKEKRYPLDEAFLQWQRTDDNADRNPYHDRYVALSEQLDLGNRQHRYLLGRALYHLAQRRGFISNRKEAGKEQEEGTVKSSIRSLTAEMEAAGCRYLGEYFYQLYQHKEKIRGKYTSRNEHYLAEFEAICERQQLPDEWRKALHRAIFFQRDLKSQKGAVGRCTFEPRKSRCPVSHPRFEEFRMLQFINNIRITSPQDTAPRPLTQEEVEVIRPLFYRKSKPHFEFEEIARKIAEKGKYACGEERTEAPYRFNFARTMTVSGCPVTASLIAVFGSDWLREMCSLYLLGEGKNEEQVLNDVWHALFFFKDEECLRTWALEKLQLTAEQAKAFAAIRLPQDYAALSLNAINKILPYLRLGYRYDEAVFLANLKAVLPKEAYDNEERRHEIEHDIAELLLGYKRNLYDKYDSKEHRIADYFSDHGLDLSRFDRLYHPSMIETYRKAQPDAAGILQLGSPRTSAVRNPMAMRALFRLRALVNRLLRDGKIDRNTKLRIEFARELNNANLRKAIEQYQREREAETRKFAEEIRSQYAAETGRTIDPTDDEILKYRLWEEQQHVCPYTGRQIRISDFIGANPGFDIEHTIPRARGGDDSQMNKTLCENRYNRVVKRSKLPTELSDFAEIMARIESFGWQEKVETLQKQIDAQIRKSKAAATKTEKDSAIQRRHYLKLQQDYWRGKYDRFTMTEVPEGFSNRQGVDIGIIGRYARLYLKTVFEHIHTVKGATTSDFRKIWGLQAEYEKKARVNHVHHCIDAITIACIGHREYLAWKRYAEEAERYQLGEGDRPDIEKPWPTFTEDVRAVADELLVSHHTADNMAKQTRKKLRVRGRVRLNAAGKPLYMQGDTARALLHKDTFYGAIEREGEIRYVVRKSLGQLQPGDENKIVDEVVRERVREAIAAVGFKTAMNAVEYTIWMNREKGVPIRKVRIYTPSVTQPVALKKQRDLSVKEYKQDYHVVNDGNYCMAIYEGVDKKGKKKRTFEIVSNLEAARYFKASTDRNDRPDLVPVADTNGYPLKCILKTGTMVLFYENTPAELYECSRKELVKRLYKVTAMAAEGRVQFLFHQDARDQKTISSIYGAGASQFSLSKPSPKLRLSVSSFNMLVEGYDFELTITGEIKFKHAMPC

SEQ ID NO: 19056 - protein, 1221 aa, unidentified
  REGION 1..1221: note = Cas Enzyme sequence
MATILGLDLGTNSLGWAVVEETEHGYTLKEQGVDIFQEGVAREKNNEKPAVQDRTNTRALRRQYFRRRLRKIDLLRVLVRYDLCPPLSGEQLTAWRKEKRYPLDEAFLQWQRTDDNADRNPYHDRYVALSEQLDLGNQQHRYLLGRALYHLAQRRGFISNRKEAGKEQEEGTVKSSIRSLTAEMEAAGCRYLGEYFYQLYQHKEKIRGKYTSRNEHYLAEFEAICERQQLPDEWRKALHRAIFFQRDLKSQKGAVGRCTFEPRKSRCPVSHPRFEEFRMLQFINNIRITSPQDTAPRPLTQEEVEVIRPLFYRPHFEFEEIARKIAGKGKYACGEERTEAPYRFNFARTTTVSGCPVTASLIAVFGSDWLREMCSLYLLGEGKNEEQVLNDVWHALFFFKEEECLRTWALEKLQLTAEQAKAFAAIRLPQDYAALSLNAVNKILPYLRLGYRYDEAVFLANLKAVLPKEAYDNEERRHEIEHDIAELLLGYKRNLYDKYDSKERRIANYFSDHGLDLSRFDRLYHPSMIETYRKAQPDAAGLLQLGSPRTPAVRNPMAMRALFRLRALVNRLLRDGKIDRNTKLRIEFARELNNANLRKAIEQYQREREAENRKFAEEIRSQYAAETGRTIDPTDDEVLKYRLWEEQQHVCPYTGRQIRISDFIGADPGFDIEHTIPRARGGDDSQMNKTLCENRYNRAVKRSRLPAELSDHAEIMACIESFGWQEKVEALQKQIDAQIRKSKAAATKTEKDSAIQRRHYLKLQQDYWRGKYDRFTMTEVPEGFSNRQGVDIGIIGRYARLYLKTVFDRIYTVKGATTSDFRKIWGLQAEYEKKARVNHVHHCIDAITIACIGHREYLAWKRYAEEAERYQLGEGDRPDIEKPWPTFTEDVKAVADELLVSHHTADNMAKQTRKKLRVRGLVRLNDAGKPIYMQGDTARALLHKDTFYGAIEREGEIRYVVRKSLGQLQPGDEDKIVDDAVRERVREAIEAVGFKTAMNADEYTIWMNREKGVPIRKVRIYTPSVTQPVALKKQRDLSEKEYKQDYHVVNDGNYCMAIYEGVDKKGKKRRTFEIVSNLEAARYFKASTDRNERPDLVPVADTNGYPLKCILKTGTMVLFYENTPAELYECSRKELVKRLYKVTGMSTLTVANNSYGRMSLKHHQEARPAGELKAKSGEWKQNEEYRPVISLLHTQLNAYVEGYDFELTITGEIKFKHAMSC

SEQ ID NO: 19057 - protein, 1220 aa, unidentified
  REGION 1..1220: note = Cas Enzyme sequence
MATILGLDLGTNSLGWAVVEETEHGYTLKEQGVDIFQEGVAREKNNEKPAVQDRTNARALRRQYFRRRLRKIDLLRVLVRYDLCPPLSGEQLTAWRKEKRYPLDEAFLQWQRTDDNADRNPYHDRYVALSEQLDLGNRQHRYLLGRALYHLAQRRGFISNRKEAGKEQEEGTVKSSIRSLTAEMEAAGCRYLGEYFYQLYQHKEKIRGKYTSRNEHYLAEFEAICERQQLPDEWRKALHRAIFFQRDLKSQKGAVGRCTFEPRKSRCPVSHPRFEEFRMLQFINNIRITSPQDAAPRPLTQEEVEMIRPLFYRKSKPHFEFEEIARKIAGKGKYACREERIEAPYRFNFARTTTVSGCPVTASLFAVFGSDWLREMCSLYLLGEGKNEEQVLNDVWHALFFFKDEECLRTWALEKLQLTAEQAKAFAAIRLPQDYAALSLNAINKILPCLRLGYRYDEAVFLANLKAVLPKEVYDNEERRHEIEHDIAELLLGYKRDLDDKYDSKEHRIADYFSDHGLDLSRFDRLYHPSMIETYRKAQPDAAGLLQLGSPRTPAVRNPMAMRALFRLRALVNRLLRDGKIDRNTKIRIEFARELNNANLRKAIEQYQREREAENRKFAEEIRSQYAAETGRTVDPTDDEILKYRLWEEQQHVCPYTGRQIRISDFIGADPGFDIEHTIPRARGGDDSQMNKTLCENRYNRVVKRSKLPTELSDHAEIMACIESFGWQEKVETLQKQIDAQIRKSKAAATKTEKDSAIQRRHYLKLQQDYWRGKYDRFTMTEVPEGFSNRQGVDIGIIGRYARLYLKTVFEHIHTVKGATTSDFRKIWGLQAEYEKKARVNHVHHCIDAITIACIGHREYLAWKRYAEEAERYQLGEGDRPDIEKPWPTFTEDVKAVADELLVSHHTADNMAKQTRKKLRVRGLVRLNDAGKPIYMQGDTARALLHKDTFYGAIEREGEIRYVVRKSLGQLQPGDVDKIVDDAVRERVREAIEAVGFKTAMNADEYTIWMNREKGVPIRKVRIYTPSVTQPVALKKQRDLSEKEYKQDYHVVNDGNYCMAIYEGVDKKGKKRRTFEIVSNLEAARYFKASTDRNDRPDLVPLTDVNGYPLKCILKTGTMVLFYENTPAELYECSRKELVKRLYKVTAMAAEGRVQFLFHQDARDQKTISSIYGAGASQFSLSKPSPKLRLSVSSFNMLVEGYDFELTITGEIKFKHAMPC

SEQ ID NO: 19058 - protein, 1222 aa, unidentified
  REGION 1..1222: note = Cas Enzyme sequence
MATILGLDLGTNSLGWAVVEETEHGYTLKEQGVDIFQEGVAREKNNEKPAVQDRTNARALRRQYFRRRLRKIDLLRVLVRYDLCPPLSGEQLTAWRKEKRYPLDEAFLQWQRTDDNADRNPYHDRYVALSEQLDLGNRQHRYLLGRALYHLAQRRGFISNRKEAGKEQEEGTVKSSIRSLTAEMEAAGCRYLGEYFYQLYQHKEKIRGKYTSRNEHYLAEFEAICERQQLPDEWRKALHRAIFFQRDLKSQKGAVGRCTFEPRKSRCPVSHPRFEEFRMLQFINNIRITSPQDTAPRPLTQEEVEVIRPLFYRKPHFEFEEIARKIAGKGKYACGEERTEAPYRFNFARTTTVSGCPVTASLIAVFGSDWLREMCSLYLLGEGKNEEQVLNDVWHALFFFKDEECLRTWALEKLQLTAEQAKAFAAIRLPQDYAALSLNAINKILPYLRLGYRYDEAVFLANLKAVLPKEVYDNEERRHEIEHDIAELLLGYKRDLDDKYDSKEHRIANYFSDHGLDLSRFDRLYHPSMIETYRKAQPDAAGLLQLGSPRTPAVRNPMAMRALFRLRALVNRLLRDGKIDRNTKLRIEFARELNNANLRKAIEQYQREREAENRKFAEEIRSQYAAETGRTIDPTDDEVLKYRLWEEQQHVCPYTGRQIRISDFIGANPGFDIEHTIPRARGGDDSQMNKTLCENRYNRVVKRSKLPTELSDHAEIMACIESFGWQEKVETLQKQIDAQIRKSKAAATKAEKDSAIQRRHYLKLQQDYWRGKYERFTMTEVPEGFSNRQGVDIGIIGRYARLYLKTVFDRIYTVKGATTSDFRKIWGLQAEYEKKARVNHVHHCIDAITIACIGHREYLAWKRYAEEAERYQLGEGDRPDIEKPWPTFTEDVKAVADELLVSHHTADNMAKQTRKKLRVRGLVRLNDAGKPIYMQGDTARALLHKDTFYGAIEREGEIRYVVRKSLGQLQPGDVDKIVDDAVRERVREAIEAVGFKTAMNADEYTIWMNREKGVPIRKVRIYTPSVTQPVALKKQRDLSEKEYKQDYHVVNDGNYCMAIYEGVDKKGKKRRTFEIVSNLEAARYFKASTDRNDRPDLVPVADTNGYPLKCILKTGTMVLFYENTPAELYECSRKELAKRLYKVTGMSTLTVANNSYGRMSLKHHQEARPAGELKAKNGEWKQNEEYRPVISLLHTQLNAYVEGYDFELTITGEIKFKHAMPC

SEQ ID NO: 19059 - protein, 1196 aa, unidentified
  REGION 1..1196: note = Cas Enzyme sequence
LDKGVAIFQEGVARDKNNEKPTVQDRTDARALRRHYFRRRLRKIDLLRVLVRYDLCPPLTDEQLSTWRQKKQYPLDEEFLRWQRTDDNEDRNPYHDRYVALTERLDLENRAQRWLLGRAFYHLAQRRGFLSNRKEAGNEKEDGTVKESIKNLSAEMEAAGCRYLGEYFYGLYQHKERIRGKYTSRNEHYLTEFNAICDRQQLPDKWRRALHRAIFFQRDLKSQKGSVGRCTFEPTKSRCPVSHPRFEEFRMWSFINNIRVTGPDDGTPRPLTPKEIETIRPLFFRKSKSYFDFEEIARRIAGKGKYACREERIEAPYRFNFARTATVSGCPVTASLMDIFGKEWLREIRSLYLLGDGKTEEQVLNDIWHALFSFKDEERLRDWACEKLQLSEEQAKAFAAIKLPQDYAAMSLNAINKILPYLRCGYRYDEAVFLANLRAALPKEVYADEDRRHNIEQEIASLLLDYKRNPYDKFDSKERRIANYFSDHGLDMSRLDRLYHPSKIETYPDAKPNAEGIMQLGSPRTSAIRNPMAMRALFRLRDLINTLLREGRIDRDTKIRIEFARGLNDANRRKAIEQYQREREAENRKFAEEIRRQYTAKTGREIEPSDDEVLKYRLWEEQQHICPYTGRQIRISDFIGANPGFDIEHTLPRAHGGDDSQMNKTLCENRFNRETKRVKLPAELSNHAEIMERIESFGWREKVESLQKQIEAQVRRSKGAATKPEKDSAIQRRHYLQMQLDYWRGKCERFTMTEIPEGFSNRQGVDIGIIGKYARLYLKTVFDRIYTVKGSSTAAFRKMWGLQEEYTRKERVNHVHHCIDAITIACIGRREYDRWAQYTADEERFNYGETDKPRFEKPWPTFTEDVKAVADELLVAHHTPDNMAKQTRKKLRVRGRVKLSADGKPIYQQGDTARCRLHQETFYGAIKREDEIRYVVRKSIKLLQPSDIDKIVDDAVRDRVRMAIDEVGFKTAINPDEYTIWMNREKGIPIRKVRIFTPGVTQPIALKKQRDLSDKEYKQDYHVANDGNYCMAVYEGKDKKGKLKRSFELVSNLEAAQYFKASADREACPDLVPQADANGFPLKCILKAGTLVLFYENSPAELCDCTPKELTKRLYKVTGFSTLTVSNNSYGRLALKHHQEARPAGELKAKSGVWKTNEEYRPVISILHTQLNAYVEGYDFELTVTGEIKFKHGRPC

SEQ ID NO: 19060 - protein, 1224 aa, unidentified
  REGION 1..1224: note = Cas Enzyme sequence
MTKVLGLDLGTNSLGWALVDESENGYALLDKGVAIFQEGVARDKNNEKPTVQDRTDARALRRHYFRRRLRKIDLLRVLVRYDLCPPLTDEQLSTWRQKMQYPLDEEFLRWQRTDDNEDRNPYHDRYVALTERLDLENRAQRWLLGRAFYHLAQRRGFLSNRKEAGNEKEDGTVKESIKNLSAEMEAAGCRYLGEYFYGLYQHKERIRGKYTSRNEHYLTEFNAICDRQQLPDKWRRALHRAIFFQRDLKSQKGSVGRCTFEPTKSRCPVSHPRFEEFRMWSFINNIRVTGPDDGTPRPLTPKEIETIRPLFFRKSKSYFDFEEIARRIAGKGKYACREERIEAPYRFNFARTATVSGCPVTASLMDIFGKEWLREIRSLYLLGDGKTEEQVLNDIWHALFSFKDEERLRDWACEKLQLSEEQAKAFAAIKLPQDYAAMSLNAINKILPYLRCGYRYDEAVFLANLRAALPKEVYADEDRRHNIEQEIASLLLDYKRNPYDKFDSKERRIANYFSDHGLDMSRLDRLYHPSKIETYPDAKPNAEGIMQLGSPRTSAIRNPMAMRALFRLRDLINTLLREGRIDRDTKIRIEFARGLNDANRRKAIEQYQREREAENRKFAEEIRRQYTAKTGREIEPSDDEVLKYRLWEEQQHICPYTGRQIRISDFIGANPGFDIEHTLPRAHGGDDSQMNKTLCENRFNRETKRVKLPAELSNHAEIMERIESFGWREKVESLQKQIEAQVRRSKGAATKPEKDSAIQRRHYLQMQLDYWRGKCERFTMTEIPEGFSNRQGVDIGIIGKYARLYLKTVFDRIYTVKGSSTAAFRKMWGLQEEYTRKERVNHVHHCIDAITIACIGRREYDRWAQYTANEERFNYGETDKPRFEKPWPTFTEDVKAVADELLVAHHTPDNMAKQTRKKLRVRGRVKLSADGKPIYQQGDTARCRLHQETFYGAIKREDEIRYVVRKSIKLLQPSDIDKIVDDAVRDRVRMAIDEVGFKTAINPDEYTIWMNREKGIPIRKVRIFTPGVTQPIALKKQRDLSDKEYKQDYHVANDGNYCMAVYEGKDKKGKLKRSFELVSNLEAAQYFKASADREACPDLVPQADANGFPLKCILKAGTLVLFYENSPAELCDCTPKELTKRLYKVTGFSTLTVSNNSYGRLALKHHQEARPAGELKAKSGVWKTNEEYRPVISILHTQLNAYVEGYDFELTVTGEIKFKHGRPC

SEQ ID NO: 19061 - protein, 1196 aa, unidentified
  REGION 1..1196: note = Cas Enzyme sequence
LDKGVAIFQEGVARDKNNEKPTVQDRTDARALRRHYFRRRLRKIDLLRVLVRYDLCPPLTDEQLSTWRQKKQYPLDEEFLRWQRTDDNEDRNPYHDRYVALTERLDLENRAQRWLLGRAFYHLAQRRGFLSNRKEAGNEKEDGTVKESIKNLSAEMEAAGCRYLGEYFYGLYQHKERIRGKYTSRNEHYLTEFNAICDRQQLPDKWRRALHRAIFFQRDLKSQKGSVGRCTFEPTKSRCPVSHPRFEEFRMWSFINNIRVTGPDDGTPRPLTPKEIETIRPLFFRKSKSYFDFEEIARRIAGKGKYACREERIEAPYRFNFARTATVSGCPVTASLMDIFGKEWLREIRSLYLLGDGKTEEQVLNDIWHALFSFKDEERLRDWACEKLQLSEEQAKAFAAIKLPQDYAAMSLNAINKILPYLRCGYRYDEAVFLANLRAALPKEVYADEDRRHNIEQEIASLLLDYKRNPYDKFDSKERRIANYFSDHGLDMSRLDRLYHPSKIETYPDAKPNAEGIMQLGSPRTSAIRNPMAMRALFRLRDLINTLLREGRIDRDTKIRIEFARGLNDANRRKAIEQYQREREAENRKFAEEIRRQYTAKTGREIEPSDDEVLKYRLWEEQQHICPYTGRQIRISDFIGANPGFDIEHTLPRAHGGDDSQMNKTLCENRFNRETKRVKLPAELSNHAEIMERIESFGWREKVESLQKQIEAQVRRSKGAATKPEKDSAIQRRHYLQMQLDYWRGKCERFTMTEIPEGFSNRQGVDIGIIGKYARLYLKTVFDRIYTVKGSSTAAFRKMWGLQEEYTRKERVNHVHHCIDVITIACIGRREYDRWAQYTADEERFNYGETDKPRFEKPWPTFTEDVKAVADELLVAHHTPDNMAKQTRKKLRVRGRVKLSADGKPIYQQGDTARCRLHQETFYGAIKREDEIRYVVRKSIKLLQPSDIDKIVDDAVRDRVRMAIDEVGFKTAINPDEYTIWMNREKGIPIRKVRIFTPGVTQPIALKKQRDLSDKEYKQDYHVANDGNYCMAVYEGKDKKGKLKRSFELVSNLEAAQYFKASADREACPDLVPQADANGFPLKCILKAGTLVLFYENSPAELCDCTPKELTKRLYKVTGFSTLTVSNNSYGRLALKHHQEARPAGELKAKSGVWKTNEEYRPVISILHTQLNAYVEGYDFELTVTGEIKFKHGRPC

SEQ ID NO: 19062 - protein, 1220 aa, unidentified
  REGION 1..1220: note = Cas Enzyme sequence
MTKVLGLDLGTNSLGWALVDESENGYALLDKGIAIFQEGVARDKNNEKPTVQDRTDARALRRHYFRRRLRKIDLLRVLVRYDLCPPLTDEQLSTWRQKKQYPLDEEFLRWQRTDDNEDRNPYHDRYVALTERLDLENRAQRWLLGRAFYHLAQRRGFLSNRKEAGNEKEDGTVKESIKNLSAEMEAAGCRYLGEYFYGLYQHKERIRGKYTSRNEHYLTEFNAICDRQQLPDKWRRALHRAIFFQRDLKSQKGSVGRCTFEPTKSRCPVSHPRFEEFRMWSFINNIRVTGPDDGRPRPLTPKEIETIRPLFFRKSKSYFDFEEIARRIAGKGKYACREERIEAPYRFNFARTATVSGCPVTASLMDIFGEEWLREIRGLYLLGDGKTEEQVLNDIWHALFSFKDEERLRDWACEKLQLSEEQAKAFAAIKLPQDYAAMSLNAINKILPYLRCGYRYDEAVFLANLRAALPKEVYADEDRRHNIEQEIASLLLDYKRNPYDKFDSKERRIANYFSDHGLDMSRLDRLYHPSKIETYPDAKPNAEGIMQLGSPRTSAIRNPMAMRALFRLRDLINTLLREGRIDRDTKIRIEFARGLNDANRRKAIEQYQREREAENRKFAEEIRRQYTAETGREIEPSDDEVLKYRLWEEQQHICPYTGRQIRISDFIGANPGFDIEHTLPRAHGGDDSQMNKTLCENRFNRETKRAKLPAELSNHAEIMERIESFGWREKVESLQKQIEAQVRRSKGAATKPEKDSAIQRRHYLQIQLDYWRGKCKRFTMTEIPEGFSNRQGVDIGIIGKYARLYLKTVFDRIYTVKGSTTAAFRKMWGLQEEYTRKERVNHVHHCIDAIMIACIGRREYDRWAQYAADEERFNYGETDKPRFEKPWPTFTEDVKAVADELLVAHHTPDNMAKQTRKKLRVRGRVKLSADGKPIYQQGDSARCRLHQETFYGAIKREDEIRYVVRKSIKLLQPSDIDKIVDDAVRDRVRMAIDEVGFKTAINPDEYTIWMNREKGIPIRKVRIFTPGVTQPIALKKQRDLSDKEYKQDYHVANDGNYCMAVYEGKDKKGKLKRSFELVSNLEAAQYFKARADREACPDLVPLADANGFPLKCILKAGTVVLFYENSPAELYECSRKELVKRLYKVTAMAAEGRVQFLFHQEARDQKTLTALYGAGTSQFCQSNPSPKLRLSVSNFNMLVEGYDFELTVTGEIKFKHGRPC

SEQ ID NO: 19063 - protein, 1196 aa, unidentified
  REGION 1..1196: note = Cas Enzyme sequence
LDKGVAIFQEGVARDKNNEKPTVQDRTDARALRRHYFRRRLRKIDLLRVLVRYDLCPPLTDEQLSTWRQKKQYPLDEEFLRWQRTDDNEDRNPYHDRYVALTERLDLENRAQRWLLGRAFYHLAQRRGFLSNRKEAGNEKEDGTVKESIKNLSAEMEAAGCRYLGEYFYGLYQHKERIRGKYTSRNEHYLTEFNAICDRQQLPDKWRRALHRAIFFQRDLKSQKGSVGRCTFEPTKSRCPVSHPRFEEFRMWSFINNIRVTGPDDGTPRPLTPKEIETIRPLFFRKSKSYFDFEEIARRIAGKGKYACREERIEAPYRFNFARTATVSGCPVTASLMDIFGKEWLREIRSLYLLGDGKTEEQVLNDIWHALFSFKDEERLRDWACEKLQLSEEQAKAFAAIKLPQDYAAMSLNAINKILPYLRCGYRYDEAVFLANLRAALPKEVYADEDRRHNIEQEIASLLLDYKRNPYDKFDSKERRIANYFSDHGLDMSRLDRLYHPSKIETYPDAKPNAEGIMQLGSPRTSAIRNPMAMRALFRLRDLINTLLREGRIDRDTKIRIEFARGLNDANRRKAIEQYQREREAENRKFAEEIRRQYTAKTGREIEPSDDEVLKYRLWEEQQHICPYTGRQIRISDFIGANPGFDIEHTLPRAHGGDDSQMNKTLCENRFNRETKRVKLPAELSNHAEIMERIESFGWREKVESLQKQIEAQVRRSKGAATKPEKDSAIQRRHYLQMQLDYWRGKCERFTMTEIPEGFSNRQGVDIGIIGKYARLYLKTVFDRIYTVKGSSTAAFRKMWGLQEEYTRKERVNHVHHCIDAITIACIGRREYDRWAQYTADEERFNYGETDKPRFEKPWPTFTEDVKAVADELLVAHHTPDNMAKQTRKKLRVRGRVKLSADGKPIYQQGDTARCRLHQETFYGAIKREDEIRYVVRKSIKLLQPSDIDKIVDDAVRDRVRMAIDEVGFKTAINPDEYTIWMNREKGIPIRKVRIFTPGVTQPIALKKQRDLSDKEYKQDYHVANDGNYCMAVYEGKDKKGKLKRSFELVSNLEAAQYFKASADREACPDLVPQADANGFPLKCILKAGTLVLFYENSPAELCDCTAKELTKRLYKVTGFSTLTVSNNSYGRLALKHHQEARPAGELKAKSGVWKTNEEYRPVISILHTQLNAYVEGYDFELTVTGEIKFKHGRPC

SEQ ID NO: 19064 - protein, 1224 aa, unidentified
  REGION 1..1224: note = Cas Enzyme sequence
MTKVLGLDLGTNSLGWALVDESENGYALLDKGVAIFQEGVARDKNNEKPTVQDRTDARALRRHYFRRRLRKIDLLRVLVRYDLCPPLTDEQLSTWRQKKQYPLDKEFLRWQRTDDNEDRNPYHDRYVALTERLDLENRAQRWLLGRAFYHLAQRRGFLSNRKEAGNEKEDGTVKESIKNLSAEMEAAGCRYLGEYFYGLYQHKERIRGKYTSRNEHYLTEFNAICDRQQLPDKWRRALHRAIFFQRDLKSQKGSVGRCTFEPTKSRCPVSHPRFEEFRMWSFINNIRVTGPDDGTPRPLTPKEIETIRPLFFRKSKSYFDFEEIARRIAGKGKYACREERIEAPYRFNFARTATVSGCPVTASLMDIFGKEWLREIRSLYLLGDGKTEEQVLNDIWHALFSFKDEERLRDWACEKLQLSEEQAKAFAAIKLPQDYAAKSLNAINKILPYLRCGYRYDEAVFLANLRAALPKEVYADEDRRHNIEQEIASLLLDYKRNPYDKFDSKERRIANYFSDHGLDMSRLDRLYHPSKIETYPDAKPNAEGIMQLGSPRTSAIRNPMAMRALFRLRDLINTLLREGRIDRDTKIRIEFARGLNDANRRKAIEQYQREREAENRKFAEEIRRQYTAETGREIEPSDDEVLKYRLWEEQQHICPYTGRQIRISDFIGANPGFDIEHTLPRAHGGDDSQMNKTLCENRFNRETKRVKLPAELSNHAEIMERIESFGWREKVESLQKQIEAQVRRSKGAATKPEKDSAIQRRHYLQMQLDYWRGKCERFTMTEIPEGFSNRQGVDIGIIGKYARLYLKTVFDRIYTVKGSTTAAFRKMWGLQEEYTRKERVNHVHHCIDAITIACIGRREYDRWAQYAADEERFNYGETDKPRFEKPWPTFTEDVKAVADELLVAHHTPDNMAKQTRKKLRVRGRVKLSADGKPIYQQGDTARCRLHQETFYGAIKREDEIRYVVRKSIKLLQPSDIDKIVDDAVRDRVRMAIDEVGFKTAINPDEYTIWMNREKGIPIRKVRIFTPGVTQPIALKKQRDLSDKEYKQDYHVANDGNYCMAVYEGKDKKGKLKRSFELVSNLEAAQYFKASADREACPDLVPLADANGFPLKCILKAGTLVLFYENSPAELCDCTPKELTKRLYKVTGFSTLTVSNNSYGRLALKHHQEARPAGELKAKSGVWKTNEEYRPVISILHTQLNAYVEGYDFELTVTGEIKFKHGRPC

SEQ ID NO: 19065 - protein, 1225 aa, unidentified
  REGION 1..1225: note = Cas Enzyme sequence
MITRILGLDTGTNSLAWAVVDRDANGSYTLVKRGDVIFSEGVKIEKGVESSKAAERTGHKSLRVQYARRRLRKIDTLKALVSLDLCPYLSDEQLSQWKAKKTYPLTDDFMLWQRSGSAEEDNPYYCRYRCLTQKLDLTDQSQRFLLGRAFYHLAQRRGFLSNRLDTTADSEESGKVKSGIAQLSVEMEKAGCHYLGEYFYQLYRQHGNTVRLRSRYTDREEHYIKEFLAICEKQELDAQWVEKLQSALYFQRPLKSQRKGVGKCTFEPKKPRCAESHPDYEAFRMLCILNSIKIKTPNDTSLRPLNTQEREKIWPLFFRKSKPNFDFEDIAKALAGKNNYAWIKDAGEKPYKFNYRMHQGVSGCPVTAQLIDIFGSDWKAGIAETYTAVGKKNGTKTIDEMADDVWNVLYSFSSKDKLKAFATEKLQLDEASATKFANAKLPHGFAALSLKAIRNILPFLRQGFIYAHAVHLAKIPDIVTKAVWNDVHKREQILSGLMEIIENYNPKDRGVEGTIDFCIKSHLQDVVDLRPGAADALYHPSMIETYPDAKLNKMGVFQLGSPRTNAIRNPMAMRSLHILRSVVNQLLRDGTIDRDTEVHVEYARGLNDANKRKAIADYQREQEKKRKQYRDDIITLYKSECHKEIEPTDTDILKFQLWEEQNHLCLYTGTQIGICDFLGDNPKFDIEHTIPRSVGGDSTQMNLTLCDATFNRQVKGAKLPTELSNHADILVRIDHWKSKCEDLRKQLDKIRTYGGMEKVMKDRLIQKRHRLKMELDYWQGKYSRFTMTEVPEGFSRRQGAGIGLVSKYAGLFLKSLFHNEQNPNKSNVYVVKGVTTAEFRRMWGLQGEYEKKSRLNHCHHCIDAITIACIGKAEYEKMAQYYHDEELFQWRGTTTKPHFNKPWRTFTEDILAIEQSLLVKHLTKDNMPKQAKKHVRTAKGKYLAQGDAARGSLHKDTYYGAIQQEGEIRYVLRKSLSDFNSESELENIVDQAVKEKIKAAVAGKNFKTAIAEPIFMNKEKGIRINKVRCYADSVKNPLHIRQQRDLSDKEYKQQFHVVNDSNYMLAIYEGEVKGKVKRDFALVNNITAASFFKRSNRRKNAEPLVPRTSPKGNLALLVMLKIGMQVLLYEKSPEEIKFDKPHDLVKRLYKVVGLSIDGSCIMIDLRYNQEARQAKDVKPKKGAYMENEQFRPCIRLRHTQFKALVEGIDFEFNILGEIKKKEHHA

SEQ ID NO: 19066 - protein, 1231 aa, unidentified
  REGION 1..1231: note = Cas Enzyme sequence
MNTRILGLDTGTNSLAWAVVDRDVNGDYTLVRRGDVIFTEGVNVDGQPVPSKAAVKSKYKSLRVQYARRRLRKIDTLKVLVSLDLCPYLSDEQLSQWKAKKTYPLTDDFMLWQRSGSAEENNPYYCRYRCLTQKLDLTDQSQRFLLGRAFYHLAQRRGFLSNRLDTTADSEESGKVKSGIAQLSVEMEKAGCTFLGEYFYQLYKQHGNTVRLRSRYTDREEHYIKEFLAICEKQELDAQWVEKLQSALYFQRPLKSQRKGVGKCTFEPKKPRCAESHPDYEAFRMLCILNNIKIKTPNDTSLRPLNAQEREKIWPLFFRKSKPNFDFEDIAKALAGKNNYAWIKDAGEKPYKFNYRMHQGVSGCPVTAQLIDIFGSDWKPGIAETYTAAGKKNGTKTIDEMADDVWNVLYSFSSKDKLKAFATEKLQLDEASATKFANAKLPHGFAALSLKAIRNILPFLRQGFIYAHAVLLAKIPDIVTNAVWDDAHKREQILSGLLEIIENYNPKDRGVEGTIDFCIKSHLQDVVDLRPGAADALYHPSMIEAYPDAKLNKMGVFQLGSPRTNAIRNPMAMRSLHILRSVVNQLLRDGTIDRDTEVHVEYARELNDANKRKAIADYQKDIERKRADYRKRIIELYKEECHKEIEPTDTDILKFQLWEEQNHRCLYTNGEIGICDFLGDNPKFDIEHTIPRSVGGDSTQMNLTLCDAMFNRQVKGARLPSQLPNHHEILKRIAPWESKCEDLRKKLDKIRTFSGMAKEKKDSQIQKRHRLKMELDYWQGKYERFTMTEVPEGFSRRQGAGIGLVSKYAGLFLKSLFHSADNPNKSNVYVVKGVTTAEFRRMWGLQGEYEKKSRLNHCHHCIDAITIACIGKAEYDKMAQYYHDEEMSRWHGSANKPQFKKPWPTFTEDVLALEQSLLIKHLTKDNMPKQAKRRVRTAKGKHLAQGDAARGSLHKDTYYGIVEKDGKLYHVLRKPIDKFEKESELENIVDQAVKEKIKAAVAGKNFKAAIAEPIFMNKEKGIRINKVRCYVKAQERLKIRQQRDLSTKEYKQFFCVENENNYLLAIYEGELKGKKERDFCVVNNLDAAAYLKMSNKGKAAPLVPERSAERSLPLLAVLQRGTQVLFYEDSPEEILFDNPQDLVRRLYKVVGIGTKRVKTGGKLYNYGEVKLRFHQNAQKDDDVKYVSGEYKNNEEQHQGITLLHTQFKALVEGIDFEFNILGEIKKKEHHA

SEQ ID NO: 19067 - protein, 1231 aa, unidentified
  REGION 1..1231: note = Cas Enzyme sequence
MITRILGLDTGTNSLAWAVVDRDANGNYTLVKRGDVIFSEGVKIEKGKESSKAAERTGHKSSRVQYARRRLRKIDTLKVLVSLDLCPYLSDEQLSQWKAKKTYPLTDDFMLWQRSGSAEENNPYYCRYRCLTQKLDLTDQSQRFLLGRAFYHLAQRRGFLSNRLDTSADSEESGKVKSGIAQLSVEMEKAGCHYLGEYFYQLYRQHGNTVRLRSRYTDREEHYKKEFLAICEKQELDAQWVEKLQKALYFQRPLKSQRKGVGKCTFEPKKPRCAESHPDYEAFRMLCILNNIKIKTPKDVSLRPLNAEEREKVWPLFFRKSKPNFDFEDIAKALAGKNNYAWYKEAGEKPFRFNYRMHQGVPGCPVTAQLIDLFGPDWKAGIAETYMAVEKKNGTKTINEMADDVWNVLYSFSSKDKLKAFATEKLQLDEARATKFANAKLPHGFAALSLKAIRNILPFLRQGFIYAHAVLLAKIPDIVTAAVWDDADKRQQILSGLLEVIENYNPNDRGIEGTIDFCIKSHLQDVVDLRPGAADALYHPSMIEAYPDAKLNKMGVFQLGSPRTNAIRNPMAMRSLHILRSVVNQLLRDGTIDRDTEVHVEYARELNDANKRKAIADYQKDIERKRADYRKRIIELYKEECHKEIEPTDSDILKFQLWEEQNHKCLYTDSEIGICDFLGDNPKFDIEHTIPRSVGGDSTQMNLTLCDAMFNRQVKGARLPSQLPNHADILVRIAPWKSKCEDLRKKLDKIRTFSGMAKEIKDSQIQKRHRLKMELDYWQGKYERFTMTEVPEGFSRRQGAGIGLVSKYAGLFLKSLFHSADNPNKSNVYMVKGVTTAEFRRMWGLQGEYEKKSRLNHCHHCIDAITIACIGKAEYDKMAQYYHDEEVSRWHGSAGKPQFKKPWPTFTKDVLALEQSLLVKHLTKDNMPKQAKRRVRTAKGKHLAQGDAARGSLHRDTYYGAIEQEGEIRYVLRKPISKFEKESELENIVDQAVKEKIKAAVAGKNFKAAIAEPIFMNKEKGIRINKVRCYVKAKERLKIRQQRDLSTKEYKQFFCVENENNYLLAIYEGEVKGKKERDFCVVNNLDAAAYLKRSNKGKAAPLVPERSAERNLPLLAVLQRGTQVLFYEDSPEEILFDNPQDLVRRLYKVVGINTKRDVKKGKTYLYGNIELRFHQNAQKKDDVKMESGGYKNNEAPHQGIVLSHNQFKALVEGVDFEFNILGEIKKKEHHA

SEQ ID NO: 19068 - protein, 1231 aa, unidentified
  REGION 1..1231: note = Cas Enzyme sequence
MITRILGLDTGTNSLAWAVVDRDANGSYTLVKRGDVIFSEGVKIEKGVESSKAAERTGHKSLRVQYARRRLRKIDTLKALVSLDLCPYLSDEQLSQWKAKKTYPLTDDFMLWQRSGSAEENNPYYCRYRCLTQKLDLTDQSQRFLLGRAFYHLAQRRGFLSNRLDTTADSVESGKVKSGIAQLSVEMEKAGCHYLGEYFYQLYRQHGNTVRLRSRYTDREEHYKKEFLAICEKQELDAQWVEKLQRALYFQRPLKSQRKGVGKCTFEPKKPRCAESHPDYEAFRMLCILNNIKIKTPKDVSLRPLNAEEREKVRPLFFRKSKPNFDFEDIAKALAGKNNYAWYKDAGEKPYRFNYRMHQGVPGCPVTAQLIDLFGPDWKAGIAETYMAVEKKNGTKTIDEMADDVWNVLYSFSSKDKLKTFATEKLQLDEARATKFANAKLPHGFAALSLKAIRNILPFLRQGFIYAHAVLLAKIPDIVTAAVWDDADKRQQILSGLLEIIENYNPNDRGIEGTIDFCIKSHLQDVVDLRPGAADALYHPSMIEAYPDAKLNKMGVFQLGSPRTNAIRNPMAMRSLHILRSVVNQLLRDGVIDRDTEVHVEYARELNDANKRKAIADYQKDIERKRADYRKRIVEEYKNKCHKEIEPTETDILKYQLWEEQNHGCLYTNGEIGICDFLGDNPKFDIEHTIPRSVGGDSTQMNLTLCDATFNRQVKGARLPSQLTNHADILKRIALWKSKCEDLRKKLDKIRTFSGMAKEKKDSQIQKRHRLKMELSYWQGKYERFTMTEVPEGFSRRQGAGIGLISKYAGLFLKSLFHSAVNPNKSNVYMVKGVITAEFRRMWELQGEYEKKSRLNHCHHCIDAITIACIGEAEYQKMAQYYHDEEMSRWHGSANKPQFKKPWPTFTKDVLALEQSLLVKHLTKDNMPKQAKRRVRTAKGKHLAQGDAARGSLHKDTYYGIVEKDGKLYHVLRKPIDKFKKESELENIVDQAVKEKIKAAVAGKNFKAAISEPIFMNKEKGIRINKVRCYVKAQERLKIRQQRDLSTKEYKQFFCVENENNYLLAIYEGEVKGKKERDFCVVNNLDAAAYLKRSNKGKAAPLVPERSAERNLPLLAVLQRGTQVLFYEDSPEEILFDNPQDLVRRLYKVVGINTKRDVKKGKTYLYGNIELRFHQNAQKKDDVKLESGGYKNNEAPHQGIVLSHNQFKALVEGIDFEFNILGEIKKKEHHA

SEQ ID NO: 19069 - protein, 1225 aa, unidentified
  REGION 1..1225: note = Cas Enzyme sequence
MITRILGLDTGTNSLAWAVVDRDANGSYTLVKRGDVIFSEGVKIEKGVESSKAAERTGHKSLRVQYARRRLRKIDTLKALVSLDLCPYLSDEQLSQWKAKKTYPLTDDFMLWQRSGSAEENNPYYCRYRCLTQKLDLTDQSQRFLLGRAFYHLAQRRGFLSNRLDTSADSEESGKVKSGIAELSVEIEKAGCHYLGEYFYQLYRQHGNTVRLRSRYTDREEHYIKEFLAICEKQELDAQWVEELQSALYFQRPLKSQRKGVGKCTFEPKKPRCAESHPDYEAFRMLCILNNIKIKTPNDTSLRPLNTQEREKIWPLFFRKSKPNFDFEDIAKALAGKNNYAWYKDAGEKPYRFNYRMQQGVSGCPVTAQLIDIFGSDWKAGIAETYTAVGKKNGTKTIDEMADDVWNVLYSFSSKDKLKAFATEKLQLDEASATKFANAKLPHGFAALSLKAIRNILPFLRQGFIYAHAVHLAKIPDIVTKAVWNDAHKREQILSGLMEIIENYNPKDRGVEGTIDFCIKSHLQDVVDLRPGAADALYHPSMIETYSDAKLNKMGVFQLGSPRTNAIRNPMAMRSLHILRSVVNQLLRDGTIDRDTEVHVEYARELNDANKRKAIADYQREQEKKRKQYRDDIITLYKSECHKEIEPTDTDILKFQLWEEQNHLCLYTGAQIGICDLLGDNPKFDIEHTIPRSVGGDSTQMNLTLCDATFNRQVKGAKLPTELSNHADILVRIDHWKSKCEDLRKQLDKIRTYGGMEKAMKDRLIQKRHRLKMELDYWQGKYSRFTMTEVPEGFSRRQGAGIGLVSKYAGLFLKSLFHNEQNPNKSNVYVVKGVTTAEFRRMWGLQGEYEKKSRLNHCHHCIDAITIACIGKAEYEKMAQYYHDEELFQWRGTTSKPHFNKPWRTFTEDILAIEQSLLVKHLTKDNMPKQAKKHVRTAKGKYLAQGDAARGSLHKDTYYGAIQQEGEIRYVLRKSLSDFNSESELENIVDQAVKEKIKAAVAGKNFKTAIAEPIFMNKEKGIRINKVRCYADSVKNPLHIRQQRDLSDKEYKQQFHVVNDSNYMLAIYEGEVKGKVKRDFALVNNITAASFFKRSNRRKNAEPLVPRTSPKGNLALLVMLKIGMQVLLYEKSPEEIKFDKPHDLVKRLYKVVGLSIDGSCIMIDLRYNQEARQAKDVKPKKGAYMENEQFRPCIRLRHTQFKALVEGVDFEFNILGEVKKKDNHA

SEQ ID NO: 19070 - protein, 1128 aa, unidentified
  REGION 1..1128: note = Cas Enzyme sequence
PLTDDFMLWQRSGSAEENNPYYCRYRCLTQKLDLTDQSQRFLLGRAFYHLAQRRGFLSNRLDTSADSEESGKVKSGIAQLSVEMEKAGCHYLGEYFYQLYRQHGNTVRLRSRYTDREEHYKKEFLAICEKQELDAQWVEKLQKALYFQRPLKSQRKGVGKCTFEPKKPRCAESHPDYEAFRMLCILNNIKIKTPKDVSLRPLNAEEREKVWPLFFRKSKPNFDFEDIAKALAGKNNYAWYKEAGEKPFRFNYRMHQGVPGCPVTAQLIDLFGPDWKAGIAETYMAVEKKNGTKTINEMADDVWNVLYSFSSKDKLKAFATEKLQLDEARATKFANAKLPHGFAALSLKAIRNILPFLRQGFIYAHAVLLAKIPDIVTAAVWDDADKRQQILSGLLEVIENYNPNDRGIEGTIDFCIKSHLQDVVDLRPGAADALYHPSMIEAYPDAKLNKMGVFQLGSPRTNAIRNPMAMRSLHILRSVVNQLLRDGTIDRDTEVHVEYARELNDANKRKAIADYQKDIERKRADYRKRIIELYKEECHKEIEPTDSDILKFQLWEEQNHKCLYTDSEIGICDFLGDNPKFDIEHTIPRSVGGDSTQMNLTLCDAMFNRQVKGARLPSQLPNHADILVRIAPWKSKCEDLRKKLDKIRTFSGMAKEIKDSQIQKRHRLKMELSYWQGKYERFTMTEVPEGFSRRQGAGIGLVSKYAGLFLKSLFHSADNPNKSNVYMVKGVTTAEFRRMWGLQGEYEKKSRLNHCHHCIDAITIACIGKAEYDKMAQYYHDEEVSRWHGSAGKPQFKKPWPIFTKDVLALEQSLLVKHLTKDNMPKQAKRRVRTAKGKHLAQGDAARGSLHRDTYYGAIEQEGEIRYVLRKPISKFEKESELENIVDQAVKEKIKAAVAGKNFKAAIAEPIFMNKEKGIRINKVRCYVKAKERLKIRQQRDLSTKEYKQFFCVENENNYLLAIYEGEVKGKKERDFCVVNNLDAAAYLKRSNKGKAAPLVPERSAERNLPLLAVLQRGTQVLFYEDSPEEILFDNPQDLVRRLYKVVGINTKRDVKKGKTYLYGNIELRFHQNAQKKDDVKMESGGYKNNEAPHQGIVLSHNQFKALVEGIDFEFNILGEIKKKEHHA

SEQ ID NO: 19071 - protein, 1223 aa, unidentified
  REGION 1..1223: note = Cas Enzyme sequence
MITRILGLDTGTNSLAWAVVDRDANGNYTLVKRGDVIFTEGVKIEKGIESSKAAERTGHKALRVHYSRRRLHKIDTLKVLVELDLCPYLSDEQLSQWKAKKTYPLTDDFMLWQRSGSAEENNPYYCRHRCLTQKLDLTDQSQRFLLGRAFYHLAQRRGFLSNRLDTSADSDESGKVKSGIAELSVEMEKAGCEFLGEYFYQLYRQHGNTIKLRSRYTDRGEHYKKEFLAICEKQELDPKWVEALQRAIYFQRPLKSQRKGVGKCTFEPKKPRCAESHPDYEAFRMLCFLNNVKIQTPNDTSLRPLNEDEREKIWPLFFRKSKPNFDFEDIAKALAGKNNYAWYKDAGEKPFKFNYRMQQGVSGCPVTAQLIDIFSSDWQTAIAETYTAVEKKNGTKTIDEMADDVWNVLYSFSSKDKLKAFATEKLQLDESSATKFANAKLPHGFASLSLKAIRNILPFLRQGFIYAHAVHLAKIPDIVTKAVWNDADKREMILSGLMEIIENYNPKDRGVEGTIDFCIKSHLQDVIDLRPGAADALYHPSMIETYPDAKLNKMGVFQLGSPRTNAIRNPMAMRSLHILRSVVNQLLRDGVIDRNTEVHVEYARELNDANKRKAIADYQREQEKKRKQYRDDIIALYKSECHKEIEPTDTDILKFQLWEEQNHLCLYTGTQIGICDFLGDNPRFDIEHTVPRSIGGDSTQMNLTLCDATFNRQVKGAQLPTQLSNHADILVRIDHWKSKCEDLRKQLDKIRTYGGMEKVMKDRLIQKRHRLKMDLDYWQGKYSRFTMTEVPEGFSRRQGAGIGLVSKYAGLFLKSLFHNEQNPNKSNVYVVKGVTTAEFRRMWGLQGEYEKKSRLNHCHHCIDAITIACIGKAEYDKMAQYYHDEELFQWRGTTTKPHFNKPWPTFTEDVLAIEQSLLVKHLTKDNMPKQAKKRVRTATGKYLAQGDTARGSLHKDTYYGAIEQDGEIRYVLRKPLNKFENEAELEKIVDQAVKEKIKEAIASKNFKTAITEPIFMNKEKGIRINKVRCYVKPSARLKVRQQRDLSSKEYKQYFYVENDINYMVAIYEGELNGKKEREFCVVNNLTAASYFKKSSHEKADSLVPERSPKNDLPLLYVLKRGVQVLLYENSPKEIQFDDPQDLVYRLYEIVGIGLDGNALMIDLRFHQEARRSSDLDRKKGAYKENETLRPCIRLRHTQFKALVDGVDFEFNILGEIKKKERHA

SEQ ID NO: 19072 - protein, 1229 aa, unidentified
  REGION 1..1229: note = Cas Enzyme sequence
MITRILGLDTGTNSLAWAVVDRDANGNYTLVKRGDVIFTEGVKIEKGIESSKAAERTAHKALRVHYSRRRLHKIDTLKVLVELDLCPCLSNEQLNQWKAKKTYPLTDDFMLWQRSGSAEENNPYYCRHRCLTQKLDLTDQSQRFLLGRAFYHLAQRRGFLSNRLDTSADSDESGKVKSGIAELSAEMEKAGCEFLGEYFYQLYRQHGNTIKLRSRYTDREEHYKKEFLAICEKQELDPKWVEALQRAIYFQRPLKSQRKGVGKCTFEPKKPRYAESHPDYEAFRMLCFLNNVKIQTPNDTSLRPLNEDEREKIWPLFFRKSKPNFDFEDIAKALAGKNNYAWYKDAGEKPFKFNYRMQQGVSGCPVTAQLIDIFGSDWQTAIAETYTAVEKKNGTKTIDEMADDVWNVLYSFSSKDKLKAFATEKLQLDEASATKFANAKLPHGFASLSLKAIRNILPFLRQGFIYAHAVHLAKIPDIVTKAVWNDADKREMILSGLMEIIENYNPKDRGVEGTIDFCIKSHLQDVIDLRPGAADALYHPSMIETYPDAKLNKMGVFQLGSPRTNAIRNPMAMRSLHILRSVVNQLLRDGVIDRNTEVHVEYARELNDANKRKAIADYQREQEKKRKQYRDDIIALYKSECHKEIEPTDTDILKFQLWEEQDHLCLYTGTQIGICDFLGDNPRFDIEHTVPRSVGGDNTQMNLTLCDATFNRQVKGAQLPTQLSNHADILVRIDHWKSKCEDLRKQLDKIRTYGGMEKAMKDRLIQKHHRLKMDLDYWQGKYSRFTMTEVPEGFSRRQGAGIGLVSKYAGLFLKSLFHNEQNPNKSNVYVVKGVTTAEFRRMWGLQGEYEKKSRLNHCHHCIDAITIACIGKAEYDKMAQYYHDEELFQWRGTTTKPHFNKPWPTFTEDVLAIEQSLLVKHLTKDNMPKQAKKRVRTATGKYLAQGDTARGSLHKDTYYGAIEQDGEIRYVLRKSLSDFNSESELENIVDQAVKEKIKEAIAGKNFKTAITEPIFMNKEKGIRINKVRCYADSVKKPLHIRQQRDLSAKEYKHQFHVVNDNNYLMAIYEGDVKGKIKRDFALVNNITAASYFKQSCRESNGKKLVPERSLKGNLPLLATLKIGTQVLLYENSPKDIQFDNPQDLVSRLYKIVGFSSMTITGNDYGVITLRNHQNAQQAKDVKYKNGKYRENEELRQGITLLHTQFKALVEGTDFEFNIIGEIIKKGSHA

SEQ ID NO: 19073 - protein, 1229 aa, unidentified
  REGION 1..1229: note = Cas Enzyme sequence
MITRILGLDTGTNSLAWAVVDRDANGNYTLVKRGDVIFTEGVKIEKGIESSKAAERTAHKALRVHYSRRRLHKIDTLKVLVELDLCPYLSDEQLSQWKAKKTYPLTDDFMLWQRSGSAEENNPYYCRHRCLTQKLDLTDQSQRFLLGRAFYHLAQRRGFLSNRLDTSADSDESGKVKSGIAELSAEMEKAGCEFLGEYFYQLYKQHGNTIKLRSRYTDREEHYKKEFLAICEKQELDPKWVEALQRAIYFQRPLKSQRKGVGKCTFEPKKPRCAESHPDYEAFRMLCFLNNVKIQTPNDTSLRSLNEDEREKIWPLFFRKSKPNFDFEDIAKALAGKNNYAWYKDAGEKPFKFNYRMQQGVSGCPVTAQLIDIFGSDWQTAIAETYTAVEKKNGTKTIDEMADDVWNVLYSFSSKDKLKAFATEKLQLDEASATKFANAKLPHGFASLSLKAIRNILPFLRQGFIYAHAVHLAKIPDIVTKAVWNDADKREMILSGLMEIIENYNPKDRGVEGTIDFCIKSHLQDVIDLRPGAADALYHPSMIETYPDAKLNKMGVFQLGSPRTNAIRNPMAMRSLHILRSVVNQLLRDGIIDRNTEVHVEYARELNDANKRKAIADYQREQEKKRKQYRDDIIALYKSECHKEIEPTDTDILKFQLWEEQNHLCLYTGTQIGICDFLGDNPKFDIEHTVPRSVGGDSTQMNLTLCDATFNRQVKGAQLPSQLSNHADILVRIDHWKSKCEDLRKQLDKIRTYGGMEKNMKDRLIQKRHRLKMDLDYWQGKYSRFTMTEVPEGFSRRQGAGIGLVSKYAGLFLKSLFHNEQNPNKSNVYVVKGVTTAEFRRMWGLQGEYEKKSRLNHCHHCIDAITIACIGKAEYDKMAQYYHDEELFQWRGTTTKPHFNKPWPTFTEDVLAIEQSLLVKHLTKDNMPKQAKKRVRTATGKYLAQGDTARGSLHKDTYYGAIEQDGEIRYVLRKSLSDFNSESELENIVDQAVKEKIKEAIAGKNFKTAIAEPIFMNKEKGIRINKVRCYADSVKKPLHIRQQRDLSAKEYKRQFHVVNDNNYLMAIYEGDVKGKIKRDFTLVNNITAASYFKQSCRESNGKKLVPERSLKGNLPLMATLKIGTQVLLYENSPKDIQFDNPQDLVSRLYKIVGFSSMTITGNDYGVITLRNHQNAQQAKDVKYKNGKYRENEELRQGITLLHTQFKALVEGTDFEFNIIGEIIKKGSHA

SEQ ID NO: 19074 - protein, 1229 aa, unidentified
  REGION 1..1229: note = Cas Enzyme sequence
MITRILGLDTGTNSLAWAVVDRDANGNYALVKRGDVIFTEGVKIEKGIESSKAAERTGHKALRVHYSRRRLHKIDTLKVLVELDLCPYLSDEQLSQWKAKKTYPLTDDFMLWQRSGSAEENNPYYCRHRCLTQKLDLTDQSQRFLLGRAFYHLAQRRGFLSNRLDTSADSDESGKVKSGIAELSVEMEKAGCEFLGEYFYQLYKQHGNTIKLRSRYTDREEHYKKEFLAICEKQELDPKWVEALQRAIYFQRPLKSQRKGVGKCTFEPKKPRCAESHPDYEAFRMLCFLNNVKIQTPSDTSLRPLNEDEREKIWPLFFRKSKPNFDFEDIAKALAGKNNYAWYKDAGEKPFKFNYRMHQGVSGCPVTAQLIDIFGSDWQTAIAETYTAVEKKNGTKTIDEMADDVWNVLYSFSSKDKLKAFATEKLQLDEASATKFANAKLPHGFASLSLKAIRNILPFLRQGFIYAHAVHLAKIPDIVTKAVWNDADKREMILSGLMEIIENYNPKDRGVEGTIDFCIKSHLQDVIDLRPGAADALYHPSMIETYPDAKLNKMGVFQLGSPRTNAIRNPMAMRSLHILRSVVNQLLRDGVIDRNTEVHVEYARELNDANKRKAIADYQREQEKKRKQYRDDIIALYKSECHKEIEPTDTDILKFQLWEEQDHLCLYTGTQIGICDFLGDNPRFDIEHTVPRSVGGDSTQMNLTLCDATFNRQVKGAQLPTQLSNHADILVRIDHWKSKCEDLRKQLDKIRTYGGMEKNMKDRLIQKRHRLKMDLDYWQGKYSRFTMTEVPEGFSRRQGAGIGLVSKYAGLFLKSLFHNEQNPNKSNVYVVKGVTTAEFRRMWGLQGEYEKKSRLNHCHHCIDAITIACIGKAEYDKMAQYYHDEELFQWRGTTTKPHFNKPWPTFTEDVLAIEQSLLVKHLTKDNMPKQAKKRVRTATGKYLAQGDTARGSLHKDTYYGAIEQDGEIRYVLRKSLSDFNSESELENIVDQAVKEKIKEAIAGKNFKTAITEPIFMNKEKGIRINKVRCYADSVKKPLHIRQQRDLSAKEYKHQFHVVNDNNYLMAIYEGDVKGKIKRDFALVNNITAASYFKQSCRESNGKKLVPERSLKGNLPLMATLKIGTQVLLYENSPKDIQFDNPQDLVSRLYKIVGFSSMTITGNDYGVITLRNHQNAQQAKDVKYKNGKYRENEELRQGITLLHTQFKALVEGTDFEFNIIGEIIKKGSHA

SEQ ID NO: 19075 - protein, 1223 aa, unidentified
  REGION 1..1223: note = Cas Enzyme sequence
MITRILGLDTGTNSLAWAVVDRDANGNYTLVKRGDVIFTEGVKIEKGIESSKAAERTAHKALRVHYSRRRLHKIDTLKVLVELDLCPYLSNEQLNQWKAKKTYPLTDDFMLWQRSGSAEENNPYYCRHRCLTQKLDLTDQSQRFLLGRAFYHLAQRRGFLSNRLDTSADSDESGKVKSGIAELSVEMEKAGCKFLGEYFYQLYRQHGNTVRLRSRYTDREEHYKKEFLAICEKQELDPKWVEALQRAIYFQRPLKSQRKGVGKCTFEPKKPRCAESHPDYEAFRMLCILNNIKIKTPNDTSLRPLNTQEREKIWPLFFRKSKPNFDFEDIAKALAGKNNYAWYKDAGEKPYRFNYRMQQGVSGCPVTAQLIDIFGSDWKAGIAETYTAVGKKNGTKTIDEMADDVWNVLYSFSSKDKLKAFATEKLQLDEASATKFANAKLPHGFAALSLKAIRNILPFLRQGFIYAHAVHLAKIPDIVTKAVWNDAHKREQILSGLMEIIENYNPKDRGVEGTIDFCIKSHLQDVVDLRPGAADALYHPSMIETYSDAKLNKMGVFQLGSPRTNAIRNPMAMRSLHILRSVVNQLLRDGTIDRDTEVHVEYARELNDANKRKAIADYQREQEKKRKQYRDDIITLYKSECHKEIEPTDTDILKFQLWEEQNHLCLYTGAQIGICDLLGDNPKFDIEHTIPRSVGGDSTQMNLTLCDATFNRQVKGAKLPTELSNHADILVRIDHWKSKCEDLRKQLDKIRTYGGMEKAMKDRLIQKRHRLKMELDYWQGKYSRFTMTEVPEGFSRRQGAGIGLVSKYAGLFLKSLFHNEQNPNKSNVYVVKGVTTAEFRRMWGLQGEYEKKSRLNHCHHCIDAITIACIGKAEYEKMAQYYHDEELFQWRGTTSKPHFNKPWRTFTEDILAIEQSLLVKHLTKDNMPKQAKKRVRTATGKYLAQGDTARGSLHKDTYYGAIEQDGEIRYVLRKPLNKFENEAELEKIVDQAVKEKIKEAIAGKNFKTAITEPIFMNKEKGIRINKVRCYVKPSARLKVRQQRDLSSKEYKQYFYVENDINYMVAIYEGELNGKKEREFCVVNNLTAASYFKKSSHEKADSLVPERSPKNDLPLLYVLKRGVQVLLYENSPKEIQFDDPQDLVYRLYEIVGIGLDGNALMIDLRFHQEARRSSDLDRKKGAYKENETLRPCIRLRHTQFKALVDGVDFEFNILGEIKKKERHA

SEQ ID NO: 19076 - protein, 1223 aa, unidentified
  REGION 1..1223: note = Cas Enzyme sequence
MITRILGLDTGTNSLAWAVVDRDANGNYTLVKRGDVIFTEGVKIEKGIESSKAAERTGHKALRVHYYRRRLHKIDTLKVLVELDLCPYLSDEQLSQWKAKKTYPLTDDFMLWQRSGSAEENNPYYCRHRCLTQKLDLTDQNQRFLLGRAFYHLAQRRGFLSNRLDTSADSDESGKVKSGIAELSVEMEKAGCEFLGEYFYQLYKQHGNTIKLRSRYTDREEHYKKEFFAICEKQELDPQWVEALQRAIYFQRPLKSQRKGVGKCTFEPKKPRCAESHPDYEAFRMLCFLNNVKIQTPSDTSLRPLNEDEREKIWPLFFRKSKPNFDFEDIAKALAGKNNYAWYKDAGEKPFKFNYRMQQGVSGCPVTAQLIDIFGSDWQTAIAETYTAVIKKNGTKTIDEMADDVWNVLYSFSSKDKLKAFATEKLQLDEASATKFANAKLPHGFASLSLKAIRNILPFLHQGFIYAHAVHLAKIPDIVTKAVWNDADKREMILSGLMEIIENYNPKDRGVEGTIDFCIKSHLQDVIDLRPGAADALYHPSMIETYPDAKLNKMGVFQLGSPRTNAIRNPMAMRSLHILRSVVNQLLRDGVIDRNTEVHVEYARELNDANKRKAIADYQREQEKKRKQYRDDIIALYKSECHKEIEPTDTDILKFQLWEEQNHLCLYTGTQIGICDFLGDNPRFDIEHTVPRSVGGDSTQMNLTLCDATFNRQVKGAQLPTQLSNHADILVRIDHWKSKCEDLRKQLDKIRTYGGMEKAMKDRLIQKRHRLKMDLDYWQGKYSRFTMTEVPEGFSRRQGAGIGLVSKYAGLFLKSLFHNEQNPNKSNVYVVKGVTTAEFRRMWGLQGEYEKKSRLNHCHHCIDAITIACIGKAEYDKMAQYYHDEELFQWRGTTTKPHFNKPWPTFTEDVLAIEQSLLVKHLTKDNMPKQAKKRVRTATGKYLAQGDTARGSLHKDTYYGAIEQDGEIRYVLRKPLNKFENEAELEKIVDQAVKEKIKEAIAGKNFKTAITEPIFMNKEKGIRINKVRCYVKPSARLKVRQQRDLSSKEYKQYFYVENDINYMVAIYEGELNGKKEREFCVVNNLTAASYFKKSSHEKADSLVPERSPKNDLPLLYVLKRGVQVLLYENSPKEIQFDDPQDLVYRLYEIVGIGLDGNALMIDLRFHQEARRSSDLDRKKGAYKENETLRPCIRLRHTQFKALVDGVDFEFNILGEIKKKERHA

SEQ ID NO: 19077 - protein, 1223 aa, unidentified
  REGION 1..1223: note = Cas Enzyme sequence
MITRILGLDTGTNSLAWAVVDRDANGNYTLVKRGDVIFTEGVKIEKGIESSKAAERTGHKALRVHYSRRRLHKIDTLKVLVELDLCPYLSNEQLNQWKAKKTYPLTDDFMLWQRSGSAEENNPYYCRYRCLTQKLDLTDQSQRFLLGRAFYHLAQRRGFLSNRLDTSADSDESGKVKSGIAQLSVEMEKAGYEFLGEYFYQLYKQHGNTIKLRSRYTDREEHYKKEFLAICEKQELDPKWVEALQRAIYFQRPLKSQRKGVGKCTFEPKKPRCAESHPDYEAFRMLCFLNNVKIQTPSDTSLRPLNEDEREKIWPIFFRKSKPNFDFEDIAKALAGKNNYAWYKDAGEKPFKFNYRMQQGVSGCPVTAQLIDIFGSDWQTAIAETYTAVEKKNGTKTIDEMADDVWNVLYSFSSKDKLKAFATEKLQLDEASATKFANAKLPHGFASLSLKAIRNILPFLRQGFIYAHAVHLAKIPDIVTKAVWNDADKREMILSGLMEIIENYNPKDRGVEGTIDFCIKSHLQDVIDLRPGAADALYHPSMIETYPDAKLNKMGVFQLGSPRTNAIRNPMAMRSLHILRSVVNQLLRDGIIDRNTEVHVEYARELNDANKRKAIADYQREQEKKRKQYRDDIIALYKSECHKEIEPTDTDILKFQLWEEQDHLCLYTGTQIGICDFLGDNPRFDIEHTVPRSVGGDSTQMNLTLCDATFNRQVKGAQLPTQLSNHADILVRIDHWKSKCEDLRKQLDKIRTYGGMEKNMKDRLIQKRHRLKMDLDYWQGKYSRFTMTEVPEGFSRRQGAGIGLVSKYAGLFLKSLFHNEQNPNKSNVYVVKGVTTAEFRRMWGLQGEYEKKSRLNHCHHCIDAITIACIGKAEYDKMAQYYHDEELFQWRGTTTKPHFNKPWPTFTEDVLAIEQSLLVKHLTKDNMPKQAKKRVRTATGKYLAQGDTARGSLHKDTYYGAIEQDGEIRYVLRKPLNRFENEAELEKIVDQTVKEKIKEAIAGKNFKTTITEPIFMNKEKGIRINKVRCYVKPSARLKVRQQRDLSSKEYKQYFYVENDINYMVAIYEGELNGKKEREFCVVNNLTAASYFKKSSHEKADSLVPERSPKNDLPLLYVLKRGVQVLLYENSPKEIQFDDPQNLVYRLYEIVGIGLDGNALMIDLRFHQEARRSSDLDRKKGAYKENETLRPCIRLRHTQFKALVDGVDFEFNILGEIKKKERHA

SEQ ID NO: 19078 - protein, 1219 aa, unidentified
  REGION 1..1219: note = Cas Enzyme sequence
MEKVLGLDLGTNSIGWAIIQREGDQSTLIDKGVSIFQEGVAREQGAEKPAVQTRTDARALRRAYRRRRKRKIDLLRVLVDHELCPPLTHEQLDLWLQKKRYPLDEAFLAWQRTDEATGRNPYRDRYRALSEQLDLTGEKGRYTLGRALYHIAQRRGFLSNRRDNTAESEGKVKQGIDSLTEAMKAAGCRYLGEYFYMLYGKGEKIRNHYTSRNDHYRAEFDAICSRQQLDPTLTDKLRRAIFYQRPLKSQKGTVGKCTFEKGKSRCPLSHPRFEEFRMLSFINNIRITTPYDFGASRPLNEEERAAAIRMFMRKSKSKPTFDFEDIAKALAGRKRSYAYEEDAGEAPYRFNYRMSTSVSGCPTTAALADIFGEDWVSGICSLYTRAEGKTKERIVDDVWHVLFSFDDDDRLRQWAAERLQLSEADAEKFAAITPKQGYAALSLNAIDKILPYLRAGRRYDEAVFCANIKAAVPAEVRSDEQLLGRITDEVSRIVADFKPDPTIKADTKQSRIEGCMREHGIEADMKKLYHPSMIETYRKAEAGDDGLVQLGSPRTSSVRNPMAMRALFRMRALLNRLLREGRIDSKTKINIEFARGLNDANKRKAIEQWQREREKENKRYAQEIRKLTGSPIEPSEEDILKYRLYEEQNHICLYTGRQISITDFIGSSASCDIEHTLPRSRGGDDSQMNKTLCDNRFNRETKCSKLPSELSEHSDVMARIEQLGWKQRIDDLHKQIETASRRSKNATTKEDKDKAIQHRHKLRMQLDYWQGKYERFTMTEVPEGFANRQGVDIGIIGRYARLYLKSVFERIYTVKGATTAAFRKMWGLQEEDSEKERTSHAHHCIDAITVACIGRNEYDRWAQYAAQEEYYRRCEGVKPSFDKPWPTFTEDVRAVADELLVAHSTPDNMSKPTKKRLRKRGRIVSGDDRRPIIVTGDSARASLHKDTFYGAIKRDDEIKYVVRKSLSDLGEKDIDKIVDEAVRARVRDAVERMDFTQAVAGTIWMNEQKRIPIKRVRIFAPTVTAPIKLKEHRDLSKKEHKHHYHVVNDGNYCMAIYEGQDKKGRTKRSFEIVDNLEAAEYFKASADRSERPDLVPRSDACGNPQRCILKTGTMVLFYENSPEELYDCSKRELAKRLYKLTQFSTLRIGNNSYGIIVFRHHQEARPASELKPKNGVWKIGEEYRPLIRILHTQFNALVEGSDFELTVTGKIRFKHRSHD

SEQ ID NO: 19079 - protein, 1219 aa, unidentified
  REGION 1..1219: note = Cas Enzyme sequence
MEKVLGLDLGTNSIGWAIIQREGDQSTLIDKGVSIFQEGVAREQGAEKPAVQTRTDARALRRAYRRRRKRKIDLLRVLVDHELCPPLTHEQLDLWLQKKRYPLDEAFLAWQRTDEATGRNPYRDRYRALSEQLDLTGEKVRYTLGRALYHIAQRRGFLSNRRDNTAESEGKVKQGIDSLTEAMKAAGCRYLGEYFYMLYGKGEKIRNHYTSRNDHYRAEFDAICSRQQLDPTLTDKLRRAIFYQRPLKSQKGTVGKCTFEKGKSRCPLSHPRFEEFRMLSFINNIRITTPYDFGASRPLNEEERAAAIRMFMRKSKSKPTFDFEDIAKALAGRKRSYAYEEDAGEAPYRFNYRMSTSVSGCPTTAALADIFGEDWVSGICSLYTRAEGKTKERIVDDVWHVLFSFDDDDRLRQWAAERLQLSEADAEKFAAITPKQGYAALSLNAIDKILPYLRAGRRYDEAVFCANIKAAVPAEVRSDEQLLGRITDEVSRIVADFKPDPTIKADTKQSRIEGCMREHGIEADMKKLYHPSMIETYRKAEAGDDGLVQLGSPRTSSVRNPMAMRALFRMRALLNRLLREGRIDSKTKINIEFARGLNDANKRKAIEQWQREREKENKRYAQEIRKLTGSPIEPSEEDILKYRLYEEQNHICLYTGRQISITDFIGSSASCDIEHTLPRSRGGDDSQMNKTLCDNRFNRETKCSKLPSELSEHSDVMARIEQLGWKQRIDDLHKQIETASRRSKNATTKEDKDKAIQHRHKLRMQLDYWQGKYERFTMTEVPEGFANRQGVDIGIIGRYARLYLKSVFERIYTVKGATTAAFRKMWGLQEEDSEKERTSHAHHCIDAITVACIGRNEYDRWAQYAAQEEYYRRCEGVKPSFDKPWPTFTEDVRAVADELLVAHSTPDNMSKPTKKRLRKRGRIVSGDDRRPIIVTGDSARASLHKDTFYGAIKRDDEIKYVVRKSLSDLGEKDIDKIVDEAVRARVRDAVERMDFTQAVAGTIWMNEQKRIPIKRVRIFAPTVTAPIKLKEHRDLSKKEHKHHYHVVNDGNYCMAIYEGQDKKGRTKRSFEIVDNLEAAEYFKASADRSERPDLVPRSDACGNPQRCILKTGTMVLFYENSPEELYDCSKRELAKRLYKLTQFSTLRIGNNSYGIIVFRHHQEARPASELKPKNGVWKIGEEYRPLIRILHTQFNALVEGSDFELTVTGKIRFKHRSHD

SEQ ID NO: 19080 - protein, 1219 aa, unidentified
  REGION 1..1219: note = Cas Enzyme sequence
MEKVLGLDLGTNSIGWAIIQREGDQSTLIDKGVSIFQEGVAREQGAEKPAVQTRTDARALRRAYRRRRKRKIDLLRVLVDHELCPPLTHEQLDLWLQKKRYPLDEAFLAWQRTDEATGRNPYRDRYRALSEQLDLTGEKGRYTLGRALYNIAQRRGFLSNRRDNTAEREGKVKQGIDSLTEAMKAAGCRYLGEYFYMLYGKGEKIRNHYTSRNDHYRAEFDAICSRQQLDPTLTDKLRRAIFYQRPLKSQKGTVGKCTFEKGKSRCPLSHPRFEEFRMLSFINNIRITPPYDFGASRPLNEEERAAAIRMFMRKSKSKPTFDFEDIAKALAGRKRSYAYEEDAGEAPYRFNYRMSTSVSGCPTTAALADIFGEDWVSGICSLYTRAEGKTKERIVDDVWHVLFSFDDDDRLRQWAAERLQLSEADAEKFAAITPKQGYAALSLNAIDKILPYLRAGRRYDEAVFCANIKAAVPAEVRSDEQLLGRITDEVSRIVADFKPDPTIKADTKQSRIEGCMREHGIEADMKKLYHPSMIETYRKAEAGDDGLVQLGSPRTSSVRNPMAMRALFRMRALLNRLLREGRIDSKTKINIEFARGLNDANKRKAIEQWQREREKENKRYAQEIRKLTGSPIEPSEEDILKYRLYEEQNHICLYTGRQISITDFIGSSASCDIEHTLPRSRGGDDSQMNKTLCDNRFNRETKCSKLPSELSEHSDVMARIEQLGWKQRIDDLHKQIETASRRSKNATTKEDKDKAIQHRHKLRMQLDYWQGKYERFTMTEVPEGFANRQGVDIGIIGRYARLYLKSVFERIYTVKGATTAAFRKMWGLQEEDSEKERTSHAHHCIDAITVACIGRNEYDRWAQYAAQEEYYRRCEGVKPSFDKPWPTFTEDVRAVADELLVAHSTPDNMSKPTKKRLRKRGRIVSGDDRRPIIVTGDSARASLHKDTFYGAIKRDDEIKYVVRKSLSDLGEKDIDKIVDEAVRARVRDAVERMDFTQAVAGTIWMNEQKRIPIKRVRIFAPTVTAPIKLKEHRDLSKKEHKHHYHVVNDGNYCMAIYEGQDKKGRTKRSFEIVDNLEAAEYFKASADRSERPDLVPRSDACGNPQRCILKTGTMVLFYENSPEELYDCSKRELAKRLYKLTQFSTLRIGNNSYGIIVFRHHQEARPASELKPKNGVWKIGEEYRPLIRILHTQFNALVEGSDFELTVTGKIRFKHRSHD

SEQ ID NO: 19081 - protein, 1380 aa, unidentified
  REGION 1..1380: note = Cas Enzyme sequence
MKRILGLDLGTTSIGWALVNEAENNNEASSIVRLGVRVNPLTVDEKSNFEKGKAITTNADRQLRHGARINLQRYKLRRQNLHDCLQKQGWLGTEAMYEEGKASTFETYKLRAKAAEEEISLHEFARVLFMLNKKRGYKSNRKANNKEDGQLFDGMTIAKKLYEEHLTPAEYSLQLLNKGKKFTQGYYRSDLNAELERIWDEQKKYYPEILTDEFKQQLEGKTKTNTSKIFLAKYGIYSADLKGLDRKLQPLKWRVEALKQQVDKEVLAFVISDLKGQIANTSGLLGAISDRSKELYFNKQTVGQYLWVSLEENPHISIKNKPFYRQDYLDEFEKIWETQAAFHKQLTPELKQEIRDIIIFYQRPLKSKKSLISVCELEQRKVKATIDGKEKEITIGPKVAPKSSPVFQEFRIWQNLNNVLLIDNDTNEKRPLDEDERNLLYKELSIKAKLSKTEALKILNKKGKQWDLNYKELEGNRTQAILFDCYNRIIALTGHEEHDFKKIKASEIRHYVSTIFKNLGFSTEILDFDPSLEKHELEKQPMYQLWHLLYSYESDNSRTGNESLLRKLETTFGFPEEYATVLCDVVFEEDYGNLSVKAMRKILPYLQAGNDYSQACAYAGYNHSRHSLTKEELDKKVYKERLELLPKNSLRNPVVEKILNQMINVINAIIDEYGKPDEIRIEMARELKSSAAERENRTRAISQGNAENQRIREILEKEFALSYISRNDIIKYKLYEELKPNGFKTLYSDTYIPKDKLFSKDFDIEHIIPKARLFDDSFSNKTLEARDINLAKSSKTAFDFVKEKYGEEGAEAYKKKLDMLLENNVISRAKYNKLLMAEADIPSGFIERDLRNTQYIAKKACEILGELVRTVTPTTGEITNRLREDWQLVDVMKELNFEKYEKLGLTEIVEDRDGRKIKRIKDWTKRNDHRHHAMDALAIAFTKPSFIQYLNNLNARSNKGDSIYAIENKELHYEEGKLRFNAPIPVNEFRAEAKRHLSAILVSIKAKNKVMTQNVNKIKTKHGILKKIQLTPRGPLHNETIYGTKMRPIIKMVKVGASLDEATINKVSSPAIREALLKRLNEYSGNAKKAFTGKNTLDKNPIYLNVERTKVVPALVKTVEWENYHPIRKPITPDLKVDKVIDKGIRDILKARLEEFNGDAKKAFSNLEENPIYLDEAKKIALKRVSIEGVLSAIPLHTLKNQAGKPITGKDGKPVLGNYVQTSNNHHIAFYYDEDGNLQDNAVSFFEAAERKSQGIPVIDKDYNRDKGWRFLFTMKQNEYFVFPNEATGFIPSEVDLTDEANYGIISPNLYRVQKMSKVRRGTYDKRDYWFRHHLETTLNDDLKVRNSIFKEIQSLQHLEGIIKVRINSIGKIVAVGEYD

SEQ ID NO: 19082 - protein, 1202 aa, unidentified
  REGION 1..1202: note = Cas Enzyme sequence
MTHQHYKYRLALDLGVTSIGAAVIKLDAHNEAEDIIDAGVRIFPLSEGAADKRAKKQARKNNRRTRLRIQLLAAALKEIGLWERDDAGSESYGLNKISPYAIRAKAIHAKIGNPYKIGRALLHLARHRGAGYLDQLVEAQENTVINADTGKVTKKAQSPYDKMYAHLENTHAATVGEYFYKRLFELPKAETKRAVRQREAHIKKGQAVDYAIPRGLVRAEFHKIWDTQQRYYPQMQDPATKAKIESILFYEKAHAPYAIGTCIYIPTETRLPKASILTEKRRIYEAVNNIRILNDLGKRALTLAERDAIIDALESGENMGKKAIKSLLGLDGKHKISLMDNAIIKAYLYARPEMKPLVALSQNDEDALENLILFLAEPINPTDPSGRLYKEEQVVAQIKSMLSAPDLDESIIYKIMATLPKERAPLGKTATEEILQLLITNPGMSHREAADALVHAGDLRFKSEEVLAQEIQGKYQKLPYYGEILSRDTQPIHPWQKARNKTLNAAEKAMGKIANPAVHMMLNQLRLVVNDIIRIYGRPYDINLELTREVGKSKATRDAIVAEQKKNHEKNQDAKKYLKEHNMRITSANILKYKLYTEQKGQDAYNPHNPIPANFNGFEIEHLIPRAKGGTDTYNNLVLVSETDNRAKGDLFPYDYFSSHKTESEKRQILKFARNTLKDKVWRFEPDAEERFCDGDPDAQNRYLTDTSYMAKLAARYLRAILDFIPDPKTNIINTRVLTIKGSHTAKLRSAWYLDGLEYDLMGLAADVPRDIACPPYFLNQETGQTITGTSPPDIDGIWHLKDTIPNPAWMKKPRIDHRHHAIDAITLGCINRNFMQKLRHADKHSYTIRNKDYPLPLSSLDADKPATAKHAFRHKVLHLLQGIHVSHKPDHGIEGPLHEETKKYLLMQDVKKGITLTRYARKLETTIKTEKDIDKILIKDFIKDTWHPDVATDRQRMLALKANLLAARAQAYQHQQNQRQIQEQAGEKTSPIRETQIWQEAINIVRRTGLYTSTTFPTYENSCSGIPIPKHQTYYVAGYNHRVEFYIAPTGKVGWQLVNNFDANTPARMAALKQDYTNNHWQPLWKIHKGDLLEMDTPPEWQATIKNKKVLVVVKKFSKGEIGIALAHDARGTSIPATIPEDKKAATAFYIQGNKCKKTGRCEGKGLLFCTRHHMRKIELTPFGKIKRKHRQLWHGTKKKS

SEQ ID NO: 19083 - protein, 1144 aa, unidentified
  REGION 1..1144: note = Cas Enzyme sequence
MKVIGIDMGTNSIGWAVIEDHKILASGVRVFPEGVNRPKGSYEESKNLKRRLARQIRRQYFRRRLRKATLTKILKAHGMFPNEQGLAAWNGLNPYELRAKATEEHLTPLEFGRVMFHMAQRRGFKSSLKGSDSEEGKIYDGDLKLRKPGITATQQAIKSEGFATLGAYLNSLDTTVERIRNRYTTRKMYQHEFEVIWDVQKSFDPQTYTPDLYDLLGHEKKGVLFFQRPLRSQKSLIGKCTFEKGKPKIPISHPDFQEYRAWSFINNIRYGNNERLTKDQNQVVFNEMMTKPTLKISQIKKKLKLQGEEFNYDDDTLVPCMSTLFQLNKHFGNKVDFTNAKELEDLWHLFYHAEDPEWLTAKVHSKYGLDPESAKAAAEGKPRVRLDEGYGSLSSAAIKRVLPFLRMGIRYDLATLLAGVRKVLGESYWGSLNENDIQALIDNVRHALLAKESGKLRERLWAYLSSEFTIDERYSAADLYHHSDLDTQQDLLDALPEPKNLRNPIVQQALYELKSLVNALLKKFGPPDRIALEMARELKSPKKVREKMLDDNRKREKQRIEIKQNLINEGIRPSSANITKYLLWEECGQQCPYTGMSISRQDLFDDGVWQVEHIIPYSVSFDDGFNNKTLCYADENRNKGNKTPWQFYNYNPNKWEEVKARAKHLFCNRNSYPKFLKFVNESDPKADEFLERQLNDTRYMAKEAKSYLAKVCKDILVTPGGVTAELRHLWGLNGILAPPIRTEYAYEGLCWLVTDPNNKPLHLEPWEMSKAGKIEEKLSKQGVVWEGELREGTFYSKKIRDDHRHHAVDAIAIACTERNYVQKISSYNALDWRFPRPAFEKPWASFFEDAKDSVESILVSHKVRNRLVTKRTLRQRINGKKVVHHTTTPRGQMHEETFYGLVRDPASGTDRFTTRKPLSAITKVKQLKGITDSRILRLIVERAHELGVDLSNKDLELPKNFFFEYSEEGIPTPTLYLPGGAYGRPIPVRKIRYRVESGNMKLRNKETNQYAEPGNNFMAVIIEDPQGNLRNETVTFWDAVTRQKENHDLVSLRAGEKILYKFQANDMYLLNIQEGIRWQDLPAKTISKHLYRVQKFSGTDFYFRLHNSSTLKYENEYERLSSLSALKKVNPVPVSSTYFGLNDL

SEQ ID NO: 19084 - protein, 1197 aa, unidentified
  REGION 1..1197: note = Cas Enzyme sequence
MSKTILGLDIGVSSVGLSIILENEGHMEIKDMAVRIVPEDPNFHGKFYSGNTASKNLERTTERGIRRSNQRFKKRRDELHTIMKSHNMLNDSLINLTAIELYGLRAKAVQERVSLEELGRVFIHLNQRRGFLSNRKSASEEENTTDYKKRLAQLQEELGNETIGQHLHNELKNARSPVEIVLRERTYLRASYMEEFDRIWECQKQYYPTLLSGGIHEDDNKGTLYNAIRNRIIFYQRPLKSQKGLVSNCTFEKYHKAINKSSPFFELYRIWQRINDLTWKLPSGETQWPSKEQKNRLFEKLFHEVEAKSNFKLTVSAIKKTLGFSSRENIYLNFTELEGSKTYSTIKNALEKAGIIESNRFLFFNHQANDEKGGLFELWHILYSLPADTDIINALIKRFGFAHEQANIVAKEVGFNADYGSLSTKAIKKLLPHLESGLAYNEACDMAGYDHSGYKTKMEIQQKLAPIKQNSLRNPVVEQVLNQVVNMVNLAIEKHGKIDEIRVELARELRNNAKTRKKITNQNSKNKKSNDEIRTRLQNEYNFKIVNGRDVQRYKLWEETNQVCLYCNKTITKTDFLNGQADIEHILPKSRSFSNNMNNYILAHRMCNKDKNQMTAFDFMLSKNDSIAKDYIERVNALYNDGKGLISKSKFEMLMCRGEDIPSDFVERMKKDTQYITKEAVKMLKTVCENTYTTTGQITDFLREKWGLKELLQEINIDKYRALGLVDGKDIKDKEGNIKSIEVIHEWSKRDDHRHHAIDALICALTDQKIIFKLNNLNKLYQYERNLLSAEEITAIESTLSDELNIDRKFDIKSFAELSDTLINEPMPNLRKQARDHLDKIFISIKKSSKVMSKNVNTPKGGNPQTTWVPRGRLHEATIMGQVKRIADKKMKLNEKFTNLENIVNPEIKAFVKHYLSEFNNDIKSAFDSKLLKKKPLIYKDKELKEVAVYEHTCTKRVVISDKVTSAQIDKIVDKKIQMVIESRLDEYQGKIKEAFSNLKDNPIWLNKEKGIQIKSFTVYDESKVEQVRNGFAKTGSNHHALIYRTEDGKFKDKVISFWEAVEIGKLNIAQTGFPYPIVNQQDDNLLGQFHFSMQINDLFVFDLKHSENPKEENEINFLSPDNRALISTKLFRVQKLSKGSSGTFQIDFRHHLETTVLRNDANLRGQTWDRIQSNEHIKRLTKIRINQLGDVLKIGE

SEQ ID NO: 19085 - protein, 1209 aa, unidentified
  REGION 1..1209: note = Cas Enzyme sequence
MTIIRKILNYTIMSKTILGLDIGVSSVGLSIILENEGHMEIKDMAVRIVPEDPNFHGKFYSGNTASKNLERTTERGIRRSNQRFKKRRDELHTIMKSHNMLNDSLINLTAIELYGLRAKAVQERVSLEELGRVFIHLNQRRGFLSNRKSASEEENTTDYKKRLAQLQEELGNETIGQHLHNELKNARSPVEIVLRERTYLRASYMEEFDRIWECQKQYYPTLLSGGIHEDDNKGTLYNAIRNRIIFYQRPLKSQKGLVSNCTFEKYHKAINKSSPFFELYRIWQRINDLTWKLPSGETQWPSKEQKNRLFEKLFHEVEAKSNFKLTVSAIKKTLGFSSRENIYLNFTELEGSKTYSTIKNALEKAGIIESNRFLFFNHQANDEKGGLFELWHILYSLPADTDIINALIKRFGFAHEQANIVAKEVGFNADYGSLSTKAIKKLLPHLESGLAYNEACDMAGYDHSGYKTKMEIQQKLAPIKQNSLRNPVVEQVLNQVVNMVNLAIEKHGKIDEIRVELARELRNNAKTRKKITNQNSKNKKSNDEIRTRLQNEYNFKIVNGRDVQRYKLWEETNQVCLYCNKTITKTDFLNGQADIEHILPKSRSFSNNMNNYILAHRMCNKDKNQMTAFDFMLSKNDSIAKDYIERVNALYNDGKGLISKSKFEMLMCRGEDIPSDFVERMKKDTQYITKEAVKMLKTVCENTYTTTGQITDFLREKWGLKELLQEINIDKYRALGLVDGKDIKDKEGNIKSIEVIHEWSKRDDHRHHAIDALICALTDQKIIFKLNNLNKLYQYERNLLSAEEITAIESTLSDELNIDRKFDIKSFAELSDTLINEPMPNLRKQARDHLDKIFISIKKSSKVMSKNVNTPKGGNPQTTWVPRGRLHEATIMGQVKRIADKKMKLNEKFTNLENIVNPEIKAFVKHYLSEFNNDIKSAFDSKLLKKKPLIYKDKELKEVAVYEHTCTKRVVISDKVTSAQIDKIVDKKIQMVIESRLDEYQGKIKEAFSNLKDNPIWLNKEKGIQIKSFTVYDESKVEQVRNGFAKTGSNHHALIYRTEDGKFKDKVISFWEAVEIGKLNIAQTGFPYPIVNQQDDNLLGQFHFSMQINDLFVFDLKHSENPKEENEINFLSPDNRALISTKLFRVQKLSKGSSGTFQIDFRHHLETTVLRNDANLRGQTWDRIQSNEHIKRLTKIRINQLGDVLKIGE

SEQ ID NO: 19086 - protein, 1316 aa, unidentified
  REGION 1..1316: note = Cas Enzyme sequence
MKRTLGLDLGTNSIGWAIVEEENGAKRLVKGGSVIFPEGVARVKGSEVPATEERTRSRAMRRLYMRRRMRKHRLLRTLMTNGMCPLSDTGLNDWIKKDQYPLEDAFVTWFRMNPYELRAKGLQERLTPLELGRVFYHMAQRRGFQSNRKGGDGEQESFHEGLEEKGIAGYNDTKRLIAMHGTLGKAGAELAKDHTPIRKRYFKRSDLVDEFNQLWEIQQGVNKDLNNKLRAQIGDGKTGDLFYQRPLKGKKSEVGRCTLEPGKRRAPISSIQAELFGVLQTINNIRKEGRMLNADERGKVMPLFFRRSKPAFEFSDVTKALKLKGAEHGFNYAAKDKLPGAKTIAHLADLWDTDAMEIVEAFGSMAPNKADLRKTWEDRYAVIYNAEDWADISERKAKGQDTAGKRDLKEYAITQWSFGDEQLKLLERFDTKQGYHSLSSRALGRIIPLMYGSTDHPPLGYHDAVVLANLPSVFKVVHKAADGKTVTHIDDRWAAMSEAERSAIYKGIRGCMDDQRDYTTETILLNGLIRAYRDSSGETGGRIGFWNSEWEQLLRRSMDGSLSLEQKRMKGIDGLERLFQAVKEKFIHHIESHQKVQFEPLLRMEDRVKNWLIDNFDLLPKDVAKLYHHSAISTYKEQTYCLGDPKTPGLKNPMVYRALHTLRMLVNKLIEAKEVDRKTQVNIEMARELDSANKRKAWQRYQNVMRKKNEDAEKAVREYYASIGNHNNPTDDAIERMWLLDEARQVFGKVLCVYTGKEFGIADLFNGGVEVEHTWPRSKTVDNSMANKMLCMTRYNRDVKKERLPAALPNYSKDALVNGAMLPAIVATAEPIKELWERYDRIVYACKMSAKSAATKEAKDKAIQDRWFNQFFRDYWRTKYEHLTAEEIKPGFRNRQLVAAGQISKLARAYMNSYFNRVECLKPEALSALRKEWLGESLVHAKDRSLHTHHAVDAAVCAAVDRVVFDALAHHYEEHDEKGVAASFDPPWKGFGADMASLRQSALVYHVHKPVIGRTSIYQRTVRLKNGEVVQVKAQGDTVRGSLHKDTYYGKIKLKKAGTEDYEEHVVLRKPIVGMSKADMAKVVDPALRQALLDADPDTIEKHRGLPWKGKHKGVPVTRVVKHARVFDRSVKNPVALKAHRDKLDGTDHKHHLWVKNDETPVMAIYENAKGKSTHYVFSLLELTLAQKGKQGRDLLMQAIPAKHPDPKREGYTLKYRNGKPMVLQAGQLVRLFKDGPEEIDHNDQVDLNRRTYVLRKVEADGRVNLLNVLEARPDDQIDETNQWKPEQPLQWLRFSVHGLKAEIDGIDTTIGMVHT

SEQ ID NO: 19087 - protein, 1051 aa, unidentified
  REGION 1..1051: note = Cas Enzyme sequence
KNLISFCEFENREMEIERNGNKIKKTIGLRVAPKSSLLFQEFKIWQVLNNVLIRKKGSRKRTASTNEKDKEVFEFDLHAKQQLFDELNIKGNLKSDKALKLLGYKPEEWELNYSELEGNSTSKALQEAYLKILDFEGYDVRDLLKVKSNKDEIALDDLDVPAVEIKQMIKSVFETLNVNIEILDFNAELDGKSFEQQASYQLWHLLYSYEGDDSASGNEKLYESLEKKFGFKKEHGQILANISLSDDYGNLSTKAMRKIYPYVKELQYDKACAEAGYKHSASSLTREEIANRSLNDKLELLKKNSLRNPVVEKILNQMVNVVNTLIETNSKRDHDGNISEYFKFDEVRIELARELKKSAKERAEMTTNINAAKINHEKIIKLLQGDFGIKNPSRNDIVRYKLYEELKNNGYKDLYTDQYIAREILFSKQIDIDHIIPQARLFDDSFSNKTIVFRNDNLKKGSRTAFDYIESEYGEEQSAAFLKRIENLSEVGKKNKEEGISRAKFQKLQKKETDIGDGFIERDLRDTQYIAKKAKNMLYDISRSVVSTTGSITDRLREDWDLVNIMQELNFDKFKKLGLTEKVEKKDGTFKERIVDWSKRNDHRHHAMDALTVAFTKHNHIQYLNHLNARFNETHKEYRIIKAIEEKETHIIKDDNGNSKRVFNLPIPNFRIVAKEHLENILVSHKAKNKVVTKNKNKTKTAKGEKVKTELTPRGQLHDQTIYGSNWWSRIELNKKTSRNEIDKIIDENIRTFLQDYIKEKGSISKAFSDGELSKLKYNGNELKEVEVSIPCYTQRIDIVKIFTDPQKTNSAKEKNIKNILDLEVRRILQSRITEFGGDYKKAFSDLDKNPIWLNRDKGISIKRVTISGVSNAEALHYKKDHFGNEIVDKDGKPIPVDFVSTGNNHHVAIYKDEEGNLQERVVSLFDAIQLVNVGLPVIEKEFNKGLGWEFMFTMKQNEYFVFPNEQARFNPKEINLLNPKNNKLISPNLFRVQKIATKNYMFRHHLETNVEEKKGLVNIAYVNIRSTNPLQNIVKIRINHIGQIVKVGEY

SEQ ID NO: 19088 - protein, 1227 aa, unidentified
  REGION 1..1227: note = Cas Enzyme sequence
MKQRILGLDTGTNSLGWAVVDRNENGTYTLVHKGDLIFQEGVKVEKGIEFSKAAERTEYKSSRKHYFRRRLRKIETLKVLIKYDFCPFISTEELKLWHTRKIYPMNDEFMCWQRTNENEEENPYYYRHLCLNEALDLSVKSNRHLLGRALYHLVQRRGFLSNRLDNSEESSEDGKVKSSIKGLSEEMKDAGFEYIGDYFYNLYSKFGNKVRIRNRYTDREQHYFKEFYAICAKQNLEEECVKELARAMYFQRPLKSQKQNVGKCVFEKGKYRCIDSHPDYEEFRMLSFINNIKIQTPRDLDLRALNGEERAKILPLFYRKSKTIFDFEDIAKALAGKNSYANYKDRSDKPYKFNFRMQQGVSGCPTTTFFLFMWGENWRQALAETYISTEGKHGVKSVDDIVTDIWNVLYSFSSQEKLKSFALEKLQLTEKEAEQFSKVKVTRNTTSISLKAVRKILPYLRVGINYTHSVFLANICSVVPSYVWNDEEQRTYILKNVYEIIHSFDPKDVKLNGTLEFCLKDFLQNNYELKAGAIDKLYHPSMIDVYPDARPNADGIYQLGSPRTGAVRNPMAMRALHQLRHVVNQLLKDGIIDSQTEVHIEYARELNDANKRKAIADYNKDLENKRKKYADDIVKLYKEATGREIVPNRQDIDKFILWEEQKHKSLYTGKEIGIADFLGTHPVFDIEHTIPRSVGGDSTMMNLTLCEAVFNRSIKQSKMPTQLANHDEILERIQPWKEKVVELTKQIDKCRTNPSMDKAMKDRIIQKRHRLSLERDYWKGKYNRFIMEEVPEGFSRRQGTGIGLISKYAGLYLKSLFHHPQDRNKSNVYVVKGVTTAEFRRMWGLQEGYEKKSRDNHVHHCIDAITIACIGKREYDLMAHYYHDEESYMRGQGSKPHFPKPWSTFTEDVLAIEKELLVVHSTPDVLPKRAKKWIMVKGVKRLAQGDSVRGSLHKETYYGAIERDGQQRFVVRKHLADMTDSDINNIVDDIVRLKVMDAVKMYGKTILKTGPIYMNKEKNVLINKVRVYSSNTLAPYAMERKRQRDLSRKEYKQKYYVSNDGNYCLAIYEGNNNGKIKRGFEVVKNIQAADYYKKSTDKKDYPELVPCVYRYSDDEIGYPLKYKLYIGTQVLLWENNPEEIWKLSSDELKKRLYYVTGISDKKQYAYVTLRYHQEGRRSSDLNEKKGAFKVKNEHFPVMVMSHLQFNALVEGVDFELTILGEVKPIKK

SEQ ID NO: 19089 - protein, 1523 aa, unidentified
  REGION 1..1523: note = Cas Enzyme sequence
LLKNSLQIYNFFIIPSIISEKICRFEEIFKQSRTMKRILGLDLGTNSIGWAVVTASQDEEDREHIIGIEGDGSRIIPMDAAVMGDFDKGNTVSQTAERTRLRGIRRLQERFLLRRERLHRVLRILGFLPKHYEEQLTRYGKFVTPDGCNLAWTKDKDGQPTFLFESSFQEMLDDFRKTQPELVSDGHKIPYDWTLYYLRKKALTQEITKEELAWILLNFNQKRGYNQLRGEEEETPQTPKNRQYFERSTITDITDTGKEYKGKKILRITLANGDSGKIFRKDIPEWIGQEKTMIATVKLKDGRDAIDDDGEIDRIYKIPTEQEWENEWALVKMKTQQDLDAQEKTVGAYIYDTLLAQPGQKIRGKLVRTIDRPYYKKELYSILETQRNFHPELQDAALYKACIEELYAANDAYRNSIAKRDMVYLLVDDVLFYQRPLKSKKSLISNCPYEYHLYTKDGEEQREYLKCIAKSHPLFQEFRLWQFLSSLRIYKKETKADIDVTDQFLASDAARAELFSWLNDRKSIDQKSLLKYPGFKLKKDADLYRWNYVEDKSYPCNETRALFLKAIDKVGLNASFLTTDIEEALWHILYSIADPKELAKALRRFAEKHGLQEEFVDAFKNLPPFKAEYGAYSAKAIKKLLSVMRLGKYWSADSIPASVRRQIDAITSGDCSEKLKVQMEGASLLNGHVEQFSGLPVWLACYVVYGRHSEGKEIQKWESPEDIDNYLNHFKQHSMRNPIVEQVVMETLRVVRDIWKQYGKIDEIHIELGRNLKEPADKRKKMTDRILENERTNMRIRLLLMEFANPDYKIEGVRPYSPSQQELLRIYEEEVLQSEEVDDEILEILKKFQQTDSAKQPKPSEIKRYRLWLEQKYRSPYTGKPISLARLFTSDYEIEHVIPQSRYFDDSLNNKVICEAEVNKLKSNALGFEFIKQHHGEKVQLAHGGTVTIFTEAAYEEYVKEHYAKNRKKCQNLLLEDIPESFSSRQLNDSRYISRVVKTLLSNLVREDGEEEAISKNVVPCTGSVTDRLKKDWGINDVWNQIILPRFERMNTFGIGSFTSVTANGNIIPDIPLQYRQGFNKKRIDHRHHAMDAIVIACANRNIVNYLNNVSASENGKTTRRDLQTILCEKHKLDGSNYEWLIRKPWDTFTHDVYEALSTTVVSFKQNTRIISRCTNHYERIVNGKKVRVPQTKGELIAVRKSLHKDTVFGEVNLVRTKFVSLNDAVKSPSRIVDRYLRGTIRKLLAEGCNAKKIKEYFAAHNTEWEAHTQKAKIEVRYFTQETNERFYAVRVPIDTSFTEAVIKKSVTDTGAQKILLRHLANCGGDSNVAFSPDGIESMNRNICELNGGKFHQPIYHVRKYESANKFSIGSTGNKRAKFVESAKGTNLFFAIYEQDGVRSYSSIPLRTAVERAKNHLPIAPENEQGISAKYVLSPNDLVYLPTQEDIANGKIASPLYMDRIYKFVSSSKGQAFFISSSVASPIVNKAEFGPLNKAERALSGEMIRETFIPLKVDRLGNIAIKE

SEQ ID NO: 19090 - protein, 1161 aa, unidentified
  REGION 1..1161: note = Cas Enzyme sequence
MNGKKYRLGLDVGTNSLGWSVLELDAETKPCAILAAGSRIFAEGREAKTKATLAATRRGARSARRRRDRFKQRQTFLLSELIKAGLFPKASEDRQELQKRNPLELRSDALRRQLQPWEVGRALFHLNQRRGFKSNRKDQSEETVSGVVSRSARLLLEDMKLIGPEANKEDITKLSPAEKKQIRQDEAQARKEALGKLNERKDLSYGSFLHQRRLNGQPTRARPATARDGKLYDVYPTRELYEDEFQKIWQTQAAYHPELMTISAKERIHRAIFHQRPLKPQKRGKCAYMSDEDRTFRALPSFQRYRIYQEVNSLEWWDLGEIKKVRDYREARDEIVNLLENVSTNNGQLTFGKMKNILKRIGITEGNFKFNFETEKRKGLDGNLTSNLMRHEDRIGPSWHDWPLAKQDDFIDTILNGTPQHQERDRKRLDGVEPNSPPDGAKDDEDVLAYLCERFGLPDHIAENCMNSRLKDDTASISLRAARLMLEKMRDGVVDAVTGEIVLPPQSDAASAVALEEPSFIDPSRSKGDDGKYRLLNKLPYYGEAFQDGRHIISGTGKPEDDDKTRWGGVTNPTVHIALNQIRLVVNELIDRFGRPESIAIELGRDLPLGPKKRGEIEREQKENQARNEKFDATLTELGQKPNAGNRLRLFLWHELSDDPNGRCCPFSGRTIGIADLFNGSTEIEHLIPFSRSLDDSRANKVVCTRDANQFKGNRTPFEAFGGSPDGYNWSEIGARAEALPSSKGWRFKPDAWDIWQQGADGDFTSRHLNDTRYIGRLTREYLETICHVDRIDVVTGRLTSLLRRHWDLNRVLDDGSNRKNRDDHRHHAVDAIVVGMTSRSLLQKVSTKARELESCDIDPARNLSRFFAPAENPSNRIDPWSRFRNDVESVVSKIVVSHKARRKSLASPHTTDGQLHNDTAYGLVQKLNDDGLWEVVSRKPVTGLKKLQDIESIRDPRLREAFKSRFEAAEASTSGSGYKAVQDMAGELNIRRVRCIEKLSVIGITDKFDNTYKAYKGDSNWGIEIYSWPTGHKKAGKWEGVMVPRFDAHQNGFRPGFTFRPHPAARLIMRLRINDCIQMLVAKESEERRIYRLQLVSKGRMCFAEIEEANVDSRDRDKAESFNYTRVGVSTLQSRLAQKVHISPTGLVSCERRRRYRRAR

SEQ ID NO: 19091 - protein, 1161 aa, unidentified; identical to SEQ ID NO: 19090
  REGION 1..1161: note = Cas Enzyme sequence

SEQ ID NO: 19092 - protein, 1368 aa, unidentified
  REGION 1..1368: note = Cas Enzyme sequence
MASKTILGLDLGTTSIGWALVREGENADIIKTGVRVIPLSTDEIQNFDKGKSITTNADRTLKRSMRRNLQRYKLRRENLIEILIEKNLINETSILAEVGNASTFETYKLRSQAVDQRVELDQFARILLMLNKKRGYKSSRKAKGEDEGSAIDGMDIAKELYERNLTPGQLINERLQLGKKSIPDFYRSDLQSEFDIIWNHQKQYYPDKLTEELYQELLGKSKTITASILRKQGFDGLELKGNLSEKKVARYSLRAKAVNSKCSLEEISEILPEINNNINQSSGYLGAISDRSKWLFFNQLTVGQFLYQQIESNPHAILKNQVFYRQDYLDEFNRIWEKQREFYPEILTQELKQEIRDVIIFYQRKLKSQKSLLSICELEGKIIEIDDNGIKKKRKVGSKVCPKSSPIFQEFKIWSQLNNITYSNEGSRKSLGISLELEQMQLLYQELNWKEKLSANEVLRLLNLKGYQLNFNEIEGNRTNASFINALNDFFVKEGHDELVLSKMNSAELLDTLKKLFPIYGIDVSLLNFDSNLGGQHIENQAFYNFWHLLYSFEGDNSKSGIDKLKTALEAKFGFPFESNTPIANIKLSDDYGNLSVRAMRKILPFLKEGNRYDLACTLAGYNHSHSETKEDLSNKVLLDRLEILPKNELRNPVVEKILNQMINVINTIFETYGKPDEIRIEMARELKKSAKERENATKAIRQITDEHIKLKRELQAEFGLPNVSRNDLIRYKLYLELKDNGFKTLYSNQPIDRSKLFSSEYDIEHIIPQSKLFDDSFSNKTIELRSYNLKKGNDTAFDFISKEFGEEGLKEYEARVKALFGNQLGKKSKYRKLLMSETDIPKDFIERELRDTQYIAKKAKDILSTVVRHVSTTTGSITEKLREDWQLVDILKELNWNKYDKLGLTETKVNRHGQKVNRIVDWTKRNDHRHHAMDAITVAFTKREYVKYFNNLNAKSEKDGEIYKILKTETYFDKEQKRRFNPPMPLSQFRARAKEHLENTLISFKAKNKVSTKNKNAIKTTKGKITTVQDTPRGQLHLETVYGSSQYYSSKVEKIGANFDLEKINKVANSKYRKLLQKRLEENGNDPKKAFTGSNSLSKRPIFLNALETYTLPESVKLVEFDTRYTIRKPITPDIKIDKVIDKGIQLILQERLNQHHGDAKKAFSNLEENPIYLNKEKGLILKRVTIQGVNNAVALHNKKDHFGKEVRDAKGNPIPVDFVNTGNNHHVAIYKDEKGNLQEEVVSLFEAIARKNQGVEIIKKQHELGWEFLFTMKQNEYFVFPNEASGFDPSEIDLLDPSNFVTISPNLFRVQKLTSGDYWFRQHLETTIEVKSELKNITYKRLGLSGLKGLIKIRLNHLGMIVQIGE

SEQ ID NO: 19093 - protein, 1088 aa, unidentified
  REGION 1..1088: note = Cas Enzyme sequence
MPAPALFSFDLGTNSIGWAVLGLADSEPCSLMDCGVRIFPRGVDPHSQTPLGVNRRLARGQSRRRDRYKRRRRALLRVLTQYMMMPDSVFARQALIRETSDRQAGQVSNDVYTLRARALDEQISLHQLGRIIFHLNQRRGFKSNRKTDRADKEIGKVASGIQRLQQAMDETQSRTLGEFLYFKRTSSADSGMVRARLVKTVDAFGKEIDSYGIYPQRAMLEAEFNLIWHSQAKFHPELTEERRQHLFAIIFHQRPLKKPKIGQCSFNPDETRLPKCDPFFQMFRLVKEINELTIRFPDETERALTLAERDQVLDHMKDKKSASFAAIRRLLKLPKGAQFKKESDTRDRLKGDEITADFSSETRFGTFWFDLPMEKHAEIIAQLNNEDDPVALDTWLTSEFALSPEQRDAVASTTLPSGYSRLGITATREILDELLGAVIPESEAAKRAGYDHALQRIGDNSDTLERYQEILGRRIPPGSNKESDDYDTRKGRISNPTVHIALNQLRRVVNRLIKKHGKPDRIVVEIARDLKQNEEQRNAWSRQNAKNAKENRRLDALLDELKQERKHDNRLILSLWEELGEKEDDRLCIYTGKLITRDMLFSNAVEVDHILPFSRTLDNSRANLLLCLSEANRAKGNMAPGEVPTWSSQHEKLTERANILPSGKKWRFSKDAMERFEKERDFLARQLTDTQYLSRMAHEYLASLYPDEEPDDWGVYNRRNHVHVVPGRLTSLLRRAWGLNSILSSNGIKNRDDQRHHAIDAIVVGATTRSMLQQISTRAGKGEDINSFAFLRSIPLPWPSFREAIKSGVRDIVVSYKPDHGTISSGNTAGKLHNDTAYGIVDASGKVPLVVRKVALTSLPESSIFAQLQDPGVRDTVLRLSLYDYLSPLLDAIPADERKKALPKLLSEFPNSPQGHNYKGIRSVRVTERLNVVTVKDEHGVPYKGYKPDSNFEITIWEMPDLRWQAIPVSMFDAHQSNFTEQRPHPAARKIMTLKQLDMVAYEQADGVTKIARVIKFSGNQITLADHNEGGALKARDADKKDPFKYLSKSANALRDMGLRHVRVDEIGTVFDPGRMDKLTRDSKKTEF

SEQ ID NO: 19094 - protein, 1211 aa, unidentified
  REGION 1..1211: note = Cas Enzyme sequence
MTKILGIDTGTNSLGWAIVEKKAEQYCLLDKGVNIFQEGVNIDKDNESSKAAERTGYRAIRVRYYRIKLRKIRLLHILTLHHLCPPLTSWELRQWRLKSIYPTDELFMQWQRTDEEKGQNPYAYRHLCLHEKLDLTQVANRYILGRVFYHFAQRRGFLSNRKDQSGEDVGVVNDGISALSEEMREAGCEYLGDYFYQLYEKGKKIRKHYTARNEHYLKEFHAICEKQQLDASLVSELEKAIFTQRPLKSQKRQVGKCVFEKNKAKCPASHPLYEEFRMLSFINHIKIKTPKEDELRPLSHEEREKILPLFFRKSKKTFNFEDIAKKLAPKKLYGFYKKAADAEMPYLFNYPMDTSISGCPVTAALQDIFGDDWLDSICEVYTLADGKSRLEILNDIWHALFFYSDQDKLAEFAKVRLQLDDEQAQAFSNINLPSAYASLSLKAICKILPYLRRGLVYSHAVFLGNLCEVMPAYEWGIEEMRQAAIDCVIKEINSYDPKTDGRTLETCIKEYLKERYHVSDENLKKLYHPSMLETYPRVRPGQDGIYQLGSPRTDSVRNPMAMRSLFCLRKLVNRLLKEGKIDQETEIHIEFSRELNDANKRSALKRYGRDNQKAHDTARKHIVEDYKAETGKAIEPTPTDILKYELWEEQQHICLYTGQQIRISDFVGPNPKFDIEHTLPRSRGGDSTKMNLTLCDSRFNRDVKKTHLPTELANHDEIMARIAIWQEKYEELSQQIRKQKRKSQAATTKEQKDKAISYRHYLELQRDYWRGKHERFTMESVPEGFNRRQGVDIGIISKCARLYLKSVFKRVYPVKGLATSDFRKIWGLQDIYSAKERVNHVHHCIDAIVVACIGLDEYGKLAEYYHDEEKHEWYGASKATFAKPWPTFVEDVRRMQNELLVYHHTPDNMAKQGRRRIIINGKKVLAKGDAVRGSLHKETYYGAIEREGEVKYVKRVELSQLEEKNIKYIVDDTVRQIVQEAVDRLGFTEAMASTIWMNEEKQIPIKKVRCYTPQVTQPLHIRYQRDVSAKEYKRKYHVVNDKNYLLAIYIGADKKGKEKRDFELVNNLQAAKYYRTSNDRTGSGDPIVPVKSSHDYPLAYTLKIGTMVLLYENSPAELYEASQAELNRRLYKVTGLSSKNVSGYKYGEIAMKYHTEARQSKDLKSKNGVYQTGEELRPVIRMLHTQIKAAVQGVHFRINELGEIKWLARYD

SEQ ID NO: 19095 - protein, 1474 aa, unidentified
  REGION 1..1474: note = Cas Enzyme sequence
MCPLTQKELDGWVKWDKSKPSEERRRFPESPRFREWLALDPYRLRAEAVDTPLEDDPDGGFTAREKLGRILYSIIQHRGFLSSRSGKEDGSIYTSTMEKDGKVGIDETRAALGDRTLGQYLYSIAPKEGDPFSDQAERVRSRYTLREMYVEEFDRIWTRQAPLLGLDREQVATVHYRYFTGKSDSYEARRQLERYRAKDPSAVIETLSGDEHRFIYKTTTSLKEHLAGKIWYDKDGTIRFVSKESTLFWQRPLRSQKSMLDKCSLESHKVKDRGTNRFITQGPTVVSASHPYYELYRVLQTLLNMRIRDRKLDLMMLQSMLDKLLTYGKNTKVSKLKKDLRLTLDLNFPDDYELPGCPTISGITKLLDSKKMPSRKGDASPIDRLVIPFDLNLYTRIWEKLFFYDDNHLLAQGLRGIEGAAFVEDLEDKLAKLHLSEDYGNLSLHALRNILPYLLRGEELYSAVLLGGIRNAVRDDALVDDHDDALRSWIHTQGPLARGEMIDRIVALLQDPDGPFQLSTPELKLRQRLYHPSQGTAKHRLMDQLPPVENLRNPMVEQALWAMRRLVNYLLNNYRSTIRPDFTFDEIHVELARDLKLSTQKRVEMRKRQKKAEEDNDMARDYLRSQGLSNSRENLQKYKLYMELAGRSMGVVTCPYTGKVISGLSAALDGNSKFQVEHIVPRTMTYDDSFANKTLCDADFNRKKGNLTPWQFYQQDPSPKLWGADSWEEVEHRAFRLLPYRKATRFVSKTIEDQLSGDQLVDTAYISRKAKEYLSYICPQDHIRLYPGRVTARLRQLWGLNSILSQGPTITKGQLPAELSLSGDQIPAIVIGKKKSGVLSRILPKYTSRPEREERDVVLLVRVQKGKVYSARYSELPLFWDKAVSLADGTYYIVLRRSEVVRVERMFADEPRLTEDQLRARVTIELNKDGQPKLSSREMDVRILKDIPLPTAPGNYWLTIPLVSVPEVTPEHPRAKVATDTIKVTGSVEQGVFVSKVYRQGGVAIEDGLAQVILTPDLSEVSFTKIKLDAPAITSGEVVLTGAIDRSDLFVCDQDDELRVQIDSFDEPGKYYAVFSFDPMASYILSYDQTPNLSSDEVVLDGELIYNDKDDRIHFSPSKNRDDHRHHALDAIVIACTGQRVLTAMSTYNAHADDYERGTGTKPTFASPWEGFRDDVRESIEAVLVKHKQSTKILNKVTKKITKDGRTHRSEGLAVRGKLHDQTFYGLRQSPQESVSSLHKREKIQSIDTPSALSRVADVTIRDLMLSRLQDIGIDTTKKEYSMPKGSHAFVDEEGNYTIHLPNKRKGGAPIPVKKVRLCERVSSPIQIAEYNKWVKPENNEHLLVYINNDNEIKYLCVSFFEEVNKKTRGVDGWKYPADLREVLLVLRINDMILWGLNATEARTVLQRGDYKEVSKYLYRVNAISGGEFELRHHSDARTDKNSRIRITPASLKKRGLPLKVELSIMGELSVVCR

SEQ ID NO: 19096 - protein, 1373 aa, unidentified
  REGION 1..1373: note = Cas Enzyme sequence
MKKILGLDLGTNSIGWALVDEAESESEKSSIVKLGVRVNPLTVDELTNFEKGKSITTNADRTLKRSMRRNLQRYKLRKENLIKILKQNNWISKQTILSENGNKSTFETYRLRAKAVIEEVSLEEFARILLMINRKRGYKSSRKAKSTDEGQLIDGMEIAKKLYHENLTPGQLILELVKAGKKYFPDFYRSDLQSEFDRIWDFQKQFHLDILTDEFKKQIAGKGKQNTSKIFLAKYGIYTAANKGANKKLEATQWRVDALSKQLSSEELAFVISDLNGNVNNSSGYLGAISDRSKELYFNKQTVGQYLMEQLEQNPHARLKNQVFYRQDYLDEFNTLWETQALFHKELTPELKSEIRDVIIFFQRRLKSQKGLISFCEFESKQIEVEVDGKKKLKTIGMKVCPKSSPLFQEFKIWQILNNIQVNDKSSHAKRFLEQEEKVILFAELSVRDKLTKADALKLLFKNHKELDLNYKDIEGNKTQAALFNAYNDIIELSGHEKIDLSKSSANEIIDSVTEVFTALGINTEMLLFDSSVAGDQFDKQPLYQLWHLLYSFEGDNSNTGQEKLIETLSTRYGFEKEYAKRMASLTFQPDYGSLSTKAIRKILPHMKEGNEYSVACVHAGYNHSKSSLTKEELDKKELKNRLDILPKNSLRNPVVEKIINQMINVVNAVSESYGKPDEIRIELARELKKSAKEREELTTAINQTTTEHEKYRQELQQKFGLSHVSRNDIVRYKLYLELEPFGFKTLYSQTYISPDKLFSGDFDIEHIIPQSRLFDDSFSNKTLETRSINLEKGNDTAIEFIEKKYGKEGVADYIARIEGLFKNNPAKQGKLKKLKMKGEDIPDDFINRDLRDTQYIAKKAKSILEEFVRDVVSTTGSITDRLREDWQLINVMQELNWYKYDKLGLTDTIIGRDGQEIPRIKDWTKRNDHRHHAMDALTIAFTKRSHIQYLNNLNARSDKAGSIYGIEQKELYRDDKGKLKFKPPMPLDDFRAEAKKHLENTLISIKAKNKVTTININTTNKKGGTNKKKQLTPRGQLHLETVYGSMLQPLIKEEKVGGNFNEATIAKVTKPIYREALLKRLQENGNDPKKAFTGKNSLEKNPIYLDDLHALKVPEKVKTQDVETIYTIRKDISPDLRIDKVVDKKIQKILQDRLAEFKNDPKKAFSDLDLNPIWLNKEKGISIKRVTITGISNALALHDKKDKEGNLLLDKEGKPQPVDFVNTGNNHHVAIYRDEKGNLQENVVSFFEATERVNQSLPVINKEFKKKEGWEFLFSMKQNEYFVFPNAETGFNPNEVDLLDPEKYCLISPNLFRVQKVATKNYFFRHHLETDVKERKELSGIAFKPQLGLNAIKDIIKVRVNHIGQIVSIGEY

SEQ ID NO: 19097 - protein, 931 aa, unidentified
  REGION 1..931: note = Cas Enzyme sequence
MAKLTYGSFLWQRQQEGRPTRARPLPGHRKSPYDVYPTRELYEDEFSKIWSAQAKYHSSMTDENKDRIYNIIFKQRPLKSQKVGRCMYMPDEDRTFRAMPGFQCYRIYQEVNNLEWTGGKLREHPDARDAIVALLEESSTREVTFSKMKGILRDKGLIQGRERDFKFNFESSKRKGFDSNLTSHIMQHEDYVGPDWHKWSLERQDKFIEIILEDKSDYTDMKQQLDAVKRQLMDEFSHLSETVAEKCMRAPLTDRTANISLKAAHLMLEKMRDGIADMETGELKLPLQNEAAERVAEENEYFVNPMRRRKADEAGYTPADRLPYYGKAFEAGSHIIPGSKEPKEEGNDLLYYGGVSNPTVHIALNQIRKVVNELIGRYGHPESVAIELGRDLPVGPKGRREIEAEQKDNQERNRKLDGALEELGLSRNPINRLRLRLWEELNDDPVGRCCPFSGKKIGKADLSNESIEIDHLLPFSRSLDNSPANKVICTRQANRDKGKRTPFEAFGDSPDGYSWSDIQERVKHLPTAKHWRFGEDAMERWNRDHSDFSERHLNDTRYIGRLAREYLECICHIDKIDVVTGRLTSLLRGHWKLNSVLNENDRSRKNRDDHRHHAVDAIVIGMTSRSMLQKVATAANRAEDLEIEHLFPKGTNGASPIDPWHGFRADVRKVINEIVVSHRARHRKQGQLHNDTAYGIISASDGKDIRHGTKQKCRVVTRKFVADLKGKTDSATRKSLESIRNLRLRQAFLHAYKGGGFDAVKELAKEKGIRRLRVVEENKTVIPIADKSDKPYKAYDGNSNWAMEIYSFPKGHKKADKWDGVTISTFDASQPNFKPSETNRPHPAARLVMRLQKNDCIEIEEENKKRILRRVQKLSDGQITLAPLHEANVDARDRDKEDSFKFLTKSPNSLKQLNARKVHISPAGRVSYEKR

SEQ ID NO: 19098 - protein, 931 aa, unidentified; identical to SEQ ID NO: 19097
  REGION 1..931: note = Cas Enzyme sequence

SEQ ID NO: 19099 - protein, 1162 aa, unidentified
  REGION 1..1162: note = Cas Enzyme sequence
MKKYRLGLDVGTNSLGWGVLELDEDGVPCAIAAAGSRIFAEGRDNKSKATLAATRREKRSARRRRDRFKQRQKFLLHELTRARLFPKSEQVRKELQKRNPLALRARALVQRLEPYEVGRALFHLNQRRGFKSNRKDRSEEVARGRVSRSARLLLKEMNLIGPEILETEEYKKLSKEGKKQARRAEADARKQALRKLADNSELTYGDFLYRRQCQRKPTRARPGADNDGKLYDIYPTRELYEDEFKKIWRAQSQHHAELMTEDVRRRIHRAIFHQRPLRPQKRGKCTYLPSEDRTFRAMPSFQRYRIYQEVNNLEWQDGHSSKRVRDYPGARDEIVRLLEKVATKNGRVGFGKIKGVLKRLDYAEGDFKFNFETAKRRGFEGNLTSNLMQHEDRVGEEWHSWPLERQDEFVDVLLNGTPEQQERDRNKLAGIGNLAPSDGAQDDSDVRRHLMERFGLSEFAADNCLNATLKDDTANISCKAARLMLAAMRDGLADQKTGEFSLPLQNEAAAAVAREVSGFVNPFRAKGDDGKYPLLDKLPYYGEAFGDGRHIIPGTGKEEDDDKTRWGGVTNPTVHIALNQIRLVVNELIDRFGHPHSIAIELGRDLPVGQEKRREFEREQKENQDRNQRFNENLLELDQKPNADNRLRLFLWEQLSDDPNGRCCPFSGDKIGITDLFSGRTEIEHLIPFSDSLDDSRANKVVCTRKANRDKGNRTPYEAFGDSPNGYVWDEIAARAEQLTDSKRWRFQKNAREIWQRDEDTDFTSRHLNDTRYIGRLAREYLERICPVDRIDVLTGRLTSLLRGHWGLNSVLRDDREGTGRKNRDDHRHHAVDAIVIGMTSRSMLQKVSAEARKLEEMELMSPQSLGRLFPPAADGKSVIDPWTGFRSDVADTVGHIVVSHKVRRKKLRRGSSDGQTDGQLHNDTAYGIIGEAEKGSACEVVARKPVSAFKTIKDIKRIRDLRLRTDFCSAFEDAAAGQEANAMQELARRRGIRRLRRTETLSVIPIKDAAGKPYKAYKGDSNWGIEIYSFPRGHKKADKWEGVVISRFEANQPHFQAGQTRRPHPAAKVVMRLQINDCVEMEQGGERRFYRLQKIGRSGQLSFAKLHEANVDSRNRSKEDSFKYLLVSANPLKNRNAIKVHVSPTGRVSHEHRRLPRRQRV

SEQ ID NO: 19100 - protein, 1162 aa, unidentified; identical to SEQ ID NO: 19099
  REGION 1..1162: note = Cas Enzyme sequence

SEQ ID NO: 19101 - protein, 1212 aa, unidentified
  REGION 1..1212: note = Cas Enzyme sequence
MKKRILGIDTGTNSLGWAVVERNEEGDYHLLRKGSFIFQEGVKVEKGIESSKAAERSSHRATRKHYFRRRLRKIEVLKTLIKYGWCPELSEEQLHLWHTKKQYPASDAFIAWQRTNENFEQNPYYYRHVCLHDKLDLTNKAEAYILGRALYHLAQRRGFLSNRLDQSEEDESGAVKSSISNLSKEMANSDCEFLGDYFYKLYSEQKNNVRIRNRYTDREAHYKKEFYAICKTQELTEVQITELEKALYFQRPLKSQRQGVGKCTFEPRKPRCADSHPDFEKFRMLTFLNNVKIKGPKDIELRNLNEEEIKKALPMFYRKSKDNFDFADIAKSIAGKDNYQYIKDAGDKPYKFNYRMTQGVSGCRTTAQLREIFGEDYANGIAEVYVKGDGKTLQQMVNDVWNVLYSFPDKQKVKQWAKDNLQLDEEMSEKFSKIKLSHNFASLSLNAIRNIIPWLEKGLIYSHAVTMAKIPDIVGHEVWQEHKETITNELIEFILNFNPKDESMQGTLDYCIKDYLKNNFDLKPNAADVLYHPSMIETYPDAKKNKDGIYQLGSPRTNAVRNPMAMRSLHQLRKVINELLREGVIDNNTEVHIEYARELNDANKRWAIGEWNKRQEKKRKEAYDEIKKLYKEKTKKDIEPTDDDITRFLLWREQNTICIYTNATIGITQIVGPDPDFDIEHTIPRSIGGESIMSNFTLCSKRYNRDVKKAKMPTELSPADYEGICTRISAWKEKIEKLRKELDKKRTNPNMAKDIKDKRIREKNLLKIELDYWKDKYNRFIITEAPDGFARRQGAGIGLVGKYAGLYLKTLFHKKEDRNKTNVRTIKGTTTAEFRKMWGLQDEFEKKSRDNHIHHCIDAIVVACIDTGNYNQVARYYQQLEEYERNKNNKPSFPKPWPTFTEDIMALKNEILVVHDTPDNMPKHARKYVRTANGKVLAKGDCARGSLHNDTYYGAIERDGEIRYVVRKSLSDLKENDIENIVDETVKSIIKQAIANKDFKKAMAEDIFMNKEKGIKIKKVRCYVPTVTSPLHIRHQRDTSKNEYKRQYHVTIDGNYCMAIYEGEIKGKTKRSYEIVNMLDAAAYFKKSANLTQLYPIAPENKNGLNYRCFVRTGTHIILLQSDEEEIDVTNEKELAKRLYFVAVMKKDGRIVLRYHQDAREATILKKERKAGAYKDGENYRSEISLSLSDFHALVEGVDFRINALGEITMLK

SEQ ID NO: 19102 - protein, 1409 aa, unidentified
  REGION 1..1409: note = Cas Enzyme sequence
MKKILGLDLGVSSIGWALVNEAENTEEKSSIIKLGVRVNPLTVDELQNFEKGKSITTNADRTLKRSMRRNLQRYKLRRQELIDVLTEAGFISNDSILSEQGNKTTFETYRLRAKAAIEQISLEELARVLLMINKKRGYKSSRKAKGDEDGKLIDGMEIAKKLYEENITPGQLCLQLIKDGKKRLPDFYRSDLQDELNRIWNVQKEFYPLALTDEAREEIKGKNKSQTWAILAKHFVWQEDTSIWDNNDAATKLATKEKKIVGIKRETKGIDLKRENYEWRSLALSERMDLERLAIVFQEINAEISSSSGYLGAISDRSKSLYFNNQTVGQFLMESLDKDPNASLKNTVFYRQDYLDEFERIWEVQAKYHKELTDDLKHTIRDIIIFYQRRLKSQKSLISICEFEQTEKEIIVDGKSKKITIGSRVIPRSSPLFQEFKIWQTLNNIEVTVKADNSKFYLTQEDKMLLAEELSVRDELKKSEILKLLFESPAKFDLNYKSIEGDKTSAALYQAYSQILEMSGHEPLDFRQTAKNIKSTVKEVFASLGWNTEILSFNSTAPLDEQPYYKLWHLLYSFEGDNTITGDGNLREKITQLCGFDKEYAQCIVNVSLIEDYGSLSAKAIRKILPYLKEGNKYDVACLYAGYRHSASSLTKDEIESKVLKDRLELLPKNSLRNPVVEKILNQMVNVVNEIIDSCGHPDEIRIELARELKKSAKEREELTRSLATATKEQEDIRHILQTEFGILHVTRKDIIRYRLYEELKDNGYKTLYSDTYIPREKLFTKEFDIEHIIPQARLFDDSFSNKTLEVRSVNIEKGKKTALDFVADKYGDEGIERYRNTCEKLFKNKKTKLRKLMMKEADIPADFIERDLRNTQYIAKRALAMLSEISRRVVATTGSITDELRNDWQLVDVMKELNWDKYKALDRVEYHEDRDGRQIGRITNWTKRNDHRHHAMDALTVAFTKDVFVQYYNNKNASECPNSNEYAIKSKYFKEGKAIPPMPLGEFRRETKEHLQNILVSIKAKNKVVTNNVNKTASKNGTRKVTQQTPRGQLHLESVYGSHKEYVTKEEKIGAAFTEEKIMTVCRKVYREALLLRLRQHGGDAKKAFTGKNALDKNPIWIDRARGIAVPPKVKTVMQEVRYTIRKPIDESLSVDKVVDVRIRKILQQRIEEYGSAKKAFANLDENPIWLNKEKGIKLKRVTIYGISNAQALHEKKDKDGNYLLDEKGNRIPVDFVNTGNNHHVAIYRKPVLDKQGVPLLDDHGDIMYELEERIVSFYEAVARTNQGLPVIDKSYRQDEGWQFLYTMKQNEYFVFPNEQTGFNPKEIDLLNSENYALISPNLFRVQTMSKVMYGSSTVRDYKFRHHLETRVDDVKELKNVTYKQYKSLAFALDIVKVRVNHIGQIVSVGEY

SEQ ID NO: 19103 - protein, 1245 aa, unidentified
  REGION 1..1245: note = Cas Enzyme sequence
MYFFWKYQIKVVLLHKISIIMKKRILGLDTGTNSLGWAVVDKLDDNSYQLVRRGVLLFQEGVKIEKGIESSKASERTAHRSLRKQYFRRRLRKIRVLEVLVKNNLCPYLSPESLHEWHVHKKYPKVDEFMLWQRTNDNEGKNPYYYRHLCLTEKLDMDCIDDRYVLGRAMYHLAQRRGFLSNRLDSSQDDKESGAVKTGITELSKEMEAAGYEYLGEYFYHLYAEQGNTVRIRTRYTDREQHYLKEFDAICEKQEIGSELKKELEKALYFQRPLKSQRHGVGKCTFEPHKPRCAESHPAYEEFRMLSFLNNIKVKGPYDVDLRPLSSEEKEKIEPLFYRKALVKSSHFDFEDIAKTIAGRNKYSHIKDADDKPYKFNFRMTQGVAGCPFTAQMRGIFGDDWKSAIAESYTLMQKQDGIKTIDEAVNDIWNVLYSFSSEEKLKEFAIDKLQLDEEKAEKFSKVKMNSGFAAISLNAINKILPFLREGYIYSHAVSLANIPAIVSKAVWNNAEQRSFILQNLNRLIENFDPKDKTLQGTLDFCIKDFLMNNFELAAGAADKLYHPSMIETYQDAKPNKQGVYQLGSPRVSAIRNPMAMRSLHELRKVVNQLLKEGVIDNTTEVHVEYARELNDANKRKAIADYQRALDNNRKKYQEEILQFYQEQGSAQQSTDDDILKFQLWEEQDHVCLYTGDQIGMADFLGKNPLYDIEHTVPRSVGGDSTKENLTLCQRRFNRETKKGQLPSQLANHEEILVRLAGWKEKVEKLSKDIDKIHTFSGMAKDMKDRLIQRRHRLIMERDYWRGKYNRFTMTEVPEGFSRRQGAGIGLVSKYAGLYLKSLFHNPKDRNKSNVFVVKGATTAEFRKMWGLQSDYEKKSRDNHVHHCIDAITIACIGKYDSNLMSRYYHDVEAFEAGVGKKPQFPKPWPTFTEDVLNIQNELLVVGDMPDNMPKKARRRIRLENPARVVVAQGDSARGSLHNDTYYGAIERDGDIRYVVRRPLSSFEKASDLESIVDEAVKQTIKDAVAGRNFKEAIAEGIWMNKQKGIRINKVRCYADSVKNPLKIRQQRDVSKKKYKQQFYVMNDSNYLMAIYEGEEKGRKKFAVEVINMLDAANYFKKSADRDVYSSIVPIDKNGFPLKVCLRVGLHVLLYDESVEEIDFGNKRDLKSRLYKIVGLRAPSESFPYGRITLKHHQEARQTKDIKIENGVFKMGEAYRASMMLLHTQFKGLVEGQDFDINVLGEIILK

SEQ ID NO: 19104 - protein, 1426 aa, unidentified
  REGION 1..1426: note = Cas Enzyme sequence
MEQKTLGLDLGTNSIGISLRNPALGDNLKEQLEYFSSDIFEAGVGTDKSGEFSYAAQRTTFRSARRLKLHRRRRLQATLRLLMDHNLCPLSEESYKQWSVYDKTQNLKREYPIGDEGFNRWIKLDFNADGKPDYTSPYQLRCELATTQLDFSSPENKFKLGRALYHIAQRRGFKSSKGETIAEQEKNEKFSANSDDLEQEMKKSEMKRSKGLRELLETQGLKTIGQAFAYLESQGTRIRNNEDIQATRDLYEKEITYIFNFQKELSIESELYKRLVSTKKGEGTIFYKNPLRSQKGLVGKCTLEPKKGRCPIGHPEFEKFRAWAFINNIRYRRTIDSDWQEPTTEMKERLYREIFTARVKADFLFSEIRKWLEKELEVQLHWDNNKSLRTINYADKQNVAGCPVTARLVKLLGTDWERFQQEGRKEHKTHSKQHPTKHTVCYSALDIWHVCFQADELEDMQSFAKDSLQWDDEKCKLLLRVWTSIPQGYAMLSLKAIRNINRMLCRGLKYSDAVMLAKVPEIAGMNENEIDTLIETFSKDLKTEVDRTKDIYIITNSLIADYKSLSFEDRFAEHDTSYCLQESDKEDIVQHIIKHFGEVTWGLMDAEEQETLMNEVERLYQDFFSKTKRNFYDIPTYASTLRAFLCEKFPHVDEQAWAKLYHPSQIASYHPERDKNCPDSWRLGTPNIGAIRNPVALRTLNILRRKINALLDANMIDPLETRVVVETTRTLNDANMRWAIDRFQKKREEQNKIIRSILEKEYTTRAISETDINTARYILEQREEHIYQTEKTGELQHDFSFNIDTKRYKLWLEQGGICFYTGKVINLTNIFNDNAFDIEHTLPRSKSFDNSDANLTICDAHYNRYIKKNILPAHLPNFEHDQTINGTLYTAIKPRLEMWRKRVERLKVNVDFWKNRTRRAQDKDTRDKCIRQRHLWQMELNYWHEKLSHFEMEEIKEGFRNSQLVDTGIITRHAALFLKSLFKNVEVQKGSVTADFRKILGIQSVDEAKNRDKHSHHAIDATILTTIPIAAKRDRMLEIFLRIKELKKILCFSKDTNKQQEIISLNQKLQYEINSCHLGNDIASLPSYIENNIIIRHLRKEQTQQNSRRTIRIRGKKIYVTDHHGNKHKKWSSGDSIRGELSGQSFYGAITQWKEKTNRNETTNHKEQNIIDPTIYYVIRKPLVFKNNTSAPGFSSWEDLEKQIVNKALIPMMKSQFCEGTSFKEACGQPIYMLNRKGEKINVLRHIRCYVRIKNPIAVKKHTFLSSKPYKQNVYAGVGGLYAAAEYTNGNKRQFVIYSLKDIAQNKKKNNEIIPSKILNGTKTLTLQRLLHAKDSILIYEESPEELKKLSMTELSKRLYVIKGFEAAKTRIKAVNHLYNIDEIGETITDYQNLPITIRLSLNKLKFLLHGYDFKFTTSGLEFLDK

SEQ ID NO: 19105 - protein, 915 aa, unidentified
  REGION 1..915: note = Cas Enzyme sequence
PAGDHRSHLVFPYLLRAAAASKRLDPHELGRAIYHLGHRRGFLSNRKTKRKEDEEGAVKEGIHELRQQMKSAGVITLGELFATLDPRERRIRKRYTDRSMYLEEFEAIRKANEWVPEAVWAELHKAIFFQRKLKSAKHLIGKCSCLPNRRRASMWHPTFQRFRILEQLNNLRIIEGPAAEGRRLTIEQRDTLASLLSQQESMSAGGAKKALKLKGVELSIEAVGSGKLIGDRTACSMRKVFGDRWDVMPEVDRMQALLDVHSYEQSEALKRRGVKHWKLSAEQAGLLGEASLEPAYASLSVAAMERLMPKMVEGMNSREALDDVFPDRFGVTQKTDLLRPVLQVLGDIRNPIVTRSLTELRRVVNRVVSKWGKPSMIRIELARDVKKGRSERERLSRENRDQEKRRTAAAEQILAETVVQRPRRTDIEKLLLADECEFTCPYTGRKFGMADLFGPTPAVDVEHIIPYSRSLDDSFANKTLCFVEENRNIKRQRTPHEAYATDTARWEEMLARVKRFRGKYARIKYERFTLPQVGEELLQEFTERQLNDTRYASKMAAKYVGQLFGGIVDAEGALRVQVSSGMVTARLRQAWRMGMALHDDGLKNRQDHRHHALDAIAIALASPAIVKRMADAAVRGAAAGRDGKLLQFSEPWPQFLEHVKAAIEPIIVSHRVDRRLAGELHEANLYSRPLQVAGKAMHRIRKGVENLREGTLEQLVDPHLREVVGQALAAEPPNKPFATPERLPIVRGAGPSAERIRHVRIDASRTPVELRTKAGSRWVAPGSNHHMAIYAVEGKKGVVWEAEIVTRLEAHRRKQAGEAIVRRTRADGSEVVFTLRSGDQIRIPTDDGRVEFHVVGSVTSGSIETVSVHDARPATEIRKLGKAGGRARWSASTLQRIGSQKVDVGVLGEITLNRE

SEQ ID NO: 19106 - protein, 1199 aa, unidentified
  REGION 1..1199: note = Cas Enzyme sequence
MKFILGLDPGIASIGWALILEAENDNEQSRIIDSNVVKVDFDNFAYMNAKGKISEGKPIEMFRKGLTVSPNLVRRQKRGAHRNLQHFKLRRADLIALLREKGFIDDDTLLCEDGKGTTYETLMLRAKAASEEISLSELARVLLLINKKRGYKSSRKGETDTDIEDMGAYLAAITGRSQSLVENHQTVGQYLMNQLNLHPLKGIKRQTFYRKDYEDEFEQIWKMQMAFHPELTRKLKKEIKKRIIFFQRPIESKKQDLSFCELESHQIEVEKNGKKQLVTTGSRVCPISSPLFQEFRMWQRLNDVVLTNTNTLEQYYLTQEQKEMLAAELSIRKELTKTAAIKLLVGKQTKTYDLNFDTLIGNETQARLVSAYLKILDLTGHDKLDIKKMRAQDVLDAICKVFEGLGYKTEALKAEVVIGPEIYMQPHYKLWHLLYSFPGDNSRSGSAKLVQRVKEFFGFDNDEYAKVVADVKFPDGYRSLSAKAIQKILPFLKEGYQYDKACEKAGYNHSKRSITKEENAERTLQHYLQPIPHNSLRNPLVERVLNQMVSVVNGLIDEYGEEYGQFSEIRIELARDLSKNAESRRRMTQDMENNKNERAKCRQELIEQLNERGYHVTYVSENDILKYRLYKELAPLGYKTLYSKTKVDLVDLIIHRKFDKEHIIPKAKSPSNAFSVLTVELSSINEEKGDMTALDYVKWKYGEAEVLQYIARVNDLFKLKAISKTKKENLLRTAADIQDEPLTRDLGLTQYINRKAYELLGTITRKVVPTTGSITSRLRDDWQLVDVLQELVWDKYDKLDLIDTYEDKDGKTVRKINEDAWTKRTDHRNHAMDAITVAFTKPAFINYLNSLNAEGEKREQLMKMRQKNLHRDKQGNWRFNEPMPLGELRAEVRHQLERINVYQKPATSAVTPNLNITKSKKKKEGNRQIQLTPRGKLHDDTYYGSIIENGVQVFTKRVEVNESLNVDDVVDKGVQRILQERLREYGNKPKEAFANLEENPIWFNREKGICIKRVIVRSKLKDARAIHKKHNNKGEKLLDKEGETQRADYVRTNNNHHVAIYEDAQHELHEVVVSFFDAVDNAIQGKPVINKTYNADKGWHFLFSLQMNDCFVFPDESTSFNPADIDLTAKENYALISPHLFKVQSISEGDYRFRHQYDATKNDNAKLKNMTWKRVRNPNGLKGVVKVRITKIGHIEYTE

SEQ ID NO: 19107 - protein, 929 aa, unidentified
  REGION 1..929: note = Cas Enzyme sequence
MWQRLNDVAIKNIMTGEVRHLTQEEKERLAAELSIRKELTKTSVVRLLYGKAIKSVELNFDSLIGNDTAARIYKACLEVIKLSGHELDTKKMSSAAVIAAVQDIFGMLGYRTVALTDAGEFAKLWHLIYSFPGDSSRSGHDTLTAHIKQLFSFDSADQAEKLANIIFADGYGNLSSKAISKILPKMKEGLQYSDACQAAGYNHSVRSVTKEDNENRVLSATVTPIPHNSLRNPLVERILNKMVYTINAVMAKHGQFDEIHIELPRELCSNAEKRAKDTAAIDRNTKDKEKAEQELKEKLKEMGVPVTYVSPNDVLKYRLYKELAGNGYKTLYNDTLIDLKELILGRGFDKEHIIPKALRLDNGFSNLTIEKTDINLKKSKQTALDFVLEEYGAAAAEQYRQRVNDLFEKKAISKTKRDNLLRTSADIPTSPLDRDLNLTRYITKKAVELLEPITRKVLVTTGAVTVKLREDWQLVDVLKEMVFDKYQKLGLTEKFTDKEGKIVERIREDVWTKRNDHRNHAMDAITVAFTTQAMIHYINSLNSQGEGRDQLLHMRQKYLHKDGKGNWIFNSPMPMDEMRATAKEVLDGVLTVHPTPKVAPVTKNKNTLVPRGKLHDATLYGRKKKEVVSFEKVDKSFTEEKISTVTNPKYRSALLRRLQENDGDTKAAFTGKNSLENNPIWLDQWHSSAVPLQVKCMTVKYIFTKRVAITENLNINKVLDEGVRAILKARLQAFGGKAKEAFANLEENPIWMNEEKEIAIKSVIVETDLKDLIPLHRKEDGTAKDFVKPNNNYRADIYIDDKGELHDNVVSFFDAVQHSSAVDSSWRCLFSIKRNEYFVMPGKDFNPLEIDLQDSRNRSLVAKHLYVVQKMSSGDYLLRLHNDTSSGIVKELKDITSMRITSLSKFIGCVKVSIDKSGDLNVLQKIVIE

SEQ ID NO: 19108 - protein, 1222 aa, unidentified
  REGION 1..1222: note = Cas Enzyme sequence
MKKVLGLDLGVGSIGWCLIEKDDDNTPKRIIRMGSRIVPISSDEESGYTRGNAISKNADRTAKRTSRKCYDRYQLRRQALLNLLKRLGMEPSKKLIFEQNPLELWQKRADAASKEITIEELGRVLLHINQKRGYKHSRLSNSDSKETAYVQEVNSRYDDLKAEGLTIGQHFAAKLKENEQTSADGKKYYTYRIKEQVYPRHAYEEETEKILEVQSRYHADILTPDVCKEIKDIIFYQRDLKSCKNLVSLCEFESYTITKDGKEMTIGPKVAPRTSPLAQLSSILETANNITIRNRRNDELYISLEQRKAIADFLDNHEVMKLTDLYKILNIGRKDGWWAGKAIGKGLKGNTTKCQIREALSNLSKEQIESLTAFKLEYDEYVDAETGEVRKRINNTLAEKQPLYRLWHLLYSIKDVDELSGALRRLGIENEESIQNLCNLDFRTAGYANKSAKAIGRILPYLMDGMMYSDACELAGFDHSRRINPDRVLLTSLPQIQKNELRQPVVEKILNQLVNVVNALLEKEGPIDEIRVELARELKQSKDERNEAFRRNNQNERLNKEYAERIKEYGLTPTRNRIMKMKMWEESEYTCMYCGQPVNVTEFLQGADVEREHIIPRGLLFDNSFTNQVCSCRRCNSQKGMRTAYDFIADDKGQEGLDSYIDRINDLFNRKQISRSKFNRLLVSHKAYMSRKAQGKEIEEDKELWENFIDRQLRQSQYIARKSVEMLQQICKNVYSTSGSVTDFVRHQWGYDEILHDLNFERYMKAGLTSMVKQLHSGKEVEVERITNWTKRLDNRHHAVDALAIACTTQGMIQRLNTLNASREGILDELNSKEERVVDPERSMLEKWIYTQPHISYAQAKEAIDNIIISQRPNTRITVPGKRYITKNGKRALVQTGIIVPRGALHAEFVYGRIMKQEADGVTLTPQYVRKYKLGIGAQGFLFNGKEFYKEELKRDSKTGLSSIVVTDKIKDVLEKVVDGGIRHRILERLNRGFEEGADYRANVAQALSNLKNLDEDPIFSDDAKTRPIRTVRKYVSSSTMVAVRKDGNGKPMSFVEPDGNHHVAFYKNEDGTITESIVTKWQAVQRKLNRIPIIIDNPSQTWSEIMGRNDVPEELLQTLPKDKTTFLLSLQIGEAFIMGMDEADYQKAKEEIDMQTLAEHLYFVQSISSSDYRFRRHIEAQYDTNDINKEDKRFLRIRKIQALFEYNPHKAKITVLGDVIH

SEQ ID NO: 19109 - protein, 1222 aa, unidentified
  REGION 1..1222: note = Cas Enzyme sequence
MKKVLGLDLGVGSIGWCLIEKDDNNTPKRILRMGSRIVPISSDEESGYTKGNAISKNADRTAKRTARKCYDRYQLRRQALVNLLKRLGMEPNKNLMLEQTPMELWQKRADAASNEISLEELGRVLLHINQKRGYKHSRLSNSDSKETAYVQEVNSRYDDLKAEGLTVGQHFAAKLKENEQISADGKKYYNYRIKEQVYLRHAYEEEAKKILEVQSRYHSDVLTPDVCKEILDIIFYQRDLKSCKNLVSLCEFESYTITKDGKEITIGPKVAPRTSPLAQLSSILETANNITIRNKRNDELYISPEQRKAIADFLDNHEVMKLTDLYKILSIGKKDGWWAGKAIGKGLKGNTTKCQIREALSNLPKQKVDSLTAFELEFDEFVDEETGEVRQSINNIKAEKQPLYRLWHLLYSIKDVDELSGALRHLGIEDEESIQKLCNLDFRTAGYSNKSAKAIGRILPYLMEGMMYSDACERAGFDHSRRINPDRVLLTHLPQIQKNELRQPVVEKILNQLVNIVNALLEKEGAIDEIRVELARELKQSKDERNETFKRNNQNERQNKEYAERIKEYGLTPTRNRIMKMKMWEENEYTCIYCGQPVNVMEFLKGADVEREHIVPRGLLFDNSFTNQVCSCRRCNSQKGMRTAYDFIADDKGQEGLDAYIDRINDLFNRKKISRSKFNRLLVSHKAYISRKAQGKETEEDKELWENFIDRQLRQSQYIAKKSVEMLQQVCKNVYTTSGSVTDFVRHQWGYDELLHDMNFERYKKAGLTMMVKQLHSGEEVEVERITNWTKRLDNRHHAVDPLAIACTTQSMIQRLNTLNASRDDMLAELNNKEQRVVDSERSMLEKWIFAQPHISYAEAKNEIDKIIISQRPNTRITVPGKRYVTKNGKRTLAQTGIIVPRGALHAEFVYGRIMKQGADGLSLTPQYVRKYKLGIGAQGFLFNGKEFYKEELKKDKKTGLSQIVVIDKINDVLEKIVDGGIRRRILDRLNRDFEEGTDYRANVAQALANLKNLDEDPIYSDDARTRPIRTVRKYVSSSTMVAVRKNDKGNPIAFVEPDGNHHVAFYKNEDGVITESIVTKWQAVQRRLHHMPIIINSPSQTWSEVMGRTDVPDELLQSLPKDSSTFLLSLQIGEAFIMGMDEADYQKAIEEKDMKTLAEHLYFVQNISSNNYRMRRHVESTFDKTGMNKEDLRFLNISSLEALFRFNPHKVKLTVLGDVIL

SEQ ID NO: 19110 - protein, 1008 aa, unidentified
  REGION 1..1008: note = Cas Enzyme sequence
MARTLGLDLGTNSVGWALIEEDGGRPTAIVATGVRIFQEAVDAKTRLPKNQQRRAARALRRILDRRRRRKQKLRAILLRAGLLPENLLKSATPETVFNELGDPYALRKRGLDHALRPHEFGRVLTALCARRGFQSNRKSLLGALAVEFEDLIDAAKHLGGISATDSTARQEIEKEEGIVRAAIQTLRDDMQRTAARTLGEYLADRPAGERRRGRFTDRAMFREEFDLLWERQREHITALADDGLRARVFDAIFFQRPLKSSKALVGRCSLEPSRRRAAVARLESQRFRLLQDVNHLAVRNPVTGLFRDLDTPERQALVGLLARQRTMGWGAARKALGLRKDELFNYEEGDRDELKGDTTSAALAGILGSTWEQMDPETRRALVEDLLTIADKAHLVRRLREHWRFPREQQYQLAVLELEPGYMAHSVKAINRMLPTLELGAKYFEAKQLAGYKLQETRKTSERLPPPPMVRNPVVQKALGETRKVLNALLQAYGKPDTIRIEMAREVRMSARQLAAFNKQQRANEKSNERALEQLASVGLAAPRRDDLIKYRLWEECGGECPYTGRAIGIHQLFSADVDVEHIIPYSRRPDDSYMNKTLCFADENRMVKRGQTPWEAYGADAARWGAILQRIRRLPPPKQHRFAMAEVATLDEFISRQLNDTRYVAVQVKNFVAALGSDIQVTKGLPTAMLRRYWDLNRILSQDPASKTRTDHLHHAVDAIVIACTNRSVYQRLASSAASSFEAVAGSRTNSAISPWPTFTEDVRRSLETVVVSHTPSRRLAGALHEETAYGYRPATGLYHYRKRLDALFSTKALDRIADPVIKKLVRDRLAEHGDDAKKAFSQPLFHSDGATPIRRVRLTKTANRASVVGVRNLAGEEYKFHDLGNNHHVEIFESADGTQRFGKVVSTLEAARRTRADAVPEVSREGGRGARFVMSLMINDMVEIIAPSGIDYYRVQKLSNDGRITLRHHRAATLDLNHECLLARPSTLKGRKVTVDPIGRVQNAGD

SEQ ID NO: 19111 - protein, 1010 aa, unidentified
  REGION 1..1010: note = Cas Enzyme sequence
MKNRNVIGIDVGTNSIGWALVEENENGLPQSLKAAGVRIFQEAVEAKTRTPKNHKRRQARLARRVLARRARRKQRLQNLLLKHGLLPGGVTDPVQREAAFTTLGDPYQLRAKGLNLPLGLHEFGRVLFQLGARRGFLSNRKTRYGHLNKLDELADLIEAEDAAPKTGDAEEGIIRKEIGELRQAMSAAGSRTLGEYLAGLAKEERKRCRHTERAMLEEEFERLWMVQARFHPELSDELKVQVHTVIFFQRPLKSNRASLGKCSLEPSRRKAARAWPEAQRFRLLQDLNNLEILDPRTGELRRLRDTERAILLNALEQQKSMTWNAVRKKLGLHQGEKFNLETGAKAETGLKGLQTLASLHAILQGWFDELGDKRDLLIEDLITIEDSAGLYRRLREHWGFDRETAFRLATLELEPGYASLSLKAIRKLLPHMGAGHRYSEARQQVGYGYETGQRDLQERLGEPPDPRNPVVDKALHELRRVINALIHRFGRPDVVRVELARDLKLAKRDKERLEKQNRENQRLNRKAEAALAELGLGQPSRDDLIKYRLWEESKGLCPYTGREIGLSTLFSPEVDVEHIIPYSRCLDDSYMNKTLCMTEENRMQKGNRTPWEAYGGDPARYEQILQCARYFPMAKRKRFLEQGSDFVDQFIQRQLNDTRYIAKLAKEYLAAVCTNVQVTKGGTTAMLRHHWGLNRLLGEDDGQKERGDHRHHALDAAVIAVTSRSLYQRLARIAHQRGHAPSQRGFYIDPPWQGYQADLAQTLAGIVVSHATNRKLTGALHEETAYGHIPHVGFVYRKTLNKDFKLGDIEAIYDPSLQELVKAHLEHHGNDPKRAFAEGIQCYHKDGHTPIKRVRIRAKQVSEKGTFSISDRAGRAYKHHKTGSNHHVEILRHRATGKIEPVYLTTKEATERARRGGEPVIQRDHGPEWEFIISLCINDMVRLGEGGQVAYFRVQKIEATNNRVTLRSHLAATLDDEDMKVTTSVPKLAVMPGFQKVLVTAVGEVLELHD

SEQ ID NO: 19112 - protein, 1104 aa, unidentified
  REGION 1..1104: note = Cas Enzyme sequence
MTDYILGLDLGPNSIGWALVAVKASGDDLKPVGLLDTTGTGHPAMGVRVFEAGLQNFNTGKEASLNQARRQARAARKTISRRRARKAACLEVLQSADLLPESEQDLAQVWKMDPYKLRADALDRKLDPQELGRALFHLAQRRGFKSNRLSGDEKEEKGLLLEISKLDSEIQRSGARTLGEYLHKQRGHASGTLPTRLRARQARLDLYEDAPRRTRRSMYEAEVEAILTAQERLAGKAALTTEQRAGLHKALFFQHPFALTPGRIKKAPSRANLHRAPGIRPCPYEKGEVGCPKSDWLAQRFRTLKEVQSLRISELHRRERPLTPEEVAYTVDHLSSNKKSSFAKLGKDLARQFNLAEPISFNLARGGRADIKGNELEATLAGAFGKKAWRDKDESERQRLRIAMVKSTSADDLGRILQTAGLADEAKREKLTKWRPRDEGYLSFSKQALKRLLPLMETGMLEHEAIAEAYPDSFEAHGLASLPSLVAMQLDSAIRQKIPPQIQNELTNLTNPVVRRALVEVRKVVNALIRDHGRPIRIVVEMAREMKQGKDARKEHSARLNDRQKRREVARHELKALRSEGWPSRSDVNRWILWEEQNHNCPYCGTGIASAQVANADVEVDHILPRWRSLDDSMNNKVLACANCNADKGNRTPVEWLGKDSERLATILKRTWSCVAKKDNPGGMPFGKIKRFEAEELDADHFAQSQLNDTRYISKLVSSYMLLLYPTNEHVGQKRVQTSKGNLTAHLRRMWGLNRVIPPLVQAHGEIVPGFIEHNGWNEKIRIDHRHHAVDALVVALSTRSFVKRLQDCWRKDDDPKERTSSFEAPWESLRDDAINAIQKINVSHRPMRRKRGGLHEETYYGAVDPASGVYVTRKRLEDLTGPMIKSIRDQRVRQVVTERLLQSGWDGKASKLPKDWHREELFLPTTKPRKGRQPRTPHPIRRVRIEVQLGRTVRLGDKNHRFAKPGSNYCLQVIDTIEGPHPQFRVVTRFDANQPGDWMSLPLGASLIGTLHRKDSVLISVPGLDEPVLCVIQLISGSSEVGTKGLSIVIRDARDSRPATEGNKKPLARLRSHGAWNGAAVRSVEVSPLGVLASDQTALVASP

SEQ ID NO: 19113 - protein, 1393 aa, unidentified
  REGION 1..1393: note = Cas Enzyme sequence
MASKRILGLDLGTNSIGWALVEEDLSNSEKSKIVKLGVRVNPLTVDEKINFEKGRPLSTNADRTLKRSARRNLQRYKLRRQNLIEILKQNKIIDDNTILAESGKGTTHETLHSRAKAAKEKIALDDLAKVFLAINKKRGYKSSRKVSSEDEGQAIDGMYVAKKLYEENLTPGQYVLNLLNENKKYIPDFYRSDLQMEFKSVWDVQKVFYPIILTEDLFSKLQEKNKTQTWAICKEPFKIEGIKQQGTSKEKRKERYQWRADGLSEKLDLEHLAIVLQEINNDLNKSSGYLGAISDRSKELFFNKETVGENLYKQILKSPHTSLKNQVFYRQDYLDEFEQIWDTQSKYYPQLTENLKEEIRDVVIFYQRKLKSQKSLISFCQFESWEQDFVEKETGKSKTRIVGRKVIPKSSPLFQEFKVWQNLNSLEFRNSDKNEKIEFIELEDEIKQVVFNELNLRGDLKPNEVLKLLSNYISIGKVSQWKCNFEKIEGNRTNQALYNVYQLIADNEGYGIDWAKKSAREINEELKAVFPEIGVDASILSFDAEDDNFDGQSSYQLWHLLYSAEEDYKISEEDKILYGNSSVALKRKLHTKYGFKPQYASMLANVSLQQDYGNLSTKAIRKIIPYLKEGSIYSRACALAGYNHSNSLTSEEQAKRALKPKLDLLKKNSLRNPVVEKILNQMVNVVNQVIDAYGKPDEIRIELARELKKSAKERSEMTKGIADATKRNEDFKKKIQKDFGIINPTKNDVIRYRLWKELEPRGYKDIFTNTQIKSKDLFSKNIDIEHIIPKALLFDDSFSNKTLAYRKDNLKKANRTAYDFVSQDYNKDIEGFELRVKDLLKNGSITRAKHNKLLMSQSELPDGFIERDLRNSQYIAKKAKYMLFEVFRKVVSTTGSITDKLREDWDLINVMKELNMPKYKSLGLTEVKRRWDSGQEKEKEVEVIKDWSKRNDHRHHAMDALTVAFTTHNHIQYLNYLNARKDESHAIYSNIIAIEKKITKSKNGKRTFTAPMKNFRVEAKSHIESILVSFKNKNKVVTNNINKTKSRGHKFNKKVQLTPRGQLHNETVYGKIKLPQNKPTKISKRFTLDEAKQIIDKQKRELILSHLAKHDNIPELAFDSKKLKKEPLIFNDEPLKEVLCFEDVFTIRKEISSDNFSNEKQLDKVVDNQVRSILKSRVVEFNGNFKEAFSDLDENPIWLNKEKGISIKRTTIRGVSNAEPLHTAKDHFGNNRIDKDQNVIPSDYVSTGNNHHVAIYKDKIGKLQEKVVSFFEAVERVNQKLPIIDKNYNKHLGWEFQFTMKQNEMFVFPNEEQGFEPTEIDLFDKKNQKEISFNLFRIQKIGEKDYWFRHHLETTITNNLEFTYKRLRNPNALAGVIKVRINHIGNIVHVGEY

SEQ ID NO: 19114 - protein, 1058 aa, unidentified
  REGION 1..1058: note = Cas Enzyme sequence
EDGKYLAAITERSQVLLERDLTVGQYLYEMLTQHPLKGIKNQTFYRKDYEDEFEKIWSCQMKFHKELTKKLKKQIRDKVIFFQRPIESKKGDVGFCQLESREVVVNGKTYTTGSRVIPTSSPLYQEFRMWQRLNDVAIKNIMTGEVRHLTQEEKERLAAELSIRKEMPKTAVIRLLYGKAIKSVELNFDSLIGNDTAARIYKACLEVIKLSGHELDTKKMSSAAVIAAVQDIFGMLGYRTVALTDAGEFAKLWHLIYSFPGDSSRSGHDTLTAHIKQLFNFDSADQAEKLANIIFADGYGNLSSKAIKKILPKMKEGLQYSDACLAAGYNHSVRSVTKEENENRELSATVTPIPHNSLRNPLVERILNKMVYTINAVMAKHGQFDEIHIELPRELCSNAEKRSKDTAAIDRNTKDKEKAEQELKEKLAEMGYPVTYVSPNDVLKYRLYKELAANGYRTLYSDTLIDLKELILGRGFDKEHIIPKALRLDNGFSNLTIEKTDINLKKSKQTALDFVQEEYGDAAAEQYRQRVIDLLEKKAISKAKHDNLLRTVAEIPANPLDRDLNLTRYITKKAVELLEPVTRKVLVTTGAVTVKLREDWKLVDVLKEMVFEKYQELGLTEKFTDKEGKVVERIREDVWSKRNDHRNHAMDAITVAFTTQSMIHYINSLSSQGEGREQIFHMRQKYLHKDGKGNWIFNSPMPIDEMRKVAKQVLENIFVIHPTPKVAPVTRNKGTLVPRGKLHDATFYGRKKKEVISFEKVDKSFTEEKISTVTNPKYKTALMARLQEFGGDAKLAFTGKNSLEKNPIWLDKFYSAAVPLKVKCMTTKHVYTKRVTVNENLNVEKVLDEGIKAILKARLQAFNGKTKEAFANLEENPIWMNEEKGIAIKSVIVETDLKDLTPLHRKEDGTAKDFVKPNCNNHADIYVDGQGELHDNVVSFFDAVKENKLPVNENWRYFFSIKRNEYFVMPGKDFNPLEIDLEDSRNRSLVAKHLFVVQKMSSGDYLLRLHNDTSSGTVKELKDITSMRITSLSKFIGCVKVSIDKSGDLNVLQKIVIE

SEQ ID NO: 19115 - protein, 1219 aa, unidentified
  REGION 1..1219: note = Cas Enzyme sequence
MKKILGLDPGIASVGWAVVQTAEEASEKSGILDAGVVKVDFDNFAYQKPDGKISSTGKIDELYRKGVTVSPNLVRRQARQARRRLQHYQQRREQLIKLLMANGFITAATPLNEEGKDTTFQTHALRAKAVTEAVTLEELAKVLLMINKSRGYKSTRKGESEGEDTNYLKTITERSKVLLERDLTVGQYLYEMLQQHPLKGIKNQTFYRKDYEDEFEKIWSCQMKFHKELTKKLKKQIRDKVIFFQRPIESKKGDVGFCQLESREVVVNGKTYTTGSRVIPTSSPLYQEFRMWQRLNDTVIKNIMTGEVRHLTQEEKERLAAELSIRKELTKTAVVRLLYGKAIKSVELNFDTLIGNDTAARIYKACLEVIKLSGHELDTKKMSSAAVIAAVQDIFGMLGYRTVALTDAGEFAKLWHLIYSFPGDSSRSGHDTLTAHIKQLFNFATDEQAEKLANIIFDDGYGNLSSKAISKILPKMKEGLQYSDACLAAGYNHSVRSVTKEDNENRVLSATVTPIPHNSLRNPLVERILNKMVYTINAIMQKHGQFDEIHIELPRELCSNAEKRAKDTAAIDRNTKDKEKAEQELKEKLAEMGYPVTYVSPNDVLKYRLYKELAANGYRTLYSDTLIDLKELILGRGFDKEHIIPKALRLDNGFSNLTIEKTDINLKKSKQTALDFVQEEYGDAAAEQYRQRVIDLFEKKAISKTKHDNLLRTAAEIPANPLDRDLNLTRYITKKAVELLEPVTRKVLVTTGAVTVKLREDWQLVDVLKEMVFEKYQELGLTEKFTDKEGKVIERIREDVWSKRNDHRNHAMDAITVAFTTQSMIHYINSLSSQGEGREQLFHMRQKDLQKDGKGNWIFNSPMPIDEMRRASKQVLEDIFVIHPTPKVAPVTRNKGTLVPRGKLHDATFYGRKKKEVISFEKVDKSFTEEKISTVTNPKYRSALLHRLQEFGGDAKLAFTGKNSLEKNPIWLDEFHSAAVPLKVKCMTTKHVYTKRVTVNENLNIDKVLDEGVRAILKARLQAFGGKTKEAFANLEENPIWMNEEKGIAIKSVIVETDLKDLTPLHRKEDGTGKDFVKPNNNYRADIYIDNKGELHDNVVSFFDAVQHSSAVDSSWRCLFSIKRNEYFVMPGKDFNPLEIDLEDSQNRSIVANHLFVVQKMSSKDYLLRLHNDTSSGIVKELKDITSIRVTSLSKFIGSVKVSIDTSGGLKVLQKMVID

SEQ ID NO: 19116 - protein, 1462 aa, unidentified
  REGION 1..1462: note = Cas Enzyme sequence
MKRILGLDLGSNSIGWGLIEQDLQQKEGKIIASGSRIIPMDQGILGDFEKGNTVSQTAERTFYRSTRKLRQRHLLRRERLHRVLHILGFVPTHYDKQIDFSKRYGKFIGDIEPKIAYNEGKFLFMDSFQEMLSDFKSHQPTLFYTKKNGEESKIPYDWTIYYLRKKALSQKISKEELAWIILNFNQKRGYYQLRGEEEVENPNKEVTYYSLIVTEVTAEAPNKKGEIWYSIQLENGWVYRRTSKIPLDDWKGKVRDFIVTTELEEDGSIKRDKEGKEKRSFRAPSEDDWNLLKKKTEQDINTSKKTVGTYIYDHLLQNPNEKIKGKLVRTIERKYYKEELKAILEKQIALQPELFTDQLFADSIRELYSKNEAQQRNLVARDFIHLFVEDIIFYQRPLRSQKTTIANCSLESRSYIDKDSHTRKEAPLKVCPKSNPYYQEFRVLQWLQNLKIYEIESDQEVTHQFIKTLEDKQQLFEFLMAQKEIDCEELLKYFLNQTYPNAKEKALKRELKKWKDTYRWNYVYDIGEKSSKKYPMNETRYELKRYLEKVANLPDDFLSSEVEYLLWHLIYSVTDKVSYEKGLKKFAQKHHLDEDSFVESFKKFKPYPSEYGSFSEKAIRKLLPLMRFGSYWDFNHIDKNTQKRIDNLITGVENEEIRTILREKAEKYQLEKETDFQDLPLWLAQYIVYNRHAEASSLEKWTSVNDLETYLNEFKQHSLRNPIVEQVVTETLRVVRDIWQQYGQGQADFFNEIHIELGRELKKTAKEREDLSKQNQKNEDTNLRIRALLAELGEDSTIENVRPYSLMQQELLKLYEEGVFSSSMEIEDDIEKIHKKATPSKAELQRYKLWLEQKYKSPYTGQIISLKRLFTEDYEIEHIIPQSRYYDDSLSNKVICESVVNKAPYKDRQLGLEFIKNQGGRIVKELSKENKTIKIFTEEQYRTFIKEHYSNNPAKTKKLLLEDIPEKMVARQMNDTRYISKYISEILSKIVRGDERDEGVNSKNVILCTGNITSALKQDWGVKDVWNDLILPRFERMNGLTQSTLFTTYNERYQKYLPTVPMEYSKGFQKKRIDHRHHAMDAIIIACTTREHINYINNQHALEKGKDKKEKQEERDKVRERLCIKKYNNRSEGNYSWIFKKPWDTFTQEVRAALEGIVVSFKQNLRVINKATNYYERWVEENDRLIKKMVKQEGTNWAIRKPLHKETVSGKITLEREKVSGGKILTATRKTIDSTFTEKVIEGITDTGIQKILLNYLKFKKNPEIAFSPEGLEELNKDIALYNDGKPHKPIYKVRIFEQGSKFPLGEAGNKSQKYVEAAKGTNLYFGVYQGKDKRSFATIPLNEVIERQKQGLPSVPEYNEKGDPLLFSLSPNDLVYVPIEGEIIEDIDFQNLSNEQKERIYKTVSFTGNQCFFVKQTVSISIVNKMEYSPLNKMERSITGIMVKEVCIKLKVDRLGNICKA

SEQ ID NO: 19117 - protein, 1458 aa, unidentified
  REGION 1..1458: note = Cas Enzyme sequence
MKRILGLDLGSNSIGWGLIEQDFQQKEGKIIASGSRIIPMDQGILGDFEKGNTVSQTAERTFYRSTRKLRQRHLLRRERLHRVLHILGFLPTHYDKQIDFSKRYGKFIGDIEPKIAYNEGKFLFMDSFEEMLSDFKSHQPTLFYTKKNGEESKIPYDWTIYYLRKKALSLKISKEELAWIILNFNQKRGYYQLRGEEEVENPNKEVTYYSLMVTEVTAEAPNKKGEIWYSIQLENGWVYRRTSKIPLDDWKGKVRDFIVTTELEEDGSIKRDKEGKEKRSFRAPSEDDWNLLKKKTEQDINTSKKAVGTYIYDHLLQNPNEKIKGKLVRTIERKYYKEELKAILEKQIALQPELFTDQLFADSIRELYSKNKAQQRNLAARDFVHLFVEDIIFYQRALRSQKSTIANCSLESRSYIDKDSHTRKEAPLKVCPKSNPYYQEFRVLQWLQNLKIYEIDSDQEVTHQFIKTLEDKQQLFEFLMAQKEIDCEELLKYFLNQTYPNAKEKALKSELKKWKDTYRWNYVYDIGEKSSKKYPMNETRYDLKRYLEKVANLPDDFLSSEVEYLLWHLIYSVTDKVSYEKGLKKFAQKHHLDEDSFLESFKKFKPYPSEYGSFSEKAIRKLLPLMRFGSYWDFNHIDKNTQKRIDDLITGVENEEIRTILREKAEKYQLEKKTDFQDLPLWLAQYIVYNRHAEASSLEKWTSVNDLETYLNEFKQHSLRNPIVEQVVTETLRVVRDIWQQYGQGQADFFNEIHIELGRELKKTAKEREDLSKRNQKNEDTNLRIRALLAELGEDSTIENVRPYSLMQQELLKLYEEGVFSSSMEIEDDIEKIHKKATPSKAELQRYKLWLEQKYKSPYTGQIISLKRLFTEDYEIEHIIPQSRYYDDSLSNKVICESVVNKAPYKDRQLGLEFIKNQGGRIVKELSKENKTIKIFTEEQYRTFIKEHYSNNPAKTKKLLLEDIPEKMVARQMNDTRYISKYISEILSKIVREDERDEGVNSKNVILCTGNITSALKQDWGVNDVWNDLILPRFERMNNLTQSTLFTTYNERYQKYLPTVPMEYSKGFQKKRIDHRHHAMDAIIIACTTREHINYINNQHALEKGKDKKEKQEERDKVRERLCIKKYNNRSEGNYSWIFKKPWDTFTQEVRAALEGIVVSFKQNLRVINKATNYYEHWVEENDKLIKKMVKQEGTNWAIRKPLHKETVSGKITLEREKVSGGKILTATRKVIDSTFTEKVIEGITDTGIQKILLNYLKFKKSPEIAFSPEGLEELNKNIALYNDGKPHKPIYKVRIFEQGSKFPLGEAGNKSQKYVEAAKGTNLYFGVYQGKDKRSFTTIPLNEVIERQKQGLPSVPEYNEKGDPLLFSLSPYDLVYVPIEGEIIEDIDFRNLSKEQKERIYKIVSFTKGRIYGIPNKVAVSIVNKMEYTQLNKIEFIKEKEVCIKLKVDRLGNICKA

SEQ ID NO: 19118 - protein, 1072 aa, unidentified
  REGION 1..1072: note = Cas Enzyme sequence
MSYVLGLDLGPSSIGWAAVNIDGNGDYKGLAQIPDGKNSIPAIGARIFPAGVENYGQGLREETRNKNRREKRSVRRTLRRRRIRRLKLVSLLEEKGILPADNEKVNTLQTSPDIDPYEIRARALKEKIKLEELGRILLHICKRRGFKSNRKSPPKKEEHGKIKDAQKRLNEALNGKTLGEFWHEKRTQNKLTSIRNRLGNYQWIATRGQYEDEFEKIWERQQKEYPQLLTNEFKKQISAILFKQITYEQLPGKMKKMIGQCSLLPKEKRCPLSNRKAQEFRCLQKINDLLIVKRGKQKPLSPEQRQAIIDILNTEEKPDFKKIQKKLNLEEDERFNFEFEDDAKLQGNETDAQLSKLFGKDIWLGFNEKIREQIWQTVIEYINNEHVKEDETVQRIEHICGQKIEKTDKLPEITLPDGYVKFCEKVLDKILPFMRKGLQYYDAVKNARFKISWAALDKLSMPDREHGFYITNPNVSTVLFQVHKLVNRLIAEIGKPERIVVEFTREIKADKERRQNILKLQTERRKAKERIAEEIKQKQEWDGPDKIPNWAIEKYLLWDEQNTLSPYSGSGKSISLSELFSRKTEIDHILPYSMTLDDSLSNKVVCFASENQEKGQRTPFDWLGHNEEKWQIVQQTIDHWKPQRKTRGRGKDAKSKADTKVINARKWEKFFITADQIEEVYEPERYLVETGYIAKEVREYLESLYEPAESKKKVRTTKGGVTSQLRKWWDLNRILGVDESNGEKDEQGNSDKKNRGDLRHHSIDAAVIAVTEPKLVKKVTSEIQRCYPRKSPRDIYVPRPWQNFEDEIKQAMSDVNISHRTQRKVKGELHGQTHYWKETNGKYAGKYITTKSLNSLSDAEVKRICDEKIKKMAEDKIREFEGNIKKAFDQPLLLPNKNGEPIPVRKVRICTDKTDKNMMFLKKGLYYVERPENHHIEIFKLSIKGKTKYICKTWDMWDITKRIRNCQPIYLKKHPDYPEAKFVMSLCKGETIELDGTAQKRVLARIKEVGADKNNGLGTDIKLWEVEIGRLDEKITKSTPKAYRIQSINELLERNAKKVIVDLLGRVRWAND

SEQ ID NO: 19119 - protein, 1002 aa, unidentified
  REGION 1..1002: note = Cas Enzyme sequence
MGISKFTIGLDIGSNSLGWAIVDGSPEFNGENIIAGVRVFSGGTAKTQAGEQSRNSDRRAARQARRQNDRYSRRKRKLKKVLITAGMYPCEPKEQEPLIEIDPYFLRRKGLYEKLTPEEFGRALLHLNQRRGFRSSLKIQDQAKEEGEIKKNISALSQEIAQNDFKTIGELFAWKKEQGMKIRGQHTSRQMFIDEFELLWNAQAQFFPDLLTEALKNEVYSAIFYQRPLKEQSHLIGKCKLEPEERRCPRSSWYAQQFRILQEINNFRVLSRSGERTLTEEERKQIFQKLMTQKSPVKIQTIKSKLLDLDEIETLNFEATGRDSLEPNYVEAGLQKIFGKDHYLANAEWYRNEVWEALIREDPYDFKQKAENDWGMNEERIKSLFDIKRPSGYTNYSLKAIKKLLPWLEKGFSVYEAIEKAGYQQEEQKELSYLPPIRSDEFRNPIVVRALSETRKVINAIIRNYGMPEKIMIEMARQTKGTIRSRQKQLWENLRRAKYHEEIREKLQEKDIDASRNNITKYKLWEECNYTCPFTGSSISFSQLFGNDYEYDIEHIFPFRRSLDDSFINKTLCKRSENISRKGNRTPYEAYYGTEQYDQILLRVNKNKKMPYAKRKRFSMKEIPEDFTKRQLVDTSYAAKSAVEYLKQLGCEVDTVRGHITSELRHFWGLNSILNDDNNQKSRDDHRHHAIDAIVVAHITKKHINALKSKYDFQKNKHFPSPWDAFGIGIDDFRRDVKKSVQTINVSHRPERKISGKMNLETNYGKTGQDNQFVYRVPLQALTPAKVTKIVDPVVRAIVESRLKEFGIEPGKGSKPIKAAVFKEELRMKAKCNKEGPPIKKVRVRASFSNAIPIKDKNGIPYRYVEPGSNHHIAIYEYEDEKGVKRRCKEMVSRFEAYQRRMKGLPIVNKKHPQYPDARFMMSLCINDMVIYKKNNNKYLCRVQKISGEGNGESIDISFRDHTASTIDSEKKGFRVRTLSPSKFDIEKVFVDPLGRVLPAHD

SEQ ID NO: 19120 - protein, 1002 aa, unidentified
  REGION 1..1002: note = Cas Enzyme sequence
MGISKFTIGLDIGSNSLGWAIVDGSPEFNGENIIAGVRVFSGGTAKTQAGEQSRNSDRRAARQARRQNDRYSRRKRKLKKVLITAGMYPCEPKEQEPLIEIDPYFLRRKGLYEKLTPEEFGRALLHLNQRRGFRSSLKIQDQAKEEGEIKKNISALSQEIAQNDFKTIGELFAWKKEQGMKIRGQHTSRQMFIDEFELLWNAQAQFFPDLLTEALKNEVYSAIFYQRPLKEQSHLIGKCKLEPEERRCPRSSWYAQQFRILQEINNFRVLSRSGERTLTEEERKQIFQKLMTQKSPVKIQTIKSKLLDLDEIETLNFEATGRDSLEPNYVEAGLQKIFGKDHYLANAEWYRNEVWEALIREDPYDFKQKAENDWGMNEERIKSLFDIKRPSGYTNYSLKAIKKLLPWLEKGFSVYEAIEKAGYQQEGQKELSYLPPIRSDEFRNPIVVRALSETRKVINAIIRNYGMPEKIMIEMARQTKGTIRSRQKQLWENLRRAKYHEEIREKLQEKDIDASRNNITKYKLWEECNYTCPFTGSSISFSQLFGNDYEYDIEHIFPFRRSLDDSFINKTLCKRSENISRKGNRTPYEAYYGTEQYDQILLRVNKNKKMPYAKRKRFSMKEIPEDFTKRQLVDTSYAAKSAVEYLKQLGCEVDTVRGHITSELRHFWGLNSILNDDNNQKSRDDHRHHAIDAIVVAHITKKHINALKSKYDFQKNKHFPSPWDAFGIGIDDFRRDVKKSVQTINVSHRPERKISGKMNLETNYGKTGQDNQFVYRVPLQALTPAKVTKIVDPVVRAIVESRLKEFGIEPGKGSKPIKAAVFKEELRMKAKCNKEGPPIKKVRVRASFSNAIPIKDKNGIPYRYVEPGSNHHIAIYEYEDEKGVKRRCKEMVSRFEAYQRRMKGLPIVNKKHPQYPDARFMMSLCINDMVIYKKNNNKYLCRVQKISGEGNGESIDISFRDHTASTIDSEKKGFRVRTLSPSKFDIEKVFVDPLGRVLPAHD

SEQ ID NO: 19121 - protein, 965 aa, unidentified
  REGION 1..965: note = Cas Enzyme sequence
MRLYALDPYTLRAKELTAPLSLPEFGRVLLHLAKRRGFQSNRRVTAKKEEEGKIKDGLKRLAEDLGEKTLGQHFSEHRQENRFVAIRNRRDSYRWMTHRDQYRQEFDRLWESQQRFHPDQLLGELRQRIAAVLFFQLPFELSHRRKQKVIGRCTLFPTQQRCPLAERAAQCFRVMQKLNDLRIRDSHGRDRPLTVDQWQAVRARLMTSKKVKFDSLRKLLKLVSDEQFNFEFEGNSDLTGHEIDAQLAGRKVFGTKGWGKLTDQHRDQVWQRVVDWLIKGQQSPDDLAVAIEQDFGIKAADPSILGKLHVPPGHVAYSKKALAWLLPELEKGHNLHDARQAVAAAAGFRRTWRTHKQLPPPDRAHGFETTNPTVRAVLHQVRQVVNALIRDLGKPERFVVEFARPLKANKEGRQEILRRQARNRKARLIARERICEARGWPSEAAAKVSGKDVNKYLLWQEQGEYCPYSGRRIGVEVLLNGETEIDHIIPRSLSLDNSLNNKVVCFTAANRDKGQRTPFDWLGADPKRWPIVERVIARWNPKATANDESQTPATGTAATANLDKWRRFHLAQQDIAEKYTPNYLLNDTSFLSRMVRDYLKRLYPVRTAIDQQVRTSKGGVTSELRKFWGLNALLGSDDPKAKNRADLRHHALDAAVIAVTEANMVQKVTAALHAAGPWRRASELNVPLPWRSYRDDLQAALSALNVSHRVERKAKGALHKETYYAKETNGAQAGKFITRKPVASLTRGMVERIVDKEVKKLAHDRLTQFDGDAKKAFAEPLALPNGRAGETPVYRVRVWENSNTMIPIRGPQRGKQTVWVEPGSNHHLAIFEVEQRGEVGWVRTLCSTYEAAQRLRRREPVIRRQHPDFSEARFVMSLSKGETLLFQDEQGQSRLARVRKFSAGDLARPEAVDLLVWELTLGDLNENITKDTPNVWRLRNINDLRKMQARKVTVDALGRIRWAHD

SEQ ID NO: 19122 - protein, 1034 aa, unidentified
  REGION 1..1034: note = Cas Enzyme sequence
MSGFIIGLDLGVASIGSCVILNKRIDSAAVSIFPEGVNVSPLGKESSRNTTRREKRQIRRQLFRKNKRRKLLTEILQSLGWFPEHILDVNELMQLDPYPLRAKGVSNALTREEFGRVLFHLSKRRGFKNSRKSGGTEEGVLFEGDKTGTKKGIAELQEEMHKNGFKTVGQYLAALNPHEVRIRNRYLLRKDLVDEYELLWETQLKFHPEWKKPDNFEEIIQKHFNIKYHDKLLESDLPTFLRDYVIYYQRKLKSQKGLVSPCKLEPKAKRAPASCLLFQEFRILQKLHDIRLIGKGKTNESLTQKQVENAFEWLNISPDKNFKQLKKELKISDDELNFKETDKIKGNRTAYELSKVFGKLVWNSFSEKEQFNRWRILYDAEDDDWLTNYGKQKWGLTAAETDKLLKVSLEKDYAELSQTAMKKLVPLMKSGGLDYTDAAKKAGYDHGLNTKKETLSDILGEPQNLRNPIVQQGLFELRKTVNAIIKDYGAKPDKIRIEFARELKMPKKKREGLSNANKNRGKERDEIRNILFDEFNIKEPSRTDILKYQLWLETNKQCLYTGEFIGKEELFSPNIEIEHIEPLSRSLNDSQSNKTLSIKRFNNLKGNDLPFEMMEKGKITTSEYDEIVERAKILVRKSGYNKFRRFLKKSIDADMVSRQLNDTAWLAVEARKYLQTICPNVEVIAGQATAELRHLWGLNRILNRHGLDIKNRDDHRHHAVDAVVVACTDIGMIQQLSKLHEKGRKATNERFPPPWEGFRNDVKDAVNQILIKHKVRSRVRGQLHDETIYGPVKGFQQQQLTNERGLPVFKSRKELTALSEAMIDKIGDKKIKEIVKNRIREHGVEPTGKFKIPANAFSEPLYLPTKKGGKIPIRRVRIHDVATSKIKLKTGKYVDSGNNHHIVIFSKPDGKKDGIVVSLFEVAQRKRNKQPIYQTDVGEENTFLMTLQINELVLLNGEHFEAAEINWNNVSNEELSPYLYRVQKLTSGGVTFRHHLTSVLKNDSNVEIGRAIKTPNSFNGIKVTVNELGEIRPA

SEQ ID NO: 19123 - protein, 1036 aa, unidentified
  REGION 1..1036: note = Cas Enzyme sequence
MSKRILGLDLGVASVGWALIEESETSETSGNILGGGSRIFPSVLEAKSELPKNAARRLKRAMRRTLNRRQMRRDTLTNVLTRSGLWPESKKDRDQLIVFSPYLFRKTGLDHPLSLFELGRCFLHMNKRRGFLSNRKSKLTGFEDDARILELIQRDEQADAEATPKKAQKNATQEEKDLGAVLGEISQLKAAMQVVGARTLGEYLADLPKKRGTHTERAMYQHEFEQLWTAQQTHHPNTLSEGLKAEVYRALFFQRPLKLQKFLVGPCTLEPQRKRAAKACLEFQEFRTRQELNHLLIFNPDERAYRCLSETEREAIFQHLQTHDQITLGQIRKALSLHAGEHLNFEDKEHKIPGNRTSVKLQKILGTLWQTLGNKQFELITDLLTINDRRDLFKRLESHWKLPLETAYHLTILELESGYSPLSRKAICLLLPHLRTGLPYAQALQQAGYHAGAKPIGEAEVLAPPPRTNNPVVGKALNQTRKIVNALIATWGLPDVIRVELTRDAKQGKKARERIQKQQKVNEKLNNEAKVQLEELGILQITGEALLKYRLWAECKGVCPYTGQTITPAMLFGSEVDIEHILPYSRSLDDSYMNKTLCMSFENRQVKKGLTPFEAYGETDRFPEIRQRLLDLESMPREKKNRFFLKDKPLEDWLAQFTNRQLSDTRYISLEVKNYLQQLGCKIEVTSGSYTAALRRKWSLNNLWRGKKDDIQDAPKSRDDHRHHALDALVTALTDVGLMQRLGKASAKYGHLALDDRQLPLPAPWPDLAEQTEKWLKNIIVSHAPMRKLSGALTEETAYGKGKAWLTKGAKKAKADEPEETELVEVLVHRKSISELKDTEVPKVRDPWLRGLLAARLAEYGGNAKKAFAEPIFHKDGKTPIKKVRLANRFTEGAIFPVSKGHPEGTDYKFYIFGNNHHIEIIEDLATGKRSGGVVTAMEAAKRVRIEKKPMVQTDHGPGKRLVCWLCINDLIRDPKPGYEGIFRVQKMDNQLHVHFRLHTDATLEKNLGAGSFTPGSYRGTKLYIDPLGRIKEARE

SEQ ID NO: 19124 - protein, 1005 aa, unidentified
  REGION 1..1005: note = Cas Enzyme sequence
GNWENEVCTIEGKTRRGHGKKHPPRPIIYKPMDIWHQCLHIDSYEELLDYANRVLNWNDEDKIQKLECLWNDISDNRCRLSHKAIHNINYFLERGLQYSDAVFFAKIPDIVGQEAWKLKEKEIFQYIQGEYGKLKSEVAQHSTIVAITNRLIADFKTLAEKDQNSDKKRGYDTSINDDDKEKILLFIKNHYGEKTWESFDSQKQQAIKESVTEEYHLFLKDAKRDFREMPRLGDELAKVMVRNFFPNKSVEDDFGKLYHPSMLSRFKPVDITGRGDLRLGSPALGNIRNPVYLRAMHILRRKVNALLDAGIIPLEFTRVVIEIPREINDANMRRAYSLYQSRQQKEKECILAALPKNCKYSDDDIEKVRLLLHSNTDYINEDTPIEDKKDSKARNERLYKKWVNAGGRCYYTGNPIKLEDLGLNGSTPKVDFEHTIPRSVLPDDSRMNQTLCFKYYNRNVKEDQLPALLSIFETGISPRLQPIRDKVERIKNEISTCRSKSRRAADKEWKDYWIVRRHVWEMELDYWQGKLQRFTAEEVPEGFRRSQLTDTAVVAKYASLYLKSIFHRVDVQKGTITALFRKLYGFQEKDEAKDRSNHYHHAIDAAVLTMIPTSAQRDRMIALYYQREEVKDKNEIGKITENLNKEVRAAHLGADLNSLKRSVASIEKQIKSSVLVNKNVVDRQLKPNKNGDSIRLDLHEKTFIGMVKTVKKVKNAKDGSVEVTRILRPVIRVKLSKLSTKSDIEKCLESIVDGKLRNYLKKIYKQKCEDNVPIKDILKGIHYRADKGGVHQPVRHVRCYKNFSYELAIPVHRHVFQREEAPAYKQYAYAQNCGNVLLLIYEKKDLNDKSQWRGRFISAFDLSKVANLFRKHQIYSIKTVNDIPEETGWLYYDSSCEYHLRCVVKPGLRVLLKEKKENLRRLSTTNLLKRLNMIVKVNEEDGVVLCHHTLVNKYSIKQDDEKNKTIQQMKRVTISSFMGKQPLFEYVDFTINPNKKSQVVSLNHK

SEQ ID NO: 19125 - protein, 1420 aa, unidentified
  REGION 1..1420: note = Cas Enzyme sequence
MEDFILGFDPGSNSLGTMVRDLSGDKLSDQFIYYSVDTFDSVVVNGKSLAAKRSKDGRQRRQLRVRRNRLWATLKLLIENNLCPLTMKELDAWRIYDKKRGYFRKYPSESKTFAQWIALDFNGDNKTDYKTPFEIRHLLATVQFDFTKTENRYLLGRALYHIAQRRGFKSNKKGIGKGTTEREVIEEPIKDIAEQLKKSELQKSNKLQAYMDNHKPKINTVGSAYHLLLTEGTGEGLTGPIRVRGSEYEAIRSQLQDEIKYIFNFQEGLKDESECLEQLLCDKEGSGTIFFKNPPRKSSVGTCTLEPEKKRCLESHPDFEKFRAWGFINNIIVRNSDGELVNLPLELKQNIYQKFFLTEKDFQFRDIRKFIQEQEGFEKINLRYSSRPQTRTINYPSDYPLSACRVTKRLIDLFGGNWENEVCTIEGKTRRGHGKKHPPRPIIYKPMDIWHQCLHIDSYEELLDYANRVLNWNDEDKIQKLECLWNDISDNRCRLSHKAIHNINYFLERGLQYSDAVFFAKIPDIVGQEAWKLKEKEIFQYIQGEYGKLKSEVAQHSTIVAITNRLIADFKTLAEKDQNSDKKRGYDTSINDDDKEKILLFIKNHYGEKTWESFDSQKQQAIKESVTEEYHLFLKDAKRDFREMPRLGDELAKVMVRNFFPNKSVEDDFGKLYHPSMLSRFKPVDITGRGDLRLGSPALGNIRNPVYLRAMHILRRKVNALLDAGIIPLEFTRVVIEIPREINDANMRRAYSLYQSRQQKEKECILAALPKNCKYSDDDIEKVRLLLHSNTDYINEDTPIEDKKDSKARNERLYKKWVNAGGRCYYTGNPIKLEDLGLNGSTPKVDFEHTIPRSVLPDDSRMNQTLCFKYYNRNVKEDQLPALLSIFETGISPRLQPIRDKVERIKNEISTCRSKSRRAADKEWKDYWIVRRHVWEMELDYWQGKLQRFTAEEVPEGFRRSQLTDTAVVAKYASLYLKSIFHRVDVQKGTITALFRKLYGFQEKDEAKDRSNHYHHAIDAAVLTMIPTSAQRDRMIALYYQREEVKDKNEIGKITENLNKEVRAAHLGADLNSLKRSVASIEKQIKSSVLVNKNVVDRQLKPNKNGDSIRLDLHEKTFIGMVKTVKKVKNAKDGSVEVTRILRPVIRVKLSKLSTKSDIEKCLESIVDGKLRNYLKKIYKQKCEDNVPIKDILKGIHYRADKGGVHQPVRHVRCYKNFSYELAIPVHRHVFQREEAPAYKQYAYAQNCGNVLLLIYEKKDLNDKSQWRGRFISAFDLSKVANLFRKHQIYSIKTVNDIPEETGWLYYDSSCEYHLRCVVKPGLRVLLKEKKENLRRLSTTNLLKRLNMIVKVNEEDGVVLCHHTLVNKYSIKQDDEKNKTIQQMKRVTISSFMGKQPLFEYVDFTINPNKKSQVVSLNHK

SEQ ID NO: 19126 - protein, 1252 aa, unidentified
  REGION 1..1252: note = Cas Enzyme sequence
KGTAGHEVTEEPIIDMAEQLKKSELQKSNKLQAYMDNHNPQVNTVGSAYHLLLTEGFGEDLTGPIRVRGSEYEAVRSQLQDEIRYIFNFQEGLKDEKECLEQLLCDKEGSGTIFFKNPPRKTSVGTCTLEPEKKRCLESHPDFEKFRAWSFINSIIIRNSNGELVNLPLELKQMIYQKLFIADKDFQFREIRAFILQQDGFEKLNLRYSSRPKTRTINYPSDYPVSACKVTKRLIDLFGSDWETKVLPIDGKKRRGHGKKHPSRPIVYKPMDIWHQCLCIDYPEELLDYANRVLGWDDEDKIQKLEYLWNDISDKRCRLSHKAIRNINYFLERGLQYSDAVFFAKIPDIVGQDAWKVKEKEIFQFIQGGYCTLKKNVVQHSAIVAITNRLIADFKTMTEDEENQNSDKKKRFDTSINKNDEKKILRFIESHYGKATWKTFDVQKQQTIKENVIEEYRSFLEDSNRDFRKMPRLGDELAKVMVNDFFQDKSVENDFGKLYHPSMISKFTPIDITGRGDMRLGSPALGNIRNPVYLRAMHILRRKVNALLDAGIIPLDSTRVVIEVPREINDANMRMAYSLYQSRQQKEKEYILAALPKDVKYSNDDIEKVRLLLHSNTDYINEDTPIEDKKDSKARNERLYKKWLKDGGRCYYTGEPIKLEDLGLNGSIPNVDFEHTIPRSILPDNSRKNQTLCFYYYNRNVKEDQLPALLPIYEEEISPRLQPIRDKVERIKNEISTCRSKSRRAADKEWKDYWIVRRHVWEMELDYWQGKLQRFTAEEVPESFRRSQLTDTAIVAKYATLYLKSIFHRVDVQKGSVTALFRKLYGFQEKDEAKDRTNHYHHAIDAAVLTMIPPPAQRDRMIALYYEREEAKDKNEIGKIIENLNKEVRAARLGTDLKSLKRSVMSIEKQIKSSVLVNKNVVDRQLKPNKNGDSIRLDLHEKTFLGIVKTVKKEKNTKDGSVNVTRIPRPVKRVKLSKLSTKGDIEKCLESIVDGKLRNYLKKVYEQRCKENVPLKDILSGIYYDFGKSGVHQPVRHVRCYRAKISYESAIPVSRHVFRKVDAPAYKQFAYVKNRENVLLLIYEKRNKNGKSLWKGRYISAFDLSKVAGLFRKKFRKHQRFTIQTINDIPEETGWLYYDSSCEYRLRHVIKPGLRVLLKENNENLRRLSTSKLLKRLHVIVKVNESKGIFLCHHTLVNGYTEIEEGGRNKSISQIDNKTINIFMDKQPLFEYVNFEIYPNKKTDGIIKWKDK

SEQ ID NO: 19127 - protein, 1042 aa, unidentified
  REGION 1..1042: note = Cas Enzyme sequence
LPIETNERKDVPIKVCAKSNPYYQEFRVLQWLQNLRIYEIETDREVTAEFIETAQDYEALFNFLMSQKEIDNESLLKYFLLAKNPQIKDKAAKSELKKWLTTYRWNYVYDAADNSSKKYPMNETGYELQRYLQKVEGLPANFLTFDITYQLWHLLYSVKDKVEFEKALKKFANKNQLDETSFVESFKNFKPYPNEYGSFSEKAIKKMLPLMRFGKHWNFKNIDVHTQKRIDDIINGMANEDIRTIIREKAEKYQLNSETCFQGLPLWLAQYIVYNHHAEATDIEKWTSVSDLEAYLEDFKQYSLRNPIVEQVVTETLRVVRDVWQQYGGGQANFFDEIHIELGRELKNTSKERERLSKQNQENENTNLRIKKLLAELKEDTNIQNVRPYSLVQQELLKIYEEGVFSSTDEIEEDIQKIRKKAEPTTPEIRRYKLWLEQKYKSPYTGEVISLTKLFTEEYEIEHIIPQSRYYDDSLSNKVICESAVNKLKTNQLGLEFIQNHHGEKVRIAGNKEVTIFTEEQYKEFVKKYYANNSAKQQKLLLNEIPEKMVARQLNDTRYISKYISEILSKIVRSDEKDEGVNSKNIIPCTGKITTALKQDWGLNDVWNELILPRFERMNQLTQTQLFTSYNDRLQKNLPTVPIKYSQGFQKKRIDHRHHAMDALVIACVTREHINYMNNQHALDKSKDKKEKQQSRIDLRTILCEKKNNNWQFKKPWRTFTQEAKEALEHIVVSFKQNLRVINKATNYYEKWEEKNGVLVKKKVKQEGTNWAIRKPLHEETFSGKISLNREKVGKGNILTATRKAVDSSFDVKKISKITDTGIQKILLNYLKYKGSPEVAFSAEGLEELNKNIAQYNDGKKHQPIYKVRIYEKGSGRFVLGEKGTKSKKYVQGAPNLYFGVYQGKEKRTYATIPLNEVIERQKQGLPSVPERNEKGEPLLFSLSPNDLVYVPMEGEAPEAIDFSNLSKEQKERIYKIVSFTGKECHFVKSTIASLIKSYDAKSKIGELGSLNKLEVTISRDSRIKEVCIKLKVDRLGNITKA

SEQ ID NO: 19128 - protein, 1456 aa, unidentified
  REGION 1..1456: note = Cas Enzyme sequence
MKRILGLDLGSNSIGWALVQQNFENKQGQIMAAGSRIIPMDQGVLGDFEKGNTVSQTAERTAYRSTRRLRERHLLRRERLHRVLHILGFLPPHYDSQIDFSKRYGKFIDNAEPKIAYNNGNFIFMNSFNEMIEDFKKHQPQLFYKKSNGEESKIPYDWTIYYLRKKALSQKITQQELAWLILHFNQKRGYYQLRGEEETEGNDMEIISSKVLSVIKKNKDKKYDKYWYDITLENGLVYKAAFYNDLVYSWIGQEREFVVKRTLLKNGDEKIELSYLPTFDEIAKMDKKQQDKFYQKIKVKTESSIGNKTVGAYIYDHLLQNPNQKIKGKLVRTIERKYYKDELKAILAKQIALQPEFFTENLLADCIRKLYHKNETQQQNLLSKDFLHLFLEDIIFYQRPLRSKKSTIANCTLEKRSYIDKETNERKDVPIKVCAKSNPYYQEFRVLQWLQNLRIYEIETNREVTAEFIETAQDYEALFNFLMSQKEIDNEGLLKYFLLTKNPQIKDKAAKSELKKYRWNYVYDVADNSSKKYPMNETGYELQRYLQKVEGLPANFLTFNTTYRLWHLLYSVKDKVEFEKALKKFAQKYQLNEVSFVDSFKNFKPYPNEYGSFSEKAIKKMLPLMRFGKHWNFKNIDVHTQKRIDDIINGVANEDIRTIIREKAEKYQLNSETCFQGLPLWLAQYIVYNHHAEATDIEKWTSVSDLEAYLEDFKQYSLRNPIVEQVVTETLRVVRDIWQQYGGGQANFFDEIHIELGRELKNTSKERERLSKQNQENENTNLRIKKLLAELKEDANIQNVRPYSLVQQELLKIYEEGVFSSTDEIEEDIQKIRKKAEPTTPEIQRYKLWLEQKYKSPYTGEVISLTKLFTEDYEIEHIIPQSRYYDDSLSNKVICESAVNKLKTNQLGLEFIQNHHGEKVRIAGNKEVTIFTEEQYKEFVKKYYANNLAKQQKLLLNDIPEKMVARQLNDTRYISKYISEILSKIVRSDEKDEGVNSKNIIPCTGKITTALKQDWGLNDVWNELILPRFERMDQLTQTQLFTSYNDRLQKNLPTVPIEYSQGFQKKRIDHRHHAMDALVIACVTREHINYMNNQHALDKSKDKKEKQQSRIDFRTILCEKKNNNWQFKKPWRTFTQEAKEALEHIVVSFKQNLRVINKATNYYEKWEEKNGVLVKKKVKQEGTNWAIRKPLHKETVSGKIVLDRKIGKDKILTATRKAVDITFTEKIISSITDTGIQKILLNYLKYKGSPEVAFSAEGLEELNKNIAQYNDGKKHQPIYKVRIFEEGSKFPLGETGAKVTKYVEAAKGTNLFFGIYQGKEKRTYATIPLNEVIERQKQGLPSVPERNEKGEPLLFSLSPNDLVYVPMEGEVTETIDFSNLSKEQKERIYKTVSFTGNECHFVKSTIASLIKSYDAKSKIGELGSLNKLEVTISGDSRIKEACIKLKVDRLGNITKA

SEQ ID NO: 19129 - protein, 1267 aa, unidentified
  REGION 1..1267: note = Cas Enzyme sequence
METILGLDLGTSSIGWALIEVDKDKIPVSVLGMGSRIIPLDSADRDQFQKGQAISKNKDRTTRRTQRKGYDRKQLKKSDDFKYSLKNILEKYGIFPSDYLMNLPMLELWKLRNDAVSQDENITPEQLGRILYMLNQKRGYKSARSEANADKKDTDYVATVKGRYAQLKDKNQTIGEYFYNELSYSKNNDSYFRLKEKVYPREAYIEEFDAIINVQKRKHSFLTDDVINSLRNDIIYYQRKLKSQKGLVNICEYEGFETIFFDKKTQKEKTIFTGPRVAPKTSPLYQLCNIWEIVNNISLKIKNPEGSKYRWGDRVPTIEEKQLLANYLWVNENLSFNELLKTLNLKKEEVYANKQILKGIKGNFTYTSIFNIIGENENFKFDLNFISTNQQAILVDKKTGEILDERDGLILDGILEKEPFYQLWHTIYSIKELTECKNALIKRFGFSDEIADRLSKIDFNKQAFGNKSTKSIRKILPYLMFGYNLSDAENLAGYNRRQTKEEKSKNVSNEPIKLLKKNSLRQPVVEKILNQMINVVNAIVDKYGCPKEIRVELARELKQSKDEREVSDKQNGANKKLNELVVDKLTELGLPTTKRYVQKYKFIFPTKDKNWKEAQVINQCIYCGQSFNITEALSGDDFDVDHIVPKSLLFDDSQTNKVLVHRKCNSNKTNNTAYDYISKKGNDILNEYIDRVDDWFKRGVISYGKMQRLKVSFEEYQGRKLKGNETEADKKLWENFVDRQLRETAYIAKKAKEILGKICNNVNSTEGNVTAKLRKLWGWDEILMNLQFERYKNANQTEQEVWTSEHGRKIHEKEIIKKELWTKRDDHRHHAIDALVIACTQQGFIQRINTLNASEVRDEMNKKVEESEIKYNEKLTLLEKYLITQKPFSTVEIEKEAEKILVSFKAGKKVATISKYKAKGKNKNTGVLVPRGELHEQSVYGKVKIIEKDKPLKYLFENPSLIVNIGVKKMVESRLQENGSEVKKAIESLKKYPIYIDKINEITLENANCYKERTVLKYNIQNIKTKDVPFIVDEKIKTIIKDRLEKYNGKEREAFKDILWFNEEKQIPILSVRVFTDLTAVEVVKKDLNGKPIGYAKTGNNHHIAIYKDSKGNESQHLCTFWHAVERRKYKIPIIIEKTNELWNELLDKKLPQSFLDKLPSDNLELQLSLQENEMYVLGLSKEEFEIALIQNNKVFLSKYLYLVWSISYNKFWFRHHLETKNSDLKKIFGARETKRFIEVSSIDGFKKLNPIKVRINNLGEITKIEN

SEQ ID NO: 19130 - protein, 1120 aa, unidentified
  REGION 1..1120: note = Cas Enzyme sequence
MGNILGLDIGTNSIGWAVVNIEKQEIHTNVHIFPQGVTEKTGEPRNIQRRSARSARRNNSRYKQRRAKLQDILTKTNMKPLEVPKETNCIYKLRANALDRKLNLQELGSVFLHLNQRRGFQSNRKEQGSADKEKEKELGKVKEGIKELEELLKSQNSRTIGELYWKLLQERNHNFSAEQAIRNRFPTEKRYTSRELLRDEFEKIWEFQKQFYPQVLNEELKKEIGKETIFYQRKLKTQKGKTEKCPFEPQSSCIPKASIEFQEFRIWQKLATIKVTIPSQDRVSSLLTLEEKQKLAYELDRLTNKEMRLTFKQIKALFKKEWGTEVNLNYKDEDDIKGNTTAIKLRRVLGEKYDEIYQEYNYIFEYEEKRKTLFYKIWHTLLFSDNNTWLKKYAIEKLKFSEIQAEKYIGINLEDGSGSLSYKAIRPILAYLKIGEDYTNACKLAGYDHALLPDKDRKLLVKMPKLENNELRNPTVQRALTETIKLVNKLMKEYQIDSICVETARELKKTKKQQDEIEKELKAKTDRRRDLADFLSKNSVMLFGKYREFDLNSKPDMEDVRKYELWLELAVTDQELNDIGIKKGFADFARKIGTADMEKYQLWKEAQRISIYTGKIIQFNRLFTKDYEIEHILPYSRSFDDSFRNKSICEAWFNAEKGNETPFEYFQKKSKEEWAAFKHRIKVLPKAKQERLLWEKEIEGFRNSQLTDTAYIAREVTRRLQAVCKDVQTTQGTVTGMLRRYWGLNALLNIEGENEKDRGDHRHHALDAIVIACTNRAKVQLINWANAKDIDWRKERKKIDFPWRSFRYDIQQKLHGILVSHRQDNGILVKRKAIIKTKDGKKKTGIQIGIKGELHEATYYGKHILPKGAPIPKDKKTKTAYFVRKKLSSLNENQVEQIVDRVVRETVQKAIAEKGLKQALAEPIYMPDTKKKGWQMPIKKVRIAVNKDDEGMIPLYKKEGEEDYNRNLYVPSGSNYIMGIYQDQTTGEKEVYIASFYEAIQRKIKKLPVLEPTRGNKKLILTAREGDMFVIYENHPDEIEKHINWDKIDAEARRFLFERLYRVRKMDKSSGRLYLAQHHLAKVNLDKDPEPFKIYPLGKKFNGIPVKVDILGNITRKKSV

SEQ ID NO: 19131 - protein, 1442 aa, unidentified
  REGION 1..1442: note = Cas Enzyme sequence
MKKILGLDLGTNSIGWAYVKQAQNDSEKSEIVELGVRVNPLTVDEKTNFEKGKPISTNADRTLKRGARRNLQRYKLRRQELIALLKEYQVISEKTILAEDGKGTTFETLRLRAKSAKERVSLEELARILLMINKKRGYKSSRKAKNEEEGQLIDGMEIARRLYDENLTTGQLSLQLLKEGKKSLPDYYRSDLQHELDKVWNFQKQFHPDILTDEFYSAIQGKGQKATRESFSSKYRIDTAENKGSREEKKLQAYQWRADAIHKELTKEELAFVITEINNNINNSSGYLGAISDRSKELIFANETVGEYLWKQIQSDPHTSLKNQVFYRQDYLDEFERIWKTQSEFYPQILTESLKNELRDILIFYQRKLKSQKALVSICEFESKEIPLKDKQGNPISKNGIPVTKLVGPKVAPKSSPLFQEFKIWQNLNNVLVRPKGSRKRKVTTDQQSTLLEGQEPVFELNLEQKELLFEELNLKGNLKTDYCLEIIGYSAKEWEMNYPTLEGNKTNKSLYEAYLKIIDSEGYDAKKLLKVKTDKDDINLDDIKVSASEIKTMISDIFNVLGINTKILDFDAELERKQFEAQASYRLWHLLYSYEGDDSKSGNELLYRLLEDKFGFKREHSKTIANVSLLSDYGNLSTKAIRTIYPYIKENKFSTACELAGYRHSKLSITKEENENRTLKDTLDVLKKNSLRQPVVEKILNQMINLINELIEKHSEKDEKGNIVKYFKFDEIHIELARELKKNAEERRELDSKVREGKDRNEKIITILKSEFGLPYPTKNDIIRYRLYEELKDNGYKDLYTNTYIPREKLFSKEIDIEHIIPKSRLFNDSFSNKTICYRQDNLNKGERTAYDYIEGLGKTQLDEYLNRVENLYVNKIITKAKYRNLLKKESEIGDGFIERDLRETQYIAKKAKEMLLQITRHVVSTTGSITDRLRDDWELVNVMRELNLPKYKALGLTEIQERKNGQTVEVITDWTKRNDHRHHAMDALTVAFTKHSHIQYLNFLNARKDEKHKEYSNIMGIQQLETEKTTDKDGKDKRVFKAPIPNFRQVAKEHLEAILISHKTKNKVVTRATNKIAGCKKQQETLSPRGQLHKETVYGKYRRYVQKEEKIGSKFDLQTIERVANPLYKRLLTKRLEENGGDPKKVFTGKNALAKNPIYLDEAQTQQLPEKVKLVWLETYFSIRKDITPDIFKDEKSIDKVLDEGIKRILKDRLKSFDGDAKRAFTDLEQNPIWLNKEKGIAIKRVTISGVSNAEPLHTKKDHLGNEIFDDTGKPIPVDYVSTGNNHHIAIYRDENGDLHDEVVSFLEAVTRANQGLPIVDKTYNRHLGWQFLFTMKQNEMFVFPNKETGFDPQEVDLLDPKNKKLISPNLFRVQKLSKLMYNNSSVREYVFRHHLETTVEDKKELQQITYQQIKSLSPLNNIVKVRINHLGDIVHIGEY

SEQ ID NO: 19132 - protein, 1434 aa, unidentified
  REGION 1..1434: note = Cas Enzyme sequence
MKKILGLDLGTNSIGWAYVKQAQNDSEKSEIVELGVRVNPLTVDEKTNFEKGKPISTNADRTLKRGARRNLQRYKLRRQELIALLKEYQVISDKTILAEDGKGTTFETLRLRAKSTKEQVSLEELARILLMINKKRGYKSSRKAKNEDEGQLIDGMEIARRLYDENLTTGQLSLQLLKEGKKSLPDYYRSDLQHELDKVWNFQKQFHPDILTDEFYTAIQGKGQKATRESFSSKYRIDTAENKGSREEKRLQAYQWRADAIHKELTKEELAFVITEINNNINNSSGYLGAISDRSKELIFANETVGEYLWKQIQNDPHTSLKNQVFYRQDYLDEFERIWKTQSEFYPQILTESLKNELRDILIFYQRKLKSQKALVSICEFESKEIPLKDKQGNPISKNGIPVTKLVGPKVAPKSSPLFQEFKIWQNLNNVLVRPKGSRKRKVTTDQQSTLLEGQEPVFELNLEQKELLFEELNLKGNLKTDYCLELIGYSAKEWEMNHPTLEGNKTNKALYEAYLKIIDSEGYDAKKLLKVKTDKDDINLDDIKVSASEIKTMISDIFNELGINTKILDFDAELERKQFEAQASYRLWHLLYSYEGDDSKSGNELLYRLLEDKFGFKREHSKTLANISLLSDYGNLSTKAIRTIYPYIKENKFSTACELAGYRHSKLSITKEENENRTLKDTLDVLKKNSLRQPIVEKILNQMINLINELIKKHSEKDEKGNIVKYFKFDEIHIELARELKKNAEERRELESKVRESKARNEKIITILKSEFGLPYPTKNDITRYRLYEELKYNEYKDLYTNTDIPREKLFSKEIDIEHIIPKSRLFNDSFSNKTICYRQDNLNKGERTAYDYIEGLGKTQLDEYLNRVENLYVNKIITKAKYRNLLKKESEIGDGFIERDLRETQYIAKKAKEMLLQITRHVVSTTGSITDRLRDDWELVNVMRELNLPKYKALGLTEIQERKNGQTVEVITDWTKRNDHRHHAMDALTVAFTKHSHIQYLNFLNARKDEKHKEYSNIMGIQQLETEKTTDKDGKDKRVFKAPIPNFRQVAKEHLEAILISHKTKNKVVTRATNKIAGSKKQQETLSPRGQLHKETVYGKYQRYVHKEEKIGSKFDLQTIERIANPLYKRLLTKRLEENGGDPKKAFTGKNALAKTPIYLDEAQTQQLPEKVKLVWLETYFSIRKDITPDNFKDEKSIDKVLDEGIKRILKDRLKSFDGDAKRAFTDLEQNPIWLNKEKGIAIKRVTISGVSNPEPLHTKKDHLGNEIFDETGKPIPVDYVSTGNNHHIAIYRDEKGNLQEKAVSFFEAVTRANQGLPIVDKTYNQHLGWQFLFTMKQNEMFVFPNKETGFDPQEVDLLDPKNKKLISPNLFRVQKISTKNYFFRHHLETSVETHNALNGVTYKSQLGLNGITDIIKVRINHLGYIVHIGEY

SEQ ID NO: 19133 - protein, 1434 aa, unidentified
  REGION 1..1434: note = Cas Enzyme sequence
MKNILGLDLGTNSIGWAYVKQAQNDSEKSEIVELGVRVNPLTVDEKTNFEKGKPISTNADRTLKRGARRNLQRYKLRRQELIALLKEYQVISDKTILAEDGKGTTFETLRLRAKSTKEQVSLEELARILLMINKKRGYKSSRKAKNEDEGQLIDGMEIARRLYDENLTTGQLSLQLLKEGKKSLPDYYRSDLQHELDKVWNFQKQFHPDILTDEFYTAIQGKGQKATRESFSSKYRIDTAENKGSREEKRLQAYQWRADAIHKELTKEELAFVITEINNNINNSSGYLGAISDRSKELIFANETVGEYLWKQIQNDPHTSLKNQVFYRQDYLDEFERIWKTQSEFYPQILTESLKNELRDILIFYQRKLKSQKALVSICEFESKEIPLKDKQGNPISKNGIPVTKLVGPKVAPKSSPLFQEFKIWQNLNNVLVRPKGSRKRKVTTDQQSTLLEGQEPVFELNLEQKELLFEELNLKGNLKTDYCLELIGYSAKEWEMNHPTLEGNKTNKALYEAYLKIIDSEGYDAKKLLKVKTDKDDINLDDIKVSASEIKTMISDIFNELGINTKILDFDAELERKQFEAQASYRLWHLLYSYEGDDSKSGNELLYRLLEDKFGFKREHSKTLANISLLSDYGNLSTKAIRTIYPYIKENKFSTACELAGYRHSKLSITKEENENRTLKDTLDVLKKNSLRQPIVEKILNQMINLINELIKKHSEKDEKGNIVKYFKFDEIHIELARELKKNAEERRELESKVRESKARNEKIITILKSEFGLPYPTKNDITRYRLYEELKYNEYKDLYTNTDIPREKLFSKEIDIEHIIPKSRLFNDSFSNKTICYRQDNLNKGERTAYDYIEGLGKTQLDEYLNRVENLYVNKIITKAKYRNLLKKESEIGDGFIERDLRETQYIAKKAKEMLLQITRHVVSTTGSITDRLRDDWELVNVMRELNLPKYKALGLTEIQERKNGQTVEVITDWTKRNDHRHHAMDALTVAFTKHSHIQYLNFLNARKDEKHKEYSNIMGIQQLETEKTTDKDGKDKRVFKAPIPNFRQVAKEHLEAILISHKTKNKVVTRATNKIAGSKKQQETLSPRGQLHKETVYGKYQRYVHKEEKIGSKFDLQTIERIANPLYKRLLTKRLEENGGDPKKAFTGKNALAKTPIYLDEAQTQQLPEKVKLVWLETYFSIRKDITPDNFKDEKSIDKVLDEGIKRILKDRLKSFDGDAKRAFTDLEQNPIWLNKEKGIAIKRITISGVSNPEPLHTKKDHLGNEIFDETGKPIPVDYVSTGNNHHIAIYRDEKGNLQEKAVSFFEAVTRANQGLPIVDKTYNQHLGWQFLFTMKQNEMFVFPNKETGFDPQEVDLLDPKNKKLISPNLFRVQKISTKNYFFRHHLETSVETHNALNGVTYKSQLGLNGITDIIKVRINHLGYIVHIGEY

SEQ ID NO: 19134 - protein, 1557 aa, unidentified
  REGION 1..1557: note = Cas Enzyme sequence
MKKILGLDLGTNSIGWSLIETDFGKKKGKIIGIGSRIIPMSQDILSEFGKGNTVSQTAVRTEYRGKRRLIQRTLLRRERLHRVLNIIGFLPEHYSEAIDFENRLGQFKDSSETKIVYKKSQDGSFQFLFTDAYNEMVEDFRQTQPHLFKNKGKDGNGEARRIPYDWTLYYLRKKALTQAINKEELAWILLNFNQKRGYYQLRGDEIEKEKDDSKKVEFVEILVNDVINTGEKQGKDQTKYKIMLENGMSFVKPSNKPVEWKGKLREFIITTELDEDGNAKLNSYNEVKRSFKSVDSEKDWIAIKTKAEKTINDSKKSVGCYIYDTLLQKPNQKIRGKLVRTIERKFYKNELEAILKTQARFHTELRSPVLLAQCADHLYANNYAHKNDLKKKDFLHLFLKDIIFYQRPLKSKKSLIAECKYEHRFYLDKETNEKKKQYVKCIAKSHPLFQEFRLWEFVQNLKIYQRENRVEGRLKTDVNVTEDFLGGESEIVKLFEFLNDRKSIKQSMFLKHFKLNDKTHRWNYVEENEYPCNETRASFIALLKKNKSFDWQSLLTNENVEKLWHTLYSVSEKEELKSALKKLAKRLNVAESILDPFNSLPPFKKDYGSFSAKALKKLVPLMRRGEYWLEENINRNTVDRIDKILTGEFDEEIQNRVRELIDKRNQDFQSISDFNGLPLWLASYIVYDRHAESDDLQKWKQPENIELLKQHSLRNPIVEQVINETLQVVKDIWKEYGGGEENFFDEIHVELGREMKNPKKDRERMTKQISNSKNTNERVRAILKELMTDKSIEGNVRDYSPSHQEIFKIYEEGVLIQYSEAELKKEKLGDISATAYDVSRKPDPTQREIQKYKLWLEQNYRSPYTGMGIPLSKLFTPDFEIEHVIPQSRYFDDSLNNKVICEAEVNKLKGNKTGYEFIEKHGGEKVTLAGGAEVEVSKIEAYEQFVQRNFRGRKKEIMLMPDIPESFTNRQMNDTRYISKVVLNLMSKIVREEGEQEPTSKNVIPVTGKITSRLKRDWGFNDVWNELLVPRFMRMNELTGTTDFGYEDEQVINGKPSGNKFFRTQVPDELKRYFEKKRIDHRHHALDALTIALASRSHVNYLNNQNAAEAKVNERIDLRNKLRRIEEKQIIDNKTHLPKKIQVAKEFLKPWQDITQEVSDALAKTVVSFKQNKRILTKTNNYYESYKDEDGQLRLDKAGIPQKGLVKQKGNNRSVRKPLHQETVHGKISLRDTKSVTFANGLKDWKNLVDKDLKTIIKRLYREGHDEKTTVKYFKKNPYCINNEEVRKVEVYYYKEELSATRKALDISFNTKTIESVTDTGIKQILLNHIEQNIYQNQLDDTGKQLAPETLAFSPEGIEEMNKNIKNLNKGKEHQPIYKVRKYEALGKKFPVGENGNRKEKYVVAASGTNLFFVIKEHRDTKKREFETVPLRDVIDAMKAGVPFVEEEVGYSWFTLSPNDLVYVPTDEEMENPSSVDFNNLSKEQVDRICRMEKASGIECYFIYNNVASLIKQYDSKSKIGEFGSQNKFEKTNDDIRIKERCWKLKVDRLGNVKKQQ

SEQ ID NO: 19135 - protein, 1379 aa, unidentified
  REGION 1..1379: note = Cas Enzyme sequence
MKRILGLDLGTTSIGWALVNEAENKDEKSEIIKLGVRIIQYDSFNKVDRFGNISESKNPADDFASGKGLSPNAKRTRQRGARRNLQRFKQRRKNLIEVLKDNGFISSSNALAESGKGTTFETLEFRARAAGERVEKNELARVFLAINKKRGYKSSRKAKNEEEGSLIDGMGVAKEMYENKLTVGQYVSKLLKGGGKYIPDFYRSDLRNEFDLIWNHQQNYNKEKLTAKLYDDLLGKNKTQTWAICKEPFELVGIKRNAKGAEMKAENYEWRELALTQQLNLETLAIVFQEINNDLNKSSGYLGAMSDRSKELYFNKETVGQNLYKQLQGNPNTSLKNQVFYRQDYMDEFEKIWEIQSVFHKELTAELKMEIRDIVIFYQRKLKSQKHLISECEFEKHHKVIPKSSPLFQEFKIRQMLNILEFKDTKTGDLKVLTEDDRELLFEELNARGKLSINEIINFLGLDKKRWETNFKEGLEGNNTNAALFKAYQKIAEYEGYGFDWNKKSASEIKEEVKVVLSQIGVSAMILECNTDLVGEDFEKQESYMFWHLLYSSEEDEALKNKLQVKFGFMPEYTGIIANVALQPDYGSLSSRAIKKILPFLKAGNEFSKACELAGYNHSSSLTKEELAKRPLKDKLELLKKNSLRNPVVEKILNQMVNLVNQAIDEYGKPDEIRIELARELKKSAKERAEMTTNINAAKTKYEGIRKVLMSEFGVPNPTRNDIIRYRLYEELKPNGYHSLYTNKYIPKEKLFSPEIEIEHIIPKSRLYDDSFSNKTLAYSKPNKDKGDRTAFDFISIVYSSDLKDYENRVDLLFNKGAGTIGKAKREKLMMGGGDIPSDFIKRDLRDSQYIAKKAKLILEEVARTVNTTTGIITAQLREDWDLINVMQELNLPKYKAIDESLVEQIEKKDGTFKTRIKNWSKRNDHRHHAMDALTVAFTTYSHVQYVNNLNASRNEENKVLYGIRNKITKVYESKNGSKKRKFVPPIPNFREVSKRHIESILISFKAKNKVVTKNINKTKVKGKDKYLIKVQLTPRGQLHKETIYGQYAYPVIKEEKVGKNFDLDKINTVTKPKYREALLTRLHEYNGDAAKAFTGKNGLIKNPLCLSEKVDDVVPEKVKTLCYESSYSIRKAIGPDLKIDKVLDEGIKRILQNRLDEFKGNPKEAFSNLEAKPIWLNEDKNIAIKRVRISGVSNAEVLHTKRDHFGNEILIDGVAQPSDFVSTGNNHHVAIYIDEDGKLHDKVVSLYEAVAKVTEGLAIIDKEFNKEQGWKLLFTMKQNEMFVFPSEDFNPKEIDLRDVNNSEIVSKHLFRVQKFSKVEYGNSAVRDYVFRHHLETQLIDNKILRDTTFIVCKSLPYFNEIVKVRIDHIGKIVQVGEY

SEQ ID NO: 19136 - protein, 1385 aa, unidentified
  REGION 1..1385: note = Cas Enzyme sequence
MRRLRERHLLRRERLHRVLHILGFLPPHYDAQIDFTKRYGKFIDNTEPKIAYNNRNFIFMNSFNEMIEDFKKHQPQLFYKKSNGEESKIPYDWTIYYLRKKALSQKITQQELAWLILHFNQKRGYYQLRGEEETESPNKEVAFHSLKVVEVEAEAPNKKGEIWYTIRLENGWIYRRTSKIPLDDWKGKTRDFIVTTDLNDDGTIKVDKEGKEKRSFRAPEENDWNLLKKKTEHDIDFSGKTVGAYIYDHLLQDPNQKIKGKLVRTIERKYYKNELKAILAKQIVLQPELFTENLLVDCIRELYRKNETQQQNLLSKDFLHLFVEDIIFYQRPLRSKKSTIANCTLEKRSYIDKETNERKDIPIKVCAKSNPYYQEFRVLQWLQNLRIYEIETNREVTAEFIETAEDYEALLNFLMSQKEIDNEGLLKYFLLTKNPQIKDKAAKSELKKWLTTYRWNYVYDVADNSSKKYPMNETGYDLQRYLQKVEGLPANFLTFDTTYRLWHLLYSVKDKVEFEKALKKFAQEYQLDEASFLDSFKNFKPYPNEYGSFSEKAIKKMLPLMRFGNHWDFNRIDVSTQKRIDDLINGVANEDIRTIIREKAEKYQLNSESCFQGLPLWLAQYVVYNRHTEATDVEKWTSVSDLEAYLEDFKQHSLRNPIVEQVVTETLRVVRDIWQQYGGGQANFFDEIHIELGRELKKTAEERKQLSNRNQENENTNLRIKKLLAELKEDASIENVRPYSPVQQELLKIYEEGVFSSTDEIEEDIRKIRKKADPTTPEIQRYKLWLEQKYKSPYTGEVISLTKLFTEEYEIEHIIPQSRYYDDSLSNKVICELAVNKLKTNLLGLEFIQKHHGEKVRVAGNKEVTIFTEEQYKEFVKKHYANNLAKQQKLLLNEIPEKMVARQLNDTRYISKYISEILSKIVRSDEKDEVVNSKNVIPCTGKITTALKQDWGLNDVWNELILPRFERMNQLTQTQLFTSYNDRLQKNLPTVPMEYSQGFQKKRIDHRHHAMDALVIACATRDHINYMNNQHALDKSKDKKEKQQSRIDLRTILCEKKNNNWQFKKPWSTFTQEAKEALEHIVVSFKQNLRVINKATNYYEKWEEKNGTLVKKKVKQEGTNWAIRKPLHKETVSGKIVLDRKIGKDKILTATRKAVDITFTEKIISSITDTGIQKILLNYLKYKGSPEVAFSAEGLEELNKNIAQYNDGKKHQPIYKVRIFEEGSKFPLGETGAKTTKYVEAAKGTNLFFGVYQGKEKRTYATIPLNEVIERQKQGLPSVPERNEKGEPLLFILSPNDLVYVPMEGEIAETIDFNNLSKDQKERIYKTVSFTGNQCFFVQEAVASPIVNKMEYSPLNKMERSIVGIMIKEVCIKLKVDRLGNITKA

SEQ ID NO: 19137 - protein, 943 aa, unidentified
  REGION 1..943: note = Cas Enzyme sequence
PQEWEINYNQLEGNRTQKALYEAYLKIVEMEAHDVKNILQIKSAKDDWSLDESPLSASEIKEKVKAIFQALGICTKILYFDPLLPVKEFEKQDSYQLWHLLYSYESDDSTSGNETLYRILEKKYAFKREHATILANVALQDDYGNLSTKAIRKLYPYIKENQYSTACEKAGYKHSKLSLTTEELEARELKNIIPLLKKNALRNPVVEKILNQMINVVNALIEKNSERDAEGKITKYFHFDEIRIELARELKKNAQERYEMTQNINKAKLEHQKISEKLQKEFGIKNPTKSDITRYRLYQELAHNGYNDLYTNTYIPKELLFSKNIDIEHIVPKARVFDDSFSNKTLAFREFNIKKGESTAFDYITSLNNEEELNQYLNRVENAYKTKNISPTKYKNLLKKASEIGDGFINRDLRDTQYIAKKAKEILFQVTKNVLSTSGSITDRLREDWGLVDVMKELNMPKYQSLGLTEVEERKDGNKVTVIKDWTKRNDHRHHAMDALTVAFTKPSYIQYLNHLNARKDKNNKNYSVILAIEEKETIKVPTNNGKNKRVFIEPIPNFRQIAKKYLEEIFISHKAKNKVVTKNVNKPTGTDKQQITLTPRGQLHKETIYGKYQYYVNKEEKIGVKFDKETIAKVSNSVYREALLKRLQANDNDPKKAFAGKNALSKNPIYLDEAKTKTLPEKVNLTYLEEDFSIRKDISPDNFKDLKSIEKVIDQGVKRILIKRLQAYGNDPKKAFVDLEKNPIWLNKEKGIAIKRVTISGVNNAQPLHIGKDHLGKTTLNKEGKEIPIDYVSTGNNHHVAIYRDKEGNLQEQIVSFFEAVVRAQQGLPIVDKTYKQAEGWQFLFTMKQNEMFVFPNEATGFNPAEIDLLDPKNKKQISPNLFRVQKIATKDYFFRHHLETNVETDNILKNVTWKREGLSGLKDIVKVRMNHLGDIVSIGEY

SEQ ID NO: 19138 - protein, 1368 aa, unidentified
  REGION 1..1368: note = Cas Enzyme sequence
MKRILGLDLGTTSIGWAVIDQSEQENEKSGIVKMGVRVNPLTTDEKDNFEKGKSVTTTADRTLKRGMRRNLQRYKQRREHLIAILTRNGIITDDAVLCEDGNRTTFETYRLRAKAAKEEISLNELARVLLMINKKRGYKSNRKANNQEEGELIDGMAIARRLYNEHLTPGELTYDLLQNTSSRLIPSFYRSDLMAEFGAIWAKQQQYYPEILTDEARERMQGQSRSRTVELFKALCHVVPAEVKDRKVRMLTYYRWRTQSLHQKMELEAVATALVEVNGAISAASGYLGNISDLSKELEIAHMTVGEFLMSKLDADPHYRLKNRVFYRQDYLNEFETIWETQKRFHPELTNALKEEVRDTIIFYQRKLKSQKGLISFCEFESREIVVKTAKGNDKKVLSGSRVCPKSSPLYQEFKLWQTINNVIIYDDNANEESGFALNDNQRLVLHDALTYSKELKKSAILKILGLPAKRYRLNYDAIQGNTTQVALVEAYKKIMEWSGHDIDEFDKMTVEQKQHQLSAVFGVLGAKTDFLSFDDSQAENSAAYKLWHLLYSYEGDSSKTGTEGLLRKIEQLTGLNSEYAKALVAVTFQADYGSVSAKAIKKILPFLKQGHLYSEACELAGYRHSKNSLTRAEIDQKQLLTALEIMPCGSLRNPVVEKILNQMIHVVNGAIAQYGPFDEIHVEMARELKQTREQREKATERIAKRTKETDQIVSILKGQPFGISNPTRNDIIRYRLYEELEPLGYKTLYTSTYIAKEKLFSRDFDIEHIIPQAKLFDDSQNNKTIETRSANLEKADQTAFDYVMAKFGPQAIDDYKARVAMILDRKKRELLLTDEEHIPSGFLNRDLSDSQYIARKATELLGLVTRRVVTTTGSITARLREDWQLIDVMKELNWEKYKAVGMTEEVKNKEGHVKRIIHDWTKRNDHRHHALDALTIAFTRPSHIQLINNVNASDGKKLDQAAFAIQRKEITHSGRFIPPMPYDQLRAAVLEHMSQILVSIKAKNKVVTPSVNRIKTKGGIRRQVTLTPRAQMHNETVFGSQYQYETKIETVGAKFDAEKISTVARQDYRIALLKRLDEFGGDPKKAFTGKNSLEKNPLYADILHAVQVPAKVKTVQLIPRFTIRRPITKDLKVYKVVDKAIREILQRRLDEFGGEAAKAFTNLDDNPIWLNKEKGIAIKSVTITGVNVAMPLHDKRDKFGQLIIDEKGSTLPVDYVSTSNNHHVAIFEDVNGNWQEHIVSFFEANERAQQGLPIVDKNYNHELGWKFLFTMKRNEYFVFPDETEGFNPLELDLQDPQNLDVISRHLYRVQKLATKNYVFRHHLETNVQEDKRLKDKTWIRITSFAGLKGIVKVRVDHLGQIVAVGEY

SEQ ID NO: 19139 - protein, 1435 aa, unidentified
  REGION 1..1435: note = Cas Enzyme sequence
MKNILGLDLGTTSIGFAHIVEDENKEKSEIKELGVRIVSLTTDEQSDFEKGKSISTNANRTLKHGARLNLDRYQQRRKYLIDLLQKANLITSSSILAENGKNTTHSTWQLRAKAVTERIEKEEFARVLLAINKKRGYKSSRKAKTEDEGQAIDGMAIAKRLYDENLTPGQLSLQLLQQNKKLLPDFYHSDLQREFDLVWNFQEQFYPNILTDAFYKELQGKGKDATSKAFSKRYHFDTAENKGSKESVRLQAYQWCAEAISKQLSKEEVAYVLTEINNNLNNASGYLGAISDRSKELYFNRQTVGQYLYAQLQENRHNSLKNKVFYRQDYLDEFERIWETQASFHKELTDELKKQIRDVVIFYQRKLKSQKGLVSFCEFESKEIEIEKDGKAITKSIGARVVPKSSPLFQEFKIWQILNNVICKRKGIRKKKVSTNTTQSDLLNESSQTISGLDMKCKQLLFEELNIKGDLKSDKVLKLLGYSPQEWEINYNQLEGNRTQKSLYEAYLKIIEIEGYEVKDILQIKSTKDDWSLDESPLSASEIRERVKAIFQTLGICTKILYFDPLLPVKEFEQQDSYQLWHLLYSYESDDSTSGNETLYRILEKKYAFKREHATILANVALQDDYASLSTKAIRKIYPYIKENQYSTACELAGYKHSKLSLTTEELEARELKNIIPLLKKNALRNPVVEKILNQMINVVNALIEKNSERDAEGKITKYFHFDEIRIELARELKKNAQERYEMTQNINKAKLEHQKISEKLQKQFGIKNPTKSDIIRYRLYQELEHNGYKELYTNTYIAPDVLFSKNIDIEHIVPKARVFDDSFSNKTLAFKEFNIKKGEYTAFDYITSLNCEGEFNQYLTRVENAYKTKSISLTKYKNLLKKASEIGDGFINRDLRDTQYIAKKAKEILFQVTKNVLSTSGSITDRLREDWGLVDVMKELNMPKYQSLGLTEVEERKDGNKVTVIKDWTKRNDHRHHAMDALTVAFTKPSYIQYLNHLNARKDENNKNYSVILAIEKKETIKVPTNNGKNKRVFIEPIPNFRQVAKKHLEEIFISHKAKNKVVTKNINKPAGTDKQQITLTPRGQLHKETIYGKYQYYVNKEEKVGVKFDERTITKVSNPLYREALLKRLQANDNDPKKAFAGKNALFKKPIYLDESKTKTLPEKVNLTYLEEDFSIRKDISPDNFKDLKSIEKVIDQGVKRILIKRLQAYDNDPKKAFVDLEKNPIWLNKEKGIAIKRVTISGVSNAQPLHIGKDHLGKTTLNKEGKEIPVDYVSTGNNHHVAIYRDKEGNLQEQIVSFFEAVVRAQQGLPIIDKTYKQAEGWQFMFTMKQNEMFVFPNEATGFNPAEIDLLDPKNKKLISPNLFRVQTISIVKYGNSVVRDFKFRHHLEATLQDDKILQGITFQQIKSLEPLRNIVKVRINHLGDIVNIGEY

SEQ ID NO: 19140 - protein, 1435 aa, unidentified
  REGION 1..1435: note = Cas Enzyme sequence
MKNILGLDLGTTSIGFAHIVEDENKEKSEIKELGVRIVSLTTDEQSDFEKGKSISTNANRTLKHGTRLNLDRYQQRRKYLIDLLQKANLITPSSILAENGKNTTHSTWQLRAKAVTERIEKEEFARVLLAINKKRGYKSSRKAKTEDEGQAIDGMAIAKCLYDENLTPGQLSLQLLQQNKKLLPDFYRSDLQKEFDLVWNLQKQFYPDILTDSFYKELQGKGKDATSKAFSKRYHFDIAENKGSKESVRLQAYQWRSEAVSKQLSKEEVAYVLTEINNNLNNSSGYLGAISDRSKELYFNRQTVGQYLYAQLQENRHNSLKNKVFYRQDYLDEFERIWETQASFHKELTEELKKQIRDVVIFYQRKLKSQKGLISFCEFESKEIEIEKDGKAITKSIGARVVPKSSPLFQEFKIWQILNNVTCKRKGIRKKKSSTNPTQLDLFNEPSQTIFSLDMECKQLLFDELNLKGDLKSDKVLKLLGYSPQEWEINYNQLEGNRTQKSLYEAYLKIIEIEGYEVKDILQIKSAKDDWSLDESPLSASEIRERVKAIFQTLGICTKILYFDPLLPVKEFEQQYSYQLWHLLYSYESDDSTSGNETLYQILEKKYAFKREHARILANVALQDDYGSLSTKAIRKIYPYIKENQYSTACELAGYKHSKLSLTTEELEARELKNIIPLLKKNALRNPVVEKILNQMINVVNALIEKNSERDAEGKITKYFHFDEIRIELARELKKNAQERYEMTQNINKAKLEHQKISEKLQKQFGIKNPTKSDIIRYRLYQELEHNGYKELYTNTYIAPDVLFSKNIDIEHIVPKARVFDDSFSNKTLAFKEFNIKKGESTAFDYITSLNCEGELNQYLTRVENAYKTKSISLTKYKNLLKKASEIGDGFINRDLRDTQYIAKKAKEILFQVTKNVLSTSGSITDRLREDWGLVDVMKELNMPKYQSLGLTEVEERKDGNKVTVIKDWTKRNDHRHHAMDALTVAFTKPSYIQYLNHLNARKDENNKNYSVILAIEKKETIKVPTNNGKNKRVFIEPILNFRQVAKKHLEEIFISHKAKNKVVTKNINKPAGTDKQQITLTPRGQLHKETIYGKYQYYVNKEEKVGVKFDERTITKVSNPLYREALLKRLQANDNDPKKAFAGKNALSKNPIYLDESKTKTLPEKVNLTYLEEDFSIRKDISPDNFKDLKSIEKVIDQGVKRILIKRLQAYDNDPKKAFVDLEKNPIWLNKEKGIAIKRVTISGVSNAQPLHIGKDHLGKTTLNKEGKEIPVDYVSTGNNHHVAIYRDKEGNLQEQIVSFFEVVVRAHQGLPIIDKTYKQAEGWQFMFTMKQNEMFVFPNEATGFNPAEIDLLDPKNKKLISPNLFRVQTISIVKYGNSVVRDFKFRHHLEATLQDDKILQGITFQQIKSLEPLRNIVKVRINHLGDIVNIGEY

SEQ ID NO: 19141 - protein, 1457 aa, unidentified
  REGION 1..1457: note = Cas Enzyme sequence
MKRILGLDLGSNSIGWALVQQNFENKQGQIMAAGSRIIPMDQSILGDFEKGNTVSQTAERTAYRSTRRLRERHLLRRERLHRVLHILVFLPPHYDSQIDFSKRYGKFIDDAEPKIAYNKGNFIFMDSFNEMIEDFRKHQPQLFYKKSNSEESKIPYDWTIYYLRKKALSQKITQQELAWLILHFNQKRGYYQLRGEEEIENPNKEIAFHSLKVVEVEAETPNKKGEIWYTIRLENGWIYRRTSKIPLDDWRGKTRDFIVTTDLNDDGTIKLDKEGKEKRSFRAPDENDWNLLKKKTEHDIDFSGKTVGAYIYDHLLQNPNQKIKGKLVRTIERKYYKDELKAILTQQIALQPEFFTENLLADCIRELYRKNQTQQQNLLSKDFLHLFLEDIIFYQRPLRSKKSTIANCLLEKRSYIDKETNERKDAPIKVCAKSNPYYQEFRVLQWLQNLRIYEIETDREVTSEFIETAEDYEALFNFLMSQKEIDNEGLLKYFLLAKNPQIKDKAAKSELKKWLTIYRWNYVYDRADNSSKKYPMNETGYDLQRYLQKVEGLPANFLTFDITYQLWHLLYSVKDKVEFEKALKKFANKNQLDETSFVESFKNFKPYPNEYGSFSEKAIKKLLPLMRFGNHWDFSCIDVSTQKRIDDLINGVANDEIRTIIREKAEKFQLNNEISFQGLPLWLAQYVVYNHHAEATNIEKWTSVSDLEAYLEDFKQHSLRNPIVEQVVTETLRVVRDIWQQYGGGQANFFDEIHIELGRELKNTSKERERLSKQNQENENTNLRIKKLLAELKEDANIQNVRPYSLVQQELLKIYEEGVFSSTDKIEEDIQKIRKKAEPSKADLQRYKLWLEQKYKSPYTGEVISLTKLFTEEYEIEHIIPQSRYYDDSLSNKVICESAVNKLKTNQLGLEFIQKHHGEKVRITANKEVTIFTEEQYKEFVKKHYAGNSAKQQKLFLNEIPEKMVARQMNDTRYISKYISEILSRIVRSDEKDEGVNSKNVIPCTGKITTALKQDWGLNDVWNELILPRFERMNQLTQTQLFTSYNDRLQKNLPTVPIKYSQGFQKKRIDHRHHAMDALVIACATKEHINYMNNQHALDKSKDKKEKQQSRIDLRTILCEKKNNNWQFKKPWGTFTQEAKEALEHIVVSFKQNLRVINKATNYYEKWEEKNGVLVKKKVKQEGTNWAIRKSLHKETVSGKIVLDRKIGKDKILTATRKAVDITFTEKIISSITDTGIQKILLNYLKYKGSPEVAFSAEGLEELNKNIAQYNDGKKHQPIYKVRIFEEGSKFPLGETGAKATKYVEAAKGTNLFFGVYQGKGKRTYATIPLNEVIERQKQGLSSVPERNEKEEPLLFSLSPNDLVYVPMLGESTETIDFSNLSKEQKERIYKTVSFTGNECHFVKSTIASLIKSYDAKSKIGELGSLNKLEVTISGDSRIKEVCIKLKVDRLGNITKA

SEQ ID NO: 19142 - protein, 1432 aa, unidentified
  REGION 1..1432: note = Cas Enzyme sequence
MKNILGLDLGTTSISFAHIVEDENKEKSEIKELGVRIVSLTTDEQSDFEKGKSITTNANRTLKHGARLNLDRYQQRRKYLIDLLQKANLITSSSILAENGKNTTHSTWQLRAKAVTERVEKEEFARVLLAINKKRGYKSSRKAKTEDEGQAIDGMAIAKRLYDENLTPGQLSLQLLQQNKKLLSDFYRSDLQREFDLVWNFQKQFYPDILTDSFYKELQGKGKDATSKGFSKRYHFDIAENKGSKESVRLQAYQWRAEAISKQLSKEEVAYVLTEINNNLNNASGYLGAISDRSKELYFNRQTVGQYLYAQLQENRHNSLKNKVFYRQDYLDEFERIWETQASFHKELTEELKKQIRDVVIFYQRKLKSQKGLISFCEFESKEIEIEKDGKTITKSIGARVVPKSSPLFQEFKIWQILNNVTCKRKGIRKKKSSAKSTELDLFNESSQAIFSLDMECKQLLFDELNLKGDLKSDKVLKLLGYSPQEWEINYNQLEGNRTQKALYEAYLKIVEMEAHDVKNILQIKSAKDDWSLDESPLSASEIKEKVKDIFQALGICTKILYFDPLLPVKEFEKQDSYQLWHLLYSYESDDSTSGNETLYRILEKKYAFKREHARILANVALQDEYGSLSTKAIRKIYPNIKENQYSTACEMAGYKHSKLSLTTEELEARELKNIIPLLKKNALRNPVVEKILNQMINVVNALIEKNSERDAEGKITKYFHFDEIRIELARELKKNAQKRYEMNQNINKAKLEHQKISEILQKQFGIKNPTKSDIIRYRLYQELEHNGYKELYTNAPIARDMLFSKNIEIEHIVPKARVFDDSFSNKTLTFHRINSDKGEYTAFDYITSLNSEEELNQYLTRVENAYKTKSISPAKYKNLLKKASEIGDGFINRDLRDTQYIAKKAKEILFQVTKNVLSTSGSITDRLREDWGLVDVMKELNMPKYQSLGLTEVEERKDGNKVTVIKNWTKRNDHRHHAMDALTVAFTKPSYIQYLNHLNARKEENNKNYSVILAIEEKETIKVPTNNGKNKRVFIEPIPNFRQVAKKHLEEIFILHKAKNKVVTKNVNKPAGTDKQQITLTPRGQLHKETIYGKYQYYVNKEEKIGVKFDKETIAKVSNPVYREALLKRLQANDNDPKKAFTGKNALSKKPIYLDESKTKTLPEKVNLTYLEEDFSVRKKIVPKNPTSKEFVPNLTSIEKVVDEGVKHILIERLRAYNNDPEKAFVDLEKNPIWLNKEKGIAIKRVTISGVSNAQPLHIGKDHLGKTTLNKEGNEIPVDYVSTGNNHHVAIYRDKEGNLQEQIVSFFEAVVRAQQGLPIIDKTYKQEEGWQFLFTMKQNEMFVFPNEATRFNPAEIDLLDPKNKKLISPNLFRVQKIATKDYFFRHHLETNVETDNVLKNTTWKREGLSGLKDIVKVRVNHLGDIVSIGEY

SEQ ID NO: 19143 - protein, 1426 aa, unidentified
  REGION 1..1426: note = Cas Enzyme sequence
MKNILGLDLGTTSIGFTHIVEDENKEKSEIKELGVRIVSLTTDEQSDFEKGKSISTNANRTLKHGARLNLDRYQQRRKFLIDLLQKANLTTPSSILAENGKNTTHSTWQLRAKAVTERIEKEEFARILLAINKKRGYKSSRKAKTEDEGQAIDGMAIAKRLYDENLTPGQLSLQLLQQNKKLLPDFYRSDLQREFDLVWNFQKQFYPDILTDSFYKELQGKGKDATSKAFSKRYHFDTAENKGSKESVRLQAYQWRAEAISKQLSKEEVAYVLTEINNNLNNASGYLGAISDRSKELYFNRQTVGQYLYAQLQENRHNSLKNKVFYRQDYLDEFERIWETQASFHKELTEELKKQIRDVVIFYQRKLKSQKGLISFCEFESKEIEIEKDGKTITKSIGARVVPKSSPLFQEFKIWQILNNVTCKRKGIRKKKSSAKSTELDLFNEPSQTIFSLDMECKQLLFEELNLKGDLKSDKVLKLLGYSPQEWEINYNQLEGNRTQKALYEAYLKIVEMEAHDVKDILQIKSAKDDWSLDESPLSASEIKEKVKDIFQALGICTKILYFDPLLPVKEFEEQDSYQLWHLLYSYESDDSTSGNETLYRILEKKYAFKREHARILANVALQDDYGSLSTKAIRKIYPNIKENQYSTACEKAGYKHSKLSLTTEELEARELKNIIPLLKKNALRNPVVEKILNQMINVVNALIEKNSERDAEGKITKYFHFDEIRIELARELKKNAQKRYEMTQNINKAKSEHQKISEILQKQFGIKNPTKSDIIRYRLYQELEHNDYKELYTNAPIARDMLFSKNIEIEHIVPKARVFDDSFSNKTLTFHRINSNKGEYTAFDYITSLNSEEELNQYLTRVENAYKTKSISPAKYKNLLKKASEIGDDFINRDLRDTQYIAKKAKEILFQVTKNVLSTSGSITDRLREDWGLVDVMKELNMPKYQSLGLTEIIERRDGRKVEVIKDWTKRNDHRHHAMDALTVAFTKPSYIQYLNHLNARKDENNKLYTDILGIERKETTKIHDENGNEKRVFIEPIPNFRQVAKKHLEEIFISHKAKNKVVTKNVNKPAGTDKQQITLTPRGQLHKETIYGKYQYYVNKEEKIGVKFDKETIAKVSNPLYREALLKRLQANDNDPKKAFTGKNALSKNPIFLDESKTKTLPEKVNLTYLEEDFSIRKDISPDNFKDLKSIEKVIDQGVKRILIKRLQAYGNDPKKAFVDLEKNPIWLNKERGIAIKRVTISGVNNAQPLHIGKDHLGKTTFNKEGKEIPVDYVSTGNNHHVAIYRDKEGNLQEQIVSFFEAVVRAQQGLPIVDKTYKQAEGWQFLFTMKQNEMFVFPNEATGFNPAEIDLLDPKNKKQISPNLFRVQKIATKDYFFRHHLETNVETDNILKNVTWKREGLSGLKDIVKVRMNHLGDIVSIGEY

SEQ ID NO: 19144 - protein, 1435 aa, unidentified
  REGION 1..1435: note = Cas Enzyme sequence
MKNILGLDLGTTSIGFAHIVEDENKEKSEIKELGVRIVSLTTDEQSDFEKGKSISTNANRTLKHGARLNLDRYQQRRKYLIDLLQKANLITPSSILAENGKNTTHSTWQLRAKAVTERIEKEEFARVLLAINKKRGYKSSRKAKTEDEGQAIDGMAIAKCLYDENLTPGQLSLQLLQQNKKLLPDFYRSDLQKEFDLVWNLQKQFYPDILTDSFYKELQGKGKDATSKAFSKRYHFDTAENKGSKESVRLQAYQWRAEAISKQLSKEEVAYVLTEINNNLNNASGYLGAISDRSKELYFNRQTVGQYLYAQLQENRHNSLKNKVFYRQDYLDEFERIWETQASFYKELTDELKKQIRDVVIFYQRKLKSQKGLVSFCEFESKEIEIEKDGKAITKSIGARVVPKSSPLFQEFKIWQILNNVICKRKGIRKKKVSAKTTQSDLLNESSQTIFGLDMKCKQLLFEELNLKGDLKSDKVLKLLGYSPQEWEINYNQLEGNRTQKSLYEAYLKIIEIEGYEVKDILQIKSTKDDWSLDESPLSASEIRERVKAIFQTLGICTKILYFDPLLPVKEFEQQYSYQLWHLLYSYESDDSTSGNETLYRILEKKYAFKREHATILANVVLQDDYGSLSTKAIRKIYPYIKENQYSTACELAGYKHSKLSLTTEELEARELKNIIPLLRKNVLRNPVVEKILNQMINVVNALIEKNSERDAKGEITKYFHFDEIRIELARELKKNAQERYEMTQNINKAKLEHQKISEKLQKQFGIKNPTKSDIIRYRLYKELEHNGYKELYTNAYIAPDVLFSKNIDIEHIVPKARVFDDSFSNKTLAFKEFNIKKGESTAFDYITSLNCEGELNQYLTRVENAYKTKSISLTKYKNLLKKASEIGDGFINRDLRDTQYIAKKAKEILFQVTKNVLSTSGSITDRLREDWGLVDVMKELNMPKYQSLGLTEVEERKDGNKVTVIKDWTKRNDHRHHAMDALTVAFTKPSYIQYLNHLNARKDENNKNYSVILAIEKKETIKVPTNNGKNKRVFIEPIPNFRQVAKKHLEEIFISHKAKNKVVTKNINKPAGTDKQQITLTPRGQLHKETIYGKYQYYVNKEEKVGVKFDERTITKVSNPLYREALLKRLQANDNDPKKAFAGKNALSKNPIYLDESKTKTLPEKVNLTYLEEDFSIRKDISPDNFKDLKSIEKVIDQGVKRILIKRLQAYDNDPKKAFVDLEKNPIWLNKEKGIAIKRVTISGVSNAQPLHIGKDHLGKTTLNKEGKEIPVDYVSTGNNHHVAIYQDKDGNLQEQIVSFFDAVVRAQQRLPIVDKTYKQAEGWQFMFTMKQNEMFVFPNEATGFNPAEIDLLDPKNKKLISPNLFRVQTISVVKYGNSVVRDFKFRHHLEATLQDDKILQGITFQQIKSLEPLRNIVKVRINHLGDIVNIGEY

SEQ ID NO: 19145 - protein, 1496 aa, unidentified
  REGION 1..1496: note = Cas Enzyme sequence
MFSQRNHPYCELLSNSVAKVGIIFLMCKYFYIKNFITFVLSKNIIPMKHILGLDLGSNSIGWAFVQQDFGNKQGRIIATGSRIIPMDQGILGDFERGNTVSQTAERTTYRSTRRLRERHLLRRERLHRVLHILGFLPPHYDAQIDFTKRYGKFIDNAEPKIAYNNGNFIFMNSFKEMIEDFKKHQPQLFYKKSNGEESKIPYDWTIYYLRKKALSQKITQQELAWLILHFNQKRGYYQLRGEEETENPNKEVAFHSLKVVDVEAEAPNKKGEIWYTIRLENGWIYRRTSKIPLDDWKGKTRDFIVTTDLNDDGTIKLDKEGKEKRSFRAPDENDWNLLKKKTEHDIDFSGKTVGAYIYDHLLQNPNQKIKGKLVRTIERKYYKDELKAILAKQIALQPELFTETLLADCIRELYRKNETQQQNLLSKDFLHLFVEDIIFYQRPLRSKKSTIANCTLERRSYIDKETNERKNAPIKVCAKSNPYYQEFRVLQWLQNLRIYEIETDREVTAEFIETAQDNEALFNFLMSQKEIDNESLLKYFLFAKNPQIKDKVAKSELKKWLTTYRWNYVYDAADNSSKKYPMNETGYDLQRYLQKVEGLPANFLTFDTTYRLWHLLYSVKDKVEFEKALKKFAQEYQLDEASFVDSFKNFKPYPNEYGSFSEKAIKKLLPLMRFGNHWDFNRIDVSTQKRIDDLINGVANEDIRTIIREKAEKYQLNSESCFQGLPLWLTQYVVYNRHAESTDIEKWTSVNDLEAYLEDFKQHSLRNPIVEQVVTETLRVVRDVWQQYGRGQANFFDEIHIELGRELKKTAEERKQLSDKNQENENTNLRIKKLLAELKGDASIQNVRPYSLVQQELLKIYEEGVFSATDEVEEDIQKIRKKAEPTTPEIQRYKLWLEQKYKSPYTGEVISLTKLFTEEYEIEHIIPQSRYYDDSLSNKVICESAVNKLKTNQLGLEFIQNHHGEKVRITANKEVIIFTEEQYKEFVKKHYANNSAKQQKLLLNEIPEKMVARQLNDTRYISKYISEILSKIVRSDEKDEGVNSKNIIPCTGKITTALKQDWGLNDVWNELILPRFERMNQLTQTQLFTSYNDRLQKNLPTVPIEYSQGFQKKRIDHRHHAMDALVIACATREHINYMNNQHALDKSKDKKEKQQSRIDLRTILCEKKNNNWQFKKPWSTFTQEAKEALEHIVVSFKQNLRVINKATNYYEKWEEKNGILVKKKVKQEGTNWAIRKPLHKETVSGKIVLNRKIGKDKILTATRKAVDITFTEKIISSITDTGIQKILLNYLKYKGSPEVAFSAEGLEELNKNIAQYNDGKKHQPIYKVRIFEEGSKFPLGETGAKATKYVEAAKGTNLFFGVYQGKGKRTYATIPLNEVIERQKQGLPSVPERNEKGEPLLFSLSPNDLVYVPMEGEIAETIDFNNLSKEQKERIYKTVSFTGNQCFFVQEAVATPIVNKMEYSPLNKMERDILGTMIKEVCIKLKVDRLGNITKA

SEQ ID NO: 19146 - protein, 1144 aa, unidentified
  REGION 1..1144: note = Cas Enzyme sequence
MKNILGLDLGTTSISFAHIVEDENKQKSEIKELGVRIVSLTTDEQSDFEKGKSITTNANRTLKHGARLNLDRYKQRRKYLIDLLQKANLITPSSILAENGKNTTHSTWQLRAKAVTERVEKEEFARILLAINKKRGYKSSRKAKTEDEGQAIDGMAIAKRLYDENLTPGQLSLQLLQQNKKLLPDFYRSDLQKEFDLVWNFQKQFYPDILTDSFYKELQGKGKDATSKAFSKRYHFDTAENKGSKESVRLQAYQWRAEAVSKQLSKEEVAYVLTEINNNLNNASGYLGAISDRSKELYFNRQTVGQYLYAQLQENRHNSLKNKVFYRQDYLDEFECIWETQASFHKELTEELKKQIRDVVIFYQRKPKSQKGLISFCEFESKEIEIEKDGKTITKSIGARVVPKSSPLFQEFKIWQILNNVICKRKGIRKKKISAKTTQLDLLNESSQTIFSLDMECKQLLFDELNLKGDLKSDKVLKLLGYSPQEWEINYNQLEGNRTQKALYEAYLKIVEMEAHDVKDILQIKSAKDDWSLDESPLSASEIRESVKAIFQALGICTKILYFDPLLPVKEFEKQDSYQLWHLLYSYESDDSTSGNETLYRILEKKYAFKREHARILANVALQDDYGSLSTKAIRKIYPNIKENQYSTACEKAGYKHSKLSLTTEELEARELKNIIPLLKKNALRNPVVEKILNQMINVVNALIEKNSERDAEGKITKYFHFDEIRIELARELKKNAQKRYEMTQNINKAKSEHQKISEILQKQFGIKNPTKSDIIRYRLYQELEHNGYKELYTNAPIARDMLFSKNIEIEHIVPKARVFDDSFSNKTLTFHRINSDKGEYTAFDYITSLNSEEELNQYLTRVENAYKTKSISPAKYKNLLKKASEIGDDFINRDLRDTQYIAKKAKEILFQVTKNVLSTSGSITDRLREDWGLVDVMKELNMPKYQSLGLTEVEERKDGNKVTVIKNWTKRNDHRHHAMDALTVAFTKPSYIQYLNHLNARKDENNENYSVILAIEEKETTKIHDENGNEKRVFIEPIPNFRQVAKKHLEEIFISHKAKNKVVTKNVNKPAGTDKQQITLTPRGQLHKETIYGKYQYYVNKEEKIGVKFDKETIAKVSNPLYREALLKRLQANDNDPKKSLYR

SEQ ID NO: 19147 - protein, 1426 aa, unidentified
  REGION 1..1426: note = Cas Enzyme sequence
MKNILGLDLGTTSISFAHIVEDENKEKSEIKELGVRIVSLTTDEQSDFEKGKSITTNANRTLKHGARLNLDRYQQRRKYLIDLLQKANLITSSSILAENGKNTTHSTWQLRAKAVTERIEKEEFARVLLAINKKRGYKSSRKAKTEDEGQAIDGMAIAKRLYDENLTLGQLSLQLLQQNKKLLPDFYRSDLQREFDLVWNFQKQFYPDILTDSFYKELQGKGKDATSKAFSKRYHFDTAENKGSKESICLQAYQWRAEAISKQLSKEEVAYVLTEINNNLNNASGYLGAISDRSKELYFNRQTVGQYLYAQLQENRHNSLKNKVFYRQDYLDEFERIWETQALFHKELTDELKKQIRDVVIFYQRKPKSQKGLISFCEFESKEIEIEKDGKTITKNIGARVVPKSSPLFQEFKIWQILNNVTCKRKGIRKKKSSAKTTQLDLLNESSQTIFSLDMECKQLLFDELNLKGDLKSDKVLKLLGYSPQEWEINYNQLEGNCTQKALYEAYLKIVEMEAHDVKDILQIKSAKDDWSLDESPLSASEIREKVKAIFQTLGICTKILYFDPLLPVKEFEEQDSYQLWHLLYSYESDDSTSGNETLYRILEKKYAFKREHARILANVALQDDYGSLSTKAIRKIYPNIKENQYSTACEKAGYKHSKLSLTTEELEARELKNIIPLLKKNALRNPVVEKILNQMINVVNALIEKNSERDAEGKITKYFHFDEIRIELARELKKNAQKRYEMTQNINKAKLEHQKISEILQKEFGIKNPTKSDIIRYRLYQELEHNGYKELYTNAPIARDMLFSKNIEIEHIVPKARVFDDSFSNKTLTFHRINSDKGEYTAFDYITSLNSEEELNQYLTRVENAYKTKSISPAKYKNLLKKASEIGDDFINRDLRDTQYIAKKAKEILFQVTKNVLSTSGSITDRLREDWGLVDVMKELNMPKYQSLGLTEIIERRDGRKVEVIKDWTKRNDHRHHAMDALTVAFTKPSYIQYLNHLNARKDENNKLYTDILGIERKETTKIHDENGNEKRVFIEPIPNFRQVAKKHLEEIFISHKAKNKVVTKNVNKPAGTDKQQITLTPRGQLHKETIYGKYQYYVNKEEKIGVKFDKETIAKVSNPVYREALLKRLQANDNDPKKAFTGKNALSKNPIYLDETKTKTLPEKVNLTYLEEDFSIRKDISPDNFKDLKSIEKVIDQGVKRILIKRLQAYGNDPKKAFVDLEKNPIWLNKEKGIAIKRVTISGVNNAQPLHIGKDHLGKTTLNKEGKEIPVDYVSTGNNHHVAIYRDKEGNLQEQIVSFFEAVVRTQQGLPIIDKTYKQEEGWQFLFTMKQNEMFVFPNATTGFNPAEIDLLDPKNKKLISPNLFRVQKIATKDYFFRHHLETNVETDNVLKNTTWKREGLSGLKDIVKVRMNHLGDIVSIGEY

SEQ ID NO: 19148 - protein, 1450 aa, unidentified
  REGION 1..1450: note = Cas Enzyme sequence
MKRILGLDLGSNSIGWALVQQDFENKQGKIMATGSRIIPMDQSILGDFEKGNTVSQTAERTTYRSIRRLRERHLLRRERLHRVLHILGFLPPHYDAQIDFSKRYGKFIDNTEPKIAYNNGNFIFTNSFNEMIEDFKKHQPQLFYKKSNGEESKIPYDWTIYYLRKKALSQKITQQELAWLILHFNQKRGYYQLRGEEETESPNKEVAFHSLKVVEVEAEAPNKKGEIWYTIRLENGWIYRRTSKIPLDDWKGKTRDFIVTTDLNDDGTIKVDKEGKEKRSFRAPEENDWNLLKKKTEHDIDFSGKTVGAYIYDHLLQDPNQKIKGKLVRTIERKYYKNELKAILTKQIALQPELFTKNLLADCIRELYRKNETQQQNLLLKDFLHLFVEDIIFYQRPLRSKKSTIANCTLEKRSYIDKETNERKDTPIKVCAKSNPYYQEFRVLQWLQNLRIYEIGTDREVTAEFIETPQDYEALFNFLMSQKEIDNESLLKYFLLAKNPQIKDKAAKSELKKWITTYRWNYVYDVADNSSKKYPMNETGYDLQRYLQKVEGLPANFLTFDTTYRLWHLLYSVKDKVEFEKALKRFAKKKQLNETSFIESFKNFKPYPNEYGSFSEKAIKKLLPLMRFGNHWDFNRIDVSTQKRIDDLINGVANENIRTIIREKAEKYQLNSESCFQGLPLWLAQYVVYNRHAEATDIEKWTSVSDLEAYLEDFKQHSLRNPIVEQVVTETLRVVRDIWQQYGGGQANFFDEIHIELGRELKKTAEERKQLSNRNQENENTNLRIKKLLAELKEDASIQNVRPYSPVQQELLKIYEEGVFSSTDEIEEDIQKIRKKADPTTPEIQRYKLWLEQKYKSPYTGEVISLTKLFTEEYEIEHIIPQSRYYDDSFSNKVICESAVNKLKTNLLGLEFIQKHHGEKVRVAGNKEVTIFTEEQYKDFVKKHYANNLAKQQKLLLDEIPEKMVARQLNDTRYISKYISEILSKIVRSDEKDEGVNSKNVIPCTGKITTALKQDWGLNDVWNELILPRFERMNQLTQTQLFTSYNDRYQKNLPTVPIQYSQGFQKKRIDHRHHAMDALVIACATREHINYMNNQHALDKSKDKKEKQQSRIDLRTILCEKKNNNWQFKKPWSTFTQEAQEALEHIVVSFKQNLRVINKATNYYEKWEEKNGVLVKKKVKQEGTNWAIRKPLHKETVSGKIVLDRKIGKDKILTATRKAVDITFTEKIISSITDTGIQKILLNYLKYKGSPEVAFSAEGLEELNKNIAQYNEGKKHQPIYKVRIFEEGSKFPLGETSAKATKFVEAAKGTNLFFGVYQGKEKRSYATIPLNEVIERQKQGLPSVPERNEKGEPLLFSLSPNDLVYVPMEGEATETIDFNNLSKEQKERIYKTVSFTGNQCFFVQEAVASPIVNKMEYSPLNKMERSIVGIMIKEVCIKLKVDRLGNITKA

SEQ ID NO: 19149 - protein, 1426 aa, unidentified
  REGION 1..1426: note = Cas Enzyme sequence
MKNILGLDLGTTSISFAHIVEDENKQKSEIKELGVRIVSLTTDEQSDFEKGKSITTNANRTLKHGARLNLDRYQQRRKYLIDLLQKANLITSSSILAENGKNTTHSTWQLRAKAVTERIEKEEFARVLLAINKKRGYKSSRKAKTEDEGQAIDGMAIAKRLYDENLTPGQLSLQLLQQNKKLLPDFYRSDLQREFDLVWNFQKQFYPDILTDSFYKELQGKGKDATSKAFSKRYHFDTAENKGSKESVRLQAYQWRAEAMSKQLSKEEVAYVLTEINNNLNNASGYLGAISDRSKELYFNRQTVGQYLYAQLQENRHNSLKNKVFYRQDYLDEFERIWETQASFHKELTDELKEQIRDVVIFYQRKPKSQKGLISFCEFESKEIEIEKDGKTITKSIGARVVPKSSPLFQEFKIWQILNNVTCKRKGIRKKKSSAKSTELDLFNESSQTIFSLDMECKQLLFDELNLKGDLKSDKVLKLLGYSPQEWEINYNQLEGNRTQKALYEAYLKIVEMEAHDVKDILQIKSAKDDWSLDESPLSASEIKEKVKDIFQALGICTKILYFDPLLPVKEFEEQDSYQLWHLLYSYESDDSTSGNETLYRILEKKYAFKREHARILANVALQDDYGSLSTKAIRKIYPYIKENQYSKACELAGYKHSKLSLTTEELEARELKNIIPLLKKNALRNPVVEKILNQMINVVNALIEKNSERDAEGKITKYFHFDEIRIELARELKKNAQKRYEMTQNINKAKLEHQKISEILQKKFGIKNPTKSDIIRYRLYQELEHNGYKELYTNAPIARDMLFSKNIEIEHIVPKARVFDDSFSNKTLAFREFNIKKGESTAFDYITSLNSEEELNQYLTRVENAYKTKSISLTKYKNLLKKASEIGDGFINRDLRDTQYIAKKAKEILFQVTKNVLSTSGSITDRLREDWGLVDVMKELNMPKYQSLGLTEVEERKDSNKVTVIKNWTKRNDHRHHAMDALTVAFTKPSYIQYLNHLNARKDENNKNYSVILAIEEKETIKVPTNNGKNKRVFIEPIPNFRQVAKKHLEEIFISHKAKNKVVTKNVNKPAGTDKQQITLTPRGQLHKETIYGKYQYYVNKGEKIGVKFDKETIAKVSNPVYREALLKRLQANDNDPKKAFTGKNALSKKPIYLDEAKTKTLPEKVNLTYLEEDFSIRKDISPDNFKDLKSIEKVIDQGVKRILIKRLQAYGNDPKKAFVDLEKNPIWLNKEKGIAIKRVTISGVNNAQPLHIGKDHLGKTTLNKEGKEIPVDYVSTGNNHHVAIYRDKEGNLQEQIVSFFEAVVRTQQGLPIIDKTYKQEEGWQFLFTMKQNEMFVFPNATTGFNPAEIDLLDPKNKKLISPNLFRVQKIATKDYFFRHHLETNVETDNVLKNTTWKREGLSGLKDIVKVRMNHLGDIVSIGEY

SEQ ID NO: 19150 - protein, 1476 aa, unidentified
  REGION 1..1476: note = Cas Enzyme sequence
MFSQRNNPYCELLSNCATKVSIIFLMCKSFLIYFYFSFLLVIFASPNYKTMKNILGLDLGTTSISFAHIVEDENKEKSEIKELGVRIVSLTTDEQSDFEKGKSITTNANRTLKHGARLNLDRYQQRRKYLIDLLQKANLITSSSILAENGKNTTHSTWQLRAKAVTERIEKEEFARILLAINKKRGYKSSRKAKTEDEGQAIDGMAIAKRLYDENLTPGQLSLQLLQQNKKLLPDFYRSDLQREFDLVWNFQKQFYPDILTDTFYKELQGKGKDATSKAFSKRYHFDTAENKGSKESVRLQAYQWRAEAISKQLSKEEVAYVLTEINNNLNNASGYLGAISDRSKELYFNRQTVGQYLYAQLQENRHNSLKNKVFYRQDYLDEFERIWETQASFHKELTEELKKQIRDVVIFYQRKLKSQKGLISFCEFESKEIEIEKDGKTITKSIGARVVPKSSPLFQEFKIWQILNNVTCKRKGIRKKKSSAKSTELDLFNESSQAIFSLDMECKQLLFDELNLKGDLKSDKVLKLLGYSPQEWEINYNQLEGNRTQKALYEAYLKIVEMEAHDVKDILQIKSAKDDWSLDESPLSASEIKEKVKDIFQALGICTKILYFDPLLPVKEFEKQDSYQLWHLLYSYESDDSTSGNETLYRILEKKYAFKREHARILANVALQDEYGNLSTKAIRKLYPYIKENQYSTACKKAGYKHSKLSLTTEELEARELKNIIPLLKKNALRNPVVEKILNQMINVVNALIEKNSERDAEGKITKYFHFDEIRIELARELKKNAQERYEMTQNINKAKLEHQKISEILQKEFGIKNPTKSDITRYRLYQELAHNGYNDLYTNTCIPKELLFSKNIDIEHIVPKARVFDDSFSNKTLAFREFNIKKGESTAFDYITSLNNEEELNQYLNRVENAYKTKNISPAKYKNLLKKASEIGDGFINRDLRDTQYIAKKAKEILFQVTKNVLSTSGSITDRLREDWGLVDVMKELNMPKYQSLGLTEVEERKEGNKVTVIKNWTKRNDHRHHAMDALTVAFTKPSYIQYLNHLNARKDENNKNYSVILAIEEKETIKVPTNNGKNKRVFIEPIPNFRQVAKKHLEEIFISHKAKNKVVTKNVNKPAGTDKQQITLTPRGQLHKETIYGKYQYYVNKEEKVGVKFDERTITKVSNPLYREALLKRLQANDNDPKKAFTGKNALSKNPIYLDETKTKTLPEKVNLTYLEEDFSIRKDISPDNFKDLKSIEKVIDQGVKRILIKRLQDYDNDPKKAFVDLEKNPIWLNKEKGIAIKRVTISGVNNAQPLHIGKDHLGKTTLNKEGKEIPVDYVSTGNNHHVAIYRDKEGNLQEQIVSFFEAVVRTQQGLPIIDKTYKQEEGWQFLFTMKQNEMFVFPNATTGFNPAEIDLLDPKNKKQISPNLFRVQKIATKDYFFRHHLETNVETDNVLKNTTWKREGLSGLKDIVKVRINHLGDIVSIGEY

SEQ ID NO: 19151 - protein, 1450 aa, unidentified
  REGION 1..1450: note = Cas Enzyme sequence
MKHILGLDLGSNSIGWAFVQQDFENKQGKIIATGSRIIPMDQGILGDFEKGNTVSQTAERTTYRSMRRLRERHLLRRERLHRVLHILGFLPPHYDAQIDFTKRFGKFIDNAEPKIAYNNGNFIFMNSFNEMIEDFKKYKPQLFYKKSNGEESKIPYDWTIYYLRKKALSQKITQQELAWLILHFNQKRGYYQLRGEEETENPNKEVAFHSLKVVEVEAEAPNKKGEIWYTIRLENGWIYRRTSKIPLDDWKGKTRDFIVTTDLNDDGTIKVDKEGKEKRSFRAPEENDWNLLKKKTEHDIDFSGKTVGAYIYDHLLQDPNQKIKGKLVRTIERKYYKNELKGILTKQIALQPELFTETLLADCIRELYRKNETQQQNLLSKDFLHLFVEDIIFYQRPLRSKKSTIANCTLEKRSYIDKETNERKDAPIKVCAKSNPYYQEFRALQWLQNLRIYEIETDREVTAEFIETPQDYEALFNFLMSQKEIDNESLLKYFLHAKNPQIKDKAAKSELKKWLTTYRWNYVYDVADNSSKKYPMNETGYDLQRYLQKVEGLPANFLTFDTTYRLWHLLYSVKDKVEFEKALKRFAKKKQLNETSFVESFKNFKPYPNEYGSFSEKAIKKLLPLMRFGNHWDFNRIDVSTQKRIDDLINGVANEDIRTIIREKAEKYQLNSESCFQGLPLWLAQYIVYNRHAEATDIEKWTSVSDLETYLEDFKQHSLRNPIVEQVVTETLRVVRDIWQQYGGGQANFFDEIHIELGRELKKTAEERKQLSNRNQENENTNLRIKKLLAELKEDASIQNVLPYSPVQQELLKIYEEGVFSSTDEIEEDIQKIRKKTEPSKADLQRYKLWLEQKYKSPYTGEVISLTKLFTEEYEIEHIIPQSRYYDDSFSNKVICESAVNKLKTNLLGLEFIQKHHGEKVRVAGNKEVTIFTEEQYKDFVKKHYANNLAKQQKLLLNEIPEKMVARQLNDTRYISKYISEILSKIVRSDEKDEGVNSKNVIPCTGKITTALKQDWGLNDVWNELILPRFERMNQLTQTQLFTSYNDRLQKNLPTVPIEYSQGFQKKRIDHRHHAMDALVIACATREHINYMNNQHALDKNKDKKEKQQSRIDLRTILCEKKNNNWQFKKPWATFTQEAKESLEHIVVSFKQNLRVINKATNYYEKWEEKNGVLVKKKVKQEGTNWAIRKPLHKETVSGKIILDRKISKDKILTATRKTVDITFTEKIISSITDTGIQKILLNYLKYKGSPEVAFSAEGLEELNKNIAQYNEGKKHQPIYKVRIFEEGSKFPLGETGAKATKFVEAAKGTNLFFGVYQGKEKRSYTTIPFNKVIERQKQGLPSVPEHNEKGEPLLFILSPNDLVYVPMEGEIAETIDFNNLSKEQKERIYKTVSFTGNQCFFVQEAVATPIVNKMEYSPLNKMERNIVGTMIKEVCIKLKVDRLGNITKA

SEQ ID NO: 19152 - protein, 1435 aa, unidentified
  REGION 1..1435: note = Cas Enzyme sequence
MKNILGLDLGITSISFAHIVEDENKEKSEIKELGVRIVSLTTDEQSDFEKGKSITTNANKTLKHGARLNLDRYQQRRKYLIDLLQKANLITLSSILAENGKNTTHSTWQLRAKAVTERIEKEEFARVLLAINKKRGYKSSRKAKTEDEGQAIDGMAIAKCLYDENLTPGQLSLQLLQQNKKLLLDFYRSDLQKEFDLVWNLQKQFYPDILTDSFYKELQGKGKEATSKAFSKRYHFDTAENKGSKESVRLQAYQWRAEAISKQLSKEEVAYVLTEINNNLNNASGYLGAISDRSKELYFNRQTVGQYLYAQLQENRHNSLKNKVFYRQDYLDEFERIWETQASFHKELTDELKKQIRDVVIFYQRKLKSQKGLVSFCEFESKEIEIEKDGKAITKSIGARVVPKSSFLFQEFKIWQILNNVTCKRKGIRKKKSSTNPTQLDLFNEPSQTIFSLDMECKQLLFEELNIKGDLKSDKVLKLLGYSPQEWEINYNQLEGNRTQKSLYEAYLKIIEIEGYEVKDILQIKSTKDDWSLDESPLSASEIRERVKAIFQTLGICTKILYFDPLLPVKEFEQQYSYQLWHLLYSYESDDSTSGNETLYRILEKKYAFKREHATILANVVLQDDYGSLSTKTIRKIYPYIKENQYSTACELAGYKHSKLSLTTEELEARELKNIIPLLKKNALRNPVVEKILNQMINVVNALIEKNSERDAEGKITKYFHFDEIRIELARELKKNAQERYEMTQNINKAKLEHQKISEKLQKQFGIKNPTKSDIIRYRLYKELEHNGYKELYTNTYIAPDVLFSKNIDIEHIVPKARVFDDSFSNKTLAFKDFNIKKGEYTAFDYITSLNNEEKLNQYLTRVENAYKTKSISLTKYKNLLKKASEIGDGFINRDLRDTQYIAKKAKEILFQVTKNVLSTSGNITDRLREDWGLVNVMKELNMPKYQSLGLTEVEERKDGNKVTVIKDWTKRNDHRHHAMDALTVAFTKPSYIQYLNHLNARKDENNKNYLVILAIEKKETIKVPTNNGKNKRVFIEPIPNFRQVAKKYLEEIFISHKAKNKVVTKNINKPAGTDKQQITLTPRGQLHKETIYGKYQYYVNKEEKVGVKFDERTITKVSNPLYREALLKRLQANDNDPKKAFTGKNALSKKPIYLDEAKTKTLPEKVNLTYLKEDFSIRKDISPDNFKDLKSIEKVIDQGVKRILIKRLQAYGNDPKKAFVDLEKNPIWLNKEKGIAIKRVTISGVNNAQPLHIGKDHLGKTTLNKEGKEIPIDYVSTGNNHHVAIYRDKEGNLQEQIVSFFEAVVRAQQGLPIVDKTYKQAEGWQFLFTMKQNEMFVFPNEATGFNPAEIDLLDPKNKKLISPNLFRVQTISVVKYGNSVVRDFKFRHHLEATLQDDKILQGITFQQIKSLEPLRNIVKVRINHLGDIVNVGEY

SEQ ID NO: 19153 - protein, 1119 aa, unidentified
  REGION 1..1119: note = Cas Enzyme sequence
LYAQLQENRHNSLKNKVFYRQDYLDEFERIWETQASFHKELTEELKKQIRDVVIFYQRKLKSQKGLISFCEFESKEIEIEKDGKTITKSIGARVVPKSSPLFQEFKIWQILNNVTCKRKGIRKKKSSAKSTELDLFNEPSQTIFSLDMECKQLLFEELNLKGDLKSDKVLKLLGYSPQEWEINYNQLEGNRTQKALYEAYLKIVEMEAHDVKDILQIKSAKDDWSLDESPLSASEIKEKIKDIFQALGICTKILYFDPLLPVKEFEKQDSYQLWHLLYSYESDDSTSGNETLYRILEKKYAFKREHARILANVALQDDYGSLSTKAIRKIYPYIKENQYSKACELAGYKHSKLSLTTEELEARELKNIIPLLKKNALRNPVVEKILNQMINVVNALIEKNSERDAEGKITKYFHFDEIRIELARELKKNAQKRYEMTQNINKAKLEHQKISEILQKQFGIKNPTKSDIIRYRLYQELEHNGYKELYTNAPIARDMLFSKNIEIEHIVPKARVFDDSFSNKTLTFHRINSDKGESTAFDYITSLNSEEELNQYLTRVENAYKTKSISPAKYKNLLKKASEIGDGFINRDLRDTQYIAKKAKEILFQVTKNVLSTSGSITDRLREDWGLVDVMKELNMPKYQSLGLTEVEERKDGNKVTVIKNWTKRNDHRHHAMDALTVAFTKPSYIQYLNHLNARKDENNKNYSVILAIEEKETIKVPTNNGKNKRVFIEPIPNFRQVAKKHLEEIFISHKAKNKVVTKNVNKPAGTDKQQITLTPRGQLHKETVYGKYQYYVNKEEKIGVKFDKETIAKVSNPLYREALLKRLQANDNDPKKAFTGKNALSKKPIYLDEAKTKTLPEKVNLTYLEEDFSIRKDISPDNFKDLKSIEKVIDQGVKRILIKRLQAYGNDPKKAFVDLEKNPIWLNKEKGIAIKRVTISGVNNAQPLHIGKDHLGKTTLNKEGKEIPVDYVSTGNNHHVAIYRDKEGNLQEQIVSFFEAVVRTQQGLPIIDKTYKQEEGWQFLFTMKQNEMFVFPNATTGFNPAEIDLLDPKNKKQISPNLFRVQKIATKDYFFRHHLETNVETDNVLKNTTWKREGLSGLKDIVKVRINHLGDIVSIGEY

SEQ ID NO: 19154 - protein, 1339 aa, unidentified
  REGION 1..1339: note = Cas Enzyme sequence
EPKIAYNNGNFIFMNSFNEMIEDFKKYKPQLFYKKSNGEESKIPYDWTIYYLRKKALSQKITQQELAWLILHFNQKRGYYQLRGEEETENPNKEVAFHSLKVVEVEAEAPNKKGEIWYTIRLENGWIYRRTSKIPLDDWKGKTRDFIVTTDLNDDGTIKVDKEGKEKRSFRAPEENDWNLLKKKTEHDIDFSGKTVGAYIYDHLLQDPNQKIKGKLVRTIERKYYKNELKGILTKQIALQPELFTETLLADCIRELYRKNETQQQNLLSKDFLHLFVEDIIFYQRPLRSKKSTIANCTLEKRSYIDKETNERKDAPIKVCAKSNPYYQEFRALQWLQNLRIYEIETDREVTAEFIETPQDYEALFNFLMSQKEIDNESLLKYFLHAKNPQIKDKAAKSELKKWLTTYRWNYVYDVADNSSKKYPMNETGYDLQRYLQKVEGLPANFLTFDTTYRLWHLLYSVKDKVEFEKALKRFAKKKQLNETSFIESFKNFKPYPNEYGSFSEKAIKKLLPLMRFGNHWDFNRIDVSTQKRIDDLINGVANEDIRTIIREKAEKYQLNSESCFQGLPLWLAQYIVYNRHAEATDIEKWTSVSDLETYLEDFKQHSLRNPIVEQVVTETLRVVRDIWQQYGGGQANFFDEIHIELGRELKKTAEERKQLSNRNQENENTNLRIKKLLAELKEDASIQNVLPYSPVQQELLKIYEEGVFSSTDEIEEDIQKIRKKAEPTTPEIQRYKLWLEQKYKSPYTGEVISLTKLFTEEYEIEHIIPQSRYYDDSFSNKVICESAVNKLKTNLLGLEFIQKHHGEKVRVAGNKEVTIFTEEQYKDFVKKHYANNLAKQQKLLLNEIPEKMVARQLNDTRYISKYISEILSKIVRSDEKDEGVNSKNVIPCTGKITTALKQDWGLNDVWNELILPRFERMNQLTQTQLFTSYNDRLQKNLPTVPIEYSQGFQKKRIDHRHHAMDALVIACATREHINYMNNQHALDKNKDKKEKQQSRIDLRTILCEKKNNNWQFKKPWATFTQEAKESLEHIVVSFKQNLRVINKATNYYEKWEEKNGVLVKKKVKQEGTNWAIRKPLHKETVSGKIILDRKISKDKILTATRKTVDITFTEKIISSITDTGIQKILLNYLKYKGSPEVAFSAEGLEELNKNIAQYNEGKKHQPIYKVRIFEEGSKFPLGETGAKATKFVEAAKGTNLFFGVYQGKEKRSYTTIPFNKVIERQKQGLPSVPERNEKGEPLLFILSPNDLVYVPMEGEIAEIIDFNNLSKEQKERIYKTVSFTGNQCFFVQEAVATPIVNKMEYSPLNKMERNIVGTMIKEVCIKLKVDRLGNITKA

SEQ ID NO: 19155 - protein, 1435 aa, unidentified
  REGION 1..1435: note = Cas Enzyme sequence
MKNILGLDLGITSISFAHIVEDENKEKSEIKEVGVRIVSLTTDEQSDFEKGKSITTNANKTLKHGARLNLDRYQQRRKYLIDLLQKANLITLSSILAENGKNTTHSTWQLRAKAVTERIEKEEFARVLLAINKKRGYKSSRKAKTEDEGQAIDGMAIAKCLYDENLTPGQLSLQLLQQNKKLLLDFYRSDLQKEFDLVWNLQKQFYPDILTDSFYKELQGKGKEATSKAFSKRYHFDTAENKGSKESVRLQAYQWRAEAISKQLSKEEVAYVLTEINNNLNNASGYLGAISDRSKELYFNRQTVGQYLYAQLQENRHNSLKNKVFYRQDYLDEFERIWETQASFHKELTDELKKQIRDVVIFYQRKLKSQKGLVSFCEFESKEIEIEKDGKAITKSIGARVVPKSSFLFQEFKIWQILNNVTCKRKGIRKKKSSTNPTQLDLFNEPSQTIFSLDMECKQLLFEELNIKGDLKSDKVLKLLGYSPQEWEINYNQLEGNRTQKSLYEAYLKIIEIEGYEVKDILQIKSTKDDWSLDESPLSASEIRERVKAIFQTLGICTKILYFDPLLPVKEFEQQYSYQLWHLLYSYESDDSTSGNETLYRILEKKYAFKREHATILANVVLQDDYGSLSTKTIRKIYPYIKENQYSTACELAGYKHSKLSLTTEELEARELKNIIPLLKKNALRNPVVEKILNQMINVVNALIEKNSERDAEGKITKYFHFDEIRIELARELKKNAQERYEMTQNINKAKLEHQKISEKLQKQFGIKNPTKSDIIRYRLYKELEHNGYKELYTNTYIAPDVLFSKNIDIEHIVPKARVFDDSFSNKTLAFKDFNIKKGEYTAFDYITSLNNEEKLNQYLTRVENAYKTKSISLTKYKNLLKKASEIGDGFINRDLRDTQYIAKKAKEILFQVTKNVLSTSGNITDRLREDWGLVNVMKELNMPKYQSLGLTEVEERKDGNKVTVIKDWTKRNDHRHHAMDALTVAFTKPSYIQYLNHLNARKDENNKNYLVILAIEKKETIKVPTNNGKNKRVFIEPIPNFRQVAKKYLEEIFISHKAKNKVVTKNINKPAGTDKQQITLTPRGQLHKETIYGKYQYYVNKEEKVGVKFDERTITKVSNPLYREALLKRLQANDNDPKKAFTGKNALSKKPIYLDEAKTKTLPEKVNLTYLKEDFSIRKDISPDNFKDLKSIEKVIDQGVKRILIKRLQAYGNDPKKAFVDLEKNPIWLNKEKGIAIKRVTISGVNNAQPLHIGKDHLGKTTLNKEGKEIPIDYVSTGNNHHVAIYRDKEGNLQEQIVSFFEAVVRAQQGLPIVDKTYKQAEGWQFLFTMKQNEMFVFPNEATGFNPAEIDLLDPKNKKLISPNLFRVQTISVVKYGNSVVRDFKFRHHLEATLQDDKILQGITFQQIKSLEPLRNIVKVRINHLGDIVNVGEY

SEQ ID NO: 19156 - protein, 1435 aa, unidentified
  REGION 1..1435: note = Cas Enzyme sequence
MKNILGLDLGTTSIGFAHIVEDENKEKSEIKELGVRIVSLTTDEQSDFEKGKSISTNANRTLKHGARLNLDRYQQRRKYLIDLLQKANLITPSSILAENGKNTTHSTWQLRAKAVTERIEKEEFAKVLLAINKKRGYKSSRKAKTEDEGQAIDGMAIAKRLYDENLTPGQLSLQLLQQNKKLLPDFYRSDLQREFDLVWNLQKQFYPDILTDSFYKELQGKGKDATSKAFSKRYHFDTAENKGSKESVRLQAYQWRAEAISKQLSKEEVAYVLTEINNNLNNASGYLGAISDRSKELYFNRQTVGQYLYAQLQENRHNSLKNKVFYRQDYLDEFERIWETQASFHKELTDELKKQIRDVVIFYQRKLKSQKGLVSFCEFESKEIEIEKDGKAITKNIGARVVPKSSPLFQEFKIWQILNNVICKRKGIRKKKVSTNTTQSDLLNESSQTISGLDMKCKQLLFEELNIKGDLKSDKVLKLLGYSPQEWEINYNQLEGNRTQKSLYEAYLKIIEIEGYEVKDILQIKSTKDDWSLDESPLSASEIRERVKAIFQTLGICTKFFYFDPLLPVKEFEEQDSYQLWHLLYSYESDDSTSGNETLYQILEKKYAFKREHARILANVALQDDYGSLSTKAIRKIYPNIKENQYSTACEKAGYKHSKLSLTTEELEARELKNIIPLLKKNALRNPVVEKILNQMINVVNALIEKNSERDAEGKITKYFHFDEIRIELARELKKNAQERYEMTQNINKAKLEHQKISEKLQKQFGIKNPTKSDIIRYRLYKELEHNGYKELYTNAYIAPDVLFSKNIDIEHIVPKARVFDDSFSNKTLAFKEFNIKKGESTAFDYITSLNCEGELNQYLTRVENAYKTKSISLTKYKNLLKKASEIGDGFINRDLRDTQYIAKKAKEILFQVTKNVLSTSGSITDRLREDWGLVDVMKELNMPKYQSLGLTEVEERKDGNKVTVIKDWTKRNDHRHHAMDALTVAFTKPSYIQYLNHLNARKDENNKNYSVILAIEKKETIKVPTNNGKNKRVFIEPIPNFRQVAKKHLEEIFISHKAKNKVVTKNINKPAGTDKQQITLTPRGQLHKETIYGKYQYYVNKEEKVGVKFDERTITKVSNPLYREALLKRLQANDNDPKKAFAGKNALSKNPIYLDESKTKTLPEKVNLTYLEEDFSIRKDISPDNFKDLKSIEKVIDQGVKRILIKRLQAYDNDPKKAFVDLEKNPIWLNKEKGIAIKRVTISGVSNAQPLHIGKDHLGKTTLNKEGKEIPVDYVSTGNNHHVAIYQDKDGNLQEQIVSFFDAVVRAQQRLPIVDKTYKQAEGWQFMFTMKQNEMFVFPNEATGFNPAEIDLLDPKNKKLISPNLFRVQTISVVKYGNSVVRDFKFRHHLEATLQDDKILQGITFQQIKSLEPLRNIVKVRINHLGDIVNIGEY

SEQ ID NO: 19157 - protein, 1426 aa, unidentified
  REGION 1..1426: note = Cas Enzyme sequence
MKNILGLDLGTTSIGFAHIVEDENKEKSEIKELGVRIVSLTTDEQSDFEKGKSITTNANRTLKHGARLNLDRYQQRRKYLIDLLQKANLITSSSILAENGKNTTHSTWQLRAKAVTERIEKEEFARILLAINKKRGYKSSRKAKTEDEGQAIDGMAIAKRLYDENLTPGQLSLQLLQQNKKLLPDFYRSDLQKEFDLVWNFQKQFYPDILTDSFYKELQGKGKDATSKAFSKRYHFDTAENKGSKESVRLQAYQWRAEAISKQLSKEEVAYVLTEINNNLNNASGYLGAISDRSKELYFNRQTVGQYLYAQLQENRHNSLKNKVFYRQDYLDEFERIWETQASFHKELTEELKKQIRDVVIFYQRKLKSQKGLISFCEFESKEIEIEKDGKTITKNIGARVVPKSSPLFQEFKIWQILNNVTCKRKGIRKKKSSAKTTQLDLLNESSQTIFSLDMECKQLLFDELNLKGDLKSDKVLKLLGYSPQEWEINYNQLEGNRTQKALYEAYLKIVEMEAHDVKDILQIKSTKDDWSLDESPLSASEIRESVKAIFQALGICTKILYFDLLLPVKEFEEQDSYQLWHLLYSYESDDSTSGNETLYRILEKKYAFKREHAIILANVALQDDYGSLSTKAIRKIYPNIKENQYSTACEKAGYKHSKLSLTTEELEARELKNIIPLLKKNALRNPVVEKILNQMINVVNALIEKNSERDAEGKITKYFHFDEIRIELARELKKNAQKRYEMTQNINKAKSEHQKISEILQKQFGIKNPTKSDIIRYRLYQELEHNGYKELYTNAYIAPDVLFSKNIDIEHIVPKARVFDDSFSNKTLAFKDFNIKKGESTAFDYITSLNSEEELNQYLTRVENAYKTKSISPAKYKNLLKKASEIGDDFINRDLRDTQYIAKKAKEILFQVTKNVLSTSGSITDRLREDWGLVDVMKELNMPKYQSLGLTEIIERRDGRKVEVIKDWTKRNDHRHHAMDALTVAFTKPSYIQYLNHLNARKDENNKNYSVILAIEEKETIKVPTNNGKNKRVFIEPILNFRQVAKKHLEEIFISHKAKNKVVTKNVNKPAGTDKQQITLTPRGQLHKETIYGKYQYYVNKEEKIGVKFDKETIAKVSNPLYREALLKRLQANDNDPKKAFTGKNALSKNPIYLDESKTKTLPEKVNLTYLEEDFSIRKDISPDNFKDLKSIEKVIDQGVKRILIKRLQAYDNDPKKAFVDLEKNPIWLNKEKGIAIKRVTISGLNNAQPLHIGKDHLGKTTLNKEGKEIPVDYVSTGNNHHVAIYRDKEGNLQEQIVSFFEAVVRTQQGLPIIDKPYKQEEGWQFLFTMKQNEMFVFPNEATGFNPAEIDLLDPKNKKLISPNLFRVQKIATKDYFFRHHLETNVETDNVLKNTTWKREGLSGLKDIVKVRINHLGDIVSIGEY

SEQ ID NO: 19158 - protein, 1426 aa, unidentified
  REGION 1..1426: note = Cas Enzyme sequence
MKNILGLDLGTTSIGFAHIVEDENKEKSEIKELGVRIVSLTTDEQSDFEKGKSITTNANRTLKHGARLNLDRYQQRRKYLIDLLQKANLITSSSILAENGKNTTHSTWQLRAKAVTERIEKEEFARILLAINKKRGYKSSRKAKTEDEGQAIDGMAIAKRLYDENLTPGQLSLQLLQQNKKLLPDFYRSDLQREFDLVWNFQEQFYPNILTDAFYKELQGKGKDATSKAFSKRYHFDTAENKGSKESVRLQAYQWRAEAISKQLSKEEVAYVLTEINNNLNNASGYLGAISDRSKELYFNRQTVGQYLYAQLQENRHNSLKNKVFYRQDYLDEFERIWETQASFHKELTEELKKQIRDVVIFYQRKLKSQKGLVSFCEFESKEIEIEKDGKAITKSIGARVVPKSSFLFQEFKIWQILNNVTCKRKGIRKKKSSTNPTQLDLFNEPSQTIFSLDMECKQLLFDELNLKGDLKSDKVLKLLGYSPQEWEINYNQLEGNRTQKALYEAYLKIVEMEAHDVKDILQIKSTKDDWSLDESPLSASEIRERVKAIFQTLGICTKILYFDPLLPVKEFEKQDSYQLWHLLYSYESDDSTSGNETLYRILEKKYAFKREHARILANVALQDDYGSLSTKAIRKIYPYIKENQYSKACELAGYKHSKLSLTTEELEARELKNIIPLLKKNALRNPVVEKILNQMINVVNALIEKNSERDAEGKITKYFHFDEIRIELARELKKNAQERYEMTQNINKAKLEHQKISEILQKEFGIKNPTKSDIIRYRLYQELEHNGYKELYTNAPIARDMLFSKNIEIEHIVPKARVFDDSFSNKTLTFHRINSNKGEYTAFDYITSLNNEEELNQYLTRVENAYKTKSISLTKYKNLLKKASEIGDGFINRDLRDTQYIAKKAKEILFQVTKNVLSTSGNITDRLREDWGLVNVMKELNMPKYQSLGLTEVEERKDGNKVTVIKDWTKRNDHRHHAMDALTVAFTKPSYIQYLNHLNARKDENNKNYSVILAIEKKETIKVPTNNGKNKRVFIEPIPNFRQVAKKHLEEIFISHKAKNKVVTKNINKPAGTDKQQITLTPRGQLHKETIYGKYQYYVNKEEKVGVKFDERTITKVSNPLYREALLKRLQANDNDPKKAFTGKNALSKKPIYLDEAKTKTLPEKVNLTYLEEDFSIRKDISPDNFKDLKSIEKVIDQGVKRILIKRLQAYDNDPKKAFVDLEKNPIWLNKEKGIAIKRVTISGVSNAQPLHIGKDHLGKTTLNKEGKEIPVDYVSTGNNHHVAIYRDKEGNLQEQIVSFFEAVVRTQQGLPIIDKTYKQEEGWQFLFTMKQNEMFVFPNATTGFNPAEIDLLDPKNKKQISPNLFRVQKIATKDYFFRHHLETNVEADNILKNVTWKREGLSGLKDIVKVRINHLGDIVSIGEY

SEQ ID NO: 19159 - protein, 1349 aa, unidentified
  REGION 1..1349: note = Cas Enzyme sequence
MKKILGLDLGTGSIGWGFVNEAENDNEKSSIIRLGVRVNPLTVDEMKNFEEGKSITTNADRTLKRSARRNLSRYKLRKENLIDVLKEKKFINNDTILREKGNKITFETYYLRAKATKEEITLEELSRVFLMINKKRGYKSSRKAKGNEEGQLIDGMDIAKKLYENNLTVGQYVLNLLKEGKLKSTPEFYNSDIQNELDKIWNYQKQFYPDILTDEFKEQIKNKNKTNTSKIFLAKYKIFIEDIKGTKEEKKIRAYQLRVDALTKEITKEQLAFVITEINGALSSSSNYLGKISDRSKELYFNKQTVGEYLATQLKDNHNISLKNQVFYRQDYLDEFEKIWETQKQFHKELTEELKKEIRDIVIFYQRRLKSQKGLISFCEFESKEIEVEIDGKKVKKIIGHKVCPKSSPLFQEFKIWQILNNIEVKDNENNVRGLNQEEKEILFNELSIKEKLSKQEALKLLFKNYKELDLNYKEIEGNETIAKLIKVCPCIANDESFRFDSKQDLENQLIFKLWHLLYSYEGDKSNTGDESLGLILENEFGFNKEDAKRLKNVTFNQDYGNLSTKAIKKILPYMEEGNKYAVACVYAGYRHSKESLTKEEIENKELKDHLDILPKNSLRNPVVEKILNQMVNVVNEIIDAYGKPDEIRIELARELKKNAQEREDLTKSINATTKLNEEYVEKIKKDFNRDYVSRNDIIRYKLYLELKENGFKTLYSNTYIPYEEIFSKKFDIEHIIPQSKLFDDSFSNKTLETKQINIEKSNQTALDYVATKYGEKGKEDYLNRVNDLFQKGVISKTKYRKLKMTINDIPNDFIERDLKDSQYIAKKAKQMLLSIVKIVTSTSGSITDRLREDWQLIDVMQELNWNKYDKLGLTEIIENKDGEKIYKIKDWTKRNDHRHHAMDALTIAFTKSSYIQYLNNLHAKSNKSSSIYAIEQKELYRNERGKLLFIPPIPLKEFREEAKIQLENILISIKAKNKVVTRNINITNKHGGNNKKVQLTPRGQLHLETIYGKTKHYITKEEKINASFNEEKINTVAKQSYREALLRRLQEFNGDSKKAFTGKNTLDKYPLLFGDKLQFSVPEKVKTVCFEEIYTIRKPISPDLKLDKVIDIKIRQILENRLKEYNNNANQAFSNLDENPIWLNKEKGISIKRVTITGVNNAIALHDKRDIDGKFILDKEGNKQPVDFVNTGNNHHVAIYRDEKGELQENVVSFFEATTRALNGNPIVDKTYNIDKGWQFLFTMKQNEYFLFPNETTGFNPKELSEDFIKNPMNYSILSPNLFRVQKLSSKNYVFNHHLETRAVNGDTLKNKLLSGLTYKFIQNTKPLEDIVKVRINHIGNIVSVGEY

SEQ ID NO: 19160 - protein, 1280 aa, unidentified
  REGION 1..1280: note = Cas Enzyme sequence
MKKILGLDLGTNSIGWAIINEAEKTDEKSEILDMGCRIVPLSPDDKSEFESGNAISKNQKRTQKRTQRKGYDRYQMRRLALRTELKRMGLMPDEGLFKLKPAELWGLRARAVYQKVELRELGRLLYHLNQKRGYKSTRKDENRDKKETEYVAEVKGRHDTIKGLGMTIGQYFYDHLKEDENYRIKEQVFPREAYIEEFDAIWNRQKQYYPEILTEREYHLIRNEIIYYQRDLKSCKHLVKICEFEGQYYKNKEGKLVFNGPKVAPKSSPIFQMERLWETINTLSIRNKFGDTIYSVHPPGKTIGQNDRIMTVDERSAIFQHLDNRITLKDNDLIKILRLDKEGGWYGNKQLEKGIPGNSTRIALLKALNGFENTEDLLRFSSQIEEYKATDKTSGEILIRKCISASCENEPFYRLWHAIYSIDDKTDLTRTLSVKFNIPENIAEELVKIDFTKQGFGNKSAKASRKILPYLMAGSAYSNACLHAGYTHSDSLTTSDNLRRILLDKLAPLPKNSLRQPIVEKILNQMINLVNSIIDEHGRPDEIRVELARELKQSKEERNVSFKQNSERERENKRIAERLTEYGLPANRRHIDKWRLFHEMTGDESKINACCLYCGQPFGITQALKGEEVDIEHILPKSRIFDDSMQNRILVHRQCNANKGNQTAFDFMKSKSEKEFKDYVERVNALYKDKLIKTKAKRDKLLMTASAIPQDFIDRQLRQTQYISRKAHEILSGICYHVHATSGSVTARLRNLWGWDNVLHDLNFNKYKEAGLTEVKTIRDDDGNAKEVERIAGWEKRNDHRHHAIDALAIACTKQGFIQRINRINADDVRSEMVAALRNRRDLTAAGLADENGLASLDEKIDRLERIKGRRLSLLDLYLQDQKTFTTGEVSAMTSRILVSFKAGKKVASKGIRKIHKGKRTIVAQDKGILVPRGALSEESVYGRSMKLQKGVDVKKLFDHPESILKKRIRELIEKRLDTFGGDRKKAISSLKKDPIFLDAENKVKLDYASILSPEYVIKYAVKDIKKKHLPSIVDGRVQKILETRINTLGEKDAFKDLESHPVWYNEQKSIRIRTVRRYINLDDDSVAPVKFDENCQATGFVKPGNNHHIAIYKDADGNLHEHVCTLWHAVERKKYGLNPVIKKPNEAWNIILSSKTEIPESFSSQLPMDGWEYVMSLQQNEMFLLGMKEQEIRDSVENSDYASFSGNLYRVQKLGASYYVFRHHVETQIDDSNEAQQARRFKRIRSLNAFMKEKPYKLKLNVTGKIASLEECLADVLPK

SEQ ID NO: 19161 - protein, 1400 aa, unidentified
  REGION 1..1400: note = Cas Enzyme sequence
MMKRILGLDLGTSSIGWAYILEAQNDNEISKIEKLGVRVNPLTTDEQLNFEKGKPITTNAGRTLARSARRNLQRFKLRRENLVEVLKREKWIDDKSILAENGNKSTFETYALRAAAAVKEVKLEELARVLLMINKKRGYKSSRKVNKEDEGQLVDGMEVAKKLYHENLTPGAFVYQLLKEGKKKIPDFYRSDLQRELDLIWDFQANYYPDLLTPDLKEELKGKGLRATSAIFWSKYKFNTAENKGTREEKKIQAYQWRKDGLTKQLEKEEVAYIIAEINGQLTNSSGYLGAISDRSKELYFNKQTVGQYLFNQLQQNTHARLKNQVFYRQDYLDEFEKIWSVQSHFHQCLTEQLKEEIRDIIIFYQRKLKSQKGLISFCEFEQREVVVNGKNKVVGLRVAPKSSPIFQEFKIWQQLNNVKLRNKMTKEVYNLAEEQKRSLFETLNLKGKLSAHQVLSLIEGKPKEWELNYTELEGNSTNAALYNAYLDILDMEGYDVRSELKIKLNKDEITLSDLDKPVSEIKDMIRRIFKHLGINTSILDFNAQLQGKSFEKQLSYQLWHLLYSYEEDDSKTGMDRLYNQLNLKFGFSLDHAKIIGKIALLDDYGNLSTKAIRQIYPYIQDAEYSAACKLAGYNHSKSSLTKEQLTNRVLKEHLDILPKNSLRNPVVEKILNQMVNVVNTLIDTENDKLIKEGKKADFRFDDIRIELARELKKNAKEREELTKAINTSKAEHEKIIKILQTEDGIKNPTRNDIIRFKLYQELKNNGYKNLYTNEYIQRKDLFTNVYDIDHIIPQSRLFDDSFSNKVLVPRNINIEKGNQTAFDYVHTKFGEDGIEAYEARVERLFNLKEEGVSRSKYKKLLMRGSDIGEGFIERDLRDSQYIAKKAKAMLFEIAPSVISTSGSVTDRLREDWGLVSVMKELNLPKFKAVGLTEYLETKDGNRKEVIKDWSKRNDHRHHAMDALTVAFTKHSHIQYLNHLNARKNEKSEFFSTIKAIEIKETYVERDDLGNRKRLFKEPIPHFRSIVKEHLERVLVSHKAKNKVVTKNRNKIDGKKEAQEVLTPRGQLHKETIYGKILQYTSKEEKISAKFDAATIAMVSNPRYRSALLDRLTAYGNEPKKAFTGKNSPIKSPIYFDQQRQLAVPEKVKLVWLEEDYTIRKEIGPDLKIEKVIDQGVKRILEQRLSAYGGDTKKAFSDLDNNPIWLNEEKGIAIKRVTISGVKNAEALHTKKDHLGQVLKDKDGKPMPVDFVSTGNNHHVAIYEDENGALQERIVSFYEAVARVDSGFPIIDKNYNQHLGWKFLFSMKQNEMFLFPSEEFDPKQINFFDRNSYKLISENLFRVQKFTIKDYFFRHHLETNVEDNSQTKGKLWRREGLNGINGIVKVRINHLGEIVQVGEY

SEQ ID NO: 19162 - protein, 1453 aa, unidentified
  REGION 1..1453: note = Cas Enzyme sequence
MTKNILGLDLGTNSIGWALISQDFDKKEGKIIGMGSRIIPMSQDILGEFGKGNSVSQTASRTGYRGVRRLRERFLLRRERLHRVLNILKFLPAHYASQIDFEKRFGKFKEETEPKLVYDTNEFIFKNSFEEMLSDFKKHQLQLLENDKKVPYDWTIYYLRNKALTQKIEKEELAWILLNFNQKRGYYQLRGEEEEENSNKLVEFYSLTIVDVVADEPQKGKSDIWYSLILENGWIYRRASKTPLFDWKNKTRDFIVTTDLNDDGSVKTDKDGNEKRSFRAPSENDWTLVKKKTESEIDKSQKTVGTYIYNALLQNPKQKINGKLVRTIERKFYKEELKKILETQRSFHPELQNDDLYNDCVRKLYRNNEAHQLTLSKKDFVHLFMDDIIFYQRPLRSQKSSISNCTLEFRKYKDENGVEHTQYLKAVPKSNPYYQEFRVWQWIYNLNIYERDDDSNVTKEFLNTTEDFENLFEFLNNRKEVDQKALLKHFKLNEKIHRWNYVEDKKYPCNETKTMISSRLDKVENIFDDFFTREIEQKIWHIIYSVNDKIEYEKALKSFANKNNLDEVSFFEAFKKFPPFKSGYGSFSEKAIKKLLPLMRLGKYWNYADIDKYSKDRIQKIINGEYDENIKDKVREKAVHLTSENDFQGLQLWLAQYIVYGRHSEASMIEKWNSTDDLEEFLKDFKQHSLRNPIVEQVITETLRVVKDIWIKYGNGAKDFFNEIHIELGREMKLPADEREQLTKQISENENTNLRIKALLAEMMNDHSVENVRPYSPMQQEILKIYEDGILKSDIEIDDDILKISKTAQPSQSDLKRYKLWLEQKYKSPYTGQIIPLNKLFTPEYEIEHIIPQSRYFDDSFSNKIICESAVNKLKDNYIGLGFIKQFGGTIIELGFGKSVKVFEAEEYEDFVKKHYANNRGKRNKLLLEEIPEKMIERQMNDTRHISKYISGVLSNIVRVEDGSDEGVNSKNIVPGNGKITTQLKQDWGLNDVWNDLILPRFERMNQLTNSTNFTAWNENHQKFLPTVPIEFSKGFSKKRIDHRHHAMDALVIACATKDHVNLLNNQSAKSDTKRYDLKKKLMKFERIVYHHTQTGEKIEKEVPKQFLKPWQNFTVEAKNSLETIIVSFKQNLRVINKATNHYEKWVEKDGVKAKERVEQTGTNWAIRKPMHKETVSGKIDLPWVKIPKGKILTATRKSLDTSFDLKSINSITDTGIQKILKNYLEFKGSSEIAFSPEGIEDMNKNIEKYNDGKQHQPINKVRVFELGSKFQVGQTGNKKDKHVEAAKGTNLFFAVYEGKNGKRSYETIPLNIVVERQKQGLTSVPLENEKGSRLLFDLSPNDLVYVPEADENIDGNFTLANLNKKHTNRIYKVEKTSGTECYFVRQDIAYLIKQYDVKTKVGELESQNKLQVTMTDDRIKIADVCLKINCDRLGNINFLTKEKIKQIFNEFR

SEQ ID NO: 19163 - protein, 1153 aa, unidentified
  REGION 1..1153: note = Cas Enzyme sequence
MSEKRILGLDLGTTSIGWAYIVESDDTENSQILQTGVRIVPIETRTADKFNKGQSVSPNKDRTTARTARKGKMRYRLRRTALSNLLKKMGIVEPQKPSGDIWQIRANAAQKTVSLNEFGQVLQHFNQKRGYKGGKNASEEETKSDYLKGIYDLEAKIAEANLTPAQYHLEQQQKKRDYRFKNGAGESKILQRKTYRAEFEKIWEQQAAAYPTILTNELKTQIADQTIFYQRKLKSQKSSISKCTHEKSYRTIPKSHPLYQDFVIWKTINDLVVTDKQSYEQYLPTDEQRQQLFEALSQTKAMKKKAILKELGFDAKLFELNFDEIKGNVTRAKLMEAFEAENLDTTPLKTPPPSIVAENDYISTLWHLIYATEPTLKLGNDEVIKNILLQKYKMTENQANTVSKISFPADFGSLSARAIRKLMPHLIEGQNEYKACQSVGYNHSEGSKTTEENEKRVLVEQLDLLKTNALRNPIVEKMLQHLINVVNDIIKDTTLGRPDEIRVELARELKSSAKQRQKVEERMKENKKENDKAIAAIEKEGKKATKKMIERYKLFKQTNGIDLYSGETMELADVLNENKYDIDHIIPQSKYFDDSLNNRIITVRHLNELKSNRTAFDFMKSRGDEKFQAYQLRLNELHKKISGFRGEHPKIKYLKMTESEIPQDFISRQLKETQYIAKEAKNILQKVVRNVHSTSGGVTDFLRNEWGLDVLLEKMVAQEGVYPDAEKMDRIFNKKSGHYVGIKDWNKRLDHRHHALDALIVACTKPAIINRLNKLSKYTENAAELKEKLTIGNSARKFPKPWANFVADVENILGGTFISFKKQDRVATLNKNKYKHHKEKNKQPQQIWTPRGAFHKETIYGKIKIIGEPIAVEKLKEKDLPNIAHQWQKDCLAQRLAQFDGNWKKAFAKLEENPIWTNKEKTKRLVHCQIFEERYVVRKDILALNREQVKDIVDAKIKAAVKSAWEEVAAKGKSKLDVETLQKYTHARRARWCDRATSLITIRENPIDGTPVGFVANDSNHHAAIYKNEAGVLNEKMVTFWEAFERKRQGVPVVQETHSEFGKLQVSMIIGEMFVFGMTKPELEEAIADKKWKKISKHLFRCQNVSSEYYVFRHHLATMINKDFQMVRVTNLKKMLTGIKVQITRIGRIEIVD

SEQ ID NO: 19164 - protein, 1435 aa, unidentified
  REGION 1..1435: note = Cas Enzyme sequence
MKNILGLDLGTTSIGFAHIVEDENKEKSEIKELGVRIVSLTTDEQSDFEKGKSITTNANKTLKHGARLNLDRYQQRRKYLIDLLQKANLITLSSILAENGKNTTHSTWQLRAKAVTERIEKEEFARVLLAINKKRGYKSSRKAKTEDEGQAIDGMAIAKCLYDENLTPGQLSLQLLQQNKKLLPDFYRSDLQKEFDLVWNLQKQFYPDILTDSFYKELQGKGKDATSKAFSKRYHFDTAENKGSKESVRLQAYQWRAEAISKQLSKEEVAYVLTEINNNLNNASGYLGAISDRSKELYFNRQTVGQYLYVQLQENRHNSLKNKVFYRQDYLDEFERIWETQASFHKELTDELKKQIRDVVIFYQRKLKSQKGLVSFCEFESKEIEIEKDGKAITKSIGARVVPKSSPLFQEFKIWQILNNVTCKRKGIRKKKSSTNPTQLDLFNEPSQTIFSLDMECKQLLFDELNLKGDLKSDKVLKLLGYSPQEWEINYNQLEGNRTQKSLYEAYLKIIEIEGYEVKDILQIKSAKDDWSLDESPLSASEIRESVKTIFQTLGICTKFFYFDPLLPVKEFEEQDSYQLWHLLYSYESDDSTSGNETLYQILEKKYAFKREHARILANVALQDDYGSLSTKAIRKIYPYIKENQYSKACELAGYKHSKLSLTTEELEARELKNIIPLLKKNALRNPVVEKILNQMINVVNALIEKNSERDAKGEITKYFHFDEIRIELARELKKNAQERDEMTKNINKAKSEHQKISEILQKEFGIKNPTKSDIIRYRLYKELEHNGYKELYTNAYIAPDVLFSKNIDIEHIVPKARVFDDSFSNKTLAFKEFNIKKGESTAFDYITSLNSEEELNQYLTRVENAYKTKSISLTKYKNLLKKASEIGDGFINRDLRDTQYIAKKAKEILFQVTKNVLSTSGSITDRLREDWGLVDVMKELNMPKYQSLGLTEVEERKDGNKVTVIKDWTKRNDHRHHAMDALTVAFTKPSYIQYLNHLNARKDENNKNYSVILAIEKKETIKVPTNNGKNKRVFIEPIPNFRQVAKKHLEEIFISHKAKNKVVTKNINKPAGTDKQQITLTPRGQLHKETIYGKYQYYVNKEEKVGVKFDERTIIKVSNPLYREALLKRLQANDNDPKKAFTGKNALSKKPIYLDEAKTKTLPEKVNLTYLEEDFSIRKDISPDNFKDLKSIEKVIDQGVKRILIKRLQAYDNDPKKAFVDLEKNPIWLNKEKGIAIKRVTISGVSNAQPLHIGKDHLGKTTLNKEGKEVPVDYVSTGNNHHVAIYRDKEGNLQEQIVSFFEAVVRAQQGLPIVDKTYKQAEGWQFLFTMKQNEMFVFPNEATGFNPAEIDLLDPKNKKLISPNLFRVQTISIVKYGNSVVRDFKFRHHLEATLQDDKILQGITFQQIKSLEPLRNIVKVRINHLGDIVNIGEY

SEQ ID NO: 19165 - protein, 1521 aa, unidentified
  REGION 1..1521: note = Cas Enzyme sequence
MKRILGLDLGSNSIGWAFVQKDFENKQGKIIAAGSRIIPIDQKMLSNFEEGTTVSQTAERTTYRSMRRLRERHLLRRERLHRVLHILGFLPPHYDSQIDFSKRYGKFIDDAEPKIAYNKGNFIFMDSFNEMIEDFKKHQPQLFYKKSNGEESKIPYDWTIYYLRKKALSQKITQQELAWLILHFNQKRGYYQLRGEEETEGNDMEIISSKVLSVIKKNKDKKYDKYWYDITLENGLVYKAAFYNDLVYSWIGQEREFVVKRTLLKNGDEKIELSYLPTFDEIAKMDKKQQDKFYQKIKVKTESSIGNKTVGTYIYDHLLQNPNQKIKGKLVRTIERKYYKDELKAILAKQIALQPEFFTENLLADCIRELYRKNQTQQQNLLSKDFLHLFVEDIIFYQRPLRSKKSTIANCPLEKRSYIDKETNERKDVPIKVCAKSNPYYQEFRVLQWLQNLRIYEIETDREVTAEFIETAQDYEALFNFLMSQKEIDNEGLLKYFLLAKNPQIKDKVAKSELKKWLTTYRWNYVYDAADNSSKKYPMNETGYDLQRYLQKVERLPANFLTFDTAYQLWHLLYSVKDKVEFEKALKKFAQKYQLDEASFVDSFKNFKPYPNEYGSFSEKAIKKMLPLMRFSNYWNFKNIDVHTQKRIDDLINGVANEDIRTIIREKAEKYQLNSETCFQGLPLWLAQYIVYNRHAEATNIEKWTSVSDLEAYLEDFKQHSLRNPIVEQVVTETLRVVRDIWQQYGGGQANFFDEIHIELGRELKNTSKERERLSKQNQENENTNLRIKKLLAELKEDANIQNVRPYSLVQQELLKIYEEGVFSSTDEIEEDIQKIRKKAEPTTPEIQRYKLWLEQKYKSPYTGEVISLTKLFTEEYEIEHIIPQSRYYDDSLSNKVICESAVNKLKTNQLGLEFIQNHHGEKVRIAGNKEVTIFTEEQYKEFVKKYYANNLPKQQKLLLNDIPEKMVARQMNDTRYISKYVSEILSKIVRSDEKDEGVNSKNIIPCTGKITTALKQDWGLNDVWNELILPRFERMNQLTQTQLFTSYNDRLQKNLPTVPIEYSQGFQKKRIDHRHHAMDALVIACATREHINYMNNQHALDKSKDKKEKQQSRIDLRTILCEKKNNNWQFKKPWRTFTQEAKEALEHIVVSFKQNLRVINKATNYYEKWEEKNGVLVKKKVKQEGTNWAIRKKLHEDFPYGKVKYQVNFLKISENISKIDLIVDEFIKRQLEKIYVENHRKVNLTKKYLKENPIRDQKGEEVISTDFREENIKYRKRKPISVLSDRNRKTGITSIEKMLKTIAKVADNVLKRELFLYLEECNNDIDVAFSPEGIEQFNSKRKIPVYRLPFFEEGEKKNELGNKGKYVEAAKGTNLFFGIYQGKEKRTYATIPLNEVIERQKQGLPSVPERNEKGEPLLFSLSPNDLVYVPMVGEATETIDFSNFSKEQKERIYKTVSFTGNECHFVKSTIASLIKSYDAKSKIGELGSLNKLEVTISGDSRIKEVCIKLKVDRLGNITKA

SEQ ID NO: 19166 - protein, 1457 aa, unidentified
  REGION 1..1457: note = Cas Enzyme sequence
MKHILGLDLGSNSIGWAFVQQDFENKQGKIIATGSRIIPMDQGILGDFDKGNTVSQTAERTTYRSMRRLRERHLLRRERLHRVLHILGFLPPHYDAQIDFTKRYGKFIDNAEPKIAYNNGNFIFTNSFNEMIEDFKKHQPQLFYKKSNGEESKIPYDWTIYYLRKKALSQKITQQELAWLILHFNQKRGYYQLRGEEETESPNKEVAFHSLKVVEVEAEAPNKKGEIWYTIRLENGWIYRRTSKIPLDDWKGKTRDFIVTTDLNNDGTIKVDKEGKEKRSFRAPEENDWNLLKKKTEHDIDFSGKTVGAYIYDHLLQDPNQKIKGKLVRTIERKYYKNELKAILTKQIALQPELFTKNLLADCIRELYRKNETQQQNLLSKDFLHLFVEDIIFYQRPLRSKKSTIANCTLEKRSYIDKETNERKDTPIKVCAKSNPYYQEFRVLQWLQNLRIYEIETDREVTAQFIETPQDYEALFNFLMSQKEIDNESLLKYFLLAKNPQIKDKAAKSELKKWLTTYRWNYVYDVADNSSKKYPMNETGYDLQRYLQKVEGLPANFLTFDTTYQLWHLLYSVKDKVEFEKALKRFAKKKQLNETSFIESFKNFKPYPNEYGSFSEKAIKKLLPLMRFGNHWDFNRIDVSTQKRIDDLINGVANEDIRTIIREKAEKYQLNSESCFQGLPLWLAQYIVYNRHAEATDIEKWTSVNDLEAYLEDFKQHSLRNPIVEQVVTETLRVVRDIWQQYGGGQANFFDEIHIELGRELKKTAEERKQLSNRNQENENTNLRIKKLLAELKEDASIQNVRPYSPVQQELLKIYEEGVFSSTDEIDEEIQKIRKKAEPTTPEIQRYKLWLEQKYKSPYTGEVISLTKLFTEEYEIEHIIPQSRYYDDSLSNKVICESAVNKLKTNLLGLEFIQNHHGEKVRITANKEVTIFTEEQYKEFVKKHYANNLAKQQKLLLNEIPEKMVDRQLNDTRYISKYISEILSKIVRSDEKDEGVNSKNVIPCTGKITTALKQDWGLNDVWNELILPRFERMNQLTQTQLFTSYNDRLQKNLPTVPIEYSQGFQKKRIDHRHHAMDALVIACATREHINYMNNQHALDKSKDKKEKQQSRIDLRTILCEKKNNNWQFKKPWATFTQEAKESLEHIVVSFKQNLRVINKATNYYEKWEEKNGVLVKKKVKQEGTNWAIRKPLHKETVSGKIVLDRKIGKDKILTATRKAVDITFTEKIISSITDTGIQKILLNYLKYKGSPEVAFSAEGLEELNKNIAQYNDGKKHQPIYKVRIFEEGSKFPLGEIGAKATKFVEAAKGTNLFFGVYQGKEKRSYATIPLNEVIERQKQGLPSVPERNEKGEPLLFSLSPNDLVYVPMEGEIAETIDFNNLSKEQKERIYKTVSFTGNECHFVKSTIASLIKSYDAKSKIGELGSLNKLEVTISGDSRIKEVCIKLKVDRLGNITKA

SEQ ID NO: 19167 - protein, 1058 aa, unidentified
  REGION 1..1058: note = Cas Enzyme sequence
MSTVLGLDIGSNSVGWALVDIENQSITAMGVRIFPDAVENKNSEREESKNVARRMKRQLRKQYDRRRRRAKVVRSIMVKNALLPLTEEELNRLNTSDPYELRSRALTEKLELYEIGKIIDHINSRRGFQSNRKSSSEEETSGVIIDGTKDGLKPGIMAIDEALNPKLRKYKDYLAEKASIVKKLPDVKQGYRTMGEYLHSLDPHTVRRRNRFTLRDHYRIELDLILALQARYYPKVLTPELQEQILGSVFHQRPMKSVRHLVGKCRFEPGKKRVHKSHPEYQRFRFLQQVNALRVNTADRVSGDDTELLPEEIYNLKLIAEAAAAKGRDRKLKLETQGDIKKALGWKSKIPATASVTSVDLERTIADMRNALGRTYIDGLSREQVHELWNVLQYAEDLDWVIDWAQKKLGVDETKARAFAAIKLEDGYGSVSLRAVRKILPFLEEGDLYNEAVVHAGYNFHDEALDFKITDRVPALLPEDARNSMVQRSFAETRRIVNAIVRKWGNPDVIRVEMGRDLKLPAKQRAKIEKENKKNQTQNADDKKRLEKEFKIDDARRSDILKLRLWEEQDGKCMYTGKTIAKNMLFNGTVDVDHILPYSRTLDDSKNNKVVCLREVNQAKGNRTPWEAAMAGVLDFEALREMAKILRANHKITDKKHANLLMSAEQFAERFSDDPNNGFIARQLNDTRFATRLVSKYLRTVTKRVEAPTGAMTAMLRRFWGLDGVLPELASLGRAFVAPVLEGGRKDRNDHRHHAVDALTIALTNQSIIQKISTLNARSEEKSKELRDGRIKLPDAPIAGLRKLALDCVDSIIVSHRKTRKGRGALHQETLYGLARTHGGEQLFNAAGVPQYVVRKPLSANLSCGEIDGIVNPVVRNLVLQRLEEFGVNTSQKKYTIPEDAFAAPLYYELASGERRRIKRVRILVPSTSAVKLRKEGVYVEPGGNDHILIYRNPDTQKQEWEMRTRLDLAQNLPLKKLSAHAASQAVSLRIGDMVLLTRKGVVEIRKVQKMSGARSGEVCLYHHSDASGDVKHLERPKPSSIQFEKLTVDILGNIKPE

SEQ ID NO: 19168 - protein, 1435 aa, unidentified
  REGION 1..1435: note = Cas Enzyme sequence
MKNILGLDLGITSISFAHIVEDENKEKSEIKELGVRIVSLTTDEQSDFEKGKSITTNANKTLKHGARLNLDRYQQRRKYLIDLLQKANLITLSSILAENGKNTTHSTWQLRAKAVTERIEKEEFARVLLAINKKRGYKSSRKAKTEDEGQAIDGMAIAKCLYDENLTPGQLSLQLLQQNKKLLLDFYRSDLQKEFDLVWNLQKQFYPDILTDSFYKELQGKGKEATSKAFSKRYHFDTAENKGSKESVRLQAYQWRAEAISKQLSKEEVAYVLTEINNNLNNASGYLGAISDRSKELYFNRQTVGQYLYAQLQENRHNSLKNKVFYRQDYLDEFERIWETQASFHKELTDELKKQIRDVVIFYQRKLKSQKGLVSFCEFESKEIEIEKDGKAITKSIGARVVPKSSFLFQEFKIWQILNNVTCKRKGIRKKKSSTNPTQLDLFNEPSQTIFSLDMECKQLLFEELNIKGDLKSDKVLKLLGYSPQEWEINYNQLEGNRTQKSLYEAYLKIIEIEGYEVKDILQIKSTKDDWSLDESPLSASEIRERVKAIFQTLGICTKILYFDPLLPVKEFEQQYSYQLWHLLYSYESDDSTSGNETLYRILEKKYAFKREHATILANVVLQDDYGSLSTKTIRKIYPYIKENQYSTACELAGYKHSKLSLTTEELEARELKNIIPLLKKNALRNPVVEKILNQMINVVNALIEKNSERDAEGKITKYFHFDEIRIELARELKKNAQERYEMTQNINKAKLEHQKISEKLQKQFGIKNPTKSDIIRYRLYKELEHNGYKELYTNTYIAPDVLFSKNIDIEHIVPKARVFDDSFSNKTLAFKDFNIKKGEYTAFDYITSLNNEEKLNQYLTRVENAYKTKSISLTKYKNLLKKASEIGDGFINRDLRDTQYIAKKAKEILFQVTKNVLSTSGNITDRLREDWGLVNVMKELNMPKYQSLGLTEVEERKDGNKVTVIKDWTKRNDHRHHAMDALTVAFTKPSYIQYLNHLNARKDENNKNYLVILAIEKKETIKVPTNNGKNKRVFIEPIPNFRQVAKKYLEEIFISHKAKNKVVTKNINKPAGTDKQQITLTPRGQLHKETIYGKYQYYVNKEEKVGVKFDERTITKVSNPLYREALLKRLQANDNDPKKAFTGKNALSKKPIYLDEAKTKTLPEKVNLTYLKEDFSIRKDISPDNFKDLKSIEKVIDQGVKRILIKRLQAYGNDPKKAFVDLEKNPIWLNKEKGIAIKRVTISGVNNAQPLHIGKDHLGKTTLNKEGKEIPIDYVSTGNNHHVAIYRDKEGNLQEQIVSFFEAVVRAQQGLPIVDKTYKQAEGWQFLFTMKQNEMFVFPNEATGFNPAEIDLLDPKNKKLISPNLFRVQTISVVKYGNSVVRDFKFRHHLEATLQDDKILQGITFQQIKSLEPLRNIVKVRINHLGDIVNIGEY

SEQ ID NO: 19169 - protein, 1422 aa, unidentified
  REGION 1..1422: note = Cas Enzyme sequence
MSKKHILGLDLGTTSIGFAHVIESENAEESSIKKIGVRVNPLTTDEQTNFEKGKPITVNADRTLKRGMRRNLDRYQDRRKNLVDALLKANIISEDTKLAEDGKNTTHETWRLRAKAVTQEIEKPELARVFLAINKKRGYKSSRKAKNEEEGQAVDGMAIAKQLYEENLTPGQLAYQLLKKGKKTLPDFYRSDLQSEFDKVWNFQKPFYPEIFTDEFYKELQGKGQRATSASFWNKYQFNTAENKGKRDEKKLQAYKWRSEAVSKQLEKEEAAYVITDINNDLNKSSGYLGAISDRSKELYFNKETVGEYLYKQLQQSPHTRLKNQVFYRQDYLDEFEAIWETQAKCHPELTDKLKEEIRDIIIFYQRKLKSQKGLISFCEFESKEIEIEKQGKKIKKTIGLRVAPKSSPLFQEFKIWQILNNLEFRNKETKERFIPDLEAKQSLFDELNIKGNLSAGKIIELLGYKPKGWEVNYKTIEGNQTNKTLYSAYLKILEIEGYDIKDLLKIKSNKDEVELDDVDIPATEIRKMVSELFEVLGIDTRVLGFNAELDGKAFEQQASYQLWHLLYSAEDDIKKYSDEDILTYGNENIGLKKLLCSKFGFKPQHAKILVNVSLSDDYGNLSTKAMRKIYPFIKEHRYSEACEQAGYRHSKSSLTKAEIANRPLKGRLELLKKNSLRNPVVEKILNQMVNVVNTLIDTENEKRKAQGLPEDFKFDEIRVELARELKKNAKERAEMTTSINSAKARHEKIFKTLQKDFGVKNPSRNDIIRYKLYEELKGNGYKDLYTNTYIPKEKLFTKEIDIEHIIPQSKAFDDSFSNKTVVYRQENLDKGNKTAYDYIESRYGKEKVDEFVARIKHLYELGQKSTEDGITKAKFQKLQKKEAEIGEGFAERDLRDSQYIAKKAKNMLFEITPSVVSTSGNITDRLRKDWDLINIMQELNLEKFKKLGLTEMVEKKDGTFKERIIDWSKRNDHRHHAMDALTVAFTKHNHIQYLNYLNARKNEKHKLHSNIIAIETKETELKVDKDGNKKRVFKKPIPNFRQVAKEHLESILVSHKAKNKVVTKNKNKTKAKNGEKVKTELTPRGQLHKETVYGSIKIPVVKEEKIGTKFDLETVECVSNPLYQKLLVQRLSENDNDPKKAFGGKNALSKNPIYIDEVEMQKLPDKVKVVRFKEDYTIRKDIAPDLKINKVVDGGIKTILENRLKEFDNDPKRAFVDLDKKPIWLDEGKGISIKRVTISGVNNAEPLHHKKDHFGNFILDENGEKIPVDFVSTGSNHHVAIYRDEKGDLKENVVSLFEAVEKVNQGLPVIDKNFNQHLGWQFLFTMKQNEYFVFPNEQTGFNPSEVDLLDPQNKKLISPNLFRVQKIATGDYWFRHHLETTVEVKPVLKDIAYKRLGLAGIKEMVKVRVNHIGDMMSVGEY

SEQ ID NO: 19170 - protein, 1505 aa, unidentified
  REGION 1..1505: note = Cas Enzyme sequence
MKTILGLDLGTNSIGWALVKQDFENKEGEILGLGSRIIPMSQETIGKFDSGQSISQTEVRTKLRGTRRLRERFLLRRERLHRVLNILGFLPKHYSENIDFTRKLGQFISETEPKLVYNNQKEFIFKDSFEEMLADFNIHQPELLSNNKKVPADWTIYYLRKKALTNKIEKEELAWLLLHFNQKRGYYQLRGEEEEENPNKLIEFHSLKVTNVLADEPVKGKSDLWYSVILENGWIYRRSSKTPLFDWIDKTKEFIVTTDLNDDGTIKTDKEGKEKRSFRAPAETDWTLVKKKTESEIEKTNKTVGEYIYETLLQNPNQKIKGKLISTIERKYYKQELRKILERQISFHQELQDSKNYIKCIEELYKNNEAHRNNISKKNFVHLFLEDILFYQRPLKSQKSLISECSFESITYKQEGIEKTIHLKCIAKSHPLFQEFRLWQWIKNLKIYSRENDEDVTNKYIDSEEKYVDLFEFLNQRKEVDQKAILKHFKLSEKIYRWNFVEDKKYPCNETLHLIQSRIEKVKDLPTNFLNAEIIEKLWHIIYSVNDKIEYEKAIETFAKKHNLDIESFVENFRKTPPMKSEYGSYSAKAIKKLLPLMRMGKYWNWDAIDDLTKSKIEKFQTGEYDENIKTSVREKSIHLVKNEDFKGLPLWLTSYIIYDRHSESSSNQKWKTAIDLEAYIKAFKQHSLRNPIVEQIVSETFRVVNDIWKQFGNGTEDFFNEIHVELGREMKNPADKRKRITSQVTENENTNLRIKALLAEMLYESTVENVRPYSPMQQDILKIYEEGVLNSSIEIPDDISKISKSSQPTKSELIRYKLWLDQKYRSPYTGNMIPLSKLFTSDFEIEHIIPQSRHFDDSLSNKVICESAVNKLKSNKTGREFIKDCHGQIVDLGFGKTAKIFTEEVYELFVKETYSKNTTKRNKLLMEDIPEKMIERQLNDTRFISKFVMTTLSNIVRESKNDDGVNSKNVLPLNGQITSTLKQSWGLNDIWNELILSRFERLNELTNTQNFTSFNEKHQKHLPSIPLELSKGFNKKRIDHRHHALDALVIACATRNHINYLNNQNALDKNKSKDEKLKTRFDLKAVLCDKKHNDVTNKNYQWEFKQPWKSFVSDSKKQLETTIVSFKQNVRVINKSVNKPEKWVMKAGLLNKVQVVQTKGNSWSIRKPMHKDTVSGIVKLRKVKENITLSNAIDNFENLLDKSLKKQIKNLISKGLNKKEILSFFKSLDNHWNKKDISKVDIYELDDENTASRVSLDTSFNDKKIESITDSGIQKILRNHLELYKGKKDDKGKEIAPETIAFLPEGIDEMNKNIFQLNNGIQHQPILKVRTYETKGNKFPIGVTGNKISKYVEAAKGTNLFFAIYTDENGKRSYETIPLNIVIERQKQGLISVPETNEKGNKLLFYLSPNDLVYVPNEEELNNQNLIDFSKLTKEQANCIYKMVSSTNTQCFFIRNDIATSIIDKMEFSALNKMEKSIDGRMIKSICWKLKIDRLGNLSKASYD

SEQ ID NO: 19171 - protein, 1402 aa, unidentified
  REGION 1..1402: note = Cas Enzyme sequence
MIKRVLGLDLGTNSIGWALVEEKRGSDKKLLDGRIIKLGVRVNPLTVDEKSNFEKGKPISTNANRTSKRSSRRNLQRFKLRREHLFNSLLKAGIITRDSILAENGNGTTHQTLRLRAKAAREKIELEELARVLFALNKKRGYKSSRKTKTQEDGVAVDGMSTAKILYDNNLTPGQFALEQLKEGKKYIPDFYRSDLQEEFDRVWLHQKAYYPEILTDALYKELKDKNKKQTWAICKEPFSIEGIKLNGNKHEQKVQRYQLRVDALSHQLSLEHLVIVLQEINSDKNKSSGYLGAISDRSKILYINNQTVGEYLWKQIEENPHIALKNQVFYRQDYLDEFEKIWETQTKFHKELNPALKEEIRDTIIFYQRKLKSQKGLLSFCEFESWEAIKRDKEGKPILNKSTGQPKMQITGHRVIPKSSPLFQEFKIWQNINNLRFIPKNEGTEGQYTLGEEDKQLLFDELNIRGSLSEKEVLNVLGLSDKEWKTNQPVQDRNKKTVRPIEGNRTNQALYNVYQAIAEREGYGFDWSIKSASEIKAELKAIFPEIGIDAEILDFDANKEGEPFDKQASYQLWHLLYSAEDDHKISEEDRLVYGNSDVNLKKTLHSKYGFKPEYAIMLANISLQEDHGSLSARAIRKILPFLQAGHIYSEACQLAGYNHSNSLTKEERKAKGLKGKLEVLPKNSLRNPVVEKILNQMINLINQVCDEYGKPDEIRIELARELKKSAKEREEAISSINTATKKNEEIRKIIRKDFGFTPTKNDVIRYRLWQELQHNGGRTIFTNQKIEYRELYSKNIDIEHIIPKALLFDDSFSNKTLAFRSVNLKKGDRTAIDFIEEDYLSEVNAYKNRVEMLYKAEAISKAKYQKLLMPANKLPDGFIERDLRNSQYIAKKAKAMLEEVFESVVPTTGSITDQLRADWDLINVMKELNLPKYKSLGLTKVEKRWDSGREKEKEVEVIKDWTKRNDHRHHAMDALTVAFTSHNHIQYINYLNARRDENHKKHSNIMAIEQLIKKDRKFEPPMNNFRQEAKKHLEQILVSFKTKNKVVTQNINKAKGSHKNRIQLTPRGQLHKETVYGQILRPSKKPTKLNSKFSIEQLALVVHPEQKAIVEAHLEKFNKSPELAFSTKTLKKSPLEYKGQPLKEVYCFEIIYTIRKEVNPDNFKDQKSIEKVVDVKQRELLKSRLAESGGNAKAAFSDLDKNPIWLNKEKGIRIKRVTITGVSQVEALHNKKDHFGKEILDENGNSQPADFVSTGNNHHIAIFRDKEGKLQESVVSFYEAVARINNGLPVIDKTLNADMGWQFLFTMKQNEMFVFPGEDFDPSEVDLLDEKNSAQISKHLFRVQKIASKNYFFRHHLETTVETIKVLNGVAYHSQLGLNSIEGIIKVRINHLGKIVHVGEY

SEQ ID NO: 19172 - protein, 1458 aa, unidentified
  REGION 1..1458: note = Cas Enzyme sequence
MKKILGLDLGTNSIGWALIEQDFESKAGKISGAGSRIIPMSQDILGTFETGQSYSQTADRTHYRSIRRLYQRTKLRRERLHRSLNVLGFLPEHYKNEIDFEQRKGQFYPNKEPKIAYYPEQVASKVKYQFLFKSSFLEMVEDFKRRGYNGAIPYDWTIYYLRKKALEKKIEKEELAWLLLNFNQKRGYYQLRGEEEDTNSNKKEEFYELKVSSVEQTHDTSPSGTWYNVHLQNGWVYRRKSKDSLKDWEGLNKKFIVTTHLNADGSEKLDKDGNVSRSFRAPKEDDWGLVKKRTESVLEKSGLHVGEFIYESLLENPEQKIRGSLIKTIERKYYKKELEAILDKQTSFHRELRNDALYKEATLELYPKNSAHRSNIKQRGFKYLFIEDIIFYQRPLKSQKHLIAHCQYEKRTYKNNGGETIEVSLQGAPKSHPSFQEFRIWQFISNLRFYDKEEIVEGQEVSITEKLLKSDSDFAELYHWLSHQREVDQNKTLKYFTQKKLIPKQKKDNPTIRWNFPEDKKYEMGEFKAQLLSRLEKVRNCQPDKFLTQKNELDLWHIIYSVTDKTEFEKALVTFAEKRELDSESFVENFKKFPPFKNDYASYSLKAIKKILPLMRRGKYWKAENLGPQTLQRIEKIVNGEADDKISIRARKLALHLNDTKSFQGLPTSLACYVAYNRHSENEENQKWQTPSDIDKYLKDFKQHSLRNPIVEQLITEALRVVRDIWKHYGQGQKDFFDEIHVELGREMKNPAIKRKKLSQKIQENENTNYRIKEVLRNLKENNIDAKPYSPSHQEILKIYEEGVYQSIENVEDEIEKIRKNNTPSSKDINRYRLWLEQGYISPYTGEVIPLSQLFSNQYEIEHIIPRSRFFDDSLANKVICESSVNALKDNKTALEFITNHGNEKVEFAGKTVEILSSDKYTEHCKRYFKRNRTKLKNLLSYDVPEGFINRQLNDSRFISKYVRNLLSNIVREEEEREAISKHILTIPGSITSQLKQDWGLNEKWNEVVTHRFERLNNLTGTTDFGFWDNKINAFRITVPKELSKGFNKKRIDHRHHTLDALVIAACTKDHVNYITSLNTERNNHSLVSKLRNTKKVLINGKERRIAKAYKLPWSSFPLDAKHQLETTVISFKQNLRVINKSSNKTWQWRNVNGEQKKKLIPQTKGDSWAIRKSMHKATVSAKVESVGKGKIKTTNRTPLGEIKGEKHVEKIYDARIREVIIPNHLNKYLDEKGKPNYEAAFSQSGIKQLNENIEVLNEGKPHAPIYKVPLFEVGSKFPVSEDAKSPKNQKYVEADKGTNLFFAVYWNEEKQKRNFETVPLHQVIVHQKQVASLPTEQRTSVPIKPELGLFLFSLSPNDLVYVPTEEEIENPHLVDLKNLSKDQTNRIYKMVSSTGNECHFIPHHISRLIMKYNAKQKVGEFGSLNKAEKAITGETIKEKCLKIQINSLGKLKTERIA

SEQ ID NO: 19173 - protein, 1041 aa, unidentified
  REGION 1..1041: note = Cas Enzyme sequence
MDSIHSRNLLVGLDLGPASVGWAIFEADAAGKAASILHCGVRIFDAGTVGDISSGRDASRNTARQEAKSRRKLLERKAMRKTHLMRVLERIGLFPELPNHSPTERHKGLCNLDESLRDEFYRLHPEYLNENNGGRRLFPYHLRSIGLHERLTPFELGRAIYHLAQRRGFWSNSRKTPTDADEGEVKAAIRALRVKMGDMHLGEYLARTGGNIPKGPESRIRGQKLHRDMLQDEFTALWHCQAQFHPALLTKDCYEGVWKAIFWQRPLKSAKHLVGFCTLENGSRRTPLCTLEAQRFRLLSKLNNLEAISNQGEVATPDVTQRACLLEHLEKEGDLTFVKARKLMGLNKDWQFNLERGGEKKMEGDRTSAKLRALLGDAWDALPVEKRSRLVLLVYATNKEAVLARVAARDYGLVPETAAALATIRLEDGYLSHSRRAVLKLMPHLEKGVPYATARKIEYGADAPPPLHDRLPPVAIALPGIRNPMVTRTLTEMRRVVNAICDRYGKPASIRVELARDLKRSRKDRMSVTKNMRAREKERNQAYADILEMFPGLGLQQRTAVLKKLLAEECGWQCPYCGEMFSPADVFGPHASVDIEHILPNSRSLDNSFLNKTLAHNACNIKKGNRTPFEAFGADTEAFEAMLERVRRFHCDIGAKKAKLHRFEVTDMAAEFADFTNRQLSDTRYASKLALEYLGQLYGGDAAKRVRASSGGVTALVRDMLGLNSILGRGDKSRADHRHHAVDAIAIAMTDQGMIQRIARAAEWAASHRERLSKAPFHGAWEGFIDTAKDMIMNIAVSLRHRRKVSGQLHDQTFYSRRGERLSIRKKLEKLSPQEVDRIIDPYIRELVKSRLDALGLKDPAKAFAADANAIFLKRLGGTQVKKVRVFVSGKAETIGKGVRARTVMTDGNHHMAVYESLDKKGQPVWKGDVVTLMEAKRRTAKGLPPIIHDAPELGRFLFSLTSGDIIALTEGEGERLWRVRSVWLAGSSARLRLSPLHDARPEKEIRKDGLNPEPMINKLREKACRKVTVTPMGEIRRDNT

SEQ ID NO: 19174 - protein, 1071 aa, unidentified
  REGION 1..1071: note = Cas Enzyme sequence
MGRNDMQQVPYILGLDLGAASIGWALLAAGDGGEPVGVLRSGVRLFEMGCAGDMDKFQRGKEESPNAARRAARQMRRQHRRKARRRQRILVLMQKYGLLPPGNVRDTNARNVFFNTLDAALLNQWLNRHAVTNSPAEADRLSCDPDFLHVFPYRLRADGLARPLSAHEFGRAVYQLAQRRGFLSNRRTEAEEDEELGKVKTSINGLQAEMTAAGAETLGQYLAGLAPSVSRIRGRYTSRDMLRQEFDLLWERQRALHPAPYPAHLREAARNALCDAIFYQRPLKVQANLVGFCELEPGERRAPKYADEAQEFRLLQRLNDLVWYDKQLVPHRLADNPEQYARLREAMLRADSMTFPAMRKLLGLPQGSRFNLEEGGEKKLFGHRVNARMHAVFGDAWDDFAPEKRAAILHDIISMDDARALSGRGRRAWGLSEEKAVQFARPLPEKGYASHSLKALRTLLPAMRAGESYGTVRPRLYPPRYGDAPQDTLPPALDAMSTLRNPVVLRCLTELRKVVNAIVREHGKPVAIRVELARDMKRSRKERTDYSARNRKQESQREKMAERLMSPETGNARIATPRRSDVEKLLLAEECGWQCPYTGRMIGWNDLFGPHPQFDVEHILPYSRCFDDSFLNKTLCHAPENRAHKRGRTPHEAYAADSERMEAILRRVEAFQGDAATCRAKLARFRAPTMQEWEDFAARQLNDTRHASVLACKYLGLLYGPQANRHVQASRGGITAMLRGLWGLNRLLGDGGKNRGDHRHHAVDAIAVAATSRGMVQSLQRAAAQAEAGRVNRLVPRDMVPLPFEGFMEQADNVVLSILPSHRVSRRVRGALHNETIYARRELPDGAVGYAVRKRLDDVGKGKPVGQDAAHTFADKLLDPGLAPSVTLLLTGSVPRRDDDDSPSPVRSVRVLQTGTPVPVGKDGRLCQTASNHHAPVYAVPGKKGEEWVCPGVVSLLEAMQRKEAWKKEEGGPVVDRQGPEGARFLFTLSSGECIRVRVDGRDEYLRVRSVYMEQGVLRVEAVRLQDARPKKEIGKKREGGFFKLSLKQLQEGGCEKVVITPLGTVVPCRD

SEQ ID NO: 19175 - protein, 1508 aa, unidentified
  REGION 1..1508: note = Cas Enzyme sequence
MGRILGLDLGTNSIGWAIIDADINDDGGVKRYNSILDSGVRIFPEGIDPATLGQGDKEKSKNAERRENRQKRRQFYRKRLRKIKLLDLLINHEMCPLRPEELLLWKKWDKNNKSSARKFPSSEIFIEWLRLNPYALRDKALKEDLSLHEFGRILYHFIQRRGFVSSRKEKDKGAIYSGKDDKAGITETRENMGKRTLGQYLYSIIPQKGEPYKEYKDEEGKIIRARSRYTLRDMYIEEFYHIWNRQAKHLGLDGIRVIQTKTRNIKGSLKSKRNINKINKLKTIYGEKNIVISGNKVVSRQEVPLLKHLAGDIWMENDKVCHKYTEDSVLFWQRPLRSQKNLLGKCRYEHQYLNINGKKIESGKTPCYLSHPEFEMFRTYQFVNNIEYGTNQKLDEKQKSLVIDIINSEKRSFKFQDIIKKLKLTSERFNYDNDFSVAGNATISQLKPLFEKDIWENKYDEIWHCFHFYNDNDKLFNKLKSAYRCKCDSADKIENISLKDGYGSLSLKAIRNINPFLKKGYNLSTAVILGGIKNAFGNELWERYSDQHHMIEKDVIRMMKEKNAEGQLIQKVKDYLSKGSGNIDFGFLPNDKRFKKLYHPSVEIQTSYNTLQEEVPPVPNLRNPLVQRALTEMRHVVNALLKEYGYMDIIKIEMGRDLKNTKSARQEMTYRIRDNQKKNEFAKEKLTEFGLAHSRQNIRKYLLYKEIEEQAGHVVCPYTGKTIRINDLLGTGNLFQIEHIIPYSTSLDDSFGNITLCESNFNRDKGEKTPYEYYKSNPDPKAWGGAVSWEDVEMRAFSLLPYNKAKRFTSKKSYESETFISRQLNDTRYISKEAVNLMRSVCADVRVLPGSLTAELRHLWGLNSILQPVNDVDLAKDTVSADENLSIPHWAVVKDDGSFVSVHRQQNEKPQLPKKYCLFPGEIKKEVFISKIFRNMTTPGYDDGKFWCKTRITGDPAFYKVFNEKPFVKADEIILKGVIKNNKFSSDRLSRSLDTDIVENGTYWGVFHVDAVKFCGSERPQVKAGEIALWGAVKEGRFISYNFKYPCALDEPNTWAVLSLTTTNPAYTKVKREIPEIKDDQVLMSGSINKDGVWISDENPDQAYASALPAGKYWALYNIDVNDCEFIRILNEEPKPGPGEKVIEGNIWMDKQGEVRFEPKKNREDQRHHAIDAMTIACTERSFLQALSTYHARQKERDMGMRSRRPEFPHPWDNFRSDAEKSAMSILVSYYKNNRALDLGQKYIVKNGKKYLTRVSAIRGQLHKDTVFGKRTPPDGRTAYHIRKPITGLKNKTHVDKIVDAAIRHMIEEHLRSNYGIDVLKKYDVPADAFYKDGEYRIKLPNKNGEEVPVKKVRMREEVGNAQQLKKDMNQYVNPRNNHHVMIYKDKNGELKESIVTFWEVVQRQNRDESPYQLPDDGQEIVTLMEINDMFLMGVDKNIVIENICNNELGKYLYRIQKLSSGDYFFRHHLASTINNQNEEIRISSFKLWQKYFPRKVILNKTGKIKEC

SEQ ID NO: 19176 - protein, 1000 aa, unidentified
  REGION 1..1000: note = Cas Enzyme sequence
MSSYTLGLDIGSNSIGWALVDLGEKPSIVDMGVRVFPEGVDRDTKGLEKSKNATRREARGARRTHQRRNLRKGQLLSTLQVSGFLPKDDSELRSLFHTNPYQLRKKGLDEKLEPYEFGRVLYHLSQRRGFKSNRKSGKGKEDGVIIKGANALQTEMDSKGCHTIGEYFAGLNADEQRIRGRYTFRSMYEQEFSLLWTKQTEYYPDVLTVELQKKIRDEIIFFQRPLKWDPETIGHCELEPGEKRCPRGDWYARRFRLLQDVNNLIVQNPDGSEDKLSGDQRKILLDELAQKEKLTFDKIRQKLGLMETQKFNAEYKIGRSGKTVESLKGDNFSWSMRSKNIFGPKKWDAIDEQEKMKLNKWLVEFEEDQLREKLRSEYGFNDEQIKALLKIVLPQGYMSFSRKAIIKLLEFMDQGAITSEAIAVAYRGGQTTGGKEDNLDELPMPEDLRNPIVNKALFEVRKVVNAIIREYGKPAKVKIEMARDVQGNKRQRDELHWKQHENKERNEDARKRLKEDIGINNPTRPDVIKYNLWVECGKRCPYTGRQISQTPLFGPNPEFQVEHILPYDRSLDDSYMNKTLCHVDENRVKHDKTPYEAYSHDPERYEQIKQNIKVLPWPKRQKFLQQKINLDTHINRELNDTRYICREVIAYLKKLGVNVRGTRGKITGELRHQWGLDGIFDELATKRDDDHRRHAVDATVVGVTENEHLRKLARSKYSVSGVRFDSPWPDFREEIREKVKHINVSHRACRRVSGKLHEETNYGPTGKNDENGQDIYVYRKPLDALTLPMVDKIVDPVVRGIVKTRLVEKGISLDSSDRKIPKEVWKEPLYMRARKSDKKVPINSVRIHDVKTNMKPLKDKTGKVYRFVEPGSNHHIEIFEYRDEKGNIKRDGKVVTMLDAVQRSQRGEPVIQKAHGPHKKFICSLAINEMFVLELEDQIKILHRVQKIDKNNRIILRPHTYSRKVSDSDNPPLIQRKSASTLRGYKVTVDPIGRIWPAND

SEQ ID NO: 19177 - protein, 1004 aa, unidentified
  REGION 1..1004: note = Cas Enzyme sequence
MASHTLGLDIGSNSIGWALLHLTKNPTILDMGVRVFPEGVDRDTKGLEKSKNVTRREARSARRTHQRRSLRKEQLLRTLQTAGLLPKDDSQLRSLFQINPYQLRKKGLDEKLEPYEFGRVLYHLSQRRGFKSNRKSGKPKEDGVVIKAGNALQAEMDNKKCRTIGEFFASLNPEEQRIRARYTFRSMYEKEFDLLWTKQAGFYRDTVAEDLEKKIRDGIIFYQRPMRWDPDRIGNCELERDENGKPLKRCPRGDWYARRFRLLQDVNNLRVQNPDGSEDKLSEEQRKPILEGLEQKEKLSFDEIRTKIGLMETQKFNAEYRIGPKGKKVESIKGDVFAAKMSGRSIFGAKRWDALDEQERIRLNESLVDLEDDQLRENLRSEYGFDDKQIEAVLKISLPQGYMSFSRKAIQKLLPKMEEGLLTHEAIKEVYGERQTNVGGEQTEKLGDPPELRNPIVQKALYEVRKVVNALVREYGKPERIKIEMARDVQGNRRQREELHWKMRENETRNENTRKRLIEDIGIRNPSREDRIKYNLWQECDRRCPYTGRQISQEALFGLNPEFQVEHILPYDRSLDDSYMNKTLCHVDENRVKHDKTPYEAYSHDPDRYEQIKQNIKVLPWPKRQKFLEQKINLDTHINRELNDTRYICREVIAYLEKMGVPVRGTRGKITAELRHQWGLDGIFKEIGTNRDDDHRRHAVDAVVVGVTENEHLRRLARSKYSVTGVSFEAPWDNFRDEMRERVRHINVSHRACRKVSGKLHEETNYGPTGKKDENGQDIYVYRKPLDALTVPMVEKIVDPVVQEIVKTRLVEKGISLDSGDRKIPKEVWKEPLYMRTTKSDKKVPIKSVRIHDVKTNVKPLKDKTGNVYRVVEPGSNHHIEIFEYTDKKGQVKRDGTVVSMFDAVQRSQRGEPVVFRDYGDGGKFVWSLAINEMFMLETDSGQHVLHRVQKMDQNKRVTLRPHTYSGKLSDYDVSPLIQRKSPGTLRGYKVMVDPLGGIWPAND

SEQ ID NO: 19178 - protein, 1000 aa, unidentified
  REGION 1..1000: note = Cas Enzyme sequence
MASYTLGLDIGSNSIGWALLDLGEKPRIVDMGVRVFPEGVDRDTKGLEKSKNATRREARGARRTHQRRNLRKGQLLSTLQVSGFLPKDDSELRSLFHTNPYQLRKKGLDEKLEPYEFGRVLYHLSQRRGFKSNRKSGKGKEDGVIIKGANALQTEMDSKGCHTIGEYFAGLNADEQRIRGRYTFRSMYEQEFSLLWTKQTEYYPDVLTVELQKKIRDEIIFFQRPLKWDPETIGHCELEPGEKRCPRGDWYARRFRLLQDVNNLIVQNPDGSEDKLSGDQRKILLDELAQKEKLTFDKIRQKLGLMETQKFNAEYKIGRSGKTVESLKGDNFSWSMRSKNIFGPKKWDAIDEQEKMKLNKWLVEFEEDQLREKLRSEYGFNDEQIKALLKIVLPQGYMSFSRKAIIKLLEFMDQGAITSEAIAVAYRGGQTTGGKEDNLDELPMPEDLRNPIVNKALFEVRKVVNAIIREYGKPAKVKIEMARDVQGNKRQRDELHWKQHENKERNEDARKRLKEDIGINNPTRPDVIKYNLWVECGKRCPYTGRQISQTPLFGPNPEFQVEHILPYDRSLDDSYMNKTLCHVDENRVKHDKTPYEAYSHDPERYEQIKQNIKVLPWPKRQKFLQQKINLDTHINRELNDTRYICREVIAYLKKLGVNVRGTRGKITGELRHQWGLDGIFDELATKRDDDHRRHAVDATVVGVTENEHLRKLARSKYSVSGVRFDSPWPDFREEIREKVKHINVSHRACRRVSGKLHEETNYGPTGKNDENGQDIYVYRKPLDALTLPMVDKIVDPVVRGIVKTRLVEKGISLDSSDRKIPKEVWKEPLYMRARKSDKKVPINSVRIHDVKTNMKPLKDKTGKVYRFVEPGSNHHIEIFEYRDEKGNIKRDGKVVTMLDAVQRSQRGEPVIQKAHGPHKKFICSLAINEMFVLELEDQIKILHRVQKIDKNNRIILRPHTYSRKVSDSDNPPLIQRKSASTLRGYKVTVDPIGRIWPAND

SEQ ID NO: 19179 - protein, 909 aa, unidentified
  REGION 1..909: note = Cas Enzyme sequence
LLPEGNEELTVLLQKNNPYELRKRGLDENLGLHAFGRVLYHLSQRRGFRSNRKSGKDREDGVVIKEAGALQADMDAKGCRTLGEYFAGLDPEQQRIRERYTFRSMYVAEFDLLWEKQAAYHPERLNEDLRRKIRDEILFFQRPLRPTDELIGPCELEPQERRCPRADWYARRFRLLQDVNNLIIHNPDGTETKLSPAQRSILLGELTQKEKLTFDNIRKRLGLLETQTFNAEYKAGPSGQKVEALRGDSFAAAMRSKNVFGPKTWDAMEELQKIRLNDMFIRLEDDELAKTLGTQYNLNAAQVQQAMKASLPRGYMSFSRKAILRLLPFMESGSFTNEALDLAGYNRQDASDCETMAYLPLPAQVRNPIVQKALVEVRKVVNALVREHGKPARIKIEMAREVHGSRQQREELHWRMLEDRRRNELVRERLREDVGISNPSRDDVIKYKLWEECGRTCPYTGKQISQNALFGPNPQFQVEHILPYDRSLDDSYMNLTLCEAHHNIHVKRNQTPFEAYGSTPETYEQILQRSRCLPWPKRRRFLQREISLDSQISRELNDTRFICRQTVAYLRQLGIDVRGTRGKVTAELRHQWGLDGVFSELGVRRDTDHRRHAVDALVVALTDNEQLRRLAASKYRVDRERFPLPWIAFRDDTQAMVKQINVSHRASRKVSGALHKETNYGRTDVDRRYVFRKRLEDLSLPMVDDIVDEVVRGLVRRRLEEHGIVANAKNRTLPKEIWKEPLYMKTTQSDKRVPIKKVRVYTVAEQMIPVNDRSGRPYRYVEPGSNHHMEIFEYIAGPRKGTRDAKVVSTYEAVRRSRAGELVVQRDHGPDTRFVCSLAINDMVLMADKAGRTGLYRVQKMSAAKQIYFRHHTASTIEGEETLIRKQATCWEGRKVAVDPLGRVWPAND

SEQ ID NO: 19180 - protein, 993 aa, unidentified
  REGION 1..993: note = Cas Enzyme sequence
MTDYTLGLDIGSKSIGWTLVEHGDCDRIAAMGVRVFPEGVDRDTQGMEKSKNATRREARSARRTRQRRIDRKRRLVRTLRSIGLLPQGRDELVSLFQSDPYELRKRGLDERLDPYAFGRALYHLAQRRGFKSNRKSGKAREDGPVIKGAAALQKEMTAQGCRTLGEYFDVLSVQEQRVREHYTFRSMYLEEFDLLWAAQARYYPQILTEDLRRRVRDEIMFFQRPLKPTDNLIGDCELEPGQKRCPRGDWYALRFRILQDVNNLIVQNANGTERRLTPDERRALLDELHRKAEVAFSDIRKMFGLLETQRFNLEQDGKKTKLKGNPFTSGMRSKKAFGPKRWDEMPESEKVMLSEWLADLEDDELAARLKAQCGLDDAQAEAVLKVSLPQGYMSFSRAAIAKLIPVMEEGKLTSEAKEQVYGDRPPADAIHATDKLGLPPDIRNPIVQKALYEVRKVVNGIIREYGKPRRIKIEMARDVQGSRQQREELHWRQLDNEKRNSEVRKRITEDIGIPYPTRDDVIKYKLWEECNWICPYTGTPIDKTDLFGPCPTFQVEHILPYDRSLDDSYMNLTLCEAHENIHVKKSQTPYETYSHDPQRFEQILERVNKSKMPYAKRRRFWQQEVDLDTQIQRELNDTRYICAEVVRYLRQLGISVQGTRGKITAELRHQWGLDGIFSELGVRRDDDHRRHAVDALIVAVTNNEHLRTLAASKYGQTGARFQTPWPIFRNEARDFVNGINVSHRVCRKVSGPLHEETNYGPTGLKDESGQDIYVYRKRLEDLTAPMVAKIVDPVVRDIVTQRLAENGIHPGAADRKIPKEVWKDPLYMRQTASTKRIQIKKVRIRDVKNNVILLKDRSGQPYRAVESGSNHHIEIFEYTQGPDKGKRDARVVSTYEAVRRSREDQPVVCREHGANTRFICSLAINDMVLLTGKTGELALYRVQKMSAAKQIYFRHHAAARIDREDTLVRRQATLFSGSKVTVDPLGRISVAND

SEQ ID NO: 19181 - protein, 1231 aa, unidentified
  REGION 1..1231: note = Cas Enzyme sequence
MEFRWFCRNETPRGRLRKKEPQDVGYTRYGGSPEGWCLRIFRLVVKNTQTRISYNAAMMACMRQVVKPKSDDSLENERKSDMKILGLDIGTNSVGSAWVDTDQHAVRMGVSVFPAGVEESDTKRGAPKNQLRRAYRSQRKNTARRAQRKHQMRAWLRENGWMPADEIAYKEWIQLNPWILRAEGLHRALSTSEFGRILLHLAQRRGAYGFDVEEDDQDAGKVKEAIDHTRQMMRQRDVGTFGELMATLYCERGKAVGYKGKQARLPIRNRTNAAGEPVYEFCADRDLVREEFLALWNKQRSFDGELAHQLTEERRRQLDDPTGDDTWRCRGILFGQRSTDWDTGVLGRCDLEPTDLGCPRADMHAQEFLVLETVNNIKIIPPGQSKRALRDDERQAVIAALRSQKTASASTVRKALGLHRGMAKTQYALSLDADPKRALNTDWFYREVVCNAVGLSAWQALTQTQRESINQAILKLDPKRQPHAERFERGCRDWWGFDEEQTKRLIRAWHDRPNPNVRLKLSRRAILNLLPYMRAEGATVSEARKRFAEDADNGATPEQRERYGFGGTRPSGAIRRFREKHPDLLPPAPQMLSNPVVRKAIHEVRRHVQAYLRKFGRPDRVIIELARDAKMPAKVRNEQLAANRAREKRRNEIIEQFGLGGLTPTQREKAVKRVLLCQEQGQQCAYCGNGNNTITEKAAAEGVEVELDHIIPESRGGGSGLNNLVLCHTRCNRGKANRTPKEWLSAEAFAKLEQRLQHLKKSNPVKWDNLHKDVPDITGFSESQLTDTAYASRQVADWLREALYGGAISGTRHVYTTKGRYTPWLRRHWGLYASAGMKNRGDHREHAMDALVVALSGPERLQELAHAVEASELAKSEGVAMPDRERLLPPWGDKDTFRVQVMEEFGRLVVAHRPAQRKITGSLHNDTMYGPVLDGEGRLSRYATIKKSVIELTPKHLRVPTQWDELRRHLESAPGEAARRAIRRRMLALEDVKPEKSGVVRDRWFREELRQCLRDNGLDPDRFTSKQIKELVTNKGISLRSGVPVRRTTLLRAPSVVAIRRKRWDDRMGRLTYDEHPQAVRLYEPQNNHHIEIRENAKGRWVGKVVTNFEAAQRVRPSKNSGLDSCSAVDRRDTCEGRFVMSLSIGEMVRMRDRTTRTLDYYVVFKIDSTGTIHFTPHWDAGRSKKTEEAAVRADIPLSPAQLQQLGESETRPPVKVWVGPLGDCKVLMRD

SEQ ID NO: 19182 - protein, 1061 aa, unidentified
  REGION 1..1061: note = Cas Enzyme sequence
MSNTKIKKILGLDLGSNSIGWALLENKDGRPQKIIDLGSRIFTKAVEDKTPTPKNVNRRESRLTRRVLQRRSRRKQRMLNYLISLDLLPKSLRDNPAPEIILNTLGDPYELRAVALDKPLEKHQLGRVFLHFVQRRGFLSNRKTILGDLVDDPDVTAVLAEAESEEDTSTEQAKEETVFKKQISVLRQTILETLAPQNSKSKDNKCRTLGEYLYTIKAPLTRRNRTHSGGELRTDRQMYRDELDLIWKQQATHHTVLNEDVKEQIEEIIFLQRPLKLRSDRIGKCSLEPKKNRISIARLEYQCFRYLQDVNNLEFMLPSENHWTKLNEDERQKLILLFESKSSVSFTEVKKTLDLKRNVKINLEEGGNKKFKGNVTASAIRKVIPEWDNFDSPQQLSFVEDMLSIQKKSTLKKRLTGHWNLNPETAVQLCMLEFEPGHGNLSLKAINKLLPYLERGMLFNEARVEAGYGYETEQTEAKERLGMPPETSNPIVNKGLHELRRLVNAIISEYGKPDVIRIEMARDLEMNTKRYKANETQQTANTKANEKATEAFQEIGSKNPQLGLRHYPSHTDKLKYRLWLDQEKRCAYSNQCINLTSLFTGEVEIDHILPYSQSLDDSFMNKVVCLTSENRNKGQRTPVDAFSTNPEKWEQIKQAIFKWGKKLKSKQNRFFMSAAEVQKRDFISSQLNDTRYMSRVALDYLKQLGADITTCKGITTSHVRHWWGLNNLLGETDKKDRTDHRHHAIDAVVIATIDRGFYNKIVSTAKSFEESNSALSMNDLVVNPPWSELRNDLDKKLGTVIVAHVPNRKLSGALHKDTGVGFIKGKGTVYRKLLNSDMTVKRAEEIIDPHVRALVIEHLSQFENDPKKAFAEGVKVFHKDGKTLIKRVRVLQSKEYKTLEKLEKSKFGVRDHQGKLYKWFAYGNNHHVEIVRNRNTRKVRGIFVTMMEASHRAKGIGNNVKVPKQPTVKTDHGPDTDFLMDLHINDLVSVEQEGERKFYRVQALERDGKKLELRLHTAATDQKPEEGVRKAITTLVNDFHIQKHSVNSIGKIRNDKTHSRH

SEQ ID NO: 19183 - protein, 1050 aa, unidentified
  REGION 1..1050: note = Cas Enzyme sequence
MLSASFFYGRGNMATILGLDLGSNSIGWALLEEVDGKPSRIIDLGSRIFTKAVEEKTPTPKNVKRRNARLARRVIQRRARRKQRMLNYLISLKLLPELLKNHTQPEKILNTLGSPYDLRAKALDEPLEPFELGRVFLHLVQRRGFLSNRKTLLSDMMDDPDVLSVLDEMDEQSDDTEKASEETAFKKDISQLRQKIGAVSCRTLGEYLATLKHGDYKRNRNRSGGHLRTDRQMYRDELEMIWEAQKKYHDTLTDEVKEQVDNIIFYQRPLKLKEDRVGKCSLEPKNKRARIARLEYQRFRYLQDINNLQYFDRIDEKWIALSDEQKEKLKILFENKSIITFPAMRRELKLDKSAEFNLEDANKKLKGNITACEVRSVLPQWDDMGADNQLTLLEDLLSFQKKSALKKRLVGHWGFDVKTAVNLCLLEFEPGHGSLSLKAIRKILPHLELGQIYSDARVNAGYGYEQEQGATVDKLGLPPEVPNPIVSKGLYELRRVINALIAEYGKPDKIRIEMARDLEMNTKRYKDFTARQRKNTKLNDEATEKYQQAGKEYPHLHLSKYPSHADKLKYRLWKDQQEMCAYDISGRKISLAELFSADIEIDHILPYSQSLDDSYMNKVICRTKENRRKGQRTPVDAFSGEQWEQIVQRISRWDRSLKSKKNRFFLKAADVQKRDFISTQLNDTRYISKVALDYLKTLGADINVTKGIMTGWLRHQWGLNSLIGQDKKNKDRVDHRHHTIDAVVTACIDRFFYKDLVKMAKGLEKEKSQFTPKDIHTDTPWQNLRNDLQTALENIIVSHTPHRKITGGLHEETGVGFIEGKGTVYRVDLSPEFKLTQVKKIVDAEVREIITDHLAKYDNKPKNAFADGVIVYHKDGKTPIKRVRIVQSKTTRKKLESSKFGVRNKQGKVFRWMAYGNMHHVEIIQHKKTKAYKGVFVTALEAHRRAMTGSKSAMKRGVLFEPIIKKEHDEQYDFMMALHINDLVSVETNDGAKFYRVQKLESDSSRMTLRLHNAATIKNDDEEIRLSISSLMQQKMKLFQLNAIGRKIND

SEQ ID NO: 19184 - protein, 1026 aa, unidentified
  REGION 1..1026: note = Cas Enzyme sequence
MAKVLGLDLGTNSIGWSLLESSDNRGNEFIGIVDSGVRIFQEGVDRSTTGAELSKNAKRRDARGARKLHKRRNQRRNALKELLIQHHLLPSDELNWQKIMQNNPYQIRSQLLLLEQDTVDKQSDTAILFTLGRALYHINQRRGFKSNRISGESDGKVATALTELQQQIGEKHYRTLGQYLYSLDPREQRIRCRYTSRAMYEEEIETLWAHLSLFYPSKLDDTLKNLVKNIIFYQRPLKAQKFLVGICEFEKREVLNDKGDKVWTGKKRSPKGSWYAQQFRLLSEINNLTVIDGNDEWQLSQDLDLRDKLVKALQKKKTMNFNAIRKLLFDKNDQPYDHIRFNLEEGGRDKLQGNEVEASLRTVLKKDYEHLSIEYRDNLVHDLLFLEDQIVVQSHCEKIGKHISLSAEQVQALANIKLVDGYVHLSEKAMKKLLPYLEQGLKYSDAVEAAGYLRKDQQEDNIVPQLGEPPQLRNPIVQKGLYEVRKVVNAIVRKYGKPDFIRVEMARDLKQSAGQRKEVGFRNAKNRRRNDEIRKRLIDEYAIANPSRNDVIKFRLWEECNHTCPYTNQTISAAMLFSSEVEIEHILPYSRTLDDSYINKTLCMSSENKNKGNQTPYEAYHADADKFSMMLARVRKFTGQFGYKKFNKFRQKEIDLDSFIKRQLNDTRYISREVTKYLQQLVGKYGVQSGRGQMTSTLRHLWGLNGILSDSGEKTREDHRHHAVDAIVTALSTPKALKAVSSASKYGHLNKLSIEQFPMPWEGFRHDVEASIQSIIISHRVMRKIRGALHEETAYGALSFTDDKNQKMYAVRKAVSALSHKEITQIADEKIKGAISSHILQKGYDPKDKADVAKALKEADKNPPTMLSGQPIKRVRLHKPFSKMRILNNKQGQAYRAMQEGSNHHIVIYEYEDKRGKTKRGGHVVSMFDAAQRARHGKPIIERKLEDGQRFVMSLSINELVQVPKGEGESNVYRVQKMRSNTQVCLRLHAAANINSRETCLEVMPSSFKGRKVVIDPLGQIYPAND

SEQ ID NO: 19185 - protein, 1054 aa, unidentified
  REGION 1..1054: note = Cas Enzyme sequence
MWIVKSIILKQGVTMSYVLGLDLGPNSIGWACIDNNNKRAIDMGVRIFQEGVNRAPTGKESSKNEVRRLKRQSRRQYERARQRRENLVSVLKRNAMYPDTPEGEKDFFSWNPYELRRRALDDKLSLLETGRVLFHINQRRGFKSSRKRQGDAKEDSTLYVETGELEAKIKAAGCRTLGEYLAGLNPMEQRIRDNYTLRKWYEDEFDAIWTVQGGHYAELTDTLKDEIRNRIIFYQRPLKSVARFIGNCSLEPVRTVKYIDKKGKERTILKGEKRCRKDSFEFQRYRIFEQINRLKYIGEDGVERLFFKRKDDKGKFVEFDEETRNLRDRLIAELEKSAECKYDKARKLLKLPEGTRFNLEGEGEAKLIGDRTGAELAKVFDRKKWSSMTAEQKEKVYQVYIFASDEEWLLRYAKGKEKEQWGLDDKRAEKILKINLESGYAAYSKKAILKLLLHLEAGFALSDAIEMAGYGKGKKSEYGENPLKDLRNPLVAQTLYELLRFLPKLEKVHGRPDEIRVELARELKVSSEKRGKMTKDNFKRRAENERVSGKLIEYEIQPNHDAVQRYKLWEECKGICPYTGRSISVDALFKTNEFQVEHILPYSRSLDDSFMNKTLCHTGENKIKGNHTPYEEYGSTAAKWDEILMRVKHFPYSKRERFTMKELPDDFISRQLNDTAYISREAKSLLESKDIKGMDYKVSVSMGRATAQLRYLWGLNNVLGGGAEGVKNREDHRHHAIDAVVVALTDIKTLESLQWYYKHGKTPTERRFPAPWDNFRSDIEGLAGRILVSHRVNKRVRGQLHEETYYGSTGLKKDKKMSIYVVRKKLEDLTPDMLESIRDEEVRKIIIDALEANGISRKDKNGIKNYFKNNPVFMKCAKGLKIPINKVRTIKVAGNMIPLPGRDDDKTFVEPGNNHHAVFYRYIDKNGKPRYDAEVCTLFEAVRRLKKGEAVIKRRLCEGREFLVSLKINELVLISDDGLIDASRIFDDREAISRRLFRVQKISDKITLRLHRHALTDDVNVVESAIKKFAGEIGSGRALKVKIDRLGRLDRAND

SEQ ID NO: 19186 - protein, 1008 aa, unidentified
  REGION 1..1008: note = Cas Enzyme sequence
MSLYKTVLGLDLGVTSIGWALLKFECDEKAKILRDEGLISNANIIDRGVRIFPATTEDKTNAPKNHKRRTSRGQRRLVMRKAKRRNELRDLLSANGLLPAIESATSAGAFHNLGDPYSLRVRALDEKLAPFEVGRVIYHLSKRRGFLSNRKSGTSSEDGKVLGGIKEVREALEREGHRTLGEYLAKQPRKRKYFTHRTMSDSEFESIWTAQQPYHNGLLNNDLKARIKNIIFYQRPLRSQRGLIGKCTFEKDKKRCDMARQEAQRLRYWQDINNLQLQDPQTLHWRPLTDKEKTRVADELENTKEFTYKNGKITKLRKLLKITDDVRINLEANEKKIYGNKSAYAFRRALGKRWDEYNEEEQNRLIEELFRIENESALERRLKGFWGFNDEQVEKLEGVWHQLEDGYSRLSLKAIRKVLPLMMDGKRYDEAVAEVYGDHRRQFGREEFQKLELPPKDLRNPIVYKALCEVRKVVNAIIREYGRPDEIRIEMARDLKLTKLQKERSNKQANQNKRDNEEAERFYKERFGLENISGSDKLKYRLWKESGGTCPYTGKPIPPETLLDDGLVDIEHIIPYSRCFDDSYMNKTICDAKFNREVKKNQAPGEIYDRESKEFFELMQRVSILPGGKRKKFEMSRQEIEEKGDSGQWIGRMLSDTRYICREVRGYLRQLYPYSPDENKYVSVVAGGATANLRHVWHLNAILSDGDIDIKNRWDHRHHTIDAIVVALCDRGLYQYISRLAGRNRDLMKRILSGFSEPWSGFLNDVETAMNGLIVSHAPTRRIRGQLLEETAYGATNTPGVYVVKKSLESITLPGVKNIVDPVVKELVELRLSQFGKDIKKAFAEPLLHKDGKTPIKNVRIFVTMSPETVVGIKDGEGKEYKFYPTAGNHHVKIYENIETDERKAVLVPRFYAAQRGWKPADLGPEWRKLFTLCSNDYVEFLGDDGKLRILKIQKMSGGGTVVIIARPLEDARSEYVAGVVQQLQAHLKKITRKLQVDPIGHLTQASD

SEQ ID NO: 19187 - protein, 1438 aa, unidentified
  REGION 1..1438: note = Cas Enzyme sequence
MRHILGLDLGITSTGFCHIIEDENMKNSTIEEIGVRIIQLDNFVSTKTGEDSKDPSKDFSAGKGISSNAGRTQKRRARINLDRYQLRRKQLIELSLQAGLITSSTILAEDGKNTTHSTWQLRAKAAVERIEKDELVRVFLAINKKRGYKSSRKVKNKDDGQIIDGMAIAKRLYDENLTPGQLVLQLLKEKKKQLPDFYHSDLQREFDLIWNFQKEFYPNILTNDLYKALQGKNKTDSSSIFYNYYHFNTAENKGTKEQMRLQAYRWRVDALSKKLSKEEVAYVLVEINSNLNNSSNYLGNISDRSKELYFNKQTIGQFLYTKLKEDRHYSLKNKVFYRQDYLDEFERIWEAQAIFHKELTGDLKKQIRDTIIFYQRRLKSQKGLISLCEFENKEITIEKEGKTVTKQIGVRVIPKSSPLFQEFKIWQILNNVVCKKKGTRKKKAVTPAPLLFELFGTPSETFFSLDMECKQLLFEELNLKGNLKADKVIRLLGYIPQEWEINYNQLEGNRTQKSLYEAYLKIIEIEGYDIKTFLRIKSDKEDWDLEETPLSAKEIRENIQHIFETLGISTAILYFDATLPIKDFEKQASYQLWHLLYSYESDNSPSGNETLYKLLQDKFGFKREHAVFLSNISFQNDYGSLSAKAIRKIYPYIKENQYSTACELAGYRLSKLSLTKEELNNRPLKDLISPLKKNSLRNPVVEKGLNQMINVVNALIEKNSEKDAEGNIIKYFHFDEIRIELARELKKNAQERAEMTLNIKNATIEQEKIKRLLISDFGIKNPTKNDITRYRLYQELAHNGYKDLYTNTYIPKELLFSKNIDIEHIVPKARVFDDSFSNKTLAYRDFNLKKGENTAFDFIDSSLGEEELNQYITRVENAFKAKKISATKYKNLLKKATEINDGFINRDLRETQYIAKKAKELLFQITRSVVSTSGSITDRLREDWGLIDIMKELNMPKYRDLGLTEIIERRDGRKVEVIKDWTKRNDHRHHAMDALTIAFTKPSYIQYLNHLNARKDENNKLYADILGIERKETTKIHDENGNEKRVFIEPIPGFRQIAKKYLEEILISHKTKNKVVTKSINKIAGTNKKQETLTPRGQLHKETIYGKYHYYSNKEEKIGTKFDKETISKVSNPLYRKALLKRLQANDNDPKKAFTGKNALSKKPIYLDEAKTKTLPEKVNITYLEEDFSIRKDISPDNFKDLKSIEKVIDQGIKRILIKRLQAYDNDPKKAFADLDKNPIWLNKEKGISIKRVTISGVKNTQALHSKKDHLGKPILDKEGQEIPVDFISTGNNHHVAIYRDKEGNLQEQIVSFFEAVVRAQQGLPIIDKTYKQEEGWQFLFTMKQNEMFVFPNEITGFNPSEIDLLDPKNKKLISPNLFRVQKIATKDYFFRHHLETNVETDNVLKNTTWKREGLSGLKDIVKVRINHLGDIVSIGEY

SEQ ID NO: 19188 - protein, 1456 aa, unidentified
  REGION 1..1456: note = Cas Enzyme sequence
MKHIKYILGLDIGSNSIGWALIQLFIEEKQGKIIATGSRIIPMDQGLLGDFEKGNSVSQTAERTFYRSTRKLRQRHLLRRERLHRVLHILGFLPPHYDKQIDFSKRYGKFVDNTEPKLTYEEGRFLFMDSFQEMLSDFKSHQPTLFYTKKKGEESKIPYDWTIYYLRKKALSQKISKEELAWIILNFNQKRGYYQLRGEEEVENPNKEVTYYSLMVTEVTAEAPNKKGEIWYSIQLENGWVYRRTSKIPLDDWKGKVRDFIVTTELEEDGSVKRDKEGKEKRSFRAPDENDWNLLKKKTEQDINTSQKTVGSYIYDHLLQNPNEKIKGKLVRTIERKYYKEELKAILEKQIALQPELFTDQLFADSIRELYSKNEAQQRNLAARDFVHLFVEDIIFYQRPLRSQKSTIANCSLESRSYIDKDSHTRKEAPLKVCSKSNPYYQEFRVLQWLQNLKIYEIDSDQEVTHQFIKTLEDKQQLFEFLMALKEIDCEELLKYFLSLTYPNAKEKALKSELKKWKDTYRWNYVYDIGEKSSKKYPMNETRYEFKRYLEKVANLPDDFLSPEVEYLLWHLIYSVTDKVAYEKGLKKFAQKHHLDEDSFVESFKKFKPYPSEYGSFSEKAIRKLLPLMRFGSYWDFNHIDKNTQKRIDDLITGVENEEIRTILREKAEKYQLEKETDFQDLPLWLAQYIVYNRHAEASSLEKWTSVNDLETYLNEFKQHSLRNPIVEQVVTETLRVVRDIWQQYGQGQADFFDEIHIELGRELKKTAKEREELSKQNQKNEDTNLRIRALLAELGEDSTIENVRPYSLMQQELLKLYEEGVFSSSMEIEDDIEKIHKKATPSKAELQRYKLWLEQKYKSPYTGQIISLKRLFTEDYEIEHIIPQSRYYDDSLSNKVICESAVNKLKGNQLGLEFIKNHYGEKVHTAGKEVSILTEEQYKEFVKNHYTNNSGKMKKLLLEDIPEKMVARQMNDTRYISKYISEILSKIVRSGERDEGVNSKNVILCTGKITSALKQDWGVNDVWNDLILPRFERMNALTQSTLFTTYNEKFQKYLPTVPMEYSNGFQKKRIDHRHHAMDAIIIACATREHINYINNQHALEKGKNKEEKQKSRIDLRTILCEKKYNDNAEENYSWIFKKPWDTFTQEVRAALEGIVVSFKQNLRVINKATNYYEHWVEENGKFIKKMVKQEGTNWAIRKPLHKETVSGKITLEREKVSKGKILTATRKAIDSTFTEKVIEGITDTEIQKILLNYLKFKKSPEIAFSPEGIEELNKNIALYNDGKPHKPIRKVRIFEQGSKFPLGEVGNKTTKYVEAAKGTNLYFGVYQGKDKRSFATIPLNEVIERQKQGRSSVPEYNEKEDPLLFSLSPNDLVYVPVEGEIIEDIDFQNLSNEQKERIYKIVSFTKGRVYGIPYKVAISIVNKLEYTQLNKIEFIKEKEVCIKLKVDRLGNISKA

SEQ ID NO: 19189 - protein, 1424 aa, unidentified
  REGION 1..1424: note = Cas Enzyme sequence
MKRILGLDLGSNSIGWGLIEQDFQQKQGRIIAAGSRIIPMDQGLLGDFEKGNTVSQTAERTFYRSARKLRERHLLRRERLHRVLHILGFLPTHYDKQIDFSKRYGKFVDNTEPKIAYNEGKFLFMDSFQEMLADFKIHQPNLFYTKRNGEESKIPYDWTIYYLRKKALSRKISKEELAWIILNFNQKRGYYQLREEEENKENDFEIISSKIISVIKKDKDKKYNKYWYDIILENGLVYQAAFYNDFVYNWINQDREFIIERTSLKNGTEKVKLSYLPTFDEIDKMDKKEQDKYYKKIKIKTENSIGNKTVGCYIYDHILQNPNEKIKGKLVRTIERKYYKEELKAILEKQIALQPELFTDQLFADCIRELYSKNAAQQRNLAARDFVHLFVEDIIFYQRPLRRQKSTIANCTLESRSYIDKDSHTRKEAPLKVCPKSNPYYQEFRVLQWLQNLKIYEIDTDQEVTHEFIKTLEDKQQLFDFLMDQKEIDCEELLKYFLNQTYPNAKEKALKSELKKWKETYRWNYVYDMGEKSSKKYPMNETRYELERYLEKVDNLPDGFLSSEVEYLLWHLIYSVTDKIAYEKGLKKFAQKHHLDKDSFVESFKKFKPYPSEYGSFSEKAIRKLLPLMRFGAHWDFNHIDKNTQKRIEDLIIGVENEEIRTILREKAEKYQLEKENDFQGLPLWLAQYIVYNRHAEASSLEKWTSVNDLETYLNEFKQYSLRNPIVEQVVTETLRVVRDIWQQYGQRKADFFDEIHIELGRELKKTAKEREELSKQNQKNEDTNLSIKEKLKELEKYNTRAYSITHQEKYKLWLEQKHISPYTGQIISPENLFTDNYEIEHIIPQSRFFDDSLSNKVVCESIVNKAPYKDRQLGLEFIKNQGGRIVKELSKENKTIKIFTEKQYRTFIKEHYSNNPAKTKKLLLEEIPEKMVARQMNDTRYISKFISEILSKIVRSDEQDEGVHSKNVILCTGKITSILRQDWGLNDVWDNLILPRFERMNNLLQKEKFTIYSIEKQKKIPVVPINDQFKSFQKKRIDHRHHALDAIIIACVTGEHINYINNQHALEKGKDKKEKQKEHDKLREKLCIKKYNKGSEENYSWIFKKPWNTFTQEVRATLEGMVVSFKQNLRVINKATNYYERWVEENGKYIKKMVKQEGTNWAIRKPLHEETISGKIYLDREKITKNDILTATRKTVDSSFDEKRIKKITDTGIQKILLNYLEYKGSPEIAFSPEGLEELNKNLSIYNDGKPHKPIYKVRIYEKGSGRFALGEKDRKYRKYVQGAPNLYFGIYQGKDKRSFATIPLNEVIERQKQGLSSVPEYNEKGDPLLFNLSPNDLVYVPIEGEIIEDINFRNLSNEQKERIYKIVSFTKGRIYGIPNRVAVSIVNKMEYTQLNKIEFIKEKEICIKLKVDRLGNLSKAGV

SEQ ID NO: 19190 - protein, 1429 aa, unidentified
  REGION 1..1429: note = Cas Enzyme sequence
MKKRKHILGLDLGTTSIGFAHIVEDENKEKSEIKELGVRIVSLTTDEQSDFEKGKSITTNANRTLKHGARLNLDRYQQRRKYLIDLLQKANLITSSSILAENGKNTTHSTWQLRAKAVTERVEKEEFARILLAINKKRGYKSSRKVKTEDEGQAIDGMAIAKRLYDENLTPGQLSLQLLQQNKKLLPDFYRSDLQKEFDLVWNFQKQFYPDILTDSFYKELQGKGKDATSKAFSKKYHFDIAENKGSKESVRLQAYQWRVEAISKQLSKEEVAYVLTEINNNLNNASGYLGAISDRSKELYFNRQTVGQYLYAQLQENRHNSLKNKVFYRQDYLDEFERIWETQASFHKELTDELKKQIRDVVIFYQRKLKSQKGLISFCEFESKEIEIEKDGKTITKSIGARVVPKSSPLFQEFKIWQILNNVICKRKGIRKKKISAKTTQLDLLNESSQTIFSLDMECKQLLFDELNLKGDLKSDKVLKLLGYSPQEWEINYNQLEGNRTQKALYEAYLKIVEMEAHDVKNILQIKSAKDDWSLDESPLSASEIKEKVKDIFQALGICTKILYFDPLLPVKDFEEQDSYQLWHLLYSYESDNSTSGNETLYRILEKKYAFKREHARILANIALQDDYGNLSTKAIRKIYPYIKENQYSTACEKAGYKHSKLSLTKEELEARELKNIIPLLKKNALRNPVVEKILNQMINVVNALIEKNSERDAEGKITKYFHFDEIRIELARELKKNAQERYEMTQNINKAKSEHQKISEILQKEFGIKNPTKSDIIRYRLYQELEHNDYKELYTNAPIAPDVLFSKNIEIEHIVPKARVFDDSFSNKTLTFHRINSDKGEYTAFDYITSLNSEKELNQYLTRVENAYKTKSISPTKYKNLLKKASEIGDGFINRDLRDTQYIAKKAKEILFQVTKNVLSTSGSITDRLREDWGLIDIMKELNMPKYRDLGLTEIIERRDGRKVEVIKDWTKRNDHRHHAMDALTVAFTKPSYIQYLNHLNARKDENNKLYADILGIERKETTKIYDENGNEKRVFIEPIPNFRQVVKKHLEEIFISHKAKNKVVTKNVNKPAGTDKQQITLTPRGQLHKETIYGKYQYYVNKEEKVGVKFDKETITKVSNPLYREALLKRLQANGNDPKKAFTGKNALSKNPIYLDEAKTKTLPEKVNLTYLEEDFSIRKDISPDNFKDLKSIEKVIDQGVKRILIKRLQTYDNDLKKAFVDLEKNPIWLNKEKGIAIKRVTISGVSNAQPLHIGKDHLGKTILNKEGNKNPIDYVSTGNNHHVAIYRDKEGNLQEQIVSFFDAVVRAQQGLPIIDKTYKQAEGWQFLFTMKQNEMFVFPNATTGFNPAEIDLLDPKNKKLISPNLFRVQKIATKDYFFRHHLETNVETDNVLKNTTWKREGLSGLKDIVKVRINHLGDIVSIGEY

SEQ ID NO: 19191 - protein, 1400 aa, unidentified
  REGION 1..1400: note = Cas Enzyme sequence
QLDNFVSTKTGEDSKDPSKDFSAGKGISSNAGRTQKRRARINLDRYQLRRKQLIELSLQAGLITSSTILAEDGKNTTHSTWQLRAKAAVERIEKDELVRVFLAINKKRGYKSSRKVKNKDDGQIIDGMAIAKRLYDENLTPGQLVLQLLKEKKKQLPDFYHSDLQREFDLIWNFQKEFYPNILTNDLYKALQGKNKTDSSSIFYNYYHFNTAENKGTKEQMRLQAYRWRVDALSKKLSKEEVAYVLVEINSNLNNSSNYLGNISDRSKELYFNKQTIGQFLYTKLKEDRHYSLKNKVFYRQDYLDEFERIWEAQAIFHKELTGDLKKQIRDTIIFYQRRLKSQKGLISLCEFENKEITIEKEGKTVTKQIGVRVIPKSSPLFQEFKIWQILNNVVCKKKGTRKKKAVTPAPLLFELFGTPSETFFSLDMECKQLLFEELNLKGNLKADKVIRLLGYIPQEWEINYNQLEGNRTQKSLYEAYLKIIEIEGYDIKTFLRIKSDKEDWYLEESPLSAKEIRENIQHIFETLGISTAILYFDATLPIKDFEKQASYQLWHLLYSYESDNSPSGNETLYKLLQDKFGFKREHAVFLSNISFQDDYGSLSAKAIRKIYPYIKENQYSTACELAGYRHSKLSLTKEELNNRPLKDLISPLKKNSLRNPVVEKGLNQMINVVNALIEKNSEKDAEGNIIKYFHFDEIRIELARELKKNAQERAEMTLNIKNATIEQEKVKSILISDFGIKNPTKNDITRYRLYQELAHNGYKDLYTNTYIPKELLFSKNIDIEHIIPKARVFDDSFSNKTLAYRDFNLKKGENTAFDFIDSSLGEEELNQYIARVENAFKTKNISATKYRNLLKKATEINDGFINRDLRETQYIAKKAKELLFQITRSVVSTSGSITDRLREDWGLIDIMKELNMPKYRDLGLTEIIERRDGRKVEVIKEWTKRNDHRHHAMDALTVAFTKPSYIQYLNHLNARKDENNKLYADILGIERKETTKIHDENGNEKRVFIEPIPGFRQIAKKHLEEILISHKTKNKVVTKSINKIVGTNKKQETLTPRGQLHKETIYGKYHYYSNKEEKIGSKFDKETISKVSNPIYRYALQKRLEANENNPKKAFTGKNALSKNPIYLDDAKTKILPEKVNLTYLEEDYSIRKNISPDNFKDLISIEKIVDEGIKRILKERLKTYNNDPKKAFADLDKNPIWLNKEKGISIKRVTISGVKNAQALHSKKDHLGKPILDKEGQEIPVDFVSTGNNHHVAIYRDQKGNLQEQIVSFFEAVVRAQQGLPIIDKTYKQEEGWQFLFTMKQNEMFVFPNEITGFNPSEIDLLDPKNKKLISPNLFRVQKISIKDYFFRHHLETNVETNNILKDITWKRGGLSLLKGIIKVRINHLGNIVSIGEY

SEQ ID NO: 19192 - protein, 1464 aa, unidentified
  REGION 1..1464: note = Cas Enzyme sequence
MKRILGLDLGSNSIGWGLIEQDFGQREGKIIAAGSRIIPMDQGLLGDFEKGNTVSQTAERTFYRSARKLRARHLLRRERLHRVLHILGFLPTHYDKQIDFSKRYGKFIGDIEPKIAYNDGKFLFMDSFQEMLSDFKSHQPDLFYTKRNGEESKIPYDWTIYYLRKKALSQKISKEELAWIILNFNQKRGYYQLRGEEEVENPNKEVTYYSLMVTEVTAEAPNKKGEIWYSIQLENGWVYRRTSKIPLDNWRGKSRDFIVTTELEEDGSVKRDKEGKEKRSFRAPDENDWNLLKKKTEQDINTSQKTVGCYIYDHLLQNPNEKIKGKLVRTIERKYYKEELKAILEKQIALQPELFTDQLFADCIRELYSKNEAQQRNLAARDFVHLFIEDIIFYQRPLRSQKSTLANCSLESRSYIDKDSHTRKEAPLKVCPKSNPYYQEFRVLQWLQNLKIYEIDTDREVTHEFIKTLEDKQQLFDFLMAQKEIDCEELLKYFLSLTYPNAKEKALKSELKKWKDTYRWNYVYDIGEKSSKKYPMNETRYDLKRYLERVANLPDDFLSSEVEYMLWHLIYSVTDKVAYEKGLKKFAQKHHLDEDSFVESFKKFKPYPSEYGSFSEKAIRKLLPLMRFGSYWDFNHIDKNTQKRIEDLITGVENEEIRTILREKAEKYQLEKETDFQNLPLWLAQYIAYNRHAEASSLEKWTSVNDLETYLNEFKQHSLRNPIVEQVVTETLRVVRDIWQQYGQGKADFFDEIHIELGRELKKTAKEREELSKQNQKNEDTNLRIKALLAELGEDSTIENVHPYSLMQQELLKLYEEGVFSSSMEIEDDIEKIHKKATPNKAELQRYKLWLEQRYKSPYTGQIISLKRLFTEDYEIEHIIPQSRYYDDSLSNKVICESAVNKLKGNQLGLEFIKNHYGEKVRIADKEVSIFTEEQYKEFVKNHYTNNSGKMKKLLLEDIPEKMVARQMNDTRYISKYISEILSKIVRADERDEGVNSKNVILCTGKITTALKQDWGINDVWNDLILPRFERMNDLTQTSLFTSYNEKYQKYLPTVPMEYSNGFQKKRIDHRHHAMDAIIIACATREHINYINNQHALEKGKNKEEKQKSRIDLRTILCEKKYNDNDEENYNWVFKKPWDTFTQEVRAALEGIVVSFKQNLRVINKATNYYEHWVEENGKLIKKMVKQEGTNWAIRKPLHKETVSGKITLEREKVSKGKILTATRKAIDSTFTEKVIQGITDTGIQKILLNYLKFKKSPEIAFSPEGLEELNKNISLYNDGKPHKPIRKVRIFEQGSKFPLGEVGNKATKYVEAAKSTNLYFGVYQGKDKRSFATIPLNEVIERQKQGLSSVPEYNEKRDSLLFSLSPNDLVYVPIVGEIIEDIDFRNLSNEQKGRIYKAASFTRNECFFIKSSIASLIKNYDAKTKIGELGSQNKLEVTICKGIRIKEVCIKLKVDRLGNISKA

SEQ ID NO: 19193 - protein, 1034 aa, unidentified
  REGION 1..1034: note = Cas Enzyme sequence
CPKSNPYYQEFRVLQWLQNLKIYEIESDQEVTHQFIKTLENKQQLFDFLMAQKEIDCEELLKYFLSLTYPNAKEKALKSELKKWKDTYRWNYVYDIGEKSSKKYPMNETRYDLKRYLEKVANLPDDFLSSEVEYLLWHLIYSVTDKVAYEKGLKKFAQKHHLDEDSFLESFKKFKPYPSEYGSFSEKAIRKLLPLMRFGSYWDFNHIDKNTQKRIEDLIMGVENEEIRTILREKAEKYQLEKETDFQNLPLWLAQYIAYNRHAEASSLEKWTSVNDLETYLNEFKQHSLRNPIVEQVVTETLRVVRDIWQQYGQGKADFFDEIHIELGRELKKTAKEREELSKQNQKNEDTNLRIKALLAELGEDSTIENVRPYSLMQQELLKLYEEGVFSSSMEIEDDIEKIHKKATPNKAELQRYKLWLEQKYKSPYTGQIISLKRLFTEDYEIEHIIPQSRYYDDSLSNKVICESAVNKLKGNQLGLEFIKNHYGEKVHAAGKEVSIFTEEQYKEFVKNHYANNSGKMKKLLLEDIPEKMVARQMNDTRYISKYISEILSKIVRADERDEGVNSKNVILCTGKITSALKQDWGVNDVWNDLILPRFERMNALTQSTLFTTYNEKYQKYLPTVPIEYSNGFQKKRIDHRHHAMDAIIIACATREHINYINNQHALEKGKNKEEKQKSRIDLRTILCEKKYNDNAEENYNWVFKKPWDTFTQEVRAALEGIVVSFKQNLRVINKATNYYERWVEENGKLIKKMVKQEGTNWAIRKPLHKETVSGKITLEREKVSKGKILTATRKAIDSTFTEKVIEGITDTGIQKILLNYLKFKKSPEIAFSPEGIEELNKNISLYNDGKPHKPIRKVRIFEKGSKFPLGEVGNKATKYVEAAKGTNLYFGVYQGKDKCSFATIPLNEVIERQKQGLSSVPEYNEKGDPLLFSLSPNDLVYIPIEGEIIEDIDFRNLSNEQKERIYKAASFTRNECFFIKSSIASLIKNYDAKTKIGELGSQNKLEVTICKGIRIKEVCIKLKVDRLGNISKA

SEQ ID NO: 19194 - protein, 1202 aa, unidentified
  REGION 1..1202: note = Cas Enzyme sequence
MKKVLGLDLGIASIGWALIAQNSENEEISHIIDCGVRVVPLSTDEHSEFAKGGSVPTNQIRRRARGMRRNLQRYRWRRHRLYCVLGQLGMMPDQRLMTRLSPLELYSLRSRALSEPLSLQEIGRILIHLNNWRGYRSNRREAVKDDEKSRYLKEIKNNEDQLKVEDKTIGQFFAERLHQGDRQRIRGRIFGRNTYIDEFNRIWDAQAQYHPSVLTEEHRRLIRDRIIYYQRPLKSAKGLVGTCALEWYYALYKETRQPKYENGRKKIVRPKCAPKSSPLNQECKVWESIHNLRIYRRDRNGRRESQPIALTLEQKKHLFWYLQESKKNLKAEEALRLLGFSAGAYAVDDHTLENNRTLSRLKEVFKKLGIRRDDLLRFDPAIEEVEWDDLETGERRRRLQVRGDFDREPLYQLWHLIYATEDEGDLIQLLEERYGFTTEQAREIAKIDFTSEGYARKSHRALRRLLPHYREGLDYTKACEAAGYRHADYITKAENEARILSERLELLPKNALRNPVVEKILNQMVHLVNDLMTTYGRPDEVRVELARELKQSAQERKKTHELNQKRRRENERIKKDIADHLAIPPEKVTRAQIEKYRFYKEIDGISLYTGKRFSLADVLNGDTVDVEHIIPRTLRFDDSYHNKTLCERNINQEKGNMTACDYMRSRGAQEYEAYLERVKAFYEKNGREVRLKYKNLTTTQEDLLKDNEFLQRQLRESQYIARKAVEVLREVCRNVYTTTGSITDFLRHRWGWDEVIPYLRLPQFKEAGLTEIIPVQNGQKTKEVIKGWSKRDDHRHHALDALVVACTRQSHIQRINELSPILAGTYGEERRQQLLDIVRDKYIAGKIPFSFRQVCEAMNQVLVSHKQRTRVATRNCPKGSQKVQITLTPRGRLHEETIYGRIRRYKKVSLDGKFSVAMLDDMVHPHQRELVEARLAQYANNPKAAFKDLDKNPIRYGPNGEKHLREVTVWEYIMVSRKALDPKATGKALKGIIDPVVHQVVKQHFEAGNVGGLPFRHVRVENRAKEWIRLPRGYAEPGSNHHIAIYRDADGKKHEHVVTFWEAFQRVHIGLPPIITDVAGALEYLSHLPGELPELHLPENPDWQFVVSLARNDMFVFGLDPADIDLRDLKNRSYVSKHLFRVRKISSGDYWFSYHLESKALDDRDSKSANRYKRCRSIASLAGAIKVTVNRLGHIVAVGQPI

SEQ ID NO: 19195 - protein, 1430 aa, unidentified
  REGION 1..1430: note = Cas Enzyme sequence
MKKRKHILGLDLGTTSIGFSHIIEDEDREKSTIEEIGVRIIPLSVDELSNFERGKTISTNADRTLKHGARINLDRYQLRRKQLIELSLQAGLITSSTILAEDGKNTTHSTWQLRAKAAVERIEKDELVRVFLAINKKRGYKSSRKVKNKDDGQIIDGMDIAKRLYDENLTPGQLVLQLLKEKKKQLLDFYHSDLQREFDLIWNFQKEFYPDILTNDLYKALQGKNKTDSSSIFYNYYHFNTAENRGTKEQMRLQAYRWRVDALSKKLSKEEVAYVLVEINSNLNNSSNYLGNISDRSKELYFNKQTIGQFLYTKLKEDRHYSLKNKVFYRQDYLDEFERIWETQAIFHKELTEDLKKQIRDTIIFYQRRLKSQKGLISLCEFENKEITIEKEGKTVTKQIGVRVIPKSSPLFQEFKIWQILNNVVCKKKGTRKKKAVTPAPLLFELFGTPTETFFSLDMECKQLLFEELNLKGNLKADKVIRLLGYIPQEWEINYNQLEGNRTQKSLYEAYLKIIEIEGYDIKTFLRIKSDKEDWDLEESPLSAKEIRENIQHIFETLGISTAILYFDATLPIKDFEKQASYQLWHLLYSYESDNSPSGNETLYKLLQDKFGFKREHAVFLSNISFQDDYGSLSAKAIRKIYPYIKENQYSTACELAGYRHSKLSLTKEELNNRPLKDLISPLKKNSLRNPVVEKGLNQMINVVNALIEKNSKKDAEGNIIKYFHFDEIRIELARELKKNAQERAEMTLNIKNATIEQEKIKRILISDFGIKNPTKNDITRYRLYQELAHNGYKDLYTNTDIPKELLFSKNIDIEHIVPKARVFDDSFSNKTLAYRDFNLKKGENTAFDFIDSSLGEEELNQYITRVENAFKAKKISATKYKNLLKKATEINDGFINRDLRETQYIAKKAKELLFQITRSVVSTSGSITDRLREDWGLIDIMKELNMPKYRDLGLTEIIERRDGRKVEVIKDWTKRNDHRHHAMDALTVAFTKPSYIQYLNHLNARKDENNKLYADILGIERKETTKIHDENGNEKRVFIEPIPGFRQIAKKYLEEILISHKTKNKVVTKSINKIAGTNKKQETLTPRGQLHKETIYGKYHYYSNKEEKIGTKFDKETISKVSNPLYRKALLKRLQANDNDPKKAFTGKNALSKKPIYLDEAKTKTLPEKVNITYLEEDFSIRKDISPDNFKDLKSIEKVIDQGVKRILIKRLQAYDNDPKKAFADLDKNPIWLNKEKGISIKRVTISGVKNAQALHSKKDHLGKPILDKEGQEILVDFVSTSNNHHVAIYRDKEGNLQEQIVSFFEAVVRAQQGLPIIDKTYKQAEGWQFLFTMKQNEMFVFPNATIGFNPAEIDLLDPKNKKLISPNLFRVQKIATKDYFFRHHLETNVETDNVLKNTTWKREGLSGLKDIVKVRINHLGDIVSIGEY

SEQ ID NO: 19196 - protein, 1429 aa, unidentified
  REGION 1..1429: note = Cas Enzyme sequence
MKKRKHILGLDLGTTSIGFAHIVEDENKEKSEIKELGVRIVSLTTDEQSDFEKGKSITTNANRTLKHGARLNLDRYQQRRKYLIDLLQKANLITSSSILAENGKNTTHSTWQLRAKAVTERVEKEEFARILLAINKKRGYKSSRKVKTEDEGQAIDGMAIAKRLYDENLTPGQLSLQLLQQNKKLLPDFYRSDLQKEFDLVWNFQKQFYPDILTDSFYKELQGKGKDATSKAFSKKYHFDIAENKGSKESVRLQAYQWRVEAISKQLSKEEVAYVLTEINNNLNNASGYLGAISDRSKELYFNRQTVGQYLYAQLQENRHNSLKNKVFYRQDYLDEFERIWETQASFHKELTDELKKQIRDVVIFYQRKLKSQKGLISFCEFESKEIEIEKDGKTITKSIGARVVPKSSPLFQEFKIWQILNNVICKRKGIRKKKISAKTTQLDLLNESSQTIFSLDMECKQLLFDELNLKGDLKSDKVLKLLGYSPQEWEINYNQLEGNRTQKALYEAYLKIVEMEAHDVKNILQIKSAKDDWSLDESPLSASEIKEKVKDIFQALGICTKILYFDPLLPVKDFEEQDSYQLWHLLYSYESDHSTSGNETLYRILEKKYAFKREHARILANIALQDDYGNLSTKAIRKIYPYIKENQYSTACEKAGYKHSKLSLTKEELEARELKNIIPLLKKNALRNPVVEKILNQMINVVNALIEKNSERDAEGKITKYFHFDEIRIELARELKKNAQERYEMTQNINKAKSEHQKISEILQKEFGIKNPTKSDIIRYRLYQELEHNDYKELYTNAPIAPDVLFSKNIEIEHIVPKARVFDDSFSNKTLTFHRINSDKGEYTAFDYITSLNSEKELNQYLTRVENAYKTKSISPTKYKNLLKKASEIGDGFINRDLRDTQYIAKKAKEILFQITRSVVSTSGSITDRLREDWGLIDIMKELNMPKYRDLGLTEIIERRDGRKVEVIKDWTKRNDHRHHAMDALTVAFTKPSYIQYLNHLNARKDENNKLYADILGIERKETTKIYDENGNEKRVFIEPIPNFRQVVKKHLEEIFISHKAKNKVVTKNVNKPAGTDKQQITLTPRGQLHKETIYGKYQYYVNKEEKVGVKFDKETITKVSNPLYREALLKRLQANGNDPKKAFTGKNALSKNPIYLDEAKTKTLPEKVNLTYLEEDFSIRKDISPDNFKDLKSIEKVIDQGVKRILIKRLQTYDNDLKKAFVDLEKNPIWLNKEKGIAIKRVTISGVSNAQPLHIGKDHLGKTILNKEGNKNPIDYVSTGNNHHVAIYRDKEGNLQEQIVSFFDAVVRAQQGLPIIDKTYKQAEGWQFLFTMKQNEMFVFPNATTGFNPAEIDLLDPKNKKLISPNLFRVQKIATKDYFFRHHLETNVETDNVLKNTTWKREGLSGLKDIVKVRINHLGDIVSIGEY

SEQ ID NO: 19197 - protein, 1457 aa, unidentified
  REGION 1..1457: note = Cas Enzyme sequence
MKRILGLDLGSNSIGWGLIEQDFGQREGKIIAAGSRIIPMDQGLLGDFEKGNTVSQTAERTFYRSARKLRARHLLRRERLHRVLHILGFLPTHYDKQIDFSKRYGKFIGDIEPKIAYNDGKFLFMDSFQEMLSDFRSHQPDLFYTKRNGEESKIPYDWTIYYLRKKALSQKISKEELAWIILNFNQKRGYYQLRGEEEVENPNKEVTYYSLMVTEVTAEAPNKKGEIWYSIQLENGWVYRRTSKIPLDNWRGKSRDFIVTTELEEDGSVKRDKEGKEKRSFRAPDENDWNLLKKKTEQDINTSQKTVGTYIYDHLLQNPNEKIKGKLVRTIERKYYKEELKAILEKQVALQPELFTDQLFADCIRELYSKNEAQQRNLAARDFVHLFVEDIIFYQRPLRSQKSTIANCSLESRSYIDKDSHTRKEVSLKVCPKSNPYYQEFRVLQWLQNLKIYEIDSDQEVTHQFIKTLEDKQQLFEFLMNQKEIDCEELLKYFLNQTYPNAKEKALKSELKKWKDTYRWNYVYDIGEKSSKKYPMNETRYDLKRYLEKVANLSDDFLSSEVEYLLWHLIYSVTDKVSYEKGLKKFAQKHHLDEDSFVESFKKFKPYPSEYGSFSEKAIRKLLPLMRFGSYWDFNHIDKNTQKRIDDLITGVENEEIRTILREKAEKYQLEKETDFQDLPLWLAQYIVYNRHAEASSLEKWTSANDLETYLNEFKQHSLRNPIVEQVVTETLRVVRDIWQQYGQGQANFFDEIHIELGRELKKTAKEREELSKQNQKNEDTNLRIKALLAELGEDSTIENVRPYSPLQQELLKLYEEGVFSSSMEIEEEIEKIHKKASPSKTELQRYKLWLEQKYKSPYTGQIISLKRLFTEDYEIEHIIPQSRYYDDSLSNKVICESAVNKLKGNQLGLEFIKNHYGEKVHAAGKEVSILTEEQYKEFVKNHYANNSGKMKKLLLEDIPEKMVARQMNDTRYISKYISEILSKIVRSGERDEGVNSKNVILCTGKITSALKQDWGVNDVWNDLILPRFERMNDLTQSTLFTTYNEKYQKYLPTVPMEYSNGFQKKRIDHRHHAMDAIIIACATREHINYINNQHALEKGKNKEEKQKSRIDLRTILCEKKYSDNAEENYSWIFKKPWDTFTQEVRSALEGIVVSFKQNLRVINKATNYYEHWVEENGKFIKKMVKQEGTNWAIRKPLHKETVSGKITLEREKVSKGKILTATRKAIDSTFTEKVIEGITDTGIQKILLNYLKFKKSPEIAFSPEGIEELNKNIALYNDGKPHKPIRKVRIFEQGSKFPLGEVGNKATKYVEAAKGTNLYFGVYQGKDKRSFATIPLNEVIERQKQGYSSVPEYNEKGDPLLFSLSPNDLVYVPVEGEIIEDIDFRNLSNEQKERIYKTVSFSGYQCFFVKQTVSTPIVNKMEYSPLNKMEKSIIGIMIKEVCVKLKVDRLGNISKA

SEQ ID NO: 19198 - protein, 1457 aa, unidentified
  REGION 1..1457: note = Cas Enzyme sequence
MKRILGLDLGSNSIGWGLIEQDFGQREGKIIAAGSRIIPMDQGLLGDFEKGNTVSQTAERTFYRSARKLQQRHLLRRERLHRVLHILGFLPTHYDKQIDFSKRYGKFIGNIEPKIAYNDGKFLFMDSFQEMLSDFKSHQPDLFYTKRNGEESKIPYDWTIYYLRKKALSQKISKEELAWIILNFNQKRGYYQLRGEEEAENPNKEVAYYSLMVTDVTAEAPNKKEEIWYSIQLENGWVYRRTSKIPLDNWKGKVRDFIVTTELEEDGSVKRDKEGKEKRSFRAPDENDWNLLKKKTEQDINTSQKTVGSYIYDHLLQNPNEKIKGKLVRTIERKYYKEELKAILEKQIALQPELFTDQLFADCIRELYSKNATQQRNLAARDFVHLFVEDIIFYQRPLRSQKSTIANCSLESRSYIDKDSHTRKEAPLKVCSKSNPYYQEFRVLQWLQNLKIYEIESDREVTHQFIKTLENKQQLFDFLMAQKEIDCEELLKYFLNQTYPNAKEKALKSELKKWKDTYRWNYVYDIGEKSSKKYPMNETRYELKRYLEKVANLPDDFLSSEVEYLLWHLIYSVTDKVAYEKGLKKFAQKHHLDEDSFVESFKKFKPYPCEYGSFSEKAIRKLLPLMRFGSYWDFNHIDKNTQKRIEDLITGVENEEIRTILREKAEKYQLEKETDFQNLPLWLAQYIAYNRHAEASSLEKWTSVNDLETYLNEFKQHSLRNPIVEQVVTETLRVVRDIWQQYGQGKADFFDEIHIELGRELKKTAKEREELSKQNQKNEDTNLRIKALLAELGEDSTIENVRPYSLMQQELLKLYEEGVFSSSMEIEDDIEKIHKKATPSKTELQRYKLWLEQKYKSPYTGQIISLKRLFTEDYEIEHIIPQSRYYDDSLSNKVICESAVNKLKGNQLGLEFIKNHYGEKVHAAGKEVSILTEEQYKEFVKNHYANNSGKLKKLLLEDIPEKMVARQMNDTRYISKYISEILSKIVRSGERDEGVNSKNVILCTGKITSALKQDWGVNDVWNDLILPRFERMNDLTQSTLFTTYNEKYQKYLPTVPMEYSNGFQKKRIDHRHHAMDAIIIACATREHINYINNQHALEKGKNKEEKQKSRIDLRTILCEKKYSDNAEENYSWIFKKPWDTFTQEVRSALEGIVVSFKQNLRVINKATNYYEHWVEENGKFIKKMVKQEGTNWAIRKPLHKETVSGKITLEREKVSKGKILTATRKAIDSTFTEKVIEGITDTGIQKILLNYLKFKKSPEIAFSPEGIEELNKNIALYNDGKPHKPIRKVRIFEQGSKFPLGEVGNKATKYVEAAKGTNLYFGVYQGKDKRSFATIPLNEVIERQKQGYSSVPEYNEKGDPLLFSLSPNDLVYVPVEGEIIEDIDFRNLSNEQKERIYKTVSFSGYQCFFVKQTVSTPIVNKMEYSPLNKMEKSIIGIMIKEVCVKLKVDRLGNISKA

SEQ ID NO: 19199 - protein, 1000 aa, unidentified
  REGION 1..1000: note = Cas Enzyme sequence
MADVMTLGIDLGPHSIGWGLIEEEKIEGPLKSEPLRLLDIGVRVFPEGVDRTPQGSEQSRSAKRREARGARKIHKRRNRRKERLKEILKDKGLLPDGDDYEALMLIDPYSLRTEGLERKLTLHEFGRALYHICQRRGFKSNRKTDNPKETGAVLKSINELREEIETSGSRTLGELLYNKHNKDKTERIRGHYTHRDMYQYEFDLLWEAQKAYYPDVLTDVLKSDVGQRTIFFQRPLKTQKNLVGQCEYEHGKKRSPRGTWYAQRFRMLQDVNNLTITDTSTGEIRPLAVAERERIILTLGKKKEMTFEAMKKLLGLNEEARFNIEEGGRKKLKGNSIEWELRQVYKKAYDDLSVELRDEIIHDLNFLASEDVLSRHACTRWNLDDKQIERLNKVRTENGYIHLSEKALKRLLSFMEAGFVYMDAVSRAGYKRRDERDVEHTPRLEAKDIPELTNPLVKAAIHQVRAVVNAITAEYGVPDRIRVEMVRDLKNGAKARKEISIRNSKNRKLNEDAEKSLKADLAMANPSRADKIKYKLWEECKHECPYTGRPIPMGALFGGDFEVEHIIPYSRSLDDSYMNKALCYTGENRLKLDKTPWEFYGHDAVRYGEILKRIKRLPYPKRKRFEMREVDDGFINRKLSDTAYIAREVRSYLERVAGKNNVQVATGITTALLRKNWGLQTILNSEDKKNRADHRHHAIDAVVVALTSPGVIKRLSRMTRGRSDVTLRGFPPPWEGFRDDVKNKIDAIVVSHKVRRKVAGALHEETNYGRLAAVGDKGETLFAIRKLVSELTRKEVERIGDDRIKSLVVERLKENGLDPVKDSEKQKEWREALLEPILLSNRNGPPVPVRRVRLHRPSTNMLDLGYRWVEPGSNHHIVIYEYTEGKKKGRWDGEVVSMFEAAQRVKNKKPVINREVGDGRRFIMSLSINEMVRLKEDELWQYYRVQLINGRSNQICFRLHTAATIDDNNERLLRIPNALKGLCTEKITIDPMGRVRRAND

SEQ ID NO: 19200 - protein, 1000 aa, unidentified
  REGION 1..1000: note = Cas Enzyme sequence
MPHAKTVLGLDLGVTSVGWALLTTSFDEEGSIISREITDAGVRIFPATTEDKTNAPKNHKRRTSRGQRRLVMRKAQRRNDLRAMLADNGLLPAIESATSAESFQELGDPYELRVRALSEKLTPYEIGRSIYHLSKRRGFLSNRKSGDANEDGKVLGGIARIREELASGNFKTIGQLLSTKEKKRKHFTHRAMTEDEFESIWSTQSAFDPTLLTDDLKMRVKNTIFYQRPLRSQRGLIGKCSFETDKKRCDLARQEAQRFRYWQDLNNLQIQNRATLNWRILKDVEKELLVKELENIEVLKYEKLRKVLKLDDDVRINLEANDKKIKGNSTAYQFRKALKKTDKPWDDFTAEQQDRLIEELFRIDNELALKRRLSEHWQFDDEQIHKLEGVWHKLEDGYSRLSLKAIRKVLPLMMAGKRYDEAASEAYGDHRKTFGAGNSLKLQLPPKDLRNPIVFKALCEVRKVVNAIIRKHKLPDEIRLEMARDLKLTKIQKERSMKQQNENKRINVQAEEFFKQKFNLENVSSTDKLKYRLWKESGERCPYTGKNSPPESLLDDGLVDIEHIIPYSKCFDDSYMNKTICDAKFNREVKRNQAPGEIYDRESQQFFELMERVKMLPSPKVRKFEQSKEELAQTDWAGRQLSDTRYICKEVRGYLRQLYPYSPDESKYVQVVAGGATANLRHVWHINAILSDGDIEVKNRTDHRHHAVDAIVIALTDRWLYQYISKLAGRNRELMKRKLSGFELPWESFLSDVEDALNSIVISHAPTRRIRGQFVEETAYGPTVTPGVYVTKKELSSMTPKMVENIIDETIKELVKARLSAFDGDFKKAFGDETNPLLHSDGKTPIRKTRIYVKMSPDTLVPIRDTSGKEYKYYPLAGNHHVRIYENTLTEDRKAVLVPRFYAAQRSWKPADLGPEWRLLFTLCSNDYVEFLGDDGRLRVYRVQKMSGGQNWQVQLRPLEDTRAGYIPGITVVMTGSNALRKITRKLQVDPLGHLTQAND

SEQ ID NO: 19201 - protein, 1138 aa, unidentified
  REGION 1..1138: note = Cas Enzyme sequence
KIKIKTENSIGNKTVGCYIYDHILQNPNEKIKGKLVRTIERKYYKEELKAILEKQVALQPELFTDQLFADCIRELYSKNEAQQRNLAARDFVHLFVEDIIFYQRSLRRQKSTLANCSLESRSYIDKDSHTRKEVPLKVCPKSNPYYQEFRVLQWLQNLKIYEIDTDQEVTHEFIKTLEDKQQLFDFLMNQKEIDCEELLKYFLNQTYPNAREKALKSELKKWKDTYRWNYVYDIGEKSSKKYPMNETRYELKRHLEKVANLPDDFLSSEVEYLLWHLIYSVKDKVAYEKGLKKFAQKHHLDKDSFVESFKKFKPYPSEYGSFSEKAIRKLLPLMRFGAYWDFNHIDKNTQKRIEDLITGVENEEIRTILREKAEKYQLEKETDFQDLPLWLAQYIVYNRHAEASSLEKWTSVNDLETYLNEFKQHSLRNPIVEQVVMETLRVVRDIWQQYGQGQASFFDEIHIELGRELKKTAKEREKLSKQNQKNEDINLSIKEKLKELKKYNTRAYSITHQEKYKLWLEQKHISPYTGQIISPENLFTDNYEIEHIIPQSRFFDDSLSNKVVCESIVNKAPYKDRQLGLEFIKNQGGRIVKELSKENKTIKIFTEEQYRTFIKEHYSNNPEKTKKLLLEEIPEKMVARQMNDTCYISKFISEILSKIVRSDEQDEGVHSKNVILCTGKITSILRQDWGLNDIWDNLILPRFERMNNLLQKEKFTIYSIEKQKKIPVVPINDQFKSFQKKRIDHRHHALDAIIIACVTGEHINYINNQHTLEKGKDKKEKQKEHDKLREKLCIKKYNKGSEENYSWIFKKPWAHFTQEVRTALEGIVVSFKQNLRVINKATNYYERWVEENGRYIKKMVKQEGTNWAIQKPLHEETISGKIYLDSEKITKNDILTATRKTVDSSFDEKRIKKITDTGIQKILLNYLKYKGSPEIAFSPEGLEELNKNLSIYNDGKPHKPIYKVRIYEKGSGRFALGEKGRKYKKYVQGAPNLYFGIYQGKDKRSFATIPLNEVIERQKQGRPSVPEYNEKGAPLLFSLSPNDLVYVPVEGENIEDIDFQNLSKEQKERIYKTVSFTGNECYFIKSNIASLIKNYDAKTRIGELESKNKLEVTICSRIRIKEVCIKLKVDRLGNISKA

SEQ ID NO: 19202 - protein, 1210 aa, unidentified
  REGION 1..1210: note = Cas Enzyme sequence
MSKHVLGLDLGVGSIGWCLIALDAQGDPAEILGMGSRVVPLNNATKAIEAFNAGAAFTANQERTARRTMRRGFARYQLRRYRLRRELEKVGMLPDAALIQLPLLELWELRERAATVGGRLTLPELGRVLCHINQKRGYRHVKSDAAAIVGDEGEKKKKDSNSAYLAGIRANDEKLQAEHKTVGQYFAEQLRQNQSESPTGGISYRIKDQIFSRQRYIDEYDQIMAAQRVHYPDILTDEFIRMLRDEVIFMQRPLKSCKHLVSLCEFEKQERVMRVQQDDVKGGRQLVERRVKFGPKVAPKSSPLFQLCRIYEAVNNIRLTRPDGSPRDITPEERDKLVAYLQTYEAPKPPKRKPAKAKPVKLAHPKLDLDKLKELLCIEEELLADKLLEEGLKGDATRIALSIILQPYSQYHHLLDMELETRMMTVQLTDEETGEVTEREVAVVTDSYVHQPLYRLWHILYSIEERDAMRRALIKQLGMKKEDLDGGLLDQLYRLDFVKPGYGNKSAKFICKLLPQLQQGLGYSEACAAVGYRHSNSPTSEEITERTLLEKIPLLQCNELRQPLVEKILNQMINLVNALKSEYGVDEVRVELARELKMSREERERMTRQNDKRKEANDEVAEKIQKCGLYPTKSRIRKYRLWEEAGRQCLYCGRSIEEEQCLNGDDMEVEHIIPKSVLYDDSYGNKTCACRRCNKEKGNRTALEYIRAKGREAEYMKRINDLLKEKKISYSKHQRLRWLKEDIPSDFLERQLRLTQYISRQAMTILQQGIRRVSASEGGVTARLRSLWGYDDILHTLNLDRYDSMGETERVYREGETTEKLRITNWSKRMDHRHHAIDALVVASTRQGYIQRLNRVSSESEREAMSGEIEMQKVTKTDKLSLLERWLTQRPHFSVRTVSDKVAEILISYRPGKRVVTRGRNIYRKKTADGREVTCVQRGVLVPRGELMEASLYGKILSQGRERIVKRYPLHTLKGEVVDPRLRELIAEYNQEITSKVKAKGAPLYLDAAEKQEVRSVRCYVAKPSVAKAIPIRFDECGRAITFVQSGNNHHLALYRTPKGKLVGSIVTFWDAVDRARYGIPLVITHPREVMEQVLQRGDIPEQVLSLLPPSDWVFVDSLQQDEMVIIGLSDEELQRALEAQDYRKLSEHLYRVQKLSAGKYFIRYHLDTDVDEDNRSGRIPKFYQLSLDAYKKNNVRKVRVDLLGRISLL

SEQ ID NO: 19203 - protein, 1194 aa, unidentified
  REGION 1..1194: note = Cas Enzyme sequence
MSKHVLGLDLGVGSIGWCLIALDAQGDPAEILGMGSRVVPLTNLGDDKAFSKGEAFTANQKRTARRTMRRGFARYQLRRYRLRRELEKVGMLPDAALIQLPLLELWELRERAATAGRRLTLPELGRVLCHINQKRGYRHVKSDAAAIVGDEGEKKKDSNSAYLAGIRANDEKLQGEHKTVGQYFAEQLRQDQSESPTGGISYRIKDQIFSRQRYINEYDQIMAAQRVHYPDILTDAFIRMLRDEVIFMQRPLKSCKHLVSLCEFEKQERVMRVQQDDGKGGRQLVERKVKFGPKVAPKSSPLFQLCRIYEAVNNIRLTRPDGSPRDITPEERAKIVAHLQSSASLSFAALKKLLKEKAIIADQLTTKSGLKGNSTRVALAAALQPYPQYHHLLDMELETRMMTVQLTDEETGEVTEREVAVVTDSYVRQPLYRLWHILYSIEERDAMRRALITQLGMKEEDLDGGLLDQLYRLDFVKSGYGNKSAKFICKLLPQLQQGLGYSEACAAVGYRHSNSPTSEEITERTLLEKIPLLQRNELRQPLVEKILNQMINLVNALKAEYGVDEVRVELARELKMSREERERMTRQNDKRKEANDEVAAKIRQCGLYPTKPCIQKYMLWEEAGRQCLYCGRSIEEEQCLNGDDMEVEHIIPKSVLYDDSYGNKTCACHECNQTKGNRTALEYIRAKGWETKYMERINDLLKEKKISYSKHQRLRWLKEDIPSDFLERQLRLTQYISRQAMAILQQGIRRVSASEGGVTARLRSLWGYGKILHTLNLDRYDSMGETERVSREGETTEELHITNWSKRMDHRHHAIDALVVACTRQSYIQRLNRLSSEFGREDKKKEDQEAQEQQATETGRLSNLERWLTQRPHFSVRTVSDKVAEILISYRPGMRVVTRGRNIYRKKTVDGREVTCVQRGVLVPRGELMEASLYGKILFQGRERIVKRYPLHDLKGEVVDPCLRELIVKSKGAPLYLDAAEKQEVRSVRCYVTQPSVAKAIPIRFDERGRAITFVQSGSNHHLAIYRTPKGKLVESIVSFWDAVNRARYGLPLIIKYPRKAMEQVIQREDIPESVLSLLPPADYEFVEVFQQNEMAVVGLPEEEFRRAVDTQDYRTLSEHLYRLKRISSKDYEFHYHLDTDDPDETDSSKKKKKRVRNTSGRIPRIYRIRGIGPLQKKNVRKVCIDLLGRLSLL

SEQ ID NO: 19204 - protein, 1189 aa, unidentified
  REGION 1..1189: note = Cas Enzyme sequence
MSKHVLGLDLGVGSIGWCLIALDAQGDPAEILGMGSRVVPLTNLGDDKAFSKGEAFTANQKRTARRTMRRGFARYQLRRYRLRRELEKVGMLPDAALIQLPLLELWELRERAATAGERLTLPELGRVLCHINQKRGYRHVKSDAAAIVGDEGEKKKDSNSAYLAGIRANDEKLQDEHKTVGQYFAEQLRQNQSESPTGGISYRIKDQIFSRQRYIDEYDQIMAAQRVHYPDILTDEFIRMLRDEVIFMQRPLKSCKHLVSLCEFEMLEKVMRVQQDDGKGGRQLVERRVKFGPKVAPKSSPLFQLCRIYEAVNNIRLTRPDGSPRDITPEERDKIVTHLQSSASLSFAALKKLLKEKALIADQLTTKSGLKGNSTRVALATALQPYSQYHHLLDMELETRMMTVQLTDEETGEVTEREVAVVTDSYVRQPLYRLWHILYSIEERDAMRRALITQLGMKEEDLDSGLLDQLYRLDFVKPGYGNKSAKFICKLLPQLQQGLGYSEACAAVGYRHSNSPTSEEITERTLLEKIPLLQRNELRQPLVEKILNQMINLVNALKAEYGVDEVRVELARELKMSREERERMTRQNDKRKEANDEVAAKIRECGLYPTKPRIQKYMLWEEAGRQCLYCGQSIEEEQCLREGGMEVEHIIPKSVLYDDSYGNKTCACRRCNKEKGNRTALEYIRAKGREAEYMKRINDLLKEKKISYSKHQRLRWLKEDIPSDFLERQLRLTQYISRQAMAILQQGIRRVSASEGGVTARLRSLWGYGKILHTLNLDRYDSMGETERVSREGETTEELRITNWSKRMDHRHHAIDALVVASTRQGYIQRLNRVSSESEREAMSGEIEMQKATKTDKLSLLERWLTQRPHFSVRTVSDKVAEILISYRPGQRVVTRGRNIYRKKTADGREVTCVQRGVLVPRGELMEASLYGKILSQGRERIVKRYPLHDLKGEVVDPRLRELITTYNQELKSREKGAPIPPLCLDKDKKQEVRSVRCYAKTLSLDKAIPMCFDENGEPTAFVKSASNHHLALYRTPKGKLVESIVTFWDAVDRARYGIPLVITHPREVMEQVLQRGDIPESVLRSLPPSDWVFVESLQLNEMVIIGLSDEELQRALEVQDYRKLSEHLYRVQKLSAGKYFIRYHLDTDVDEDNRSGRIPKFYQLSLDAYKKNNVRKVRVDLLGRISLL

SEQ ID NO: 19205 - protein, 1209 aa, unidentified
  REGION 1..1209: note = Cas Enzyme sequence
MSKHVLGLDLGVGSIGWCLIALDAQGDPAEILGMGSRVVPLTNLGDDKAFSKGEAFTANQKRTARRTMRRGFARYQLRRYRLRQELEKVGMLPDAALIQLPLLELWELRERAATAGERLTLPELGRVLCHINQKRGYRHVKSDAAAIVGDEGEKKKDSNSAYLAGIRANDEKLQDEHKTVGQYFAEQLRQNQSESPTGGISYRIKDQIFSRQRYIDEYDQIMAAQRVYYPDILTDEFIRMLRDEVIFMQRPLKSCKHLVSLCEFEKQERVMRVQQDDGKGGRQLVERKVKFGPKVAPKSSPLSQLCRIYEAVNNIRLTRPDGSPRDITPEERDKLVAYLQTYEASKPPKRKPAKAKPVKLAHPKLDLDKLKELLCIEEELLAGKLLEEGLKGDATRIALSIILQPYPQYHHLLDMELETRMMTVQLTDEETSEVTEREVAVVTDSYVRQPLYRLWHILYSIEEREAMRRALITQLGMKEEDLDGGLLDQLYRLDFVKSGYGNKSAKFICKLLPQLQQGLGYSEACAAVGYRHSNTPTREEITERTLLEKIPLLQRNELRQPLVEKILNQMINLVNALKAEYGVDEVRVELARELKMSREERERMTRQNGERKKANDKVAEKIQKCGLFPTKPRIQKYMLWEEAGKVCLYCGRSIEEEQCLNGDDMEVEHIIPKSVLYDDSYGNKTCACHECNQTKGNRTALEYIRAKGWEAEYMERINDLLKEKKISYSKHQRLRWLKEDIPSDFLERQLRLTQYISRQAMAILQQGIRRVSASEGGVTARLRSLWGYGKILHTLNLDRYDSMGETERVSREGETTEKLRIKDWSKRKDHRHHAIDALVVASTRQGYIQRLNRVSSESEREAMSGEIEMQKVTKTDKLSLLERWLTQRPHLSVRAVSDKVAEILISYRPGKRVVTRGRNIYRKKTADGREVTCVQRGVLVPRGELMEASLYGKILSQGRERIVKRYPLHDLKGEVVDPRLRELITTYNQELKSREKGAPIPPLCLDKDKKQEVRSVRCYAKTLSLDKAIPMCFDENGEPTAFVKSASNHHLALYRTPKGKLVESIVTFWDAVDRARYGIPLVITHPREVMEQVLQRGDIPESVLRSLPPSDWVFVESLQLNEMVIIGLSDEELQRALEVQDYRKLSEHLYRVQKLSAGKYFIRYHLDTDVDEDNRSGRIPKFYQLSLDAYKKNNVRKVRVDLLGRISLL

SEQ ID NO: 19206 - protein, 1210 aa, unidentified
  REGION 1..1210: note = Cas Enzyme sequence
MSKHVLGLDLGVGSIGWCLIALDAQGDPAEILGMGSRVVPLTNLGDDKAFSKGEAFTANQKRTARRTMRRGFARYQLRRYRLRRELEKLGMLPDAALIQLPLLELWELRERAATAGQRLTLPELGRVLCHINQKRGYRHVKSDAAAIVGDEGEKKKDSNSAYLAGIRANDEKLQDEHKTVGQYFAEQLRRNQSESPTGGISYRIKDQIFSRQRYIDEYDQIMAAQRVHYPDILTDAFIRMLRDEVIFMQRPLKSCKHLVSLCEFEKQEKVMRVQQDDGKGGRQLVERRVKFGPKVAPKSSPLFQLCRIYEAVNNIRLTRPDGSPRDITPEERAKLVAYLQTYEAPKPPKRKPAKAKPVKLAHPKLDLDKLKELLCIEEELLAGKLLEEGLKGDATRIALSIILQPYPQYHHLLDMELETRMMTVQLTDEETSEVTEREVAVVTDSYVRQPLYRLWHILYSIEERDAMRRALITQLGMKEEDLDCGLLDQLYRLDFVKPGYGNKSAKFICKLLPQLQQGLGYSEACTAVGYRHSNSPTSEEIAERTLLEKIPLLQRNELRQPLVEKILNQMINLVNALKAEYGIDEVRVELARELKMSREERERMARNNKDREERNKEVAAKIRECGLYPTKSRIRKYRLWEEAGRQCLYCGRSIDEKQCLNGDDMEVEHIIPKSVLYDDSYGNKTCACRRCNKEKGNRTALEYIRAKGWEDEYMERINERLKAKKISYSKHQRLRWLKEDIPSDFLERQLRLTQYISRQAMAILQQGIRRVSASEGGVTARLRSLWGYDDILHTLNLDRYDSMGETERVSREGETTEKLRIKDWSKRKDHRHHAIDALVVASTRQGYIQRLNRVSSESEREAMSEEIEVQKVTKTDKLSLLERWLTQRPHLSVRAVSDKVAEILISYRPGKRVVTRGRNIYRKKTADGREVTCVQRGVLVPRGELMEASLYGKILSQGRERIVKRYPLHDLKGEVVDPRLRELIAEYNQEITSKVKAKGAPLYLDAAEKQEVRSVRCYVTQPSVAKAIPIRFDERGRAITFVKSGNNHHLALYRTPQGKLEESIVTFWDAVDRARYGIPLVITHPREVMEQVLQRGDIPESVLRLLPPSDWVFVDSLQPDEMVIIGLSDEELQQALEVQGYRKLSEHLYRVQKVSSRDYWFRYHLETSVADDKNTSGRIPKFHRVRSLSDYEKRNIRKVRVDLLGRISLL

SEQ ID NO: 19207 - protein, 1177 aa, unidentified
  REGION 1..1177: note = Cas Enzyme sequence
MGSRVVPLTNLGDDKAFSKGAAFTANQERTARRTMRRGFARYQLRRYRLRRELEKVGMLPDAALIQLPLLELWELRERAATAGRRLTLPELGRVLCHINQKRGYRHVKSDAAAIVGDEGEKKKDSNSAYLAGIRANDEKLQDEHKTVGQYFAEQLRQDQSESPTGGISYRIKDQIFSRQRYIDEYDQIMAAQRVHYPDILTDEFIRMLRDEVIFMQRPLKSCKHLVSLCEFEKQEKVMRVQQDDGKGGRQLVERRVKFGPKVAPKSSPLFQLCRIYEAVNNIRLIRPDGSPRDITPEERDKLVAYLQTYEAPKPPKRKPAKAKPVKLAHPKLDLDKLKELLCIEEELLADKLLEEGLKGDATRIALSIILQPYPQYHHLLDMELETRMMTVQLTDEETGEVTEREVAVVTDSYVRQPLYRLWHILYSIEERDAMRRALITQLGMKEEDLDGGLLDQLYRLDFVKPGYGNKSAKFICKLLPQLQQGLGYSEACAAVGYRHSNSPTSEEIAERTLLEKIPLLQRNELRQPLVEKILNQMINLVNALKAEYGVDEVRVELARELKMSREERERMARNNKDREERNKEVAAKIRECGLYPTKPRIQKYMLWEEAGRQCLYCGQSIEEEQCLNGDDMEVEHIIPKSVLYDDSYGNKTCACHECNQTKGNRTALEYIRAEGREAEYMKRINDLLKEKKISYSKHQRLRWLKEDIPSDFLERQLRLTQYISRQAMAILQQGIRRVSASEGGVTARLRSLWGYGKILHTLNLDRYDSMGETERVSREGEATEELRITNWSKRMDHRHHAIDALVVACTRQSYIQRLNRLSSEFGREDKKKEDQEAQEQQATETGRLSNLERWLTQRPHFSVRTVSDKVAEILISYRPGKRVVTRGRNIYLRHGKKCVQSGLLVPRGPLSKETVYGQITVNGEQQIVCKYDLHSLKAKDVDYVVDLALRKRLKELLAQHGGKEKEAFAGDVYMDEAGTQGPIRSVRCFTGLDRDKMKAVKYDEQGDAVGFVSPRNNHHLAIYRTPKGKLEESIVTFWDAVDRARYGIPLVITHPREVMEQVLQREDIPESVLSLLPSSDWIFVESIQRDEMVLVGLSDEEIRQAVEAQDYCKLSEHLYRVQKIATGNYMVRYHLETDTDMNRSGRIPKLYQLSLTSYEEKNVRKVRVDLLGRISLL

SEQ ID NO: 19208 - protein, 1024 aa, unidentified
  REGION 1..1024: note = Cas Enzyme sequence
MGSRTVLGLDLGTNSIGWCLIREVEKNVPERLLAGGVRIFQEAVEAKTRTPKNKTRRDARLLRRVIQRRARRKRRLRNYLIKAGWLPSELGTTPNPEVLLNTIGDPYTLRKKGLDESLTKEEFGRVLLHICARRGFLSNRKTALMDLYRSGDPDVLEALSADLDQESEVELDDEAKAEETAFKKDIAELRDDIQSSRSRTLGEYLANLPLHERKRTRRTERKMYEDEFNQLWDAQQRLNPEWCSERERLATHEVIFFQRPLKLKKNRRGRCSLEPSRFRAAMATLEAQEWRMHQDINLLNYVDTSTGELLHLDESQRSLLTEKLSRQRSMTWGAARKLLGLTKKGKSKVEFNLERSKPALIGNRTAASVRNIDSEWWDELGAVQRTSLIEDLLTIKDRYALYKRLVEVWDKPPKVALKYASLEFEPSHASLSLKSIRALLPHLRAGMIYSKARVAAGYGYESEESTLLDRLGEPPETNNPVVQKALYEVRKIVNAIIRVHGKPDAIRVEMARDLKLTKKMKASAHKQARLNEKANRDAAAEHEKVRTANPHLALAEYPSRDDLLRYRLWKEADSLCIYSGKTISLTQLWTADIEVDHILPYSRTLDDSYMNKIVCVAQENRDKSNSTPFEMWGGNAATYDAIKQRSRKCPPPKQARMLRKDLDKIDDFISRQLNDTRYISRLALGYMSTAFPDVSVTTGSVTAFLRHQWGLNSILAESGKKNRNDHRHHFVDATVVALVNRRTHQIMAREASRADFDTGNARLSRLDVEAPIDDLRRVVEKMADDIVISHAVNRKISGAFHEATFRGLSADGGVTLRVSVDSTLREADIGKVVDPVLRKKLQDHIVKNSGTAKQAFSEPVDLGKGRFLRHVKIRTGNAPKEGAYMELKDRLGNVQRRAAYGNTHHVKLYRTIDGKVKADFVTAFEAASRAVDPDELVIDRSVDADEELISVFHKNDAALLNIDGGQRLYRIVKLDKTSKRMTLITNRAATDEYEKPMLKAVSTLVNNYGLAGVTIDLLGNVTPN

SEQ ID NO: 19209 - protein, 1037 aa, unidentified
  REGION 1..1037: note = Cas Enzyme sequence
MKNILGLDLGSSSIGWSVIRENSEEQELVAMGSRVVSLTAAELSSFTQGNGVSINSQRTQKRTQRKGYDRYQLRRTLLRNKLDTLGMLPDDSLSHLPKLQLWGLRAKAVTQRIELNELGRVLLHLNQKRGYKSIKSDFSGDKKITDYVKIVKTRYDELKEKRLTIGELFFRRLTENAFFRCKEQVYPRQAYVEEFDCIMNCQRKFYPDILTDETIRCIRDEIIYYQRPLKSCKYLVSRCEFEKRFYLNAAGKKTEAGPKVAPRTSPLFQVCRLWESINNIVVKDRRNEIVFISAEQRAALFDFLNTHEKLKGSDLLKLLGLSKTYGYRLGEQFKTGIQGNKTRVEIERALGNYPDKKRLLQFNLQEESSSMVNTETGEIIPMISLSFEQEPLYRLWHVLYSIDDREQLQSVLRQKFGIDDDEVLERLSAIDLVKAGFGNKSSKAIRRILPFLQLGMNYAEACEAAGYTHSNNYTKAENEAHALLDRLPAIKKNELRQPVVEKILNQMVNVVNALMEKYGRFDEIRVELARELKQSKEERSNTYKSINKNQRENEQIAKRIVEYGVPTRSRIQKYKMWEESKHCCIYCGQPVDVGDFLRGFDVEVEHIIPKSLYFDDSFANKVCSCRSCNKEKNNRTAYDYMKSKGEKALSDYVERVNTMYTNNQISKTKLQNLLTPVDKISTDFIDRQLRESQYIARKAKEILTSVCYNVTATSGSVTSFLRHVWGWDTVLHDLNFDRYKKVGLTEVIEVNHRGSVIRREQIKDWSKRFDHRHHAIDALTIACTKQAYVQRLNNLRAEEGPDFNKMSLERYIQSQPHFSVAQVREAVDRILVSFRAGKRAVTPGKRYIIRKNRKRISVQSVLIPRGALSEESVYGVIYVWEKDELGHVIQKQRAVMKYPITSINREMLDKEKVVDKRIHRILSGRLAQYNDNPKEAFAKPVYIDKECRIPIRTVRCFAKPAINTLVPLKKDDKGNPVAWVNPGNNHHVAIYRDEDGKYKERTVTFWEAVDRCQVGIPAIVTQPDTIWDNNTSAKRYI

SEQ ID NO: 19210 - protein, 1504 aa, unidentified
  REGION 1..1504: note = Cas Enzyme sequence
MSKIIGLDLGTNSIGWGVRDINLEGNQFIDFDENDNEILNAGVVVFKKGVGDGKSSGEYSLAAERRVHRSKRRLYNAKRYRKWATLKVLSKHNMCPISEEELKLWSEGVRQEDNGKMKNAGRVYPSSPDFLAWLAMDFNKIGKDWKDQKLSPEYRNIYALRVDVLECYSAYDPNRLLKIGRAFYHLCQRRGFKSSRKRGKSAFGKNEYMENAIEKNPNWKVAQVLLDGLDKDNRRIRNSGVIQRQYFEDEFWTICKKQQLNDELSKALHSAIYFVRPLRTQKGLVGKCTLEKDKTRIPISHPLYEEFRALQYINNIKWRETGSKKRFEEIPIKLKKRILEETFFKKITKGNRKGLVDDRASFDFIEIVDTFSENHKYEFNYAQYKNKKFGLKRNPSVAACPVIAGLINTFEGVWADVFISDIKIFGFNWDGLNLSYTPVYDGEVQTDKERNYSYEDIWHLLFDFLRTKDNEDGLREFCKNALKWNNDRTDMFCDISISQGYGSLSYSAINKITPFLREGYIYSEAVSFANLKSILGEKYEANRQEAEKLIAREIKEVSKQKELLNITNGLIQQHFKDNPTSRAKGIDGTVEQIAALEIDVQEKLSSYFGNDVWVLKSETEQKTYVEPVRNLYFKFIDGKQKQEEKAASRHGKNPEIDYYKLPRLDEAIKHTLKENFRVTDKDLQKLFHPSDIDIYPKSKTGRLENPNPPSKGWKNPMAMRTMYELRKFINYLLDERRIDEDTKVVVEMARELNDSNYRKAYTLWVQDKEKENLEYAKAIGELIDDNTNIEDRDKKKFQSAVEQVSIYRFSQNKNDIFYKKYHEFIDTYLRGDDDKIDDYDYFMYLILRRDKFHQFLNTKIPNSNKFINQIIKTTSGFTKKKNELQKLIDKYMLWKEQNFQCLYTGNMISFSELFTSNYEIEHTIPAIISSDNSLSNWSICDKKYNGFKSNRFPTECPNYYHSARVPTNSGLRECSSIKSRVDRFIEPKVEGLKARIENLKRIGKKIPDWEKDKKNANIRLRHYLSFELDYWEKKHRNFTVRKENWKDSWKNSQLVDTQIISKYARAYLKTVFNRVDVQKGMNTNKFKIIYGIKRKEQKDRSRHTHHAIDAMTLTLIPGSAKREAILDEYHKNEDKKIKGLTSETYHITPHNYEDFDYSHIESVTNKISINHVSKDQTLVETKKKLRKRGKIQKTINGRVIWQQGDGIRGQLHKESYFGAIKVNERNKQGYAIKENNHYILRKDGEKDEIWIVMRKPIKDVDFEKDEIIDKVLKKYLIQQLDNGVPQIELKDFNKKPIRRLRCRVKSGGGGYLSVQKAIPIKEHKVPFVSKHQHKRHVLAQNGEKNYLFLLYEGSNAEGKLVRGYRILNLMDVVHLEIDDINEIKQISELQTLIKGKSTLPLKAILRVGDRVIPYVEHRDELESKMLIDRLFIIIKFNEPTSSTAYIYIQNHLEARPDSEVKKDTEKDFDPNKYQPRLSLSSSKFNCLIEHLDFVVKPDGKIILL

SEQ ID NO: 19211 - protein, 1153 aa, unidentified
  REGION 1..1153: note = Cas Enzyme sequence
MKNILGLDLGSSSIGWSVIRENSEEQELVAMGSRVVSLTAAELSSFTQGNGVSINSQRTQKRTQRKGYDRYQLRRTLLRNKLDTLGMLPDDSLSYLPKLQLWGLRAKAVTQRIELNELGRVLLHLNQKRGYKSIKSDFSGDKKITDYVKSVKTRYDELKEMRLTIGELFFRRLTENAFFRCKEQVYPRQAYVEEFDCIMNCQRKFYPDILTDETIRCIRDEIIYYQRPLKSCKYLVSRCEFEKRFYLNAAGKKTEAGPKVSPRTSPLFQVCRLWESINNIVVKDRRNEIVFISAEQKVALFDFLNTHEKLKGSDLLKLLGLSKTYGYRLGEQFKTGIQGNKTRVEIERALGNYPDKKRLLQFNLQEESSSMVNTETGEIIPMISLSFEQEPLYRLWHVLYSIDDREQLQSVLRQKFGIDDDEVLERLSVIDLVKAGFGNKSSKAIRRILPFLQLGMNYAEACEAAGYTHSNNYTKAENEAHALLDRLPAIKKNELRQPVVEKILNQMVNVVNALMEKYGRFDEIRVELARELKQSKEERSNTYKSINKNQRENEQIAKRIVEYGVPTRSRIQKYKMWEESKHCCIYCGQPVDVGDFLRGFDVEVEHIIPKSLYFDDSFANKVCSCRSCNKEKNNHTAYDYMKSKGEKALSDYVERVNTMYTNNQISKTKLQNLLTPVDKISTDFIDRQLRESQYIARKAKEILTSVCYNVTATSGSVTSFLRHVWGWDTVLHDLNFDRYKKVGLTEVIEVNHRGSVIRREQIKDWSKRFDHRHHAIDALTIACTKQAYIQRLNNLRAEEGPDFNKMSLERYIQSQPHFSVAQVREAVDRILVSFRAGKRAVTPGKRYIRKNRKRISVQSVLIPRGALSEESVYGVIYVWEKDELGHVIQKQRAVMKYPITSINREMLDKEKVVDKRIHRILSGRLAQYNDNPKEAFAKPVYIDKECRIPIRTVRCFAKPAINTLVPLKKDDKGNPVAWVNPGNNHHVAIYRDEDGKYKERTVTFWEAVDRCRVGIPAIVTQPDTIWDNILQRNDISENVLESLPDVKWQFVLSLQQNEMFILGMNEEDYRYAMDQQDYALLNKYLYRVQKLSKGDYNFRYHTETSVEDKYDGKLNLELSRQMGKLKRVSIKSLLGLNPHKVHISVLGEIKEIS

SEQ ID NO: 19212 - protein, 1133 aa, unidentified
  REGION 1..1133: note = Cas Enzyme sequence
LKKILKKQIEFQPELFSDNLFNACVRELYRSNKKHQQELGKRDFVNLIVEDIIFYQRPLKSQKSTISNCTLEYRIHKDENGNEVKNYLKAIPKSNPLYQEFRVWQWMYNLKIYTRESDTDVTNQFLRTKDNWQKLFGFLMQQKEVNHIDILTYLLHPLLKEKYPNAKSRAFKIELDSEIKKYRWNYVFDDYQENEKDKSKKYPCNTTGYEIRKRLGKVENISSAFLTQEIEQHLWHIIYSVNDKEQFEKALGKFADKYSIDKGSFVENFKKFPPFESEYGSLSEKAIKKLLPLMRLGKYWSWEAINEETKDRIAKIITGEYDDKIGNKVREKAMSLSGENDFQGLQLWLAQYIVYNRHSESDIQGKWNSVADLEKYLEEFKQHSLRNPIVEQIITETLRVVRDIWQDFGNGAADYFDEIHVELGREMKNPADKRKHLTNQIIENENTNLRIKAMLVEMSNDTAVNNVRPYSPMQQEILKIYENGVLNSEIDIDDDILKISKKSVPTNSEINRYRFWLEQKYRSPYTGEIIPLSRLFTEDYQIEHIIPKSRYFDDSLNNKVICESAVNQLKDKQLGLEFIKNHHGEKVECGKGKVVEIFSETEYQEFVKRHYSKNKFKRQNLLLEDIPEKMIERQINDTRYISKFVSNLLSNIVRSKENDEGINSKNLVPINGKITSRLKRDWGLNAVWNELILPRFERMNALTKSQDFTTWNEKYQKFLPTVPLELSKNFQKKRIDHRHHAMDALVVACATRSHVNLLNNQSAKSEKSRYDLQHKLRKVEKWVDNNGKERFRFTEFIKPWQSFTSDAKNELQKVIISFKQNTRVINKAVNKYWAYKDEKGNPTEKKNLLTQKGTNWAIRKPLHKETVAGKVEINRLKIPKGKILSATRKPVDSSFNLKKIKSITDESIQTILINYLGSKDNSPELAFSPEGLEDLNRNIELYNNGKYHKPIYSVRIFELGSKFQLGEEGINKKKYVEAAKGTNLFFAIYWNEEKKKREFDTIPFNEVIAHQKQEAHLPKDKRTIIPIKAEKGEFLFFLSPNDLVYVPTEEEVERSQKLDLNDLKGKNMDVYKVVSFSGNQLFFIRQDIATSILNKKEFSTLNKMERAIDGRMIKENCIKIDVNRLGKIIKVLR

SEQ ID NO: 19213 - protein, 1009 aa, unidentified; identical to SEQ ID NO: 15761
  REGION 1..1009: note = Cas Enzyme sequence

SEQ ID NO: 19214 - protein, 1000 aa, unidentified
  REGION 1..1000: note = Cas Enzyme sequence
MSNILGLDLGPNSIGWSIINTDRKEIIDAGVRIFPEGVENYGKGGQQESKNVARRVARGMRKQNNRYRMRRDYVRHILKDLKMFPSEKEAEKSFFKIDPYEVRKKGVKKKLSLLEFGTALIHLNSRRCFKSNRKTDSGDTTKIHKGGDGVLGISETEKAIKEGKFKTLGAYLASLNPGEIRRRSRYTKRKMYEDEFNILWDCQKRYHKNTLTNKNRVKLLNAIFFQRKLKSQKHTVAKCTFEPKKKCAPKSSPVFQYYRILEQLSRLRISTETRHSEPLTQDEKDKLIAELLKAESKSFTQISIILSLPKDTHYNLEHEKKLKGHSTFTRIRKAIGKDKFSQLNEDEKITLWHNIYFAEDTEWLEKYGEKIGLTEESAAKLAKVTLEKEYCNLSQKGMKKMIPHLEKAFDEYGEPMTYDKAVKLAGYHHSEVRDKTGSLMNLPNPENIRNPIVQQTLFELKKVVNALIDEYGNPECIKVELVRELKLPRKRREKIFRENLNRKHDHEEIRTKLIDLGIFEPSRDDVIKYKLWNECDRTDVYTGKKIQSVSQLFNGEYEVEHILPKSRSLDDSYMNKTLCHKTVNAEKGNQTPWETWGETSKYDDIIQRVEKLVKEGNFPYPKYKRFLTKQLKEEDFINRQLVDTAYIATEVRKYLWKICKDVQGVPGIATAKLRWFWGLDSILSLEENVKNREDHRHHAVDAIVVACTERKFIQKFSTYHHFNKDVKKENFPKPWVKFRADAEEVINRILVSHKIKNNVRGKLHKESYYGLVRDRNSEPKTDEKGQKLYAKSKPATRLTKAEIKKIPDKVVREVVEEWYSLKKDDRTEYPVLPDGTLVKRVRIHDVHSNVVEINPGVFVEPGSNHHMVIFENIKTGKRKGKVISLFEAAQRKRKKLPIVDKTPEEGWKFVMTLSINEMVIIHDNAEEIESKIDDLKWVNKHLYRVQKINATGRTFYRQHTVAILKDKENNEPGMQEGSPNKKRGRKVVINNLGKLEFLND

SEQ ID NO: 19215 - protein, 1378 aa, unidentified
  REGION 1..1378: note = Cas Enzyme sequence
MKKILGLDLGTTSIGWAYVLEAENENESSQIKGLGVRVNPLTTDEKGDFEKGKSISVNADRTLKRSMRRNLNRYQDRRKSLIKSLKKSGLLNEGVALNEDGKDTTHSTYQLRSKAAKERVEKDELCRIFLMINKKRGYKSSRKLKTDDDQEIDGMSIAKRLYDDNLTPGQYCLNQLINNKRVLPDFYRSDLKSELNKIWGFQKKFYPELLKDELYDEVEGKNKGQTWKILERPWSIEGILRTGSRKEKQLEIFQWRNSALSSKMGLENLAIIIQEINGQISGSSGYLGEISDRSKALYFNNQTVGEYLYEQLRKDSRARLKNQVFYRQDYLDEFEKIWETQKRHYNELTEELKLEIRDTIIFYQRKLKSQKGLISFCEFEQKEVSLIIEGKEKKKTIGARVVPKSSLLFQEYKIWKNLNDIVLTDISNGEKIIFDLETKRMLFEELNIRGNLKSQEILKLIGEKPKDWEINFKEIEGNRTNQALYEAYMKILEVEGHDFEEYQPQGTELKEIVRDYFNSAGINPEILNFDGEISGLEFEKQPSFQLWHVLYSFEEDPMKTNSVEKLHKKLVEKFGFSMEQAKILSNVIFQEDYSNLSSKAIRKIFPYIKENQFDKACQLAGYNHSHSITKEENEKRTLTNQLELLSKNSLRNPVVEKILNQMVNVVNAIIKDESFGKPDEIRLELARELKKSAKERKEMTSQIGTAQKLNDKYRQILKDEFGIKNPTRNDIIRYKLYLELKPLGFKTLYSQTYISREKIFDGEFDIEHIIPKSRLFDDSYSNKTLESRAINIEKGNDTAADFIVEKYGQDEMNNYKERIIRLNKEKENPISRGKMNKLLMTGSEIPDGFIERDLRNTQYISKKAQEMLLRSFRVVNTTTGVVTDKLREDWGLTEVMRELNISKYRSLGLTKYIEKKDGSKKEVIQDWSKRNDHRHHAMDALTVAFTTYSHIQYLNYMNARKDEAHKKHGIIYALENKLFQSVKKGRKSFIPPMDNFRDQCKLKLDTILISHKAKNKVVTRNVNKIKVKGKVHSKIELTPRGQLHKETIYGKILKRQSKEVKIGGSFNYDIISQVANVNFREAIFKRFKENGSDPKQAFSGANSLAKKPIYTIQKQKVPEKVLLTWHEDEYVIRKEVNPTNFSNIKQIEKIVDRGIKRKMIRRLEEYSGNAKEAFSDIDKNPIWLDKRNGIPIKSVRIKGVNNAESLHDKNDHHGKTLLNSKGAQQNADFVQFGNNHHVAIYQDAEGKLHEMVVSFFEAVRRSHAKEPVIDKSYNEHIGWKFLFTMKQNEMFIFPSENFNPKEIDIMNPINYPEISKNIFRVQKVAPGDYSFRHHLETQLIDNSKSKGFTWKRLGLSGINGIIKVRINHLGKIVKVGEY

SEQ ID NO: 19216 - protein, 1378 aa, unidentified
  REGION 1..1378: note = Cas Enzyme sequence
MKKILGLDLGTTSIGWAYVLEAENENESSQIKGLGVRVNPLTTDEKGDFEKGKSISVNADRTLKRSMRRNLNRYQDRRKSLIKSLKKSGLLNEGVALNEDGKDTTHSTYQLRSKAAKERVEKDELCRIFLMINKKRGYKSSRKLKTDEGQEIDGMSIAKRLYDDNITPGQYCLNQLINNKRVLPDFYRSDLKSELNKIWGFQKKFYPELLKDELYDEVEGKNKGQTWKILERPWSIEGILRTGSRKEKQLEIFQWRNSALSSKMGLENLAIIIQEINGQISGSSGYLGEISDRSKALYFNNQTVGEYLYEQLRKDSRARLKNQVFYRQDYLDEFEKIWETQKRHYNELTEELKLEIRDTIIFYQRKLKSQKGLISFCEFEQKEVSLIIEGKEKKKTIGARVVPKSSLLFQEYKIWKNLNDIVLTDISNGEKIIFDLETKRMLFEELNIRGNLKSQEILKLIGEKPKDWEINFKEIEGNRTNQALYEAYMKILEVEGHDFEEYQPQGTELKEIVRDYFNSAGINPEILNFDGEISGLEFEKQPSFQLWHVLYSFEEDPMKTNSVEKLHKKLVEKFGFSMEQAKILSNVIFQEDYSNLSSKAIRKIFPYIKENQFDKACQLAGYNHSHSITKEENEKRTLTNQLELLSKNSLRNPVVEKILNQMVNVVNAIIKDESFGKPDEIRLELARELKKSAKERKEMTSQIGTAQKLNDKYRQILKDEFGIKNPTRNDIIRYKLYLELKPLGFKTLYSQTYISREKIFDGEFDIEHIIPKSRLFDDSYSNKTLESRAINIEKGNDTAADFIVEKYGQDEMNNYKERIIRLNKEKENPISRGKMNKLLMTGSEIPDGFIERDLRNTQYISKKAQEMLLRSFRVVNTTTGVVTDKLREDWGLTEVMRELNISKYRSLGLTKYIEKKDGSKKEVIQDWSKRNDHRHHAMDALTVAFTTYSHIQYLNYMNARKDEAHKKHGIIYALENKLFQSVKKGRKSFIPPMDNFRDQCKLKLDTILISHKAKNKVVTRNVNKIKVKGKVHSKIELTPRGQLHKETIYGKILKRQSKEVKIGGSFNYDIISQVANVNFREAIFKRFKENGSDPKQAFSGANSLAKKPIYTIQKQKVPEKVLLTWHEDEYVIRKEVNPTNFSNIKQIEKIVDRGIKRKMIRRLEEYSGNAKEAFSDIDKNPIWLDKRNGIPIKSVRIKGVNNAESLHDKNDHHGKTLLNSKGAQQNADFVQFGNNHHVAIYQDAEGKLHEMVVSFFEAVRRSHAKEPVIDKSYNEHIGWKFLFTMKQNEMFIFPSENFNPKEIDIMNPINYPEISKNIFRVQKVAPGDYSFRHHLETQLIDNSKSKGFTWKRLGLSGINGIIKVRINHLGKIVKVGEY

SEQ ID NO: 19217 - protein, 1144 aa, unidentified
  REGION 1..1144: note = Cas Enzyme sequence
MKVIGIDMGTNSIGWAVIEDHKILASGVRVFPEGVNRPKGSYEESKNLKRRLARQIRRQYFRRRLRKATLTKILKAHGMFPNEHGLTAWNGLNPYELRAKATEEHLTPLDFGRVMLHMAQRRGFKSSLKGSDSEEGKIYDGDLKLRKPGITATQQAIKSEGFATLGAYLNSLDTTVERIRNRYTTRKMYQHEFEVIWDVQKSFDPQTYTPDLYDLLGHEKKGVLFFQRPLRSQKSLIGKCTFEKGKPKIPISHPDFQEYRAWSFINNIRYGNNERLTKDQNQVVFNEMMTKPTLKISQIKKKLKLQGEEFNYDDDTLVPCMSTLFQLNKHFGNKVDFTNTKELEDLWHLFYNAEDPEWLTAKVHSKYGLDPESAKAAAEGKPRVRLDEGYGSLSSAAIKRILPFLRMGIRYDLAALLAGVRKVLGESYWGSLNENDIQALIDNVRHALLAKESGKLRERLWAYLSSEFTIDERYSAADLYHHSDLDTQHDLLESLPEPKNLRNPIVQQALYELKSLVNALLKKFGPPDRIALEMARELKSPKKVREKMLDDNRKREKQRMEIKQNLINEGIRPSSANITKYLLWEECGQQCPYTGMSISRQDLFDDGVWQVEHIIPYSVSFDDGFNNKTLCYADENRNKGNKTPWQFYNYNPNKWEEVKARAKHLFCNRNSYPKFLKFVNESDPKADEFLERQLNDTRYMAKEAKSYLVNVCKDILVTPGGVTAELRHLWGLNGILAPPIRTEYAYEGLCWLVTDPNNKPLHLEPWEMSKAGKIEEKLSKQGVIWEGELREGTFYSKKIRDDHRHHAVDAIAIACTERNYVQKISVYNALDWRFPRPAFDRPWTSFFEDAKDSIESILVSHKVRNRLVTKRTLRQRINGKKVVHHTTTPRGQMHEETFYGLVRDPASGTDRFTTRKPLSAITKVKQLKGITDSRILRLIEERAHELGVDLTNKDLELPKNFFFEYSEEGVPTPTLYLPGGAYGRPIPVRKIRYRVEIGNMKLRNKETNQYAEPGNNFMAVIIEDAQGNLRNETVSFWDAVTRQKENRSLVDLTAEEKILFKFQANDMYLLNIPEGIRWQDLPAKTLSKYLYRVQKFSGIDFYFRLHNASTLKYVNEYLRLSSLSALKKVNPVPVSSTYFGLNDL

SEQ ID NO: 19218 - protein, 1029 aa, unidentified
  REGION 1..1029: note = Cas Enzyme sequence
MYHLAQRRGFKSSLKGSDNEEGKIYDGDLKLLKKGISATQNAVVSGGYPTLGSYLNSLDTTEERIRNRYTLRSMYLHEFEVLWNVQATFNPQIYTQELKDKLGHEKEGVLFFQRPLKSQKGLIGKCTFEPGKTKAPSSSPLYQEFRAWQFINNLQYGDNQLLSPQQRELVFREMSTKMTLKISQIKKKLKLNEEFNYDDDTSAPCMTTICQIQNLFGDKIRIDNPKEVQDLWHLLYDAVDPEWLIQKIQIKYGLSPDEATTVGKGKKRIRLEEGYGNLSLAAIRRILPFLRMGKKYHTSTLLAGVRKVLGETYWSTLNELDIQSLIDCVHAAIDSKGNGTIKDRLWAYLNAEFSIDPKWSAKDLYHHSDLDHQQDLLDLLPEPKNLRNPIVQQSLFELRSLVNTILKKYGKPDRIALEMARELKSSKKAREEMLDKNRKREKQRMEIKQRLIEESIRPTGANITKYLLWEECQKQCPYTGNTISRQDLFNDGIWQIEHIIPYSISFDDSFNNKTLCFADTNRDKGNRTPYQYLSFSPASWEDVKSRAKHLFCNKNSYPKFLKFINEHTPKADDFQARQLNDTRYMAKEAKSYLAKVCANVLVTPGGVTADLRHLWGLNAILAPPIRTHFDYEGFCWLITDHHRNPLRFEPWDIAKVSKIEERLSKEGVVWEGEIRDHTFYSFKNRDDHRHHAVDAITIACTEQRYVKAISSYNSLDQKFSRPVFDQPWPAFFEDAKASIESILVSHKSRNRLVTKRTVRQKINGQKVIHHYSTPRNQLHEETFYGQVLDPNLQEKKYTTRKPLSSITKVKQLKGITDKGILRLIEDRARELQIDLGNKDTELPKNFFFEHNEEGMPIPTLYLPGPEYGRPVPIRKVRYRVDSSNMTLRNKLTDQYAEPGKNFIAAVIEGAQGEWREEIVSFWTAVLRHKANQPLVNLNAGEKLLYSFQANELYLINLPESISIPEIPTKILSQHLYRVQKFSSQFYVFRLHNASTINYDNESVSMRSFGSIKKTNPIKVGIDSTGNLII

SEQ ID NO: 19219 - protein, 1143 aa, unidentified
  REGION 1..1143: note = Cas Enzyme sequence
MKVLGIDMGTTSIGWALIENEVILASGVRVFPEGVNRPKGSYEESKNLTRRLARQIRRQYFRRRMRKSILIKILKQHEMYPHPDGLLAWNALNPYELRAKGTEEALTPLEFGRVMYHLAQRRGFKSSLKGSDNEEGKIYDGDLKLLKKGISATQNAVVSGGYPTLGSYLNSLDTTEERIRNRYTLRSMYLHEFEVLWNVQATFNPQIYTQELKDKLGHEKEGVLFFQRPLKSQKGLIGKCTFEPGKTKAPSSSPLYQEFRAWQFINNLQYGDNQLLSPQQRELVFREMSTKMTLKISQIKKKLKLNEEFNYDDDTSAPCMTTICQIQNLFGDKIRIDNPKEVQDLWHLLYDAVDPEWLIQKIQIKYGLSPDEATTVGKGKKRIRLEEGYGNLSLAAIRRILPFLRMGKKYHTSTLLAGVRKVLGETYWSTLNELDIQSLIDCVHAAIDSKGNGTIKDRLWAYLNAEFSIDPKWSAKDLYHHSDLDHQQDLLDLLPEPKNLRNPIVQQSLFELRSLVNTILKKYGKPDRIALEMARELKSSKKAREEMLDKNRKREKQRMEIKQRLIEESIRPTGANITKYLLWEECQKQCPYTGNTISRQDLFNDGIWQIEHIIPYSISFDDSFNNKTLCFADTNRDKGNRTPYQYLSFSPASWEDVKSRAKHLFCNKNSYPKFLKFINEHTPKADDFQARQLNDTRYMAKEAKSYLAKVCANVLVTPGGVTADLRHLWGLNAILAPPIRTHFDYEGFCWLITDHHRNPLRFEPWDIAKVSKIEERLSKEGVVWEGEIRDHTFYSFKNRDDHRHHAVDAITIACTEQRYVKAISSYNSLDQKFSRPVFDQPWPAFFEDAKASIESILVSHKSRNRLVTKRTVRQKINGQKVIHHYSTPRNQLHEETFYGQVLDPNLQEKKYTTRKPLSSITKVKQLKGITDKGILRLIEDRARELQIDLGNKDTELPKNFFFEHNEEGMPIPTLYLPGPEYGRPVPIRKVRYRVDSSNMTLRNKLTDQYAEPGKNFIAAVIEGAQGEWREEIVSFWTAVLRHKANQPLVNLNAGEKLLYSFQANELYLINLPESISIPEIPTKILSQHLYRVQKFSSQFYVFRLHNASTINYDNESVSMRSFGSIKKTNPIKVGIDSTGNLII

SEQ ID NO: 19220 - protein, 1144 aa, unidentified
  REGION 1..1144: note = Cas Enzyme sequence
MKVIGIDMGTNSIGWAVIEDQKILASGVRVFPEGVNRPKGSYEESKNLKRRLARQIRRQYFRRRLRKATLTKILKAHGMFPDEQGLAAWAGLNPYLLRAKATEEQLTLLEFGRVMYHMAQRRGFKSSLKGSDSEEGKIYDGDLKLRKPGITATQQAIKSEGYASLGAYLNSLDTTVERIRNRYTTRKMYQHEFEVIWDVQKSFDPQTYDSALYDLLGHEKKGVLFFQRPLRSQKSLIGKCTFEKGKPKIPISHPNFQEYRAWSFINNIRYGNNEKLTKDQNQVVFNEMLTKATLKMSQVKKKLKLQGEEFNYDDDTLVPCMTTMVQLTKHFGNKIDFTNAKELEDLWHLFYHAEDPEWLTSKVHAKYHLDLESAKAAAEGKPRVRLDEGYGSLSSAAIKRILPFLRMGIRYDLATLLAGVRKVLGESYWGSLNENDVQALIDNVRHALLAKESGKLRERLWAYLSSEFTIDERYSAADLYHHSDLDTQQDLLEALPEPKNLRNPIVQQALFELKSLVNALLKKFGPPDRIALEMARELKSPKKVREKMLDDNRKREKQRMEIKQNLISEGIRPSSANITKYLLWEECGQQCPYTGMSISRQNLFDDGVWQVEHIIPYSISFDDGFNNKTLCYADENRSKGNRTPWQLYNFNPNKWEEVKARAKHLFCNRNSYPKFLKFVNESDPKADEFLERQLNDTRYMAKEAKSYLAKVCRDILVTPGGVTAELRHLWGLNGILAPPIRTEYAYEGLCWLVTDPNNKPLHLEPWEMSKAGKIEEKLSKQGVVWEGELREGTFYSKKIRDDHRHHAVDAIAIACTERNYVQKISAYNALDWRFPRPAFEKPWTNFFEDAKDSIESILVSHKVRNRLITKRTLRQRINGKKVVHHTTTPRGQMHEETFYGVVKDPASGTDRFTTRKPLASITKVKQLKGITDSRILGLIDERARELGVDLTNKDLELPKNFFFEYSEEGIPTPTLYLPGGTYGRPVPVRKIRYRVESGNMKLRNKETNQYAEPGNNYMAVIIEDAQGNLREEIVSFWDAVTRQKEGLTIVSLLEGEKILYNFQANEMYIFNIPEGIRWQDLPAKTLSKHLYRVQKFSSMFYVFRLHNASTLKYENEFIRIQSFLALKKINPVPVSSTYFGLNDL

SEQ ID NO: 19221 - protein, 1143 aa, unidentified
  REGION 1..1143: note = Cas Enzyme sequence
MKVLGIDMGTTSIGWALIENEVILASGVRIFPEGVNRPKGSYEESKNLTRRLARQIRRQYFRRRMRKSILIKILKQHEMYPHPDGLLAWNALNPYELRAKGTEEALTPLEFGRVMYHLAQRRGFKSSLKGSDNEEGKIYDGDLKLLKKGISATQNAVVSGGYPTLGSYLNSLDTTEERIRNRYTLRSMYLHEFEVLWNVQATFNPQIYTQELKDKLGHEKEGVLFFQRPLKSQKGLIGKCTFEPGKTKAPSSSPLYQEFRAWQFINNLQYGDNQLLSPQQRELVFREMSTKMTLKISQIKKKLKLNEEFNYDDDTSAPCMTTICQIQNLFGDKIRIDNPKEVQDLWHLLYDAVDPEWLIQKIQIKYGLSPDEATTVGKGKKRIRLEEGYGNLSLAAIRRILPFLRMGKKYHTSTLLAGVRKVLGETYWSTLNELDIQSLIDCVHAAIDSKGNGTIKDRLWAYLNAEFSIAPKWSAKDLYHHSDLDHQQDLLDLLPEPKNLRNPIVQQSLFELRSLVNTILKKYGKPDRIALEMARELKSSKKAREEMLDKNRKREKQRMEIKQKLIEESIRPTGANITKYLLWEECQKQCPYTGNTISRQDLFNDGIWQIEHIIPYSISFDDSFNNKTLCFADTNRDKGNRTPYQYFSFSPATWEEVKSRAKHLFCNKNSYPKFLKFINEHTPKADDFQARQLNDTRYMAKEAKSYLAKVCANVLVTPGGVTADLRHLWGLNAILAPPIRTHFDYEGFCWLITDHQRNPLNYEPWDIAKVSKIEERLSKEGVVWEGEIRDHTFYSFKNRDDHRHHAVDAITIACTEHRYVKAISSYNSLDQKFSRPVFDQPWPAFFEDAKASIESILVSHKSRNRLVTKRTVRQKINGQKVIHHYSTPRNQLHEETFYGQVLDPNLQEKKFTTRKPLSSITKPKELKGITDKGILRLIEDRAKELQIDLGNKDTVLPKSFFFEHNEHGMPIPTLYLPGPEYGRPVPIRKVRYRVESSNMTLRNKLTNQYAKPGNNFIAAVIEDAQGVWREEIVSFWTAVLRYKANQPLVNLNAGEKLLYSFQANELYLLNLPVGIAIPEIPTKILSQHLYRVQFISSKFYVFRLHNASTLKYENEFIRISSFGALNKINPIKVGIDSTGNLVI

SEQ ID NO: 19222 - protein, 1212 aa, unidentified
  REGION 1..1212: note = Cas Enzyme sequence
MSRILGLDVGTNSLGWAILDPFQKRFTDAGVVVFQQGIPDEKGREAERSPAAERRAFRAARRLKFRRRLRKYHTLKVLIANQMCPLTMAELQNWIRNGKFPIENRNFISWLGSTKENNPYYFRAKAAERKLPPLELGRAFYHLAIRRGFRSSRKESSSSNEKELTNFKKEINQLTEILQKKQCTLGQYFYELFQRSEKIRKVNRCGRKEHYEPEFEKICEVQNLPEPFVAEMRKAIFLQRPLRSQKHLAGHCSLEKKRVRCLIGHPLFERYRMLSFINSIRKNGVPLNEEERQKAQAAFLVGKPSFEFEKLVRKLYPKYPKNEWSEWNYPPDKSIASSPVTNQLQKILGTEDLFTWHHEYIGRDNKPKSMDYQTLFDALTFFDDDDMLKNFAIERAGLTVDQAEKFIKIRIPSGYANFSLYAIRKILPFLDAGHIQTRAVFLAKLPDVIGKEVFQKNGEKIIADMEQLEADWRMERESASESGERAEFLSLTERIKHYLEDEFHVTPDRFELLYRYNSRSDYQDHTRSGILPEVNLGMIYNPMVYRSLNVLRRLVNHLRKTGKIDADTEIHVELARSVNDKNTRMAVANYQKKQENLRKQYREAIEALGYEATEEQILRYVLWMEQNKRCLYTGKPIGLAELMSGDNVVEIEHTVPRSRGGDSNMENLTLCFTDYNRYTKKNGLPTACPNYDVKWNGHNSIRENIRVVGWEEKRENLRLCLEKLRSAARGNPQKRVEMLECRREFEYWCANLAAFEITDEELRRKGFSRRQLVDTGIIARHAVFLLKSVYRNTYSRNGRVTEWARKAWGVQGFYEKKERSDHRHHAIDAMCIAALTEDFFQKISAAYRADREEAMAYARYSSTLPDAYPWHSFPEDVFEKSEEILVAHFTRHNETKQTRKRVHLVTPYKTADGELRRVVTAGGDTVRGQLHKESYFGRIIDPESGQEKSVLRKELNSQNFKGESALSAIVDPAIREAVSAQLRFRMSSGKNFKNAIDEGGFHMKSKDGTFQGPPICKVRCFVRLAEPLKIRKHAYASEVEYKNYIYADNAKGGNFKAALFRSPRGKLCYCLQSLWDWANEHKRSDYVPPEKQPGLGEFLGFIAPGTMALAYETTPDELKELAPRELSKRLYKIIVIEKDMQRLSLRYHCEGRAKSEAQAAMKKTMGVEEASSISFQEPARLLKISSDTFSSHLIFEGIDFVISIDGEIRFLK

SEQ ID NO: 19223 - protein, 1212 aa, unidentified
  REGION 1..1212: note = Cas Enzyme sequence
MSRILGLDVGTNSLGWAILDPFQKMFIDTGVVVFQQGIPEEKGREAECSPAAERRRFRAARRLKYRRRLRKYHTLKVLIENQMCPLTIPELQNWIRNGKFPIENREFIAWFSSTKEDNPYYFRAKAAERKLPPLELGRAFYHLAIRRGFRSSRKETSGSNEKELTSFKQEINRLTEILQRKQCTLGQYFYELFQKSEKIRKVNRCGRKEHYEPEFDKICEVQELPEPFVSEMRKAIFLQRPLRSQKYLAGHCSLEKKRVRCLIGHPLFERYRMLSFINSIRKNGVPLNERERQKAQAAFLVSKPSFEFEKLVRKLYPGYPKNEWSEWNYPPDKSIASSPVTNQLQKILGTEDLFAWHHEYIGRDNKPKSMDYQTLFDALTFFDDDGMLKNFAIERAGLTVDQAEKFVKIRIPTGYANFSLYAIRKILPFLEAGHIQTRAVFLAKLPDLLGKDVFQKNGEKIIADMEQLEADWRMERESASESGERAAFLSLTERIKHYLEDEFHVTPDRFELLYRYNSRSDYQDHTRSGILPEVNLGMIYNPMVYRSLNVLRRLVNHLRKTGKINADTEIHVELARSVNDKNTRMAVANDQKKQENLRKQYKDAIEAEGFEATEERILRYVLWMEQNKHCLYTGKAIGLADLMSENDLVELEHTVPRSRGGDSSRENLTLCFTDYNRYTKKNGLPTACPNYDVKWKEYNSIRENIKDAGWEEKRENLRSRLEKLRSAARGNPQKRVEMLECRREFEYWCAKLAAFEITDEELRRKGFSRRQLADTGIIARHAVFLLKSVYGNTYSRNGRVTEWVRKAWGVQGIYEKKDRCDHRHHAIDAMCIAALTEDFFQKISAAYRADEEKAMAYARYNSTLPDAYPWRSFPEDVFEKSEEILVTHFIRHNETKQAKKQVHLVTPYKTADGGLRRVVTAGGDTVRGQLHKESYFGRIRDPESGEKKSVLRKELNSQNFKTESALAAIVDPAIREAVSAQLRLRMSSGKSFKEAMDEGGFRMRSGDDVFQGPPIRKVRSFVRTAEPLKIRRHAYASEAEYKNYIYADTAKGGNFKAALFRAPRGKLCYCLQSLWNWANAHKRPDYVPPEKQPGVGEFLGFIAPGTMVLVYENTPDELKKLSRRELNKRLYKIIVIEKDIQRLSLRYHCEARAKSEVQEEMKKTLGVEEASTISFQEPAKLLKITSGEFSNHLIFEGIDFVMSIDGEIRFLK

SEQ ID NO: 19224 - protein, 1212 aa, unidentified
  REGION 1..1212: note = Cas Enzyme sequence
MSRVLGLDVGTNSLGWAILDPFQKRFTGAGVVVFQQGIPDEKGREAERSPAAERRAFRAARRLKFRRRLRKYHTLKVLIANQMCPLTMAELQDWIRNGKFPIENRNFISWLGSTKEDNPYYFRAKAAERKLPPLELGRAFYHLAIRRGFWSSRKESSSSNEKELTNFKKEINQLTEILQRKQCTLGQYFYELFRRSEKIRKVNRCGRKEHYEPEFEKICKVQNLPEPFVAEMRKAIFLQRPLRSQKHLAGHCSLEKKRVRCLIGHPLFERYRMLSFINSIRKNGVPLNEEERQKAQAAFLVGKPSFEFEKLVRKIYPKYPKNEWSEWNYPPDKSIASSPVTNQLQKILGTEDLFSWRHEYIGRDDKRKTMDYQTLFDALTFFDDDDMLKNFAMERAGLTADQAEKFVKIRIPTGYANFSLYAIRKILPFLEAGHIQTRAVFLAKLPDVLGKEVFQKNSEKIIADIDRMETDWRAERESAVSSRERAAFLSQTERLKQYLEDEFHVTPDRFELLYRYNSRSDYQDHSRTGILPEVNLGMIYNPMVYRSLNVLRRLVNHLRKTGKIDADTEIHVELARSVNDKNTRMAVANYQKNQENLRKQYREAIEAEGVEATDEQILRYALWMEQNKRCLYTGKPIGLADLMSGDNVVEIEHTVPRSRGGDSSMENLTLCFTDYNRYIKKNGLPTACPNYDVKWKEYNSIRENIRVVGWEEKRENLRSRLEKLRSAARGNPQKRVEFLECKREFNYLCAKLAAFELTDDELQQGGFSRRQLVDTGIIARHAVFLLKSVYKNTYSRNGRVTEWARKAWGVQGFYEKKERSDHRHHAIDAMCIAALTEGFFQRISEAYRLDEEKAMTYARYSSTLPDAYPWRSFPEDVFEKSEEILVAHFTRHNETKQTRKRVHLVTPYKTADGELRRVVTAGGDTVRGQLHNDSYLGRIKDPESGEEKYVFRKELIFKYFKEESALAAIVDPAIREAVSAQLRLRMDSGKSFKDAIAEGGFHMKSKDGTFQGPPIRKVRCFVRNAEPLKIRKHAYASEVEYKNYIYAETAKGGNFKAALFRSPQGELCYCLQSLWDWANAHKRSDYVPPEKQSGPGEFIGFIAPGTMALAYETTPDELKKLSPRELCRRLYKIIIIEKDRPRLNLRYHCEARAKSEVQAEMKKTMGVEEASSISFQEPARLLKISSEKFSNHLIFEGIDFVISIDGEIRFLK

SEQ ID NO: 19225 - protein, 1061 aa, unidentified
  REGION 1..1061: note = Cas Enzyme sequence
SRKESSSSNEKELTNFKKEINQLTEILQRKQCTLGQYFYELFRRSEKIRKVNRCGRKEHYEPEFEKICKVQNLPEPFVAEMRKAIFLQRPLRSQKHLAGHCSLEKKRVRCLIGHPLFERYRMLSFINSIRKNGVPLNEEERQKAQAAFLVGKPSFEFEKLVRKIYPKYPKNEWSEWNYPPDKSIASSPVTNQLQKILGTEDLFSWRHEYIGRDDKRKTMDYQTLFDALTFFDDDDMLKNFAMERAGLTADQAEKFVKIRIPTGYANFSLYAIRKILPFLEAGHIQTRAVFLAKLPDVLGKEVFQKNSEKIIADIDRMETDWRAERESAVSSRERAAFLSQTERLKQYLEDEFHVTPDRFELLYRYNSRSDYQDHSRTGILPEVNLGMIYNPMVYRSLNVLRRLVNHLRKTGKIDADTEIHVELARSVNDKNTRMAVANYQKNQENLRKQYREAIEAEGVEATDEQILRYALWMEQNKRCLYTGKPIGLADLMSGDNVVEIEHTVPRSRGGDSSMENLTLCFTDYNRYIKKNGLPTACPNYDVKWKEYNSIRENIRVVGWEEKRENLRSRLEKLRSAARGNPQKRVEFLECKREFNYLCAKLAAFELTDDELQQGGFSRRQLVDTGIIARHAVFLLKSVYKNTYSRNGRVTEWARKAWGVQGFYEKKERSDHRHHAIDAMCIAALTEGFFQRISEAYRLDEEKAMTYARYSSTLPDAYPWRSFPEDVFEKSEEILVAHFTRHNETKQTRKRVHLVTPYKTADGELRRVVTAGGDTVRGQLHNDSYLGRIKDPESGEEKYVFRKELIFKYFKEESALAAIVDPAIREAVSAQLRLRMDSGKSFKDAIAEGGFHMKSKDGTFQGPPIRKVRCFVRNAEPLKIRKHAYASEVEYKNYIYAETAKGGNFKAALFRSPQGELCYCLQSLWDWANAHKRSDYVPPEKQSGPGEFIGFIAPGTMALAYETTPDELKKLSPRELCRRLYKIIIIEKDRPRLNLRYHCEARAKSEVQAEMKKTMGVEEASSISFQEPARLLKISSEKFSNHLIFEGIDFVISIDGEIRFLK

SEQ ID NO: 19226 - protein, 1212 aa, unidentified
  REGION 1..1212: note = Cas Enzyme sequence
MSRILGLDVGTNSLGWAILDPFQKVFVDTGVVVFQQGIPEEKGREAECSPAAERRKFRAARRLKYRRRLRKYHTLKVLIENQMCPLTIPELQNWIRNGKFPIENREFIAWLSSTKEDNPYYFRAKAAERKLPPLELGRAFYHLAIRRGFRSSRKESSSANDKELTNFKKEINQLTEILQRKQCTLGQYFYELFQKSEKIRKVNRCGRKEHYEPEFDKICEVQNLPEPFVSEMRKAIFLQRPLRSQKYLAGHCSLEKKRVRCLIGHPLFERYRMLSFINSIRKNGVPLNEQERQKAQAAFLVSKPSFEFEKLVRKLYPGYPKNEWSEWNYPPDKSIASSPVTNQLQKIVGTADLFAWHHEYIGRDNKPKSMDYQTLFDALTFFDDDGMLKNFAIERAGLTVDQAEKFVKIRIPTGYANFSLYAIRKILPFLEAGHIQTRAVFLAKLPDVLGKDVFQKNGEKIIADLEQLEADWRMERESASESGERAAFLSLTERIKHYLEDEFHVTPDRFELLYRYNSRSDYQDHTRSGILPEVNLGMIYNPMVYRSLNVLRRLVNHLRKTGKIDADTEIHVELARSVNDKNTRMAVANDQKKQENLRKQYKEAIEAEGFEATEERILRYVLWMEQNKHCLYTGKAIGLADLMSENDLVELEHTVPRSRGGDSSRENLTLCFTDYNRYTKKNGLPTACPNYDVKWKEYNSIRENIKVAGWEEKRENLRSRLEKLRSAARGNPQKRVEMLECRREFEYWCAKLAAFEITDEELRRKGFSRRQLVDTGIIARHAVFLLKSVYGNTYSRNGRVTEWVRKAWGVQGIYEKKDRCDHRHHAIDAMCIAALTEDFFQKISAAHRADEEKAMAYARYNSTLPDAYPWRSFPEDVFEKSEEILVTHFTRHNETKQAKKQVHLVTPYKTADGGLRRVVTAGGDTVRGQLHKESYFGRIRDPESGEKKSVLRKELNSQNFKTESALAAIVDPAIREAVSAQLRLRISSGKSFKEAMDEGGFRMRSGDDVFQGPPIRKVRSFVRTAEPLKIRRHAYASEAEYKNYIYADTAKGGNFKAALFRAPRGKLCYCLQSLWNWANAHKRPDYVPPEKQPGVGEFLGFIAPGTMVLAYENTPDELKKLSRRELNKRLYKIIVIEKDIQRLSLRYHCEARAKSEVQEEMKKTLGVEEASTISFQEPAKLLKITSGEFSNHLIFEGIDFVMSIDGEIRFLK

SEQ ID NO: 19227 - protein, 1145 aa, unidentified
  REGION 1..1145: note = Cas Enzyme sequence
MKIGIDMGSNSIGWALLNNDQILASGVRVFPEGINLEKGTKEVSKNLKRRLARQIRRQYFRRRMRKIILEKVLKAHGMFPAEHELAAWRTLNPYVLRSKGTEEALTPLEFGRVMYHLSQRRGFKSSMKGADEEEGKIYDGDLKIRKTGINQTLKGMNSGGFPTLGSYLNSINPHAERIRNRYTTRQMYQQEFKVLWHVQQKFNPEIYSQDLYDQLGHDKTGVLFFQRPLKSQKTLIGKCTFEKNKPRIPISHPMFQEYRAWCMLNNIRFGDNQFLSTEQKKQALDLMSNNQKLNITQLKKKLKLLEEFNFSEDDKLPCLTTLAFFNKHLSNIVLNADEKSIADLWHLFYDAQEPEWLQNKLVEKYSISPQKAMDMVKGRHKVILEEGYGSLSALAIRRILPFLRQGLQLHVAVLLAGVCKVLGDDYWNGLSKSEQETLTNNIRAAAESKSGGTIRERIWNYLVAELGVPKKYTMADLYHHSDTDKQLELLDALPEPKKLRNPIVEQSLFELRSLINTLIQQYGAPDRIVLEMARDLKNTKKQREKALSDNRRREQQRNVVKQKLIDEGIRPNSGNITKYLLWEECQQQCPYTGQSISRSDLFNDGIWQIEHIVPYSVSLDDSFTNKTLCLADENRKKGNKTPWQYLNYSDALWAEAKERAKVLFCNKYSYPKYLKFISEREPKADDFISRQLNDTRYMASEAKRYLETICRDVVVTPGGVTAELRHQWGLDAILSPTLNTPVDVSGPGWLIVSSQGEYIEFVPWEIKLSEASAKTEAKLSKKGIVMYGEMRSGQFFPGKNRNDHRHHAVDAIAIACTERRYVQSIAGQHAQGKLYNPSPIPPPWEHFFEDARDAVQKILVSHKKRKRLMTSRTVKQKHNGKIVMHKTLTPRGQLHDETFYGKVLDPTTKNWEFTTRKPLSSFTKIKQLKAITDSRIMALIKRRAEELQVEWKDDAELPKNFFFENDENGQPIPTLYLPGGNLMASVPVRKVRCRVASSNMALRNQSTQQYAEPGSNYMAAIIETEQGSWREEIVSFWTAAQRFRRKEPLVGLKSGEKILHTLQSNDLYLLNLPHDLDAKVAPPEILSKHLYRVQKISTLFYVFRKHTASTLESDSEMVRITSFDGWKRVNPIKCRVERDGHLQLL

SEQ ID NO: 19228 - protein, 1227 aa, unidentified
  REGION 1..1227: note = Cas Enzyme sequence
MKKTLGLDLGSNSLGWAILDDITGDILDKGVIVFPEGVDLDAKSSADTPAAIRRSARMARRMKFRRKLRKWHLLNILIDADMCPLTHAELDEWKKTGRYPLGNKAFLEWLKATDTSNPYCDRAAAASVKVPPLTLGRALYHIAQRRGFKSSRKDETDLADETAGQTKQLDKELGAVKTDIAALTKEIDAAGCKTLGQYFFKLLQDEKGKLNKTRIRCRYTGRIEHYEKEFAVIMDVQGYSSGDGLRTKLYKAIFSQRPLRSQAHLVGPCPLEPRNPRVQIGHPAFEEFRMLAFVNNLSLEDSDGNCRDEQGNILYPLSAKDRAVICSALMKAAPSIKFGDIVKLFKKDPRFKTQGLKFHYYRLDDSVATCQTRHKIKSAFNGVPYDEQMVFDALTFFDDNDKLNAWFRKHFPALDDAAVKKLVSIHPKEGNASYSLKAINKMLPFLRKGFELSQARFLAKLPDVIPDFAANEQAILQGLDEARWAFREERRRYGEMDSAERRQVKAPLLFDFYQRYLLNNWNVTEEKWNRLYLHGEGTYVKETEYKVKGKIVQLERPRLPPVQLRMIRNPLVQRAMTTLRRLVNYLGDHGKLEETDTIRIELARTVNDFATRKAWQDWQKARQCLRAEAAAEIAKLGVAVTEDAIDRYVLWKEQDGVCLYTHKTISLSDLFVGNKFDIEHTIPRSLSGDDSLANKTICEAAYNRQTKQGRIPRECPNWDEIDTMLRPWREKIEQLEKTYRSQTRSARAKTDPAQRSQARVKALVTKFELSYWRDKLRRFEITSDKLQSPESGLSGFKKRQLVDTGIMCSHAVELLRSVYPATFAVNGAATAFARKAWGIQNDEAKDRTEHTHHAKDAMVIAALTPARFTSICTALKDDGAEHRRECDVCPPPYEGFAEKVRHACDEILIKHVMRQTTLRQSSKRNVLAKAHPPKDNPEGPLIKAVLSRGDTVRGALHKETFYGCIQTPGQNGRQFVVRKSLLGPVKDAQAIVSKIIDPAIRDIVNRRLKELVASEVKNVSAGDIRMPSGVPINKVRIAAKTTNPSTLRDHAIPSTSPYKTPYYVTFAEGSNFRLGLFNDAGRMFVIPDNSLVWAQNHKRPDYIPLDQRPGFIGYVRPGTMALAYHEGHSEELEVMPSTELFKRLYKVVKFRDDGRVTFRLHIEARASTVLEGELASTGFNKKGESKINYDVPYRLLCLSPSTYTKQMFFEGIHFRMMLDGSIQFIRK

SEQ ID NO: 19229 - protein, 1079 aa, unidentified
  REGION 1..1079: note = Cas Enzyme sequence
KSSKKDQEKEDSPEMQSSEMKGKIRELKLKLESSGITLGQYLYERFQCEKKIRKEIRCGRKEHYEPEFERICDVQGIDPEVRKTLHTAIFMQRPLRSQKHRVGKCPLEKRHSRCLISHPLFERYRMLSFINSIKVKTSGDKEFRFLTDAERRLAETVFMVSAPSFKVERILHKLFPEIGKKNYEGPRPEINYRPDHTVASASVTHQLSKILKCNDLFAWRHSYVTRHGKEAVMDVQALFDGLYYFSHIYDEDDDDKAALKFASERVGLSEDAAAALIKIKIPDGYARYSLCAIRKIMPFLEMGYVERHAVFLAKLPDIMGECFENRKEELLHDFQQCVNDYVWEKENLSRREHVQGRLLSLTERLRNMLEEKWKIMPPEFEKLYSYQENSNYQDCSKEGILPRIELGMIYNPVVHRSLTVLRHLVNHLRRCGKIDADTEIHVELTREVNDKNHRLAYLDWQKKNEGERAQAVKAFEEYGISNPTETQILRWCLWEEQGHRCLYTGRKIEAGEIFSPTADSVDIEHTIPRSRGGDNSRENLTLCDSQFNRHEKVGKLPSECDNYRQPNGILENLESCILPKLEEAEVAYSKASAAARKATGIQRANARKKMLYLRFALDYWRTKVKTFKLAADEINEDFTLRQLSATGVMTRHALQFLKSVYPRVFANSGKITKFARESWGVQNQDEAKDRSDHIHHAVDAIVVAALNRKTLARISAAYHECEELMQGRGALKIAYPWESFPEDVRNAVNQILVRHIVQRNEMKQTKRNGVFLTSPVKLPDGRIIRRVPAAGDTVRGALHNQTWYGCIRQNGAEKFVVRKPFDSNEFKQLKDLEKIVDPGVKNALLEQIRNSGMDFKTAMQQEFRMKTKTGKFDGPVIRRVRIFCSMQEPLKIKEQTYCSEKAYKNYYYAETAKGSNFMVALYRKPEIPGTEKTYEYRLISLWNWAKEHRQSGFVPYEQREKNLDFIGFIAPGTMALFYEKSPEELHGLPKSELQKRLYTITAFEKDGERLKLQLRWHREAREKKKAEEAMDVMKMKQSVVSYDTPGFLLRISQKSYQNHLLFDGIDFEFTADGEIIFRE

SEQ ID NO: 19230 - protein, 1226 aa, unidentified
  REGION 1..1226: note = Cas Enzyme sequence
MQKVLGIDLGTNSLGWGIVESNTVKDCGVLVFEQGIPQEKGREAALSPAAERTAFRAARRLKFRRRLRKYHTLKILIAQGMCPLALDELNRWIRQGVFPRGNENFIHWLNSTKERNPYYFRAHAATEKIPLPDLGRAFFHIALRRGFKSSKKDQEKEDSPEMQSSEMKGKIRELKLKLESSGITLGQYLYERFQCEKKIRKEIRCGRKEHYEPEFERICDVQGIDPEVRKALHTAIFMQRPLRSQKHRVGKCPLEKHHSRCLISHPLFERYRMLSFINSIKVKTSGDKEFRFLTDAERRLAETVFMVSAPSFKVERILHKLFPEIGKKNYEGPRPEMNYRPDHTVASASVTHQLSKILKCGDLFAWRHSYVTRHGKEAVMDVQALFDGLYYFSHIYDEDDDDKAALKFASERVGLSEDAAAALIKIKIPDGYARYSLCAIRKIMPFLEMGYVERHAVFLAKLPDIMGECFENRKEELLHDFQQCVNDYVWEKENLSRREHVQGRLLSLTERLRNMLEEKWKIMPPEFEKLYSYQENSNYQDCSKEGILPRIELGMIYNPVVHRSLTVLRHLVNHLRRCGKIDADTEIHVELTREVNDKNHRLAYLDWQKKNEGERAQAVKAFEEYGISNPTETQILRWCLWEEQGHRCLYTGRKIEAGEIFSPTADSVDIEHTIPRSRGGDNSRENLTLCDSQFNRHEKVGKLPSECDNYHQPNGILENLKSCIQPKLEEAEVAYSKASAAARKATGIQRANARKKMLYLRFALDYWRTKVKTFKLAADEINEDFTLRQLSATGVMTRHALQFLKSVYPRVFANSGKITKFARESWGVQNQDEAKDRSDHIHHAVDAIVVAVLNRKTLARISAAYHECEELMQGRGALKIAYPWESFPEDVRNAVNQILVRHIVQRNEMKQTKRNGVFLTSPVKLPDGRVIRRVPAAGDTVRGALHNQTWYGCIRQNGAEKFVVRKPFDSNEFKQLKDLEKIVDPGVKNALLEQIRNSGMDFKTAMRQEFRMKTKTGKFDGPVIRRVRIFCSMQEPLKIKEQTYCSEKAYKNYYYAETAKGSNFMVALYRKPEIPGTEKTYEYRLISLWNWAKEHRQSGFVPYEQREKNLDFIGFIAPGTMALFYEKSPEELHGLPKSELQKRLYTITAFEKDGERLKLQLRWHREAREKKKAEEAMDVMKMKQSVVSYDIPAFLLRISQKSYQNHLLFDGIDFEFTADGEIIFRE

SEQ ID NO: 19231 - protein, 1212 aa, unidentified
  REGION 1..1212: note = Cas Enzyme sequence
MSRILGLDVGTNSLGWAILDPFQKVFVDTGVVVFQQGIPEEKGREAECSPAAERRKFRAARRLKYRRRLRKYHTLKVLIENQMCPLTIPELQNWIRNGKFPIENREFIAWLSSTKEDNPYYFRAKAAERKLPPLELGRAFYHLAIRRGFRSSRKESSSANDKELTNFKKEINQLTEILQRKQCTLGQYFYELFQKSEKIRKVNRCGRKEHYEPEFDKICEVQNLPEPFVSEMRKAIFLQRPLRSQKYLAGHCSLEKKRVRCLIGHPLFERYRMLSFINSIRKNGVPLNERERQKAQAAFLVSKPSFEFEKLVRKLYPGYPKNEWSEWNYPPDKSIASSPVTNQLQKILGTEDLFAWHHEYIGRDNKPKSMDYQTLFDALTFFDDDGMLKNFAIERAGLTVDQAEKFVKIRIPTGYANFSLYAIRKILPFLEAGHIQTRAVFLAKLPDVLGKDVFQKNGEKIIADMEQLEADWRMERESASESGERAAFLSLTERIKHYLEDEFHVTPDRFELLYRYNSRSDYQDHTRSGILPEVNLGMIYNPMVYRSLNVLRRLVNHLRKTGKINADTEIHVELARSVNDKNTRMAVANDQKKQENLRKQYKEAIEAEGFEATEERILRYVLWMEQNKHCLYTGKAIGLADLMSENNLVELEHTVPRSRGGDSSRENLTLCFTDYNRYTKKNGLPTACPNYDVKWKEYNSIRENIKVAGWEEKRENLRSRLEKLRSAARGNPQKRVEMLECRREFEYWCAKLAAFEITDEELCRKGFSRRQLVDTGIIARHAVFLLKSVYGNTYSRNGRVTEWVRKAWGVQGIYEKKDRCDHRHHAIDAMCIAALTEDFFQKISAAHRADEEKAMAYARYNSTLPDAYPWRSFPEDVFEKSEEILVTHFTRHNETKQAKKQVHLVTPYKTADGGLRRVVTAGGDTVRGPLHKESYFGRIRDPESGEKKSVLRKELNSQNFKTESALAAIVDPAIREAVSAQLRLRMSSGKSFKEAMDEGGFRMRSGDDVFQGPPIRKVRSFVRTAEPLKIRRHAYASEAEYKNYIYADTAKGGNFKAALFRAPRGKLCYCLQSLWNWANAHKRPDYVPPEKQPGVGEFLGFIAPGTMVLAYENTPDELKKLSRRELNKRLYKIIVIEKDIQRLSLRYHCEARAKSEVQEEMKKTLGVEEASTISFQEPAKLLKITSGEFSNHLIFEGIDFVMSIDGEIRFLK

SEQ ID NO: 19232 - protein, 1156 aa, unidentified
  REGION 1..1156: note = Cas Enzyme sequence
FRAARRLKYRRRLRKYHTLKVLIENQMCPLTIPELQNWIRNGKFPIENREFIAWLSSTKEDNPYYFRAKAAERKLPPLELGRAFYHLAIRRGFRSSRKETSGSNEKELTSFKQEINRLTEILQRKQCTLGQYFYELFQKSEKIRKVNRCGRKEHYEPEFDKICEVQELPEPFVSEMRKAIFLQRPLRSQKYLAGHCSLEKKRVRCLIGHPLFERYRMLSFINSIRKNGVPLNERERQKAQAAFLVSKPSFEFEKLVRKLYPGYPKNEWSEWNYPPDKSIASSPVTNQLQKIVGTEDLFAWHHEYIGRDNKPKSMDYQTLLDALTFFDDDGMLKNFAIERAGLTVDQAEKFVKIRIPTGYANFSLYAIRKILPFLEAGHIQTRAVFLAKLPDVLGKDVFQKNGEKIIADMEQLEADWRMERESASESGERAAFLSLTERIKHYLEDEFHVTPDRFELLYRYNSRSDYQDHTRSGILPEVNLGMIYNPMVYRSLNVLRRLVNHLRKTGKINADTEIHVELARSVNDKNTRMAVANDQKKQENLRKQYKEAIEAEGFEATEERILRYVLWMEQNKHCLYTGKAIGLADLMSENDLVEFEHTVPRSRGGDSSRENLTLCFTDYNRYTKKNGLPTACPNYDVKWKEYNSIRENIKVAGWEEKRENLRSRLEKLRSAARGNPQKRVEMLECRREFEYWCAKLAAFEITDEELRRKGFSRRQLADTGIIARHAVFLLKSVYGNTYSRNGRVTEWVRKAWGVQGIYEKKDRCDHRHHAIDAMCIAALTEDFFQKISAAYRADEEKAMAYARYNSTLPDAYPWRSFPEDVFEKSEEILVTHFIRHNETKQAKKQVHLVTPYKTADGGLRRVVTAGGDTVRGQLHKESYFGRIRDPESGEKKSVLRKELNSQNFKTESALAAIVDPAIREAVSAQLRLRMSSGKSFKEAMDEGGFRMRSGDDVFQGPPIRKVRSFVRTAEPLKIRRHAYASEAEYKNYIYADTAKGGNFKAALFRAPRGKLCYCLQSLWNWANAHKRPDYVPPEKQPGVGEFLGFIAPGTMVLAYENTPDELKKLSRRELNKRLYKIIVIEKDIQRLSLRYHCEARAKSEVQEEMKKTLGVEEASTISFQEPAKLLKITSGEFSNHLIFEGIDFAMSIDGEIRFLK

SEQ ID NO: 19233 - protein, 1224 aa, unidentified
  REGION 1..1224: note = Cas Enzyme sequence
MTKILGLDLGTASIGWALVERNDTEYALLDQGVDIFQEGVAREKNSEKPAVQDRTAARALRRHYARRRLRKIDLLRVLVRHDLCPALTDEQLKDWKQKKIYPLTDEFIRWQRTDDRTDKNPYRDRYKALTETLDLDTQRDRYTLGRALYHLAQRRGFLSNRKDAGDESESGKVRQSIEGLTVDMEKAGCAYLGEYFYRLYARKEKIRTKYTSRNEHYLAEFRAICEKQRLADGLRKALHRAIFYQRPLKSQKGSVGRCTFEKDKSRCPASHPRFEEFRMLSFINNIRITTPDDPEPRPLSRQETETILPLFTRKTKPHFDFEEIAKKLAGKGRYACQGDRGEAPYRFNFARTATVTGCPVTASLIALFGDDYLTKICDLYTLGAGKTREQILGDVWHALFSFDDEERLSAWAKQKLRLSDDEAGRFAAIRLPQDYAALSLHAINKILPYLREGYRYDEAVFVANLKAVLPSDIYSDESERSAIEADITALITDFRRNPLNRGTTKEQCVRDYLRNCRGIDEKRLGRLYHPSMIEIYQTAQPDAQGVLQLGSPRTPAVRNPMAMRALFRLRVLVNRLLRDGKIDRETKIHIEFARGLNDANRRKAIELYQRDREAERKAYADEIRRQYASESGREIEPTDDDILKYRLWKEQNHICPYTGKQIGLSDFMGDSARFDIEHTVPRARGGDNSQMNKTLCESRFNRELKRDKLPSELPNHADVMARIEELGWPEKIAGLQKQIEIQRRKSKSATTKSEKDGAIQRRHVLQMQLDYWRGKYERFTMTEVPDGFSNRQGVDIGIIGKYARLYLKTVFERIYTVKGATTAEFRRMWGLQEEYARKERVNHTHHCLDAIVIACIGRNEYDRWAQYAGDEERYRRGEGAKPRFEKPWPTFTEDLEAVADRLLVAHHTPDNMPKQSRKRLRIRGRIRTGRNGETLYAQGDTARGALHQQTFYGAIERQGEVRYVVRKPLGQLQLADVDNIVDDAVRQKVKEAIDAVGFKTAMDTESHPIWMNEQKRVPIRKVRIFAGKNISPKSLGGKKHRDLSALPHKRPVYVSYGSNYCMAVYEGEDKRGKLKRTFEIVSTLEAAQYFKASADKAARPDLVPQSDANGFPLKCILKTGTMVLFYEETPEELYECTQQELAKRLYKLTKFSSMTTGNSSYGSCTFRHHQEARPAKELKPKGGTWKVGEAYRPIISLLHTQLNAYVEGFDFELSVTGTVRFKHE

SEQ ID NO: 19234 - protein, 1224 aa, unidentified
  REGION 1..1224: note = Cas Enzyme sequence
MTKILGLDLGTASIGWALVERNDTEYALLDQGVDIFQEGVAREKNSEKPAVQDRTAARALRRHYARRRLRKIDLLRVLVRHDLCPALTDEQLKDWKQKKIYPLTDEFIRWQRTDDRTDKNPYRDRYKALTETLDLDTQRDRYTLGRALYHLAQRRGFLSNRKDAGDESESGKVRQSIEGLTADMEKAGCSYLGEYFYRLYARKEKIRTKYTSRNEHYLAEFRAICEKQRLADDLRKALHRAIFYQRPLKSQKGSVGRCTFEKDKSRCPASHPRFEEFRMLSFVNNIRITTPDDPEPRPLSRQEAETILPLFTRKTKPHFDFEEIAKKLAGKGRYACQGDRGEAPYRFNFARTATVTGCPVTASLIALFGDDYLTKICDLYTLGAGKTREQILGDVWHALFSFDDEERLSAWAKQKLRLSDDEAGRFAAIRLPQDYAALSLHAINKILPYLREGYRYDEAVFVANLKAVLPPDIYSDESERNAIEADIAALITDFRQNPLNRGTTKEQCVRDYLRNCRGIDEKRLGRLYHPSMIEIYQTAQPDAQGILQLGSPRTPAVRNPMAMRALFRLRVLVNRLLRDGKIDRETKIHIEFARGLNDANRRKAIELYQRDREAERKAYADEIRRQYASESGREIEPTDDDILKYRLWKEQNHICPYTGKRIGLSDFMGDSARFDIEHTVPRARGGDNSQMNKTLCENRFNRELKRDKLPSELPNHADVMARIDELGWPKEIASLQKQIEIQRRKSKSATTKSEKDGAIQRRHILQMRLDYWRGKYERFTMTEVPDGFSNRQGVDIGIIGKYARLYLKTVFERIYTVKGATTAEFRRMWGLQEEYARKERVNHTHHCLDAIVIACIGRNEYDRWAQYAGDEERYRRGEGAKPRFEKPWPTFTEDLEAVADRLLVAHHTPDNMPKQSRKRLRIRGRIRTGRNGETLYAQGDTARGALHQQTFYGAIERQGEVRYVVRKPLGQLQPSDVDNIVDDAVRQKVKEAIDAVGFKTAMDTESHPIWMNEQKRVPIRKVRIFVGKNISPKPLGGKKHRDLSALPHKRPVYVSYGSNYCMAIYEGKDNQGKLKRTFEIVSTLEAAQYFKASADKAARPDLVPQSDEKGFPLKCILKTGTMVLFYEETPEELYDCTQQELAKRLYKLTKFSSMTTGNNSYGLCTFRHHREARPAGELKPKGGAWKAGEAYRPLISLYHTQLNAYVEGFDFELSVTGTVRFKHE

SEQ ID NO: 19235 - protein, 1224 aa, unidentified; identical to SEQ ID NO: 18937
  REGION 1..1224: note = Cas Enzyme sequence

SEQ ID NO: 19236 - protein, 1224 aa, unidentified
  REGION 1..1224: note = Cas Enzyme sequence
MTKILGLDLGTASIGWALVERNDTGYALLDQGVDIFQEGVAREKNSEKPAVQDRTAARALRRHYARRRLRKIDLLRVLVRHDLCPALTDEQLKDWKQKKIYPLTDKFIRWQRTDDRTDKNPYRDRYKALTETLDLDTQRDRYTLGRALYHLAQRRGFLSNRKDAGDESESGKVRQSIEGLTVDMEKAGCAYLGEYFYRLYARKEKIRTKYTSRNEHYLAEFRAICEKQRLADGLRKALHRAIFYQRPLKSQKGSVGRCTFEKDKSRCPASHPRFEEFRMLSFINNIRITTPDDPEPRPLSRQETETILPLFTRKTKPHFDFEEIAKKLAGKGRYACQGDRGEAPYRFNFARTATVTGCPVTASLIALFGDDYLTKICDLYTLGAGKTREQILGDVWHALFSFDDEERLSAWAKQKLRLSDDEAGRFAAIRLPQDYAALSLHAINKILPYLREGYRYDEAVFVANLKAVLPSDIYSDESERSAIEADIAALITDFRRNPLNRGTTKEQCVRDYLRNCRGIDEKRLGRLYHPSMIEIYQTAQPDAQGILQLGSPRTPAVRNPMAMRALFRLRVLVNRLLRDGKIDRETKIHIEFTRGLNDANRRKAIELYQRDREAERKAYADEIRRQYASESGREIEPTDDDILKYRLWKEQNHICPYTGKRIGLSDFMGDSARFDIEHTVPRARGGDNSQMNKTLCENRFNRELKRDKLPSELPNHADVMARIDELGWPKEIASLQKQIEIQRRKSKSATTKSEKDGAIQRRHILQMRLDYWRGKYERFTMTEVPDGFSNRQGVDIGIIGKYARLYLKTVFERIYTVKGATTAEFRRMWGLQEEYARKERVNHTHHCLDAIVIACIGRNEYDRWAQYAGDEERYRRGEGAKPRFEKPWPTFTEDLEAVADRLLIAHHTPDNMPKQSRKRLRIRGRIRTGKNGETLYAQGDTARGALHQQTFYGAIERKGEVKYVVRKPLGQLQPSDVDNIVDDAVRQKVKEAIDAVGFKTAMDTESHPIWMNEQKRVPIRKVRIFAGKNISPKPLGGKKHRDLSALPHKRPVYVSYGSNYCMAIYEGKDNQGKLKRTFEIVSTLEAAQYFKASADKAARPDLVPQSDANGFPLKCILKTGTMVLFYEETPEELYECTQQELAKRLYKLTKFSSMTTGNNSYGLCTFRHHQEARPAGELKPKGGAWKAGEAYRPLISLYHTQLNAYVEGFDFELSVTGTVRFKHE

SEQ ID NO: 19237 - protein, 1041 aa, unidentified
  REGION 1..1041: note = Cas Enzyme sequence
MEKAGCAYLGEYFYRLYARKEKIRTKYTSRNEHYLAEFRAICEKQRLADDLRKALHRAIFYQRPLKSQKGSVGRCTFEKGKSRCPVSHPRFEEFRMLSFVNNIRITTPDDPEPRPLSRQETETILPLFRRRTKSHFDFEEIAKKLAGKGRYACQGDRSEAPYRFNFARTATVTGCPVTASLIALFGDDYLTKICDLYTLGVGKTREQILGDVWHALFSFDDEERLSAWAKQKLRLSDDEAGRFAAIRLPQDYAALSLHAINKILPYLREGYRYDEAVFVANLKAVLPPDIYSDESERSAIEADIAALITDFRRNPLNRGTTKEQCVRDYLRNCRGIDEKRLGRLYHPSMIEIYQTAQPDAQGILQLGSPRTPAVRNPMAMRALFRLRVLVNRLLRDGKIDRETKIHIEFARGLNDANRRKAIELYQRDREAERKAYADEIRRQYASESGREIEPTDDDILKYRLWKEQNHICPYTGKRIGLSDFMGDSARFDIEHTVPRARGGDNSQMNKTLCENRFNRELKRDKLPSELPNHADVMARIDELGWPKEIASLQKQIEIQRRKSKSATTKSEKDGAIQRRHVLQMQLDYWRGKYERFTMTEVPDGFSNRQGVDIGIIGKYARLYLKTVFERIYTVKGATTAEFRRMWGLQEEYARKERVNHTHHCLDAIVIACIGRNEYDRWAQYAGDEERYRRGEGAKPRFEKPWPTFTEDLEAVADRLLVAHHTPDNMPKQSRKRLRIRGRIRTGRNGETLYAQGDTARGALHQQTFYGAIERQGEVRYVVRKPLGQLQPSDVDNIVDDAVRQKVKEAIKAVGFKTAMDTESHPIWMNEQKRVPIRKVRIFAGKNISPKPLGGKKHRDLSALPHKRPVYVSYGSNYCMAIYEGKDNQGKLKRTFEIVSKLEAAQYFKASADKAARPDLVPQSDEKGFPLKCILKTGTMVLFYEETPEELYECTQQELAKRLYKLTKFSSMTTGNNSYGLCTFRHHREARPAGELKSKNGTWKVGEAYRPIINLLHTQLNAYVEGFDFELSVTGTVRFKHE

SEQ ID NO: 19238 - protein, 1228 aa, unidentified
  REGION 1..1228: note = Cas Enzyme sequence
MNADMTKILGLDLGTASIGWALVERNDTGYALLDQGVDIFQEGVAREKNSEKPAVQDRTAARALRRHYARRRLRKIDLLCVLVRHDLCPALTDEQLKDWKQKKIYPLTDEFIRWQRTDDRTDKNPYRDRYKALTETLDLDTQRDRYTLGRALYHLAQRRGFLSNRKDAGDESESGKVRQNIEDLTVDMEKAGCAYLGEYFYRLYARKEKIRTKYTSRNEHYLAEFRAICEKQRLADDLRKALHRAIFYQRPLKSQKGSVGRCTFEKGKSRCPVSHPRFEEFRMLSFVNNIRITTPDDPEPRPLSRQETETILPLFRRRTKSHFDFEEIAKKLAGKGRYACQGDRSEAPYRFNFARTATVTGCPVTASLIALFGDDYLTKICDLYTLGAGKTREQILGDVWHALFSFDDEERLSAWAKQKLRLSDDEAGRFAAIRLLQDYAALSLHAINKILPYLREGYRYDEAVFVANLKAVLPPDIYSDESERSAIEADIAALITDFRRNPLNRGTTKEQCVRDYLRNCRGIDEKRLGRLYHPSMIEIYQTAQPDAQGILQLGSPRTPAVRNPMAMRALFRLRVLVNRLLRDGKIDRETKIHIEFARGLNDANRRKAIELYQRDREAERKAYADEIRRQYASESGREIEPTDDDILKYRLWKEQNHICPYTGKQIGLSDFMGDSARFDIEHTVPRARGGDNSQMNKTLCENRFNRELKRDKLPSELPNHADVMARIDELGWPKEIASLQKQIEIQRRKSKSATTKSEKDGAIQRRHILQMRLDYWRGKYERFTMTEVPDGFSNRQGVDIGIIGKYARLYLKTVFERIHTVKGATTAEFRRMWGLQEEYARKERVNHTHHCLDAIVIACIGRNEYDRWAQYAGDEERYRRGEGAKPRFEKPWPTFTEDLEAVAGRLLVAHHTPDNMPKQSRKRLRIRGRIRTGKNGETLYAQGDTARGALHQQTFYGAIERQGEVRYVVRKPLGQLQPSDVDNIVDDAVRQKVKEAIDAVGFKTAMDTESHPIWMNERKRIPIRKVRIFAGKNLSPKPLGEKRHRDLSALPHKRPVYVSYGSNYCMAVYEGKDNQGKFKRTFEIVSTLEAAQYFKASADKAARPDLVPQSDANGFPLKCILKTGTMVLFYEETPEELYECTQQELAKRLYKLTKFSSMTTGNNSYGLCTFRHHREARPAGELKSKNGTWKVGEAYRPIINLLHTQLNAYVEGFDFELSVTGTVRFKHE

SEQ ID NO: 19239 - protein, 1228 aa, unidentified
  REGION 1..1228: note = Cas Enzyme sequence
MDANMTKILGLDLGTASIGWALVERNDTGYALLDQGVDIFQEGVAREKNSEKPAVQDRTAARALRRHYARRRLRKIDLLRVLVRHDLCPALTDEQLKDWKQKKIYPLTDEFIRWQRTDDRTDKNPYRDRYKALTETLDLDTQRDRYTLGRALYHLAQRRGFLSNRKDAGDESESGKVRQNIEDLTVDMEKAGCAYLGEYFYRLYARKEKIRTKYTSRNEHYLAEFRAICEKQRLADDLRKALHRAIFYQRPLKSQKGSVGRCTFEKDKSRCPASHPRFEEFRMLSFVNNIRITTPDDPEPRPLSRQETETILPLFTRKTKPHFDFEEIAKKLAGKGRYACQGDRGEAPYRFNFARTATVTGCPVTASLIALFGDDYLTKICDLYTLGAGKTREQILGDVWHALFSFDDEERLSAWAKQKLRLSDDEAGRFAAIRLPQDYAALSLHAINKILPYLREGYRYDEAVFVANLKAVLPSDIYSDESERSAIEADIAALITDFRRNPLNRGTTKEQCVRDYLRNCRGIDEKRLGRLYHPSMIEIYQTAQPDAQGILQLGSPRTPAVRNPMAMRALFRLRVLVNRLLRDGKIDRETKIHIEFARGLNDANRRKAIELYQRDREAERKAYADEIRRQYASESGREIEPTDDDILKYRLWKEQNHICPYTGKQIGLSDFMGDSARFDIEHTVPRARGGDNSQMNKTLCESRFNRELKRDKLPSELPNHADVMARIDEFGWPEKIAGLQKQIEMQRRKSKSATTKSEKDGAIQRRHVLQMQLDYWRGKYERFTMTEVPDGFSNRQGVDIGMIGKYARLYLKTVFERIHTVKGATTAEFRRMWGLQEEYARKERVNHTHHCLDAIVIACIGRNEYDRWAQYAGDEERYRRGEGAKPRFEKPWPTFTEDLEAVADRLLVAHHTPDNMPKQSRKRLRIRGRIRTGRNGETLYAQGDTARGALHQQTFYGAIERQGEVRYVVRKPLGQLQPSDVDKIVDDAVRQKVKEAIDAVGFKTAMDTESHPIWMNERKRIPIRKVRIFAGKNLSPKPLGEKRHRDLSALPHKRPVYVSYGSNYCMAVYEGKDNQGKLKRTFEIVSTLEAAQYFKASADKAARPDLVPQSDANGFPLKCILKTGTMVLFYEKTPEELHDCTQQELAKRLYKLTKFSSMTKGNRSYGLCTFRHHQEARPAGELDSKGTAWKAGEAYRPIISLYHTQLNAYVEGFDFELSVTGTVQFKHG

SEQ ID NO: 19240 - protein, 1224 aa, unidentified; identical to SEQ ID NO: 19234
  REGION 1..1224: note = Cas Enzyme sequence

SEQ ID NO: 19241 - protein, 1212 aa, unidentified
  REGION 1..1212: note = Cas Enzyme sequence
MSRILGLDVGTNSLGWAILDPFQKVFVDTGVVVFQQGIPEEKGREAECSPAAERRKFRAARRLKYRRRLRKYHTLKVLIENQMCPLTIPELQNWIRNGKFPIENREFIAWLSSTKEDNPYYFRAKAAERKLPPLELGRAFYHLAIRRGFRSSRKETSGSNEKELTSFKQEINRLTEILQRKQCTLGQYFYELFQKSEKIRKVNRCGRKEHYEPEFDKICEVQELPEAFVSEMRKAIFLQRPLRSQKYLAGHCSLEKKRVRCLIGHPLFERYRMLSFINSIRKNGVPLNEQERQKAQAAFLVSKPSFEFEKLVRKLSPGYPKNEWSEWNYPPDKSIASSPVTNQLQKILGTEDLFAWHHEYIGRDNKPKSMDYQTLFDALTFFDDDGMLKNFAIERAGLTVDQAEKFVKIRIPTGYANFSLYAIRKILPFLEAGHIQTRAVFLAKLPDVLGKDVFQKNGEKIIADMEQLEADWRMERESASESGERAAFLSLTERIKHYLEDEFHVTPDRFELLYRYNSRSDYQDHTRSGILPEVNLGMIYNPMVYRSLNVLRRLVNHLRKTGKINADTEIHVELARSVNDKNTRMAVANDQKKQENLRKQYKEAIEAEGFEATEERILRYVLWMEQNKHCLYTGKAIGLADLMSENDLVELEHTVPRSRGGDSSRENLTLCFTDYNRYTKKNGLPTACPNYDVKWKEYNSIRENIKAAGWEEKRENLRSRLEKLRSAARGNPQKRVEMLECRREFEYWCAKLAAFEITDEELRRKGFSRRQLADTGIIARHAVFLLKSVYGNTYSRNGRVTEWVRKAWGVQGIYEKKDRCDHRHHAIDAMCIAALTEDFFQKISAAYRADEEKAMAYARYNSTLPDAYPWRSFPEDVFEKSEEILVTHFTRHNETKQAKKQVHLVTPYKTADGGLRRVVTAGGDTVRGPLHKESYFGRIRDPESGEKKSVLRKELNSQNFKTESALAAIVDPAIREAVSAQLRLRMSSGKSFKEAMDEGGFRMRSGDDVFQGPPIRKVRSFVRTAEPLKIRRHAYASEAEYKNYIYADTAKGGNFKAALFRAPRGKLCYCLQSLWNWANAHKRPDYVPPEKQPGVGEFLGFIAPGTMVLAYENTPDELKKLSRRELNKRLYKIIVIEKDIQRLSLRYHCEARAKSEVQEEMKKTLGVEEASTISFQEPAKLLKITSGEFSNHLIFEGIDFVMSIDGEIRFLK

SEQ ID NO: 19242 - protein, 1212 aa, unidentified
  REGION 1..1212: note = Cas Enzyme sequence
MSRILGLDVGTNSLGWAVLDPFQKVFVDTGVVVFQQGIPEEKGREAECSPAAERRKFRAARRLKYRRRLRKYHTLKVLIENQMCPLTIPELQNWIRNGKFPIENREFIAWLSSTKEDNPYYFRAKAAERKLPPLELGRAFYHLAIRRGFRSSRKETSGSNEKELTSFKQEINRLTEILQRKQCTLGQYFYELFQKSEKIRKVNRCGRKEHYEPEFDKICEVQNLPEPFVSEMRKAIFLQRPLRSQKYLAGHCSLEKKRVRCLIGHPLFERYRMLSFINSIRKNGVPLNERERQKAQAAFLVSKPSFEFEKLVRKLYPGYPKNEWSEWNYPPDKSIASSPVTNQLQKILGTEDLFAWHHEYIGRDNKPKSMDYQTLFDALTFFDDDGMLKNFAIERAGLTVDQAEKFVKIRIPTGYANFSLYAIRKILPFLEAGHIQTRAVFLAKLPDVLGKDVFQKNGEKIIADMEQLEADWRMERESASESGERAAFLSLTERIKHYLEDEFHVTPDRFELLYRYNSRSDYQDHTRSGILPEVNLGMIYNPMVYRSLNVLRRLVNHLRKTGKIDADTEIHVELARSVNDKNTRMAVANDQKKQENLRKQYKEAIEAEGFEATEERILRYVLWMEQNKHCLYTGKAIGLADLMSENNLVELEHTVPRSRGGDSSRENLTLCFTDYNRYTKKNGLPTACPNYDVKWKEYNSIRENIKVAGWEEKRENLRSRLEKLRSAARGNPQKRVEMLECRREFEYWCAKLTAFEITDEELRRKGFSRRQLVDTGIIARHAVFLLKSVYGNTYSRNGRVTEWVRKAWGVQGIYEKKDRCDHRHHAIDAMCIAALTEDFFQKISAAYRADEEKAMAYARYNSTLPDAYPWRSFPEDVFEKSEEILVTHFIRHNETKQAKKQVHLVTPYKTADGGLRRVVTAGGDTVRGQLHKESYFGRIRDPESGEKKSVLRKELNSQNFKTESALAAIVDPAIREAVSAQLRLRMSSGKSFKEAMDEGGFRMRSGDDVFQGPPIRKVRSFVRTAEPLKIRRHAYASEAEYKNYIYADTAKGGNFKAALFRAPRGKLCYCLQSLWNWANAHKRPDYVPPEKQPGVGEFLGFIAPGTMVLAYENTPDELKKLSRRELNKRLYKIIVIEKDIQRLSLRYHCEARAKSEVQEEMKKTLGVEEASTISFQEPAKLLKITSGEFSNHLIFEGIDFVMSIDGEIRFLK

SEQ ID NO: 19243 - protein, 1216 aa, unidentified
  REGION 1..1216: note = Cas Enzyme sequence
MKTLGIDLGTNSLGWAILDSEKPPHSAITDSGVVIFEEGIKRDKGNDSLETPAAERRRHRMARRLKFRRRMRKIKILGILIEHGMCPLKPEELARWKNQDEYPLGNREFLAWLKSTRTDNPYGDRAAAATEKVPPEVLGRAIYHLAQRRGFKSSRKDAPAEDAERPKKKTDERSLVKNSIAELTAILDEKQITLGQHFYDLYQNGKKVRGCYTGRKEHYEKEFDAIARVQEMDDTLAAQIRNILFFQRPLRSQSHLIGKCPLEKKHNRCLVAHPVFEAYRMWSFINTIRVIGEDGERIPLADEDRKKAAKAFFKSARYISFADIAKTLKKPKGTRYNYPPKKTIATCSVTHQLNKVLGGDCFQWFRTVHKPNGGKTTYTYQTAFDALMFFEDPDRLQAFAREKLGLEETEAAAFAKIVCREGYAQYSLCALQKITPFLKKGIELSQAIFLANLPDVLGPGVFQTHENEIIADVAERNADYRENLRVRGQDPKIGVVALQQRLKDYAKSRWQLSDADFDRLYFRDPNTDDSYASVQPQDGMLPPVNLGMMRNPLVQRTLTILRRHVNFLRRTGRIDANTRIHVELARSVNDRNTRMAFAVWQKTREDARENARQRLIEDIKCPNPSDTDILRYILWQEQGTKCLYSGNTIAPHELLTDAYDIEHTIPRCRSGNNSQANLTLCEHAFNCQRKKGRIPSECDNYEEILARLKPWQDKLSALEETYLKQMKTAKNTPADNPEAKAKNRQKALATKMELNYWRDKVYAFTVQADRLNQGFMNRQLVDTGIITKHAVALLRSVYPRTYPVNGTAVAWARQGWGIQSIREKKERTTHLHHAIDAMVVAGLSRDRFNQICAFCKDDGEKDYDITFPDELHPFRGFSQAVFDSTESILVKHVPRHVEMKQTRRTAVRLARPIWTKDGKIHRTVPARGDTVRGQLHKESFYGCIQSPESGGKLFVIRKFLNSENFGSEADIAKIVDPAVRNIVLEQIRSQMDEGTAFKKIMDGTEFRMPSGVPIRKVRITAKVSEPQEIRRQVFTSKHDYKIPYYVESGTGSNFRLALFMQEAKGKIKWHAEPDNLLDWAKRGSDSEQLHLRTDLGHFKGYILPGAMALVYDQNPDELRALRPVDMKRRLYQVIKFNTKDRRITFCLHSEARASTDLSKYLKSIDKHAAGESSIDFIQAHELLLLSPGTYLSHVLFEGIHFDMDWTGKITFRDNAC

SEQ ID NO: 19244 - protein, 1231 aa, unidentified
  REGION 1..1231: note = Cas Enzyme sequence
MKRVLGIDLGTNSLGWGIIEDQKIIDCGVQIFDQGIPLVKGIESANSPAAQRTAFRAARRLKYRRRLRKYHTLKILLENGMCPIAPEELKNWIRNGRFPIDNAAFISWLNSTQENNPYYFRAKAAAEKIAPMELGRALFHIAIRRGFKSSKKDQSAENAKETSELKNSIKQLKEQLLISDQTLGEYLYGMWKNNSKIRGEIKCGRVEHYIPEFEKICRVQEITGELKKKLYDALFLQRPLRSKRYMVGKCSLEKKYPRALIAHPLFEKYRMLSFVNSIKVQVDGEAYRFLNFDERETACSAFMVKSPSIKFEKIAKVLEKKYYKNRSVNYNYTRMDQSCASSSLIYQLQNILGCDDLFTWQHRYYDAKGHEKVMDYQAVFDGLKYFRTDFDGDDDGEAFKKFAVERVGLSDKAAEEFIKTDIKEGYAKYSLYAIRKIIPFLEKGFSEPYAVFLAKLPDIMGKEFFAVKEKEVLEDFCQCVDDYLWEKQNLDYREKHRILGLSERFRQLLEEKYKCPPEKVAELYEFKEQSNYSDHTAEGVLPRVELGMIYNPMVHRSLTVLRRLVNALRKSGKIDASTEIHIELARNVSDKTTRMAVTEMQRANEALHKQAIAEFAEYNIVPTAEQILRWRLWNEQNRICIYTGRKILESEIFTNNFSSLDKEHTIPRSAGGESNLENLTLCDSTYNRDIKKGKLPVECPNYSFPVGGAKISIQEGLTVAGFYKNLEAAEKEYADVSHKLKTIPASSPARVNVRKKAIILREKRKYWRDKILSFEICRDELNSDFSRRQLAATGVMSRHALQFLKSVYPRVYASNGTVTAFTRKEWGLQEQFEKKDRIDHTHHVIDALVIAAIDRESLNRISHAYHEAEVYNGGEKVLKLAYPWESFADDVHSAVENVLVKSLKSHNETKQTKRNRVYPATPVTGSDGRIIRYFGAAGDTVRGQLHDQTYFGRIMDSKQNIRTVLRTELNTDKFKKPEDLNTIVDKGVREAVIAQLKSRMESGASFEDALAAGDIMMPTKSGLFDGPVIKKVRIYRDDVSAPLVVKRQTYRTNKEHKNHYYADTAKGSNFMIALYRSPETSPTQKIYHYELVSLWQWAKDHRKPDYVPPQERTENGDFAGIINPGTTVLFYKDSPEELKTMTGTQLSKRMYIITEFKKEGRMCLRWHREARSKKEAEQITKERFGVGQLSRVEWDTAAPLLNIGRNIYQNHTLFAGVDFEISADGEISFKE

SEQ ID NO: 19245 - protein, 1056 aa, unidentified
  REGION 1..1056: note = Cas Enzyme sequence
MIILGLDIGTSSIGWSLIEENHQKIINTGSVIFQEGVNRSPVGKEESLNATRRNAKQIRRQKFRKKQRKMLLMKLLQDLAWCPTDLVQLQEWQKLNPYELRALALDKPLTQLEIGRVLYHLSQRRGFKSSRKSGDNDEGALYKGSEGKRGITELEKAIQEGGFRTLGEYLASINPHEIRRRNRYTLRKMYEAEFELIWENQIKLQPKLIQNIDYQAIIKKHCSPKYQRKLLDKDLKFFLKDYIIYFQRGLKSQKGRVGKCTLEPKKRRAPKSSLLFQEFRILDKLYSLRITGSGRTDSPLTKEEFTKAFEVLNKTKEKTIKDILKLCKLEGYNTNYPLEDKIKGNTTAYELMKVFGKDWVMLSASEQNKIWEVVYMADDNEWLEIYGQEKWNLSPENATKLKKVSFEKSYAELSHKALSRLVPSMKNEGLEYSSACQKLGYHHSQLIDNQAIKNTLLQEPKNLRNPIVQQALYVLRKLVNQIIQEYALKPDIIRVELARELKMKRVERENINSANKKAKDEHDRITKILLKEIPAFKKESDISREDIIKYKLWEECSNICPYTGKSINISQLYNGEFEIEHIIPYSRSLDDAFNNKTLCERSFNLRKGNLTPYELKEKGIINEKEYDGMVERAKSFKRNGKFNYNKFKKFLQKTVDDDFVKRQLNDTAWIAKESKTWLSSICDKVQISMGGATAELRHLWGLNSILNKHGLNLKNRDDHRHHALDALVVALTSPGMLQALSKNHEKGIRTTERQFPLPWPNFRKDAQDALNQILVHQKRKNRPRGKLHDETFYGAVLDRNGSHKRQGKDLYYFKVKKPLESLSPAQIDKIADPVIKKIVKERIRAMGENPDDKKFKIPSGCFNEPLYMYSKKGKKILIKKVSIHDVGSNKIQLREGVYVDSGSNHHIVIYQKPDGKRDGKVVSLFEVVQRRKYKQPIINANVGADNQFVMSLSINEMVLIDDEKTGFSTAKLKWNENLKAFEDDNGTLRLAELSPYLYRVQYIDSAQFTIALRHHLTAVLKNEYGEEIGRKFAKPNTFKGIKVKINILGEIEPCND

SEQ ID NO: 19246 - protein, 1047 aa, unidentified
  REGION 1..1047: note = Cas Enzyme sequence
MRGQAQMVKHILGLDLGTNSIGWVLLAMIDDELNNIVDMGCRIFSRSVEDKTPTPKNAKRRKSRLLRRVIQRRARRKQRLLNYLCKIGMLPRELVNHTQPEILLNDLGDPYALRAKALVSPLTPYELGRVWLHFVQRRGFLSSRKSLLGDMIDDPDVLAILGELDVEDGISTERAKEETAFKKDISLLRQAILDAGKRTLGEYLASLEPHQCKRNRLHSGGHLRTDRQMYREELDLIWNTQVGFHPTLLTPEIKAAIEEIIFYQRPLKLRPDRIGKCSLEPKRNRCRIARLEYQIFRYLQDINNLRYYDPDYEKELELSPEDKSKLITLFDQNATVSFAQIRKTLGLDKARVFNLEQGGKKLKGNITACEIRAVLDAWDTFSREKQLQLVEDLLTIKKKSVLKNRLVNHWQLAPDMAVKLCLLEFEPGHGNHSVKAINRLLPYLRNGERYDQARVNAGYGYAPVVQQKIKRLGPPPALPNPIVSRTLYELRRLINAIISQHGTLSGIRIEMARDLEQNTKRYQEKEKQRKNNEKLNDEAVEKYRELAQKNPHLMLSKYPSRDDKIKYRLWKDQHERCAYSGQQIPASILFGPEIDVDHIIPISESLDDSYMNKVVCYAAKNRAKGQRTPIEAFSGDEWDQIIQSIHTWDKRLKGKRDRFFLRHEDVLKRDFFNSQLNDTRYICREAKDYIANICDDVIVSKGITTAWLRHQWNLNSLVSETDQKQRTDHRHHTIDAAVIACVDRKLYQSMVNLAKTLERSRPEVTLRDIPIPPPWPTWREDLRVKIDNLVISHSSQRKLSGELHEETGAGFREGVGTIYRNKLSDFCSDIKSKEKAAKVLPAIIDPVVREIVSKHLEQHDYNPKEAFADGITVRHKDGKTPIKRVRVIQSKSIKTEKKLALNKFGIKDRQGKIFKWYSYGNMHHIEILRDTETNTYSGELVTMLEASHRIRGIHGAKRPVVNTNHDGKELAMVIYKRDMVTLNQSGERKYFVVTKLGQMGGSPRPTLVPHNQAISEKNATISDSIDALMTKYQMELHRVNIIGRQLE

SEQ ID NO: 19247 - protein, 1032 aa, unidentified
  REGION 1..1032: note = Cas Enzyme sequence
MSKLVLGLDIGSNSIGWALVELGDEGKPIGIVGLGSRIFTKAVEEKTPTPKNMKRRMARLTRRVLHRRSQRKQRMMNYLVKLALLPAALQGDTRPEVILNSLGDPYTLRAKALDAELTPFELGRAILHLVQRRGFLSSRKTLLGDMADDPDVQEVLNELEGDDDVSTEAAKEETAFKHDISLLRNRIRESGSRTLGEYLSTFTQHESKRNRIRDGGHLRTDRQMYKEELSLILARQQQFHATIDEDVADELASIIFFQRPLKLKSDRIGKCSLEKSRKRIRLARPEYQKFRYLQDINNLAYFDQWQERNINLSEEQRAKLVVLFESSNAVTFPKIRKELGLDKSHEFNLENGGKKLKGNITACTIREVLPQWDDLEVCNQTDLMEDLLTIQKKSVLRQRLINFWKLSNEQAVQLCLIEFEPSHGALSLKAINKLLPYLEQGQIYSTARISAGYGYEKEEIETIESLGQPPEIPNPIVSRALHELRRLTNAIIKEYGKPDAIRVEMARDLEMNTKRYKAAEKQQKDNEKKNDEAVDKYREMALSNSHLRLSKYPSRQDKIKYRLWQDQDQRCAYSAKSISLSTLFSAEIDVDHVLPYSQSLDDSYMNKVVCYAAENRYKGQRTPVDAYGKDEKKWNQIVQSVNRWGRSLKSKRERFFQTENDLQTKDFVSSQLNDTRYITRVALDYLQPLGTEITTSKGAITAWLRHQWGLNDLIGNSREKDRVDHRHHAIDAAVVACVDRFFYNNLVSAARQHERSHPELQIKDLAIDTPWAAMRTDLGAALGEVIISRSPQRKLTGSLHEETGVGFIEGVGNVGRKSLDAEFKQVDKIYDAGVKSIVQRHLEKYGNKEKEAFAPGVTVFHKDGKTPIKRVRVVQSVTTRERLEGSKFGARNKEGVVFKWLAYGNGHHVEIVRDLKTNKVKGYFVNTMKASNRARGVSQAKQAVVKIDHGTGFEFLMALFIDDLVSFELEGKKRFYRVQTLDAAGNRMMFRSHIAASLSDKSEGLLLTINDDLLVRYKLKRHRINVLGHILG

SEQ ID NO: 19248 - protein, 1031 aa, unidentified; identical to SEQ ID NO: 15626
  REGION 1..1031: note = Cas Enzyme sequence

SEQ ID NO: 19249 - protein, 1036 aa, unidentified
  REGION 1..1036: note = Cas Enzyme sequence
MSKQKILGLDLGTNSIGWALLEADNSKANKIIDLGSRIFIKAVEEKTPTPKNVKRRDARLARRVVQRRSRRKQRMLNYLVKLGLLPNELQEHTQPEVILNSLGDPYQLRSRGLDHALSAHELGRVLLHLVQRRGFLSNRKTLLGDMIDDPDVQETLAELENKEDIASERAKEETAFKKDISELRAAIKTAGYRTLGEYLASLDHHDCKRNRAREGGHRRTDRQMYRDELNLIWKQQKNSHPILTDDVLEQIEQIIFYQRPLKLRSDRIGKCSLESRQNRAKIARLESQRFRYLQDINHLKYLYPGSEEWIPINHIDREKLIKLLENKANPTFKTDVRNALGLDKKTEFNLDNENKKLKGNITACEIRAVYPEWDQLDDVKQHALVEDLLTIQKKSALKKRLITHWDIDKRSAINLCMIEFEPGHSNHSTRAIKRLLPHLNQGLRYDEARVRAGYGYETKDIKVVARLGPPPEIPNPIVQKALHEVRRLINAIIAEYGKPDVIRIEMARDLEMNTKRYKTFTKQQSANTRANDEAIDKYREIGEKNPHLQLGKYPSKADKIRYRLWKDQGERCAYSNKQITLSTLFSAEIDIDHILPYSESLDDSYMNKVVCYADENRYKGQRTPIDAFGGNSKKWQQISQAINHWHKGLKSKRDRFYQTAANVQKRDFISSQLNDTRYISKVALEYLSQLGADITTCKGSTTAWVRHQWGLNNLIGESKEKDRIDHRHHAIDAVSIACIDRAFYKTLVAQAKDLERRQSAINIKDLVFDPPWKGFRDELKKRLSEVIIAHTPQRKLSGALHEETGVGYIDGIGTVYRANLDSNFKPAQLKKIIDDDVREIVTTHMKRYDNNPKQAFAENIKVLHKDGRTPIKRVRIVQSKTTLEKLEKSKFGVTQCDGEVFKWLAYGNLHHVEIIKNKKNGQYSGRFVTTMEAHQRAKGIGVVIQSITQIDHGPDSEFVMALHINDLVSVKREEQRHFYRVQKLDPANKRVHLRLHTASTLNNDHETLLDRESTVSALMNANIQLHKVNAIGKLVS

SEQ ID NO: 19250 - protein, 1034 aa, unidentified
  REGION 1..1034: note = Cas Enzyme sequence
MEMSKKILGLDLGTNSIGWALLEEDNKQPTALCDLGVRIFQKAVEEKTPIPKNQKRRDKRLARRVIQRRSRRKQRMLNFLVKLGLLPEEIQGHTQPEIILNGLGDPYRLRARALDEKLENYELGRVLLHLVQRRGFLSNRKTLLGDMIDDPDVVAILAEDDAAEDRSSERAKEETAFKKDISQLRNTIEEQGFRTLGEYLASLDLHDCKRNRSREGGHLKTDRRMYREELDLIWKKQSELHESLTDNIKEQLEEIIFYQRPLKLRSGRIGKCSLEPSRKRIHVARLEYQQFRYLQDINNLKYFDHYTEQWRDLTQDDRGKLITLFESKSHPTFKTDVRNALGLPKGTEFNLDTDNKKLKGNITACEIRQVLPSWDEMTSEKRKALVEDLLTINKKSVLKRRLLQFWNFDTETAISLCLLEFENDHANLSLKAINKLLPYMRQGKIYSDARIASGYGYEIEEVEVKDKLGAPPEIANPIVNKALHEVRRVINAIIKEHGKPDIIRIEMARDLEMNTKKYKAFLKQQSANTKANDEAVQKYQEIGSKNPHLKLSKYPSRTDKIRYRLWKDQDGRCVYSNKQIGITTLFSPEVDIDHIIPYSQSLDDSYMNKVVCYAGENRLKGQRAPVDTWGGNEERWAQITQSINRWPRSLSAKKNRFYMKQKDVMERDFISSQLNDTRYISKVTLDYVKQLGSDVSVSKGQTTAWLRHMWGLNSLIGETDKKERTDHRHHAIDAVVVGCVGRAFYINLVGLARELERSRAGAAIKDMKIDQPWINLRNDLNDRLRTMIVSHASQRGIIGALHEETGAGYIEGVGTVYRANLNGEFKTAQVKKIIDDTVREIIEAHLAKHNNNPKEAFAEGVIVYHRDGKTPIKRVRIVQAKTTLDKLKKSKFGARDKEGEVFKWLPYGNMHHVEIIKNRETGKYSGEFVTTMEAARRVRGIGIKKCPLIKRDHGDEYEFVMALHINDMVSVMVNGCKKYYRIQMLDSPNKRVKLRAHTASTISSDQDTFPDRELTVPVLMEKEIELCNLNCIGR

SEQ ID NO: 19251 - protein, 1034 aa, unidentified
  REGION 1..1034: note = Cas Enzyme sequence
MMSKKILGLDLGTNSIGWALLEETDKQPSNIIDIGVRIFQKAVENGSTPTPKNVKRRNARLARRVIQRRARRKQRMLNYLVSLDLLPKELQKHPQPEIILNSLGDPYRLRARALDHQLGNFELGRVLLHLVQRRGFLSNRKTLLGDMVDDPDVLAILAEDDDTEDNSSERAKEETEFKKDISQLRNTIFESGSRTLGEYLASLDHHDCKRNRSREGGHLKTDRRMYREELEQIWKKQAEFNGQLTDDIKENIEEIIFYQHPLKLRSDRVGKCSLEPGRKRAQMARLEYQNFRYLQDINNLKYFDHYSEKWQELNQQDREKLIDLFESKAKPNFKTDIRNALGLPKGTEFNLDSDNKKLKGNITACEIRSVFPAWDKLDADKRKALVEDLLTINKKSVLKKRLIDHWGMDIQTAINLCLLEFEYDHAGLSLKAINKLLPFVRQGKIYSDARIAAGYGYEQEETKVAEKLPAPLEIANPIVNKALHELRRVINALIKEYGKPDIIRIEMARDLEMNTKKYKAFLKQQTANAKANEEAEGAFREMGLKNPHLMLTKYPSRADKIRYRLWRDQDGRCAYSNKQINLSTLFSPEIDIDHIIPYSQSLDDSYMNKVVCYAGENRYKGQRTPVDAWGGNSERWLQITQSINSWPRNLAAKKNRFYMKENEIMERDFISSQLNDTRYISKVALDYVRQLGVDVSVSKGQTTAWLRHMWGLNSLIGETDQKERTDHRHHAIDAVVVSCVGRRFYTDLVRLAKDLEKSRSGADMKDMNIDPPWEALRTDLNQKLQQLIVSHAAQRGITGALHEETGAGYINGVGTVYRANLDGEFKTTQVKKIVDDNVREIVEKHLAKYGDNSKQAFAEGVTVLHKDGKTPIKRVRIVQAKTTLDKLKKSKFGARDQLGNVFKWMPYGNMHHVEIIRHKETGKYSGVFVTAMEAAQRVRGIGQGKTSMINNHHGAEYEYIMALHINDLVSLDIDGRKKYYRVQLLDSPNKRVNVRAHTASTLSNEHDTFPDRELTIPSLISKGMVLCNLNCISK

SEQ ID NO: 19252 - protein, 1025 aa, unidentified
  REGION 1..1025: note = Cas Enzyme sequence
MSKRVLGLDLGSNSLGWALLEEQDGTVNKFIDIGSRIFSKAVEEKTPTPKNVKRRDMRLGRRVLQRRARRKQRMLNYLVSLNLLPAELQKNTQPEIQLNKMGDPYQLRAKALDHQLTPYEFGRVLLHFVVRRGFLSSKKQLAGDLVDDPDTMAYLNELDKKPTKDKEEGAFKSDIAEVRNAIEKSGYRTLGEYLHNIEIGECKRNRSHEGGHLRTDRKMYQDELAEIWKQQHQYFNHLPNDFMEENKGIKQVIFYQRPLKLKQNRIGKCSLEPKNNRAATARLEVQRFRYLQDVNNLEYFERELDQWLKLDDAKKQKLIKYFEQHKSINISTLKKELGFDSHYKFNLEMKNLKGNITAFEIKKILENMWDDFSQQQQKALVDDLLSIKKKSALKNRLIKHWGLQTSQAIQLCLLELEPGHSSHSLKAINKLLPYLEKGLVYADARVEAGYDYEPEEITAQEKLGAPPETANPIVNKGLHELKRVINAVIKQYGKPDIVRIEMARDLEMNTKRYKDNEARQKKNKEENENAVEAYKGLNLGSYPSYDDKIKYRLWQEQNHFCAYSCKAIPVNAVFTANVEIDHILPYKKSLDDSYMNKVLCFTAENRNKGDRTPKDAWGSNEEKWNQMTQAINGWKGLDPKVKRFFQTETDLQKRDFISSQLNDTRYISKLAIEYVKQLGCDVTTSKGVTTAWLRHQWGLNNLIGETDKKERTDHRHHAIDAAVVACVDRSLYKQILSWTKNNTKELKINSPYPNFRDELDEQLKHVIVSHNTQRKLSGGLHEETGAGYIEKHGGLVYRKNLTPDFTEKNAKSIIDDTVKKQVIEHLEKYENKPKAAFADNITVCHKDGKTPIKRVRVLQSKTTLKKLEKNKLGIKDKTGKVFKWMAYGNMHHVEIIQHKKTGKYKGEFITMMEAHRRAMTGTKSAARRGVERESIIKNSQGDDWSFIMALHINDLVSVGKGDGEREFYRVQKLDTGSNRMVIRLHTAAKLDNKKEEIYFSFNDASFKKWDLRKHQINAIGVLSHD

SEQ ID NO: 19253 - protein, 1033 aa, unidentified
  REGION 1..1033: note = Cas Enzyme sequence
MSKQILGLDLGTNSIGWALLEESENKPSKIVGLGCRIFTKAVKAVKDGDSAIPKNMKRRDARLARRVVQRRARRKKRMLNYLVKLGLLPAELSNATQPEAILNKIGDPYALRAKALDEELTCYELGRVFLHLVQRRGFLSNRKTVLGDMVDDPDVQELLESIESKEDKSTERAKEETAFKGDIRKIRACIQKSGCRTLGEYLAGFDRHISKRNRKRDGGFLRTDRQMYREELVAIFQKQTQFHPLLTEEVKNQLEEIIFFQRPLKLRNDRVGKCSLEPSRNRARLARLECQRFRYLQDINNLQYFDTCEDRLCSLDAEQKATLEHLFEHNARPTIAKIRKALGVSNKTEINLDTANKNLKGNITASAIRNVVSEWDSFSREEQIALVEDLLTITIKSALKKRLIEHWNFPVRTAVALCLLEFEPGHSNLSLKAINQLLPFLEQGEIFSKARQLAGYDYAIEEIEAAPRLAAPPELPNPIVNKALHELRRLVNAVIAEYGKPDAIRIEMARDLEMNTKRYKQFVKQQDANAKANKEAAAKYEEMVEKNPHLALSAHAGRKDKIKYRLWKDQDGRCVYSGKSIDLSTLFSAEIDVDHILPYSKSLDDSYMNKVVCYAGENRYKSNRTPIDAFGGSDKWTQITQAVNRWPKELRNKKNRFFTTEEELQKRDFISNQLNDTRYISRVALQYVTQLGVDVSVSKGITTSWLRSQWGLNNLLGDSNEKERTDHRHHAIDAAVIACVDRSFYKAMVGMAKDLERRRTEFDSREMHFDPPWMSFRADLQRSLNEMVVAHAPQYKLTGALHEETGAGFVEGIGTVYRADLDQGFELTQLKKIIDKEVRKLVESHLAKHDNNPKKAFAPNVTLFHKDGKTPIKRVRIVQAKTTEKKLRQSKYGVKNSQGEVFKWMPYGNMHHVEIIKDLKDGTYAGKFVTMMEASHRAKGINMPKQPIVQTNHGDGFEFVMALHINDMVSLPDGNGRTFYRVQKLERDSNRLMLRLHSAATLTKSTEERLSIFSLMKKMATRHRVNCIGKLVE

SEQ ID NO: 19254 - protein, 1560 aa, unidentified
  REGION 1..1560: note = Cas Enzyme sequence
MKKILGLDLGTNSIGWAVVNANETTRESDTTYLKPVGISSAGSRIIPMSANILGDFDKGNSISQTAERTRQRMVRRLRERNLLRRERLLRVLSLMEFLPEHFAHKINRYGKFTDDSEPKLPWRMGAGGKMEFLFQESFHEMLAEFSQYQPELLADGKKVPYDWTIYYLRKKALTQRITKEELAWILLQFNQKRGYYQLRGEDEEEDTSKKVEFLSQKVIRVEATGERKGDDLWYNVYLENGMIYQRPSRIPLDWEGKIKEFIVTTDLEKDGSPKKNKYGEIKRSFRAPKEDDWTLLKKKTEYDIEQSNKTVGCFIYDTLLQNPSQKIIGKLVRTVERRFYKEELRKILEVQQELIPELRDSDLYRRCIEELYPSNEAHRSNISKPDFVRLFVDDILFYQRPLKSKKSLIDNCPYEFRFDKEGNIHPVKCIAKSNPFFQEFRLWQFVQNLRIYQREKTISDGQLDLFSNAPTGKLQTDVDVTAEILRSEEDYVKLFNWLNDRATIKQDTLLNTYFKIKKEKGKDRYPYRWNYVEDKEYPCNETRAAILSGLAKCNVSTDFLTRENEMALWHILYSVEDKIEINKALNSFADKHHLAANFTEVLSKTKPFKKDYGSYSEKAIKKLLPLMRMGSYWNEAAFDANTHDRIEKIITGEYDEHIKNRVREKAISLTDISHFRGLPVWLACYIVYNRHSEAKEIEKWKKPEDIDQYLRTFKQHSLRNPIVEQVITETLRTVRDIWRQEGQIDEIHLELGREMKNPADKRRQMTERIQQNENTNLRIKAMLMEFMNPEMEIENVRPYSPSQQDILRIYEENALDNLSRDDKEYDFVSKVSKMAQPSKSDIIRYKCWLEQKYQSPYTGEMIPLSKLFTPAYEIEHVIPQSRYFDDSFSNKVICESEVNKLKDRQLGYEFIKNHAGEIVQLSQGGTVKIQSVEAYERFVKDYYANNRTKMKKLLMDDIPDGFIERQMNDSRYISKLVKGLLSNIVREKQVNGEYEEEAVSKNLISCNGSITDRLKKDWGMNDVWNSFVLPRFQRLNQLTGKDCFTTLNREGHEIPNMPLELQKGFNKKRIDHRHHAMDAIVIACATREHVNLLNNEAAHSKHNANRYQLQRKLRRFETIIINGKEREIAQEFLKPWDTFATDAWQALSNIIVSFKQNLRVINKTTNHYQHYDAKGRKGYEKQHHGDSWAVRKSMHKDTVFGEVNLRMKKTVSLNEAVKNPENIVNKEFKKKVTKLLANGYDAKSIKKYVEDNKDIWSDINLSKIEVYYFTKDEKKRNGEPKERYFATRKSLDTSFDQKKIKESVTDTGIQQILLAHLASKENNPELAFSPDGIDEMNRNIVALNNGKFHQPILKVRVYEKAEKFAVGQTGNKNKKFVEAAKGTNLFFAFFETEKENKESGNKETIRSYMTIPLNVMIDCQKKYGARWRSNIEVFLKDKDMVDAKAKLMFILSPNDLVYLPTKEELQNGIQSLEKQRIYKFIDPGMNTGNFIPFSIAKAVFSSKFTEQKKKGINFSIQDEVGLGSQGTKSPRAITGEMIKETCIPVKVDRLGNIIELNGIK

SEQ ID NO: 19255 - protein, 1308 aa, unidentified
  REGION 1..1308: note = Cas Enzyme sequence
  SITE 1287: note = misc_feature - Xaa can be any naturally occurring amino acid
MKKILGLDLGTTSIGWAYVIEDDNYEKSEIKQIGVRVNPLTVDEQTNFEKGRPFSVNVERTLKRGARRNLDRYKDRRENLNKILKKHNILNESTILTEDGKNTTHSTWAIRSKATTERIELDEFARVLLAINKKRGYKSNRKAKDDDEGQAIDGMAIAKKLYEENLTPGQYVFQLLKEGKKAVPDFYRSDLQAEFDRVWQKQKQYYPDVFTDTFYEEVKGKGQRATAAIFWNRYGFNTADIKDLEDSLKTEKTIKLNLTERKRLQAYKWRNDAINLQLAKEEAAYVIAEINKNLSSSSGYLGSISDRSKELYFNKQTVGQYLYKQLQENRHTRLKNQVFYRQDYLDEFEKIWETQAKYHTVLTPELKSEIRDTIIFYQRRLKSQKELISFCEFESKVIEVEKDGKKTTKTIGARVAPRSSPLFQEFKIWQILNNMVVKKKGSKKRKPVGDVKQTTLFEQEKEIFSLNLEEKQLLFDELNIKGTLKDDAILEMLGCNTKEWEMNYKSIDGNRTNRALYDAYLKIIELSGHDVRDYLRVKTSKDEIELDDLKVPASQIKEMVVAVFETLGIDTSILDFNAELEGKAFEQQPFYQLWHLLYSYEGDNSKSGNERLYKLLEEKFGFSEEYGRILANVPLLDDYGNLSTKAIRRILPYIKEHQYDEACSLAGYRHSKHSFTKDELENRILKRRLELLKKNSLRQPVVEKVLNQMVNVVNTLIDIENKKLKAKGKPEDFHFDEIRIELARELKNSAEKRKQITEGINKAKGQHEQIAKLLQNEFGIKNPTRNDIIRYKLYEELKDNGYKDLYTNTYIPREKLYSKEIDIEHIIPQSRLFDDSFSNKTVVYRDENLKKGNRTAYDYILEDYGEGKLDEFVVRIEKLFQLGQKSKEGGLSKAKYRKLLKSESEIEDGLIERDLRETQYIAKKAKEMLFTITRRVVTTTGQVTDKLREDWGLINVMKELNLPKYRALGLTEMEERKYGQQVEVIKDWTKRNDHRHHAMDALTVAFTKHSHIQYLNYLNARNNPTHKLHGNIIAIEKKELEEHVNKNGTKTRLFKEPMPNFRLEAKKHLENVIISHKSKNKVVTKNKNRISGKSQPQITLTPRGQLHKETVYGLYHYYETKMEKVGTKFDLETIAKVANPVYRNALLQRLAEYNNDPKKAFGGANSPSKKPIYTDETQTKKVPEQVKLSCSATDYSVRKDVTPENFKEDKDIDKVLDKGIVKLLRERLQEFGGDAKKAFSDLDLNPIWQNKEKGIAIKRVTISGVKNAEPLHYKKDHHGKLILDKHXWPFTATSREHYRKKWFRFLKR

SEQ ID NO: 19256 - protein, 1507 aa, unidentified
  REGION 1..1507: note = Cas Enzyme sequence
MKTILGLDLGPNSIGWAKVEVDDKGNYLRNIKLGSRIIPMDQGILGKFDSGVTESQTAIRTNFRGVRRLRERHLQRRERLHRVLHALKFLPKHYEDAIGWDRNEPAIYGKFINNSEPKLAWERQEDGSMRFLFMESFYEMMADFAKMQPSLVSGEKKIPLDWTIYYLRKKALTQQIKKEELAWILLNFNQKRGYYQLRGEEEEDNPTKRKEYYKLKVIGVEADGAPKAGKIWYNIHLENGWTARCQSKVPLDNWVGNIKEYIVTTEYEADGETPKYDKEGKIKRSFKSPEKGDWQLIKTRTEKFIESSNKTVGTFIYDHLLKEPFDKIRGKYIRTIERKYYKNELYKILCEQAKYHKELDSLDTLNACAKELYKNNQQHQEYLLKKDMKYLLLDDLIFYQRPLKSKKSLIADCPYEVYKYNYKQTGKKEQKKIKCIAKSNPYYQEFRLWQFISNIHLFNVTDGKDVTSEYLKTKEDYVRLFTYLNDRKEIKQETLLKGFLKLKKETIGSEKIYPIRWNYIEDANKSYPCNTTRHELLLAFNRAGIQRELLNVEGREYRLWHLLYSIESKDKTESALRKLKSNKAFSDLNIDDAFVNSFLKIKPFKKEYGAYSEKAIKKLLAVMRRGSLWKEADICEATKQNIAKILQNDIDEKLKKKIEAAVSSFNKLSDFQGLPTWLACYVVYGRHSEAAQIQCWQSPEDLKTYINKFKQHSLRNPIVEQCLLETLRTVYDIWKDAGQIDEIHIELGRNMKSTAEQRARKTNEFLRNENTNLRIKNLLMELKNDDKIENVRPYSPSQQEILRIYEEGALQELSKEDEMYEDISKISKMAQPSPTELSRYKLWLEQKYRSPYTGRVIPLSKLFTTAYQIEHIIPQSRYFDDSFNNKVICESEVNSLKDNMLGYEFIKECGGQKVHCTLLDGNVEIFTEEEYKTFVTKHYVGNPRKKDNLLLEDIPQEFSARQLNDSRYISKMVQTVLSNIVRTKDEQEAISKFVVSCNGMITDRLKKDWGLNDVWNTIVYPRFKRLNEKTKTNAFGHWENKNGEKVFQTTVPLELQNGFSKKRIDHRHHAMDALVIACASRNIVNYLNNESANNPEKREYLRKQLCNEKRKIKKPWNTFTQDAREALADIVVSFKNYVRVINKATNHYEHYSSSGSKVMISQKGNDMWAIRKPLHKESFFGHVNLRRKATVSLKKALENIPAICDKTLRDYINFLVEKRFNTRQLLAHFKSINYRLNRKRVDKVEVWQFSDEKIEMVAKRKPLDTSFDAKQISFITDTGIQKILLNYLQSKDGNAEIAFTPEGIEEMNKNISIYNGGKAHQPILNVRVATSKGMKYPVGQTGNKATKFVVAEKGTNLYFAIYENELGERSYDTIPLDIVIKRLKEGQSPVPQINKVGIPLKFYLSPNDLVYVPTKENEDELCRDRIYKFVDSSGTTANFVPHTSANTIYNVDKEYAKKYCNGAVILNEYGLGSPQSKNQKDLDGEMIKEICWKLKVDRLGNIIKVIK

SEQ ID NO: 19257 - protein, 1534 aa, unidentified
  REGION 1..1534: note = Cas Enzyme sequence
MISQRNNPYCDLLENCYKYKALKINLQIKTKKMKNILGLDLGTNSIGWAKVSMDDEGKYLQDIVLGSRIIPMSEDVLSNFDKGITVSQTALRTGFRSVRRLRERCLLRRERLHRVLHVLGFLPEHYDKALGWDRNCATTYGKFLDDSEPKLAWKRAEDGHFRFLFMDSFKEMVADFGLHQPTLVAGGRQIPLDWTVYYLRKKALSEPILKEELAWLLLNFNQKRGYYQLRGEEEEENPTKKEEYEELKVVSVEATEERKGDAIWYHAHLENGWIYRRQSKVSLDNWVGQVKAFIVTTEFEKDGVTPKLDKNGEVKRSLRAPSEDDWALRKKRTEKQLENSGQTVGCFIYDHLLAEPSDKIRGNFVRTIERKYYKDELRAILRKQMEFHPALRDDRMLRACIAELYQKNEAHQKSLLQKDMEYLLVDDLLFYQRPLKSKKSLIANCPYERHLYKWTNQETGEIKRDQILPIKCIAKSNPYFQEFRLWQFVHNLRLFRREDQVEVTGEYLSSREDYVRLFLCLNDRKEIKMETVLKDCFGLKKPRGKDSVYPLYWNYVQDKVYPGNETRYEILSALGKAGISLDWADKEGRMYRLWHLLYSVSDRLELKEALRKLNDDDAFVEAFLKVKPFKKDYGAYSEKAVKKLLAVMRMGSLWHEEDLCAQTKAKIAAIIEGRIDSKLKEKMGTERVFTSLNDFQGLPLWLACYVVYGRHSEVSEIKKWETPEQLMTYIRGFKQHSMRNPIVEQCVLETLRTVHDLWKEVGHIDEIHVELGRSMKKTAEQRERDMRQMMRNENTNLRIKHLLMELKRDQEMADVRPYSPMQQEILRIYEEGALLRLTKEDEDYDEIMKISQQAQPSQAQLTRYKLWLEQKYVSPYTGRPISLSKLFTPAYQIEHVIPQSRFFDDSLMNKVICEAEVNLLKGAMLGYEFIKAHGGEIVHCTMLGDVRILSEPEYKELVDACYTNHQKKRERLLAEDIPEGFLARQMNDTRYISRVVMSLLSNVVREKDEEEATSKNVIPCTGGITDQLKKDWGLKDVWNTIVTPRFERLNELTKTEHFGRWENKEGKRVFQTDVPLELQQGYSKKRIDHRHHAMDALVIACASRSMINYLNNESAKKPKCREDLRIKLCDKNRVMRKPWETFTQDALAALENVVVSFKNHVRVINKATNYYERFDEKGKKVYVSQRGNALWAIRKPMHKGFVFGEVNLRRKALVPIAKALENISAICNKDLRRYIDGLVANKFNEKQLVAHFKSLHYRWNRQDVSKVEVILESKDKERMVAIRRLLDTSFDKKRIGSITDTGIQKILLCYLEAKGGDPAMAFTPDGIAEMNRDISLYNGGKRHQPILKVRVSESKGAKFQVGEKGAKVRKFVEAQKGTNLYFAIYEDREGIRSYSTEPLDEVAERLKQDQSPVPERNDNDVPLKFYLSPNDLVYVPSEEERMSEDVCMNKSRIYRFVDASGTTANFVPHTVASLIYSVDKKTAESFCQGNIIQDEFGVGSSQSKNQRAITGEMVKAVCWKLEVDRLGKILKIIR

SEQ ID NO: 19258 - protein, 1456 aa, unidentified
  REGION 1..1456: note = Cas Enzyme sequence
MKRVLGLDLGTTSIGWALVNEAETSHEESSIIRLGVRVNPLTVDEQQNFEKGKSITTNATRTLKRSMRRNLQRYKLRRDNLIDILKKNNLITDKTLLSENGNHTTFETYRLRAKAANYEITLEEFARVLLMINKKRGYKSSRKTKEADDGVLIDGMDVAKKLYSENLTPGQFCLQLLQVGKRNLPDFYRSDLETELNRIWSRQSTFYPDMLSDELRVTLLGKNEKATWAICKEYFKWTETDHSWNNTEARNETIIKEKTLVGIKRNGTIQEQKIENYVWRSKAISEQLHPEELAIVLSKINSQIYSSSGYLGAISDRSKELFFNRIPIEGSNSFSIEKNTRAQTVGEYQLAIIEKNPNASLRNMIFYRQDYLDEFNTIWETQAKFHKELTEELKGEIRDVIIFYQRRLKSQKGLISFCEFESKKIEVDIDGKKKIKTIGSRVIPRSSPLFQEFKIWQVINNLEVSGKGGNKKKRNGDTLSLFTEQEDRLQIFGKRNLYQEEKELLAIELSVKEKLTKSDILKLLFDNHQDLDLNFSVIPGNTTQAKLFEAYKTIIELSGHELNLRKPTVEIIQNIVEIFNGLGYNTGILHFDSSKPLEKQAMYNLWHLLYSFEDDDSVTGNEKLIKKITDLYGFEKEYATIIAKVVFQDDYGSLSAKAIRKILPYLKEGNKYDIACEYAGYKHSASSLTKEEIEKKILKDKLEILPKNTLRNPVVEKILNQMVNVVNSIIDTYGKPEEIRIELARELKKNAKEREELSKLIGETTKAHEEYKRLLMKPLSEGGQFGLVYVSRNDIIRYKLYEELKDNGYKTLYSNTYISPGSVFSGDFDVEHIIPQSRLFDDSFSNKTLELRTINLEKGNKTAIDFVKEKYGEEGCDNSLDNYLTRISRLYKNGALSRAKYNKLRMQETEIPEGFINRDLGDTRYITKYAKTMLCDLVKRVVTTTGSITDTLRDDWQLVDVMKELNWDKYNTLGLTYYEENCEGKLLKRITDWTKRNDHRHHAMDALTVAFTKDAFVQYFNNKNSSFNPNAIEYALKAKYFKDNKAVSPLPLNVFRADAKRHLENTLISIKAKNKVVTQNINTTQKPGGVNKKTQQTPRGQLHLETIYGSIRQYVIKEEKIGASFDEAKIQTVNKPSYRDALLKRLYTNDNNPKKAFEGKNSPTKNPIYINESQTEKLPEKVKTVSFETVYTIRKKITPDLKIDKVVDVQIRKILENRLKEFENDPKKAFSNLEQNPIWINKDKGISIKSVTISGISNVENLHEKRDKDGILILDKNGNKQPVDYVNTGNNHHVAIYRDAEGVFQENVVSFFDAVTRRNLGLPIIDKEYKAEEGWQFLFSMKQNEYFVFPNENTGFNPNEIDLFNPDNYALISPNLYRVQKISTKNYMFRHHLETRVSFETNNEASNKEDRKKRAKEIENKLRKIAWELIQTPVKLQGIVKVRINHIGQIVSVGEY

SEQ ID NO: 19259 - protein, 1031 aa, unidentified
  REGION 1..1031: note = Cas Enzyme sequence
MKVAPKSSPLFQEFKIWQTLNNCLLKRKKKSRQKITAEIIQNSETEITLDLTAKQLLFDELNVKGNLKSDVAIKLLGYETSEWELNYLELEGNNTNKALLEAYLEILEIEGYDTKDLLKIKQSKDEIDLSKTDIPANEIRRIVREIFNSLNIKTEILEFDSELKNKEFEQQLSYQLWHLLYSYEGDNSVSGNDKLYKALEDKFGFKKEHSQILANIALQDDYGSLSTKAIRKIFPFIKENKYSEACALAGYKHSAESLTKEEINSRPLKLKLEILKKNSLRNPVVEKILNQMVNVINTLIEVNSKKDESGKIIKPFHFDEIRIELARELKKSAKERSEMAANIGAAKIQHEKIVKLLQSEFGVKNPSRNDIIRYKLYEELKNNGYKDLYTDTYIPREILFSKQIDIDHIIPQAKLFDDSFSNKTVIYRKDNLKKSNRTAFDYVESEYGKSKAEEFLQRIEKLFEVNKKNNIEGIGKAKFLKLQKRDSEIGDGFIERDLRDTQYIAKQAKKMLLEITRSVLSTTGSITERLREDWGLVNLMQELNFDKFKQLGLTEKVEKKDGTFKERIIDWNKRNDHRHHAMDALTVAFTKHSHIQYLNNLNARYYETHKEFKNIKYIEEKETHIIKDDSGSNKRVFNLPIPNFRVLAKEQLENVLVSHKAKNKVVTKNKNKIPASKGVKVKTELTPRGQLHKETVYGKYFYPVQKEEKVSAKFDLETINKVSNPTYKMHLLTRFNENGNDPKKAFSGKNALSKNPIYLDEKKSEIMPEIVTLSWLESDYSIRKDVTPENFKDDKTIEKVLDAKVRQILTDRLKEFGNDPKKAFSDLDKNPIWLNRDKGITIKRVTISGVSNAQPLHVKKDHFGKKILDKNGNTIPVDFVSTGNNHHVAIYKDEKGILQERVVSFFDAVELTNAGLPVIDKEFNKNLGWQFMFTMKQNEYFVFPNEKTGFNPKEVNLLDSKNYKHISPNLFRVQKIATKNYMFRHHLETNVNEIKELVNIAYINIRSTPPLIGIVKVQINHIGQIVKVGEY

SEQ ID NO: 19260 - protein, 1430 aa, unidentified
  REGION 1..1430: note = Cas Enzyme sequence
MKTKNIIGLDLGTTSIGFAHVIEGEKPENSSINMLGVRIIPLSIDEQTNFEKGKSVSINADRTLKRGARRILNRYKDRRKNLIEVLRKANVISEETVLTEDGKNTTHETWGLRAKAVLERVEKDQIARILLAINKKRGYKSSRKSKNEDEGKAIDGMTIAKQLYEQNLTPGQLVYQHLKDGKKYIPDFYRSDLQREFDTVWECQSKFYPEIFNNEFYQELLGKGLRGTSSSFWAKYKFNTAENKGTREEKLIRAYEWRSKAITDKLNKEEAAYVISEINSNINNSSGYLGSISDRSKELYFNKETVGQYLYKQLKQNPHTKLKNQVFYRQDYLDEFEAIWKEQSKHHSELTAVLKTEIRDIIIFYQRRLKSQKDLISLCEFEKKQIQIKKEGKIVETTVGMKVTPKSSPLFQEFKIWQTLNNCLLKRKRKSKNKLSAEIIQNSETEITLDLTAKQVLFDELNVKGNIKSDVAIKLLGYETSEWELNYPELEGNNTNKVLLQAYLEILEIEGYDTKDLLKTKQSKDEIDLSKIDVSANEIRRIVREIFNSLNIKTQILEFDSELKNKEFEQQLSYQLWHLLYSYEGDNSVSGNDKLYKALEDKFGFKKEHAQILANIALQDDYGSLSTKAIRKIFPFIKENKYSEACALAGYKHSAESLTKEEINSRPLKPKLEILKKNSLRNPVVEKILNQMINVVNTLIEVNSKKDEGGKIIKPFHFDEIRIELARELKKSAKERSEMSANIGAAKIQHEKIVKLLQSEFGVKNPSRNDIIRYKLYEELKNNGYKDLYTDTYIPREILFSKQIDIDHIIPQARLFDDSFSNKTVIYRKDNLKKSNRTAFDYIESEYGKSKAEEFLQRIEKLFEVNKKNNIEGIGKAKFLKLQKRESEIGDGFIERDLRDTQYIAKQAKKMLLEITRSVLSTTGSITERLREDWGLVNLMQELNFDKFKKLGLTEKVEKKDGTFKERIIDWSKRNDHRHHAMDALTVAFTKHSHIQYLNNLNARYYESHKEYKNIKHIEEKETHVVKDDSGSNKRVFNLPIPNFRVLAKEQLENVLVSHKAKNKVVTKNKNKIPTSKGVKIKTELTPRGQLHKETVYGKYFYPVQKEEKVSAKFDLETINKVSNPTYKMHLLTRFNENGNDPKKAFSGKNTLSKNPIYLDEKKSEIMPEIVTLSWLESDYSIRKDVTPENFKDDKTIEKVLDAKVRQILSDRLKEFGNDPKKAFSDLDKNPIWLNRDKGISIKRVTISGVSNAQPLHVKKDHFGKEILDKNGNAIPVDFVSTGNNHHVAIYKDEKGILQERVVSFFDAVELINAGLPVIDTEFNKNLGWQFMFTMKQNEYFVFPNEKTGFNPKEINLLDSKNYKEISPNLFRVQKIATNDYWFRHHLETTVDVNTQLKDIAYRRCSLNGIKEMLKVRINHIGQIVKVGEY

SEQ ID NO: 19261 - protein, 1430 aa, unidentified
  REGION 1..1430: note = Cas Enzyme sequence
MKTKNIIGLDLGTTSIGFAHVIEGEKPENSSINMLGVRIIPLSIDEQTNFEKGKSVSINADRTLKRGARRILNRYKDRRKNLIEVLRKANVISEETVLTEDGKNTTHETWGLRAKAVLERVEKDQIARILLAINKKRGYKSSRKSKNEDEGKAIDGMTIAKQLYEQNLTPGQLVYQHLKDGKKYIPDFYRSDLQREFDTVWECQSKFYPEIFNNEFYQELLGKGLRGTSSSFWAKYKFNTAENKGTREEKLIRAYEWRSKAITDKLNKEEAAYVISEINSNINNSSGYLGSISDRSKELYFNKETVGQYLYKQLKQNPHTKLKNQVFYRQDYLDEFEAIWKEQSKHHSELTAVLKTEIRDIIIFYQRRLKSQKDLISLCEFEKKQIQIKKEGKIVETTVGMKVTPKSSPLFQEFKIWQTLNNCLLKRKRKSKNKLSAEIIQNSETEITLDLTAKQVLFDELNVKGNIKSDVAIKLLGYETSEWELNYPELEGNNTNKVLLQAYLEILEIEGYDTKDLLKTKQSKDEIDLSKIDVSANEIRRIVREIFNSLNIKTQILEFDSELKNKEFEQQLSYQLWHLLYSYEGDNSVSGNDKLYKALEDKFGFKKEHAQILANIVLQDDYGSLSTKAIRKIFPFIKENKYSEACALAGYKHSAESLTKEEINSRPLKPKLEILKKNSLRNPVVEKILNQMINVVNTLIEVNSKKDEGGKIIKPFHFDEIRIELARELKKSAKERSEMSANIGAAKIQHEKIVKLLQSEFGVKNPSRNDIIRYKLYEELKNNGYKDLYTDTYIPREILFSKQIDIDHIIPQARLFDDSFSNKTVIYRKDNLKKSNRTAFDYIESEYGKSKAEEFLQRIEKLFEVNKKNNIEGIGKAKFLKLQKRESEIGDGFIERDLRDTQYIAKQAKKMLLEITRSVLSTTGSITERLREDWGLVNLMQELNFDKFKKLGLTEKVEKKDGTFKERIIDWSKRNDHRHHAMDALTVAFTKHSHIQYLNNLNARYYESHKEYKNIKHIEEKETHVVKDDSGSNKRVFNLPIPNFRVLAKEQLENVLVSHKAKNKVVTKNKNKIPTSKGVKIKTELTPRGQLHKETVYGKYFYPVQKEEKVSAKFDLETINKVSNPTYKMHLLTRFNENGNDPKKAFSGKNTLSKNPIYLDEKKSEIMPEIVTLSWLESDYSIRKDVTPENFKDDKTIEKVLDAKVRQILSDRLKEFGNDPKKAFSDLDKNPIWLNRDKGISIKRVTISGVSNAQPLHVKKDHFGKEILDKNGNAIPVDFVSTGNNHHVAIYKDEKGILQERVVSFFDAVELINAGLPVIDTEFNKNLGWQFMFTMKQNEYFVFPNEKTGFNPKEINLLDSKNYKEISPNLFRVQKIATNDYWFRHHLETTVDVNTQLKDIAYRRCSLNGIKEMLKVRINHIGQIVKVGEY

SEQ ID NO: 19262 - protein, 1432 aa, unidentified
  REGION 1..1432: note = Cas Enzyme sequence
MSRKNILGLDLGTTSIGFAHVIEAKTPEESSIMRIGVRVIPLSTNEQINFEKGKPITTNAERRLKRSMRRNLDRYQDRRKNLISVLRNSKLISEDSVLAEDGKNTTHETWRLRAKSITEKIEKDQLARVLLAINKKRGYKSSRKAKTEEEGLAIDGMAIAKRLYEEGLTPGQLVFQLLKEGKKHIPDFYRSDLQAEFDKVWDCQQRFHPEIFTDEFYRDLQGKGQRATAASFWGNHKFNTAENRGTRDEKRLKAYEWRSRAISEKLEKEEAAYAIAEINNNLNNSSGYLGAISDRSKELYFNKQTVGQYLYSQLQRNPHTSLRNQVFYRQDYLDEFEAIWKEQSKHHAELTDELKGQVRDITIFYQRRLKSQKGLISICEFENREIDIEKNGKKVKKRIGLRVAPKSSPLFQEFKIWQNLSNLEIRQKVGRKRISSNNTPQTEEQTEAFALDLLAKQQLFDELNIKGNLKADEVIELLGYKPTEWEINYNQLEGNQTNKNLYKAYLQILDAEGYDIRDLFKVKSSRDEVGLEDLTVPASEIKQKIKSILASLDIDVAILDFDAELEGKTFENQASFQFWHLLHSYEGDNSISGNEKLYELLKKKFGFKREHSRILANISLPDDYGSLSTKAMHKIYPYVKELKYDKACAAAGYRHSASSLTKEEIANRPLKNKLELLKKNSLRNPVVEKILNQMVNVINTLIDVNSKKDENGTISEYFRFDEIRIELARELKKNIEERKLMSSNINEAKAKHEKIAKLLQNEFGIKSPSRNDIIRYKLYQELKNNGYKDLYTDTYIPREILFSKQIDVDHIIPQARLFDDSFSNKTVIYRRDNLKKGNMTAYDFLESEYGQEQSESYLQRIKKLFELGKKNAEEGISKAKFQKLQKRASEIDDGFIERDLRDSQYIARKAKNMLHDIARSVVSTSGSITARLREDWGLVNIMQELNFEKFKNMGLTEKVEKKDGTFKERIVDWSKRNDHRHHAMDALTVAFTKHNHIQYLNFLNARFNENHKEHWKIKDIEDKETHVVKDDRGNGKRLFNLPMPTFRTVAKEQLANVLVSYKAKNKVVTKNKNKIKTAEGVKIKTELTPRGQLHKETIYGEYHYPVHKEEKVGPKFNLEKINKVANPIFKKLLIHRLSENGNDPNKAFAGKNALSKTPIYIDDSKTETLPETLRLTWLEKGYSIRKDVTPENFKNVKVIKKVLDEGVKRILHSRLKEYGNDPKKAFSDLDKNPIWLNMEKGICVRRVTINGVSNAEGLHYKKNHLGNFILDDANNKIPADFVSTGNNHHVAIYKDERGDLQERVVSLFDAVQLVNAKLPVIDMDYNKRIGWQFLFTMKQNEYFVFPDENESFNPIEIDLLSSKNTKRISPHLFRVQKLTTGDYWFRHHLETSVDVKAQLKDVTYKRCGLSGIKGIIKVRLNHIGQIVKVGEY

SEQ ID NO: 19263 - protein, 1404 aa, unidentified
  REGION 1..1404: note = Cas Enzyme sequence
MKIIGLDLGTNSIGWAIRNTALLENEIENFGVITFEKGVGEGKTGEYSYAAERTKNRSLRRRYQAHKYKLWATLEALIKSDYCPLSIEDLDRWRKYKKGAKREYPLHALAFANWIKLDFDEDGKPDYTSPYQIRLELITKKLDFTEQKNRYKLGRALYHIAQHRAFKSSKKVQEGEELSTEDLIGAEKKRAQFIDDLLTKHGAETVGAAFAIEEMQGIRIRQNLHQHVLRKQLQYEVKKMFDFQNLSFADLFGKEVNKSCIFWQRPLRSQKGSIGKCTLEPSKYRCPVSHPSFEAFRAWSFLNTIEYRLQGDCQNQWQKIPFQLRQEIYNEKFFRVSKSDFDFYEIRKFIEKKNEHDKWELNYKDKTNVSACPVSARLQDIFGEGWITVKREYQNDSNKKGKGHYDLEDVWHVLFSFDDEDETRKFALEKLNLTNKEEEKFVHLWYKMPVAYGMLSLNAINKILPFLRKGFIYTEAVLMAKMPEILGSEFWKNNEENIVGYIGQIIEINRTEKKKLATANGLIAKYKALENSLRFAERNYDYQLQKDDLKEVEDACIEAYGLKSWQEKPEEERKIIFSDVAKSYQSFFSDATRGFKKLPHLLDTVKAILADTFQIDAKKLEGLYHPSQIEIYPPAKEKYYEQYNKHLRLLGNPKTDAFKNPMAMRTLFELRKLINYLLITEQIDEETRVVVEVARELNDANMRWAIETYQRRRQEENKDFAIAISELLRTDPDAKADPQNDSDVDKLRLWFEQLKDEEVNDGKGEYSKHEWSNTKSKVYKEVAAAKEMIEKYRLWKEQECQCIYTGRMIGMTDLFSENNTDFEHTLPRSISFDNSLANRTVCDFVYNRSVKKNAIPTSLQNYDTDALINGKLYTAIKPRLEKWQRKVEELKLHIDFWKKKSKAAATKEAKDKAIRQKHLWQFELQYWQNKLSRFTMTEIKSGFKNSQMVDTQLISKYAFHFLKTAFNKVDVQKGSNTAQFRKIYGIQNRGVVKDRSKHSHHAKDAVVLTLIPVAAKRDEILVKAYQHEERMHQQYTELPYKGFKQSFIEDIENIILINNIQKDQALTPGCRRVRVRGKKVYLKDQNGNEREKWAKGDSIRGQLHLDTFYGKIKVVKRADNGKPLKDETGEWMYTDKNEGFGFVLRKEINKDLKVETIVDPYLKQLFIQQMNGRNLDKTLKEDGCIWMLNKKGNKVHAMRHVRTFANDVTEPLAIKHQTYTSGKEYKTHYWAKNGENYAYAFYQGIIKNKIERGYELINLFDAAQSSLADNRNNLDVPKDISFNKKGDQLQLYAILKVNQKVIFYKDSPYELDDLEITDLSKRLYRIIKFEKDGRIVFAHHLDARNDNALKALEVQFGKSIYNGFSAFNYEQPWPRLKLSLGNLNFLIEKKDFELLLDGTINIYK

SEQ ID NO: 19264 - protein, 1374 aa, unidentified
  REGION 1..1374: note = Cas Enzyme sequence
MKKILGLDLGTTSIGWAFVKEGDKQNSTIEKIGVRVVPLTTDEQTNFEKGKSISSNAERTLKRGARRNLDRYKQRRSNLIAVIKKHNISSNETVLAETEKGSTHSTYKIRSKAATERVEKDEFVRILLMINKKRGYKSSRKAKSEDEGQIIDGMAIAKTLYEEKLTPGEFCYQLLKSGKKYLPEFYRSDLKIELDRVWDTQKSFYPDILSDNIKTELHEKGQKATVAIFISKKDIYPAENKEGSREEKKLKLYEWRVKALKGKLKAEEVVSVIAEINNNINSSSGYLGAISDRSKELYFNKETIGQYLYRQLKINPHTRTKGQVFYRQDYLDEFEAIWETQAKFHKELTPELKTEVRDIVIFYQRRLKSQKDLISFCEFESSQIEIVRNGEKKAKTIGYRVSPKSSPLFQEFKIWQNLNNLEAKNKKTKDIILFEQESELKEKLFEELNIKGNLSSEQILNVIGLKGTDWELNYTSLEGNRTNQTLYEIFEKIFLYEGNEDINFSKMPAKEIRSAVQDLFNSLNIDTSILIFDPELEGKGFEKQSSYQFWHLLYSYEGDNSNSGNQNLIELLQTKYGFKREYAQLIINASLSDDYCSLSAKAMRKIFSYIKENKYSAACALAGYNHSKFKTKEENEARVLKDRLEILPKNSLRNPVVEKILNQMVNVVNAILEDPSLGKPDEIRIELARELKKNAKERAEMASNINQAKLLHESIFKLLQDEFGIKNPTRNDIIRYKLYDELKANGYKTLYSDTYIPREKLFSKEFDIEHIIPKARLFDDSFSNKTIAPRQENINKKDETAFDFVDKGLGKEALENYVARIEMMYKLKDGGINKAKYKKLLMQGSDIGQGFIERDLRDSQYIAKKAKEMLLEITRTVSTTTGSITDRLREDWGLINVMQELNFDKYKKIGLTEIVEKKDGNSKERIVDWTKRNDHRHHAMDALTVAFTKPSHVQYLNNLNARSDKAGSIYGIEQNETFKDAEGKRKFIMPLKHFREEAKEHLENVLVSFKAKNKVVTKNKNRTKANSADKIKIELTPRGQLHKETVYGKLKQYSTKEVKVGANFTEGVILMTAKYTEREALLLRLRENDNDPKKAFAGKNSPSKNPIYIDKEKSITLGEKVKLVEFEEDYTIRKEIGPDLKIEKVIDEGVKRILQRRVDEFNGNSKEAFSNLENNPIWLNEQKGIAIKRVKISGIKNVEALHTKKDHLGEQILNENGNKIPVDFVSTGNNHHVAIYQDGNGDFQEKVVSLYEAVERVNQQLPIIDKSFNQNIGWQFLFTMKQNEYFVFPANGFEPKDYDLLNVKNNKIISKHLFRVQKLATKNYMFRHHLETTVVDKNELKNIAFINLRSCNQLDSIVKVRINHIGQIVKVGEY

SEQ ID NO: 19265 - protein, 1341 aa, unidentified
  REGION 1..1341: note = Cas Enzyme sequence
PISVNADRTLKRGARRNLQRYKQRRENLIDALIKSNIISTETALAEDAKGTTHETYLLRAKAVSEKISKEEFARVLLMINKKRGYKSSRKAKNDDEGQAIDGMAVAKRLYAENITPGQLAFQLLKESKKYLPEFYRSDLLSEFNKVWDFQKQFHPEILTDEFKKEIEGKGQRATSASFWNKFKFNIAENKQKTRVEKKLKAYEWRTKAITEKLEKEEVAFVLTEINNDLNKSSGYLGAISDRSKELYFNKQTVGQYLYAQLVANFHTRLKNQVFYRQDYMDEFEMIWEEQAKYHLELTAELKTEIRDIVIFYQRKLKSQKGLISFCEFESKEIEIEKDGKLIKRTVGLKVSPKSSPLFQQVKIWQILHNIEFRNKITKERVFPDLASKQLLFEELNIKGNLTANKITELLGYKTKDWELNYKEVEGNRTSQALYEAYLQILELEGYDEDLFKIAGKDEIKLADINTSSNEIKNMVKTIFETLGIEVSILDFDAEIDGKAFEKQSSFQLWHLLHSYEGDDSNSGNETLYALLNRKFGFKKEHAQILANIIFASDYGSLSAKAMRKIFPYLKENNYSESCKLAGYNHSSSVTKEENEKRPLKGKLELLKKNSLRSPVVEKILNQMVNVVNAIIEDPSLGKPDEIRIELARELKKNSKERAEMTLNINSAKIENEKIRKLLSQEFGVKNPTRNDIIRYKLYEELKGNGYKDLYTNTYIPQEKLFSKDFDIEHIIPQAKLFDDSFSNKTIVPRQVNLDKGNQTAYDFVLGKYGAATLEEYLLRVELMYKQKEGSISKAKYQKLLKQGKDIGDGFVERDLRETQYIAKKAKQMLEEVCRKVISTTGNVTDRLREDWGLVNVMQELNFEKYKTIGLTELVEKKDGTFKERIKDWSKRNDHRHHAMDALTIAFTKHSHIQYLNHLNARKDEDNKLHNHIIGIENKETELVIEDNGNKKRRFKQPITNFRLEAKKHLESVLISFKAKNKVVTKNKNKIKSKNGEKVKIELTPRGQLHKETVYGKLQQYVTKEEKVGAKFNEEIIKKVANKKQREALMQRLTEHAGDSKKAFTGKNSLDKNPVYLDEQKLQVVPDKVKLVFMEADFAIRKDITPDLKIDKVIDAGVRAILQKRLDEHNGNAKTAFSDLDKNPIWHNQEKGIRIKKVRISGVKNAEALHSKKDHLGNDILDANGKPNATDFVSTGNNHHVAIYRDAEGNLQEKIVSFYEAVERVNQGLPVIDKKYNESLGWEFLFTMKQNEYFVFPSPSFNPTEIDLLDARNNKLISPHLYRVQKIATKNYFFRHHLETTVEEIKELKNMAYKPQLGLSAINNTVKVRLNHIGKIVKVGEY

SEQ ID NO: 19266 - protein, 1593 aa, unidentified
  REGION 1..1593: note = Cas Enzyme sequence
MEMKKILGLDIGTNSIGAALITIPKAIDDFGKQGKIEWLGSRIIPVDRDYLQKFESGAQAETKAAARRMKRGSRRLKHRYKLRRSRLIQVFKILGWIDNEFPLDNPHKIKANIREEGKFSFRISDHLPVSDESYKEFYLHLGYQESVIDALIEEMKYRRKNNGEKKNKDIKLLPEDWVVYYLRKKALNKSITTNELARIIYMMNQRRGFKSSRKDLKDTTVLNIDEFIRIKQDIDAGKLREYQKGEGESLETKFVSITKIKSVEQNGEEKDKKGNYTFNITAEDNRLENWEEKRKKTPEWVGKEVTLVVTQKIDKNGKFTQNKPQLPKEEDWELNMVALDNQIGDKTPGAFFWDKLVEDKNYKIRQTPVRREKYQDELETVWNKQCELNPELARLNQDKEIIKKCAEVLYPSQYQFQGAKIKELLSHDLLHIISKDIIYYQRELKSQKNSVGECQYEKHKGIDGEYYGVKCAPKSSPEFQEFRIWQDIHNIRIFEKEQRGNDFVKIDVDITKNLIDDTAKEKLFELFDTSREVSEHNIFSELNKLLTSDKKLNKDKYRINLFANRDKLAGNETKETFRKIFRKHSYEAEGEKLLSDKETLRKLWHINYSISSSDLNKSAKGIRTAISKFNMPEDVVEAFTRLPEPKKQYAAYSSKAINKLLPLMRCGKYWSWENIDNETRERIDTIINEGWNFAYDKRTGELIKEREFSQKDQFAGLPVWMACYVAYGRHSERESDKKYTPEEIKSLNIMQLMPNNSLRNPIVEQVVRETMFLVKDLCNQYGQPDEIHIEMGRELKKNAAEKEKIAKNNRRNLEEKQRIKKLLYELLNGTFEHYDEDGEKINAAFEVKPNPENPTDVEKFRIYKSCGAITSDEEKENWDALFKSGNKEKIPTHAEIKKYILWLSQRCVSPYTGKIIPLSKLFTEEYEVEHIIPRKKIKYDAFENLVICERGVNKLKDNELAMLFISKNNGAELSYEGKKYKLQTTNDYISHCKKTFKGRKLKNLLATEVPEDFVERQINDTRYITRKVSELLYPVAKDKSGLIFTIGSITSDLKREWGLNNVWKEIVKPRFERLEQITGQALIVPDKEDANKFHFTVPDQPDFNDKRIDYRHHALDALIVAATTREHIRYLNSLNAADSSEELQKVKRALVKGKIRGYKQPWEKFTKEAKEKLCETIVTFKSNNKVVSKPANKYVKWFKSNESWEKKEVFQKPNSRWMAVRKSMFKEPQGIIWLKEKKEVSVLDAFKIQIERMKVEQDKEKRKTASYVYDQLARQNLKQIIENTGIELDRTELLKEIQKYLKKNSRKILTGAVKKNGKPEFKIVYSLGEQMYEKVWIAEFVEYATKRTSLSKKEYVEKLTEEKIKKDLAYPEQNRISKLMINHIREYKNNPKEAFNAEGLEHLNKKAIADPKIGKPIKAITRIEKKSPEDKFGSKYVEVDKGAIAYFIIYEDDQTKERPEMYSLATHQAIERLVQGKPIAEKREGYNTIILSPDDLVYVPTPEEWQAIKENKPEPINWNDRGKIGERIYRMVKSTGKQCFFIPAYISKLILPYDASKKLGELESQNCSEKTLDGQVQIKQCCIKIEVDRLGNI

SEQ ID NO: 19267 - protein, 998 aa, unidentified
  REGION 1..998: note = Cas Enzyme sequence
MTKILGLDLGTNSIGWALLDTESQKIIDAGVRVFQEGVARTPTGSEESKNAQRRNARGLRKQNARFKMRRDLLIKILTDLNWYLPESKDAFYKMNPYELRKRGLDEALTLPELGRAIFHLSMRRGFKSNRRAGAKDDSKIFTGYENIIGISETENKIKEGHYRSLGEYLASINSRERRIRGRFTLRKMYESEFEILWEKQKEFHTPEMTDEVKWKLYNDIFKQRKLKSQKRTVRYCTFEPNKKCAPKSSPIFQYYRILEQVSRLKISCDNRSNEPLTDDERFRLITALNEKKELKFEQIKKLLSLPQDAFINLEDQEKLLGNRTEYELSRVFGKKNWSQYSADEKYQIWHTLHFCDDNDWLKKYASEKWKLDEISINKLLDVSLEKGYCNLSAKALKRIIPHLEDGLTYDRAALEAGYNHSQPDQLKEVQDLLPEPENLRNPIVQQTLFELRKLINNLFNTYGKPEIARVELLRELKSSREQRQNIQKEMRIREKEIARARDRIKEIPEYLGKEPSRDDIVKYLLWEECKGICPYTGNHIPLSSLFTGEYHVDHIIPYSRSLDNSFANKTLCHHSTNIEKGNRTPYEAYASDPVRWNEIVQRVTSTMRHKLRKFLLTDVAAEVDDDFFHHQMTDTAYISTEVNKYLKNVCPKVQITKGGATAILRQLWGLNTILSPSINIKTRDDHRHHAIDALVIANVNPGTLHRLSLFHKFNKNVPHENFPEPWPNFRNNAEEVINKILVSHRRNVRVRGKLHEETYYGKITAPDNGRETYVVRKPLAGLTPKMIVNIVDPVVKKMLINRLIEKGVDVGEKFTIPKDAWNQPLFMPDGKTPIKSVRVKCPTETMIRLYQDRKIFVESGNNHHLEIFVNPETGKRIGRVVSLFEATKRLKQKLPLIDKTAPVPDYKFLMSLAINELILVDISDIDWDNPPPSTELSPYLYRVQKMDVNQIITLRHHTVSILKDETGNEPGVLRKNINTINGIKVSINHLGKIRKADD

SEQ ID NO: 19268 - protein, 998 aa, unidentified
  REGION 1..998: note = Cas Enzyme sequence
MTKILGLDLGTNSIGWALLDTESQKIIDAGVRVFQEGVARTPTGSEESKNAQRRNARGLRKQNARFKMRRDLLIKILTDLNWYLPESKDAFYKMNPYELRKRGLDEALTLPELGRAIFHLSMRRGFKSNRRAGAKDDSKIFTGYENIIGISETENKIKEGHYRSLGEYLASINSRERRIRGRFTLRKMYESEFEILWEKQKEFHTPEMTDEVKWKLYNAIFKQRKLKSQKRTVRYCTFEPNKKCAPKSSPIFQYYRILEQVSRLKISCDHRFNEPLTDDERFCLITALNEKKELKFEQIKKLLSLPQDAFINLEDQEKLLGNRTEYELSRVFGKKNWSQYSADEKYQIWHTLHFCDDNDWLKKYASEKWKLDEISINKLLDVSLEKGYCNLSAKALKRIIPHLEDGLTYDRAALEAGYNHSQPDQLKEVQDLLPEPENLRNPIVQQTLFELRKLINNLFNTYGKPEIARVELLRELKSSREQRQNIQKEMRIREKEIARARDRIKEIPEYLGKEPSRDDIVKYLLWEECKGICPYTGNHIPLSSLFTGEYHVDHIIPYSRSLDNSFANKTLCHHSTNIEKGNRTPYEAYASDPVRWNEIVQRVTSTMRHKLRKFLLTDVAAEVDDDFFHHQMTDTAYISTEVNKYLKNVCPKVQITKGGATAILRQLWGLNTILSPSINIKTRDDHRHHAIDALVIANVNPGTLHRLSLFHKFNKNVPHENFPEPWPNFRNNAEEVINKILVSHRRNVRVRGKLHEETYYGKITAPDNGRETYVVRKPLAGLTPKMIVNIVDPVVKKMLINRLIEKGVDVGEKFTIPKDAWNQPLFMPDGKTPIKSVRVKCPTETMIRLYQDRKLFVESGNNHHLEIFVNPETGKRIGRVVSLFEATKRLKQKLPLIDKTAPVPDYKFLMSLAINELILVDISDIDWDNPPPSTELSPYLYRVQKMDVNQIITLRHHTVSILKDETGNEPGVLRKNINTINGIKVSINHLGKIRKADD

SEQ ID NO: 19269 - protein, 1433 aa, unidentified
  REGION 1..1433: note = Cas Enzyme sequence
MKKILGLDLGCNSIGWALVNEAENTEEISSIIKLGVRVNPLTVDEMQNFEKGKSITTNADRTLKRSMRRNLQRYKLRRDTLIEVLKEHGFITDSTLLSEHGNKTTFETYRLRAKAAVEEISLEKFARVLLMINKKRGYKSSRKAKGSEDGVLIDGMDVARKLYEEGLTPGELCLQILEAGKKNLPDFYRSDLQNEFDRIWNFQKQFNPELFCDAVKEEVRGKNRSQTWAILVKFFVWSEKESVWNEKEARTEERVKEYKLVGLKRDTKGNELKLENYRWRVQALSEQLNPEIVAIVLQEINGQISASSGYLGAISDRSKQLYFNRQTVGQYLMSELEKDPNVSLRNRVFYRQDYLDEFDRIWEKQAEFHEELTVELKKEIRDIIIFYQRRLKSQKGLISFCEFEKREVVVEEDGRKKNKTVGCRVIPRSHPLFQEFKIWQNLNDIEVFAWDKQSKRKKADKSSILFDNSEDALLVEGKRFLYQEEKELLAKELFVKESMKKAEVLKLLFENYQELDLNFKQIDGNHTGFALFSAYSKMIEKYGYEPVDFKKSADEIIEKLETIFTNLGWNTELLSIDLSKEDKELERQSYFRLWHLLYSFEGDNTPTGNGKLLEKIMQLCDVEKEYAVELANVSFQEDYGSLSAKAIKKILPYLKEGNQYDVACDYAGYRHSKSSLTKDEIENKILKDKLEILPKNSLRNPVVEKILNQMVNLINTLIDTYGKPDEIRVELARELKKNAKEREELTKSIARNTREHDEIRQLLRTEFGMMNVSRNDIIRYKLYEELKDNGYKTLYSNEYIPREKIFSKEIDIEHVIPQARLFDDSLSNKTLEYRAINIEKGNKTAYDFVKEKYGNDGLEKFLNRCETLFKDKRTKLRKLKMEEKDIPEGFIDRDLRNTQYISKKAFAMLNEISRRVVATTGSITDKLREDWQLVDLMKELNLPKYEKLGMVEMFEDKDGRKIKKITDWTKRNDHRHHAVDALTVAFTKDVFIQFYNNKNAAWMPASKEHANITGIKARYFENGKALAPMPLAQFRAEAKRHLENLLVSIKAKNKVITSNVNHTKKKNGENRKLQQTPRGQLHLETVYGSHRQYATKIEKVNAAFDAAKIATVSKLAYRNALLKRLEAFGNDPKKAFTGKNTLEKNPLYLDENQTEMVPEKVQTVEFETVYTIRKPIDPNLSIDKVIDVKIRSVLEKRLKEYGGDAKKAFVNLDENPIWLNEAKGISIKRVSIRGISNAQSLHEKKDKDGNLILGKEGRKIPVDFVNTGNNHHVAIYKKPVLDKVGQIVLDEEGNPKYELDEVVVSFFDAVTRANLGQPIIDKDYRRSEGWQFLFSMKQNEYFVFPNEKTGFNPKEVDLLNPENYALISPNLFRVQKFAYKNYVFRHHLETTIKDTSSTLKGITWTDFRSSKGLDKIVKVRVDHIGQIVSIGEY

SEQ ID NO: 19270 - protein, 1087 aa, unidentified
  REGION 1..1087: note = Cas Enzyme sequence
MLGGMVEKGLVLGLDLGPNSVGWALVEAGFDDGDNQVAETGIVATGVRVFEEGLDNFDSSKEESRSQKRRMARGARRTHQRRARRKRKVRRLLQSTGLLPASPEALHRLVGPFPKGAKPIDPYEARARGLDERLHPHELGVVFYHFAVRRGFKSNRKDAGNSKEEGNVKGAIAELRRAMEASGARTLGEYLFRLRAGDHGTIAAERQHGGQMHRLRNRFTARGMYRDEFEAIVAAQRAFHEPLADSQFVGRLREAIFHQRPYGVTPERVESLQKQANGRPRFANLLRSPSIGACPLEPDEVRMPRGHWLAQRFRLLKEVNNLGLIARSERPLKPEERDCVVAALESHKSQKFDQLRKALGLHEFVRFNLEAGGRKALDGNVIEDAIAKAVGRARWRRHARDERGRIGIEVSEILLDEEDRDQARERIVSAFATNGGLDPETAGKLAGFHPGDSYIAYSRRAVERLLPHLEGGLDEYEAIRRAYPDRPQAATVNRLPPPSGSITNPIVRRALTEARKVVNAILREYGRPARIVVETAREVAQGPKRRREFTSRMREREQARNELRTRLETEFGVPNPDRDLILRYELWEEQDGRCPYSGRGIEVAAVVSGGGDLQVDHILPRWRSLDDTRANKVLTFADINREKGDRTPWEWCGDTPAFDEMAKRIERLRRMPLGKKRRFLQKELAADGFVQRQLNDTRYIAREVVGYLNRLYPPEQRVGEKAVRSSPGRLTAELRRCWGLNNIFTHWQGPAYTGEKIRDDFRHHAVDALVVALSTRRHLARYARFRRAVEEGLVDAAEREVEFDPPWSTFRVDAQRSVESIVVSHRVQRKLRGAFHEETFFGPTNDEASFVFRKRLDDSFKETDLKRVRDARIRELLRAHLDRQGWKPGAKLPKGAFTGENQVGIPPRDPSDGLGTPVRRVRLTRTMKNPFAFTDSEGHPFRFANLGNNHHLAIASRSESDRRALVARVMTMREAAERVRRRGLDAVDRPVADGLEFEMSLARKESVMVRDPESGADRICIVQLLSGSPDWSTGFDLTLRDARDGRPASEGNRDPYRRLRSFGAKWKELEIRKVTVDPLGRVMPAGD

SEQ ID NO: 19271 - protein, 1190 aa, unidentified
  REGION 1..1190: note = Cas Enzyme sequence
MPNKKILGLDIGVSSVGMAIISEDKNGEKDIKKLAVRIIPEDPNFHGKFYSGNTASKNLERRIKRSIRRNNQRFKLRRDRLYNLLREKKMFPQQSLFMLNAEQLYELRAKAVSEKIDLEELGRVFIHLNKRRGFLSNRKADNDENNSDYKKVIAKLEESRENLTIGQKLYQELKDSRNLQETLIRERTYLRASYIEEFDRIWEKQRQFYPDVLTGNSQEELVRGSFYDELRNKTIYYQRPLKSAKGLVSECEFEKHHRSIPRTSPVFELFRIWQRLNDLNWRLEDGTLIKPKLEQKEELAALLINGEKLNAKGLLTITEIKKFFGFSRNQRVYFNFQELEGSKTAKIIRDALKKAKINDIDSLLSFDYRLPDEKGGLYELWHITYSLPDKKNVISTLIKRFGFTEDKAKIIASEVNYKSDYAKLSSRAIKKLLPLMEKGLQYSEACTKVGYDYSGYMTTEAIADRLTQIKPNSLKNPVVEQVLNQVVNMVNLAVEDYGKFDEIRVELARELRNSAKARNRITSSINKNKKENQKIRERLKDEYGFKIVNGRDIKRYKLWQEADKHCLYCSNPITKTDFLNGNAEIEHILPKSRSFNNAMSNYILSHKKCNSDKGQRTAYDFMKNKSKDYFQTYVDKVNELFNSNKKKISQAKFDNLMCSGDDIPSDFVERMKKDSQYIAKETVKMLKKVCPKTYTTTGQVTDLLRAEWGLKHVLEDLGLPKYRALGQVETKTIKVTDGNSKQIEKIKDWSKRDDHRHHAVDALICALTDQKIIFKLNNLNKIFQYERDALTTEEIKELERINETKFDLKHFVEQAAYEFKEPIDNLRSKTKNHLEGILTSFKKPNSKVLTKNVNDIKNGPNQATWVPRNRLHEDTIMGERKRPSNKKVKLNKKFDSVEDVINDIQKTAIEQHLKKYDNNPLVAFDSKTLKKDPILLAGEELVSVSVFDTTNSKRVPLSESFTKAQIEKIMDEKIKELVKNRIMKYGSIKAAFKDLESEPLWFNQERGIRIKSVSVYDESKAIDVRNGKAKSGGNHHALIYKDEKGKYQDRVISFNDAVQIGLFNIEQNGKPYPIILRHNDPELGEFQFSMQNNDLFVFDLKHSNNPTEENEIDFYDVKNRKLISEKLYRVQKMSKKSSGEFDVHFRHHYESTIDRSIKEETWINIRSNKLLNRITKIRINHLGEIIKIGE

SEQ ID NO: 19272 - protein, 1112 aa, unidentified
  REGION 1..1112: note = Cas Enzyme sequence
MQLTEKILGIDVGSNSVGWALVSTDGQVIDMGSYVFPEGVKNDDYSKSGKEISKNAGRRMARGIRRGYHRWKLRRDSLQQALKNVGMMPEDLNKWQAHELYQLRARALSEKLTLEEIGRILLHLNSRRGFKSNRKNQAADEKEEGLVKSSISELSKRMKEGGFQTIGQLFASFYDGSGNHPDAPSERIRNLRAIGDRFVGREMYKNEFDAVWEAQQKYYPDVLTGHSKDASKTTLYHRLKNEIIFFQRPLKSQKGRVNKCSLEPQKTVIPKSHPLFQEFRIWQQLANIQLFDIDGPYKLSLDARHKIAGAMMKSAEVTEKAIRKIANIEAWVEMNAMPKFVGHRTNATIIKAIGEQEYARFTDEDREQLWHVLYFANDDQWLKDYLIRKFALPVEAAQKLSKVSLEPDYGNLSARAIRRMLPYMTEQGMDYAHAAKAAGYHHSYDAETQAADRELKDKMPQLKANELRSPLVQQSVAECIKVVNAIIATYGKPDRVRLELAREFQMPKEVREEQRNRNAQKDKLREMYAEFLTRKNLLQRQVYKTDAEILKFELWLELGLQHLPEDAKQKSFSEFIKKTRTIDLTRHALWLECNRISPYSGKLITLTDLFSPSIEIEHIIPYSRSLDNSFANKTLCEKHINAEKKGQTPWEYFQNKPKSEWEEFVERSKAFPHRKRELMLMKEIPPDFKNSQMNNTAWVGREMLGRLKEVFRYVEVRNGQATGTLRRAWGLNRLLSPDNDEALKNRKDHRHHAVDALVVALTSREVYDEMAQTAKLTERGQFRVKVDLPFPDLAMQAERILEKTIVAHRNTQKLFSVRKYRITISKNRVPHKTQPGKFVNEFKSVIKRGLSVRGSLHEDTFYGVIHDPAVRNGGDEKVVVRKIVNFSNFYKWNHIDKIVDPKVREQVQNRIKENGGDFKKAFSSLEKEPIWMYSRKGVKVPINSVRVIAPLTKQSLIQLRPAENKKLFAAPGNNFIFAIYQEYDKKDKLKLTGESISYFDAIQKARKKLPIVPLTKHGKVLKMTLQKNDLLVLYQDSEQDIRWDDPKWIAQNTYRVYKFSGNSIFIVLHNIADKNDENLEKDDSNPVKFKRAASTLKAVKIRVNRLGKIVRD

SEQ ID NO: 19273 - protein, 1044 aa, unidentified
  REGION 1..1044: note = Cas Enzyme sequence
MKYILGLDLGTHSAGWAILELDSAGKAAAVKDAGVRIFEAPVEPKTQAPKNLARRTARQHRRQLARRKQRRVKLTRVLQEAKLLPVNQVELETLLLDDNECNPYMLRAKGLDSELGGYEFGRVLFHINQRRGFKSNRKTSFSEVLKKVPAIAELIEQEESAESTKILQKQNKLSAATTGDDDDGVVKAGISLLRATIETSNARTLGEYLYLVKEGRASRPNRMSIEVPKKVRGLYTERAMYEDEFEQLWAKQSQYNQSLDAQLKVLVFDAIFSQRPLKTQKYLVGDCVFEYHRKRAAKATLEFQRFRFLQTVNDLEIKNTDTRLYRKPTEQQRLNLLALLEKSEKVTWGRVRKALQIHSDETINFEEGGKEELLGDSTSSRIGKAISAQWEALSVEKRNELVADLLTIPQKDWLLVRLLDHWKFSPVEAYKLAILTLEPGYGAVSMKALRKLIPLMGGGLNYKTACDKLSYIEGANRKSTAGEVLPFPPNVRNPVVQKALYQVRRLLHAIVRKYGVPEIVTVELARDMKLSKKQKEESEARNRKNKRERDIARAALQSNGLPEPSHDDLLKYRLWKEAGCMCPYTGQPISMGMLLGKEGEVDIEHIIPYGRCLDDSYMNKTICLASENRAGKREKTPYEAYSINKERYEDLLSRVSHMSEMPFGKKRRFELRPEDISLDEFVTRQLNDTRYICREVSNYLLGLGCRVQVSKGEATSALRHKWALNEILSPDGSGEKNRADHRHHAIDAIVVALTTPTLFRQLSNLSAQTGFGIKNRRFLLEEPWRNFHKSVEDLVEAIVVSHEAHRKITGKLHEDSAYGPTEKEGQFVRRRSIEDLTAKDLPDVRDGAVKAILTQQLERFNGSAEKAFSMPVSHNNPSILIKKVRLNVRLNPEIVFPISRGGGTPFKYHNLGNNHHVEVIQDNASKKFEFEIVSAAEAARRVRREGSPVVKTDFGPAKKFVMSLCANDTVELSGKDGVRRVFRVKSFAKERDRRRIVLQLHNSASPTDFERLPPNGFQERKPRKLEVDMLGRIIDSRMNDKSNN

SEQ ID NO: 19274 - protein, 1044 aa, unidentified
  REGION 1..1044: note = Cas Enzyme sequence
MKYILGLDLGTHSAGWAILELDSAGKAAAVKDAGVRIFEAPVEPKTQAPKNLARRTARQHRRQLARRKQRRVKLTRVLQEAKLLPVNQVELETLLLDDNECNPYMLRAKGLDSELGGYEFGRVLFHINQRRGFKSNRKTSFSEVLKKVPAIAELIEQEESAESTKILQKQNKLSAATTGDDDDGVVKAGISLLRATIETSNARTLGEYLYLVKEGRASRPNRMSIEVPKKVRGLYTERAMYEDEFEQLWAKQSQYNQSLDAQLKVLVFDAIFSQRPLKTQKYLVGDCVFEYHRKRAAKATLEFQRFRFLQTVNDLEIKNTATRLYRKPTEQQRLNLLALLEKSEKVTWGRVRKALQIHSGETINFEEGGKEELLGDSTSSRIGKAISAQWEALSVEKRNELVADLLTIPQKDWLLVRLLDHWKFSPVEAYKLAILTLEPGYGAVSMKALRKLIPLMGGGLNYKTACDKLSYIEGANRKSTAGEVLPFPPNVRNPVVQKALYQVRRLLHAIVRKYGVPEIVTVELARDMKLSKKQKEESEARNRKNKRERDIARAALQSNGLPEPSHDDLLKYRLWKEAGCRCPYTGQPISMGMLLGKEGEVDIEHIIPYGRCLDDSYMNKTICLASENRAGKREKTPYEAYSINKERYEDLLSRVSHMSEMPFGKKRRFELRPEDISLDEFVTRQLNDTRYICREVSNYLLGLGCRVQVSKGEATSALRHKWALNEILSPDGSGEKNRADHRHHAIDAIVVALTTPTLFRQLSNLSAQTGFGIKNRRFLLEEPWRNFHKSVEDLVEAIVVSHEAHRKITGKLHEDSAYGPTEKEGQFVRRRSIEDLTAKDLPDVRDGAVKAILTQQLERFNGSAEKAFSMPVSHNNPSILIKKVRLNVRLNPEIVFPISRGGGTPFKYHNLGNNHHVEVIQDNASKKFEFEIVSAAEAARRVRREGSPVVKTDFGPAKKFVMSLCANDTVELSGKDGVRRVFRVKSFAKERDRRRIVLQLHNSASPTDFERLPPNGFQERKPRKLEVDMLGRIIDSRMNDKSNN

SEQ ID NO: 19275 - protein, 1044 aa, unidentified
  REGION 1..1044: note = Cas Enzyme sequence
MKYILGLDLGTHSAGWAILELDSAGKAAAVKDAGVRIFEAPVEPKTQAPKNLARRTARQHRRQLARRKQRRVKLTRVLQEAKLLPVNQVELETLLLDDNECNPYMLRAKGLDSELGGYEFGRVLFHINQRRGFKSNRKTSFSEVLKKVPAIAELIEQEESAESTKILQKQNKLSAATTGDDDDGVVKAGISLLRATIETSNARTLGEYLYLVKEGRASRPNRMSIEVPKKVRGLYTERAMYEDEFEQLWAKQSQYNQSLDAQLKVLVFDAIFSQRPLKTQKYLVGDCVFEYHRKRAAKATLEFQRFRFLQTVNDLEIKNTATRLYRKPTEQQRLNLLALLEKSEKVTWGRVRKALQIHSDETINFEEGGKEELLGDSTSSRIGKAISAQWEALSVEKRNELVADLLTIPQKDWLLVRLLDHWKFSPVEAYKLAILTLEPGYGAVSMKALRKLIPLMGGGLNYKTACDKLSYIEGANRKSTAGEVLPFPPNVRNPVVQKALYQVRRLLHAIVRKYGVPEIVTVELARDMKLSKKQKEESEARNRKNKRERDIARAALQSNGLPEPSHDDLLKYRLWKEAGCMCPYTGQLISMGMLLGKEGEVDIEHIIPYGRCLDDSYMNKTICLASENRAGKREKTPYEAYSINKERYEDLLSRVSHMSEMPFGKKRRFELRPEDISLDEFVTRQLNDTRYICREVSNYLLGLGCRVQVSKGEATSALRHKWALNEILSPDGSGEKNRADHRHHAIDAIVVALTTPTLFRQLSNLSAQTGFGIKNRRFLLEEPWRNFHKSVEDLVEAIVVSHEAHRKITGKLHEDSAYGPTEKEGQFVRRRSIEDLTAKDLPDVRDGAVKAILTQQLERFNGSAEKAFSMPVSHNNPSILIKKVRLNVRLNPEIVFPISRGGGTPFKYHNLGNNHHVEVIQDNASKKFEFEIVSAAEAARRVRREGSPVVKTDFGPAKKFVMSLCANDTVELSGKDGVRRVFRVKSFAKERDRRRIVLQLHNSASPTDFERLPPNGFQERKPRKLEVDMLGRIIDSRMNDKSNN

SEQ ID NO: 19276 - protein, 1044 aa, unidentified; identical to SEQ ID NO: 19273
  REGION 1..1044: note = Cas Enzyme sequence

SEQ ID NO: 19277 - protein, 1157 aa, unidentified
  REGION 1..1157: note = Cas Enzyme sequence
MITLGIDVGTNSVGSAWIDTEKKLIDVAVSVFPAGVEESETKRGAPSGQARRDLRSQRRSIARRARRKLRLRKLLTEAKLLPCKSEGWDVLVRQIDQDPRKPTPWHLRRLGLSEPLAPYEFGRVLLHLAQRRGARGVDWGDEEDQEAGRVKQAISETHQEMVRRNANTFGELMAAVYDQRRQAVPGKSEKYFHGAIRNREGQFEFHADRELIRQEFHQLWKVQRGFKSELSKILTDDLLRKLDDPTPDRIWSVRGALFGQRRIYWDAGTLGRCSLEPTDRLCPQCDMYASEFRVLQTVNSIKIEEKGQEPRTLDDGERAAVIQALTVTKTATTATLRKALKIHTPAKKKLFDLNLERMKQPEINTDWFGREIIEGVFGRENWKTLTDRQQASVNQALQKIDDQERLRQGAATWWNLELEQIDRLVDAWKKRPPLEKRVNLSRRAIQKLLPHLRDGQDVTTAKQNCGYSVKTSSLTKSQQHYLQKHTNSLPPAPYILNPVVRKCVHEVRRHVNAWLRKYPGTKPDRIIVEFARGMTLSSRDRNDQLSANRAREFERRKIEEDFAEYIRPGNPAHKVVLRVRLWTEQKWKCAYSNDPERVISRDQVGSGEGLEIDHIIPDSRGGGNSFHNKVLCFRESNRNKGNRTPREWMSREEFAAFERRFAYLNGRTRGKQGEYDLVPNPRKYQLMCSSGRSEEEWRESQLTDTSYAAKAVTAYLQDALYRNDVPDSDGKMKRRLFATKGQYTGMLRHDWGLLEDLMPQIDVTGTLSATDPRARREKKDRADHRHHAIDAVVIAFCGPELLTELGAKAQYAADYKSRTGYYPPRQPIDPHPDWGTKEEFRQRILNAVRNAVVAHRPVKRRLIGALHEATCYGVVDIDQRRFTTRIPLAKLTPKMLRLPVSVSSPDGRTVLQDPPLEKSGLVRDQELRRILRTQLTRLGVNPETFSKKQIEEVAKNHLVRMPSGVPIRRVTLLRTITEPVIIQNSAKPTRVYQGGNNHHFEILRDENSGKWVGRCWDMFTVAQRVRPPRGLPKLPMVIGRDLHRVLAASLLDEQTATFYRGRTFIMSLSQGETLYCRHKDRQYDHPDAVGYYVVVKLDKDRITLAPHWDAKREHTWPITPEGLRGLGPTPGTFPHKVRLEPWASTQEEFTGIIRLHD

SEQ ID NO: 19278 - protein, 934 aa, unidentified
  REGION 1..934: note = Cas Enzyme sequence
MSRGARRLLRRKRERKNNLRELFTANNLLPKIENGESSQKFDALGNPYNLRVRGLSEKLELPEIGRAIYHLAKRRGFLSNRKSGKSKDDGVVFEGIAEIKDGIEKNNFQTLGQYLETLDKKRKHYTARKMVEDEFEAFWTVQSEFYPEILNESFKSEIKHTIFYQRPIQSQRGLIGKCSFEKGKKRCDLARQEAQRLRYWQDINNLQLQDRESLNWRNLTPEEKAKLAEEFEKKKEITYKGLRKLLKLREDVRINLKANEKKLYGNKTAVAFRKVLGNIWDEFSDEKQNLLTEDFFRIESEISLENRLREFWKFSDAQLTELLKIDLESGYSRASLKAIRKILPLMQSGLRYDEAATQIYGDHRKLFDTKSSEKLSLPPKDLRNPIVSKALHEIRKVVNAILREYGKPDEIHLEMARELKLTALQKENLMKRQNENKKANDIAADFYKQKFGIENVSGFDKLKYRLWKEAGEMCPYTGEKIPPETLLDDQFVDVEHIIPYSRCFDDSYMNKTICLANFNRDVKKNFTPFELFGADEQKYFEMLQRIKDFPQGKQKKFTTKEVNFDEMVGRQLSDTRYICKEARGYLLQLYGNEQGVTVVAGGATANLRHVWGLNSILADGDVDEKNRYDHRHHAIDAIVIALTSRSLFQYISKLAGKNRELMKRNLSGFETPWENFLTDVDEAINSIVVSHAPVHRVRGELLESTAFGITSQEGVFVTRKSLDSLTLPAVKKIVDPTIREIVETRIEQFNGDLKKAFVEPLFHKDGKTQIKKVRIHETKSPETVVGIKDETGKPYKYYALGGNHHVEIFENPATEERKAVLVPRFKAAQNVRESIKKGNAPSPVSHNLGENWQFLFSLCPNDYIEFLGDDGKLRIYRVQKMSGGGKVVMIALPLTEARSEYVSGVSLTIQGKAFKKIIRKLQVNPLGHLAPAND

SEQ ID NO: 19279 - protein, 1029 aa, unidentified
  REGION 1..1029: note = Cas Enzyme sequence
MRYVLGLDLGPSSIGWAAVKLDNEGNYIGLADIPNGNDLTPAIGVRIFPAGIENINQGQREEPKNKKRREARSVRRMLRRRRARRLKLLVALTANNLMPSDIKKKEEILSQDPYKLRDKAVSEKINLFDIGRIFLHIAKRRGFLSNRKQTEKDKDAGLVKEAIERLANESGNKTLGQFWSEKLRENPFEAIRNRRSNYHWIAQRMQYEYELNKIWDVQAKFYPDILKDNFKKLLFDILFKQIDFELSNLKKRKVVGTCTLIAGKPRLSMASRKAQEFRLLQKINDMKVYRKGKEIPFDKEKLYQELMVSSNRDFKQIRKLLGLEEDDRINQEHSKSNKLIGNQIDAILSGNKFFGKKEWLKLDETQKENIWKEIQRYINNSRITSEQLLKNIKEKYELEIKDKTAIEKLSEPQGNLSYCEQAIDKILPFMRQGKGLYESIEAAKFVKGWTQQKMLPLPSRENGINIPNPIVTTVMFQLRKIVNALIREIGKPEKIVIEFARDLKASKDLRKEIIEEQNENQKDKEDCIKRIREYHKWDEDVKVSPVDVLKYRLWQQQKEVCPYSLRKIGIEKLLSTETEVDHILPYSMSLDNSMHNKIVCYSGENQTKGQNTPIDWLGETSEKFKKLADAIDKGEFNFDKAKRERFFVHNEEIAERYTPDRLLQDTSYIAREVRSYLKRLYSASDSEKCVKTTKGGITAELRNLWGLNAILRDGELGPKNRDDLRHHAVDAAIIAVTEPGIIKKITEKLKDNWPKRPSRARVDEPWNGFGVELAKAIEKINISHKVLRKVNGALHKETNYWKELNECQQKGKFITRKELNGNFTNSWAEQICDNVIKQLVKNRLLEFGNDPKKAFAEDNPLYLENENGKPVPIRKVRVWQTSSNMIQIRPNIWVEPGSNHHIEIFETKDKKGNTKYEGELVTTFEAYKRKISGEPIIQMEHEPDKKFIMSLSQNEMFILKLEDGLEVLHRVQKMSQSKGSISLIFRPHTYGGAMSDYDKPPLIQRKSPSTLFGRKVTVDPLGRIRWAND

SEQ ID NO: 19280 - protein, 1015 aa, unidentified
  REGION 1..1015: note = Cas Enzyme sequence
VFFSTILPVISERLFFYAGGMMTATLGLDIGSNSIGWALIDQEGQKLTDIGVRVFPEGVDRDTKGLEKSKSATRREARGARRMHQRRTSRKKLLIKELQAVGLLPKDAKELTSLLLKNHNPYELRKKGLDAKLETHQFGRVLYHLSQRRGFKSNRKSGQSKDDGKVKKEAGELQQRIDAANCRTIGEYFAGLNPDEQRIRGRYTFRTMYEKEFDLIWTKQAEFYPDILTENLKNKIRDDILFFQRPIRWDKDTIGDCELEKGEKCCPKGDWFARRFRILQDVNNLKIQNPDGTEDKPSTEQRKFILDELYKKKELKFEDIRKKLQLMETQLFNLEQDGKVAALKGDAFVAAMRSKNVFGPKVWDAMPENDKIKINEVFVELEDDELAKFLKNEYRFNDAQIETAMKAPLPQKYMSFSRKAILKLLPFMEQGCLTSEAIEKAGYSRAAEDKEITDKLPLPPNLRNPIVQKALFEVRKLINAVIRQYGKPKTIALEMARDVQGSSRQREEMHWKMLENEKRNKEVRDKLINDMNITRPSRDDIIKYKLWEECGRKCPYTGKSISQNALFGEHPEFQIEHILPYDRSLDDSYMNKTLCDAHENIHIKKGQTPYEAYNSNPEKYEQIKQNIKVLPYPKRQKFLQKEISLDEHIKRELNDTRYICRETIKYLKQLGIYVRGTRGKTTAELRHQWGLDGIFDELGSKRDDDHRRHAVDAAIVAVTDNNHLHQLAKSKYAVKGVSFEPPYPNFREEIRESVKQINVSHRVQRKVSGKLHEETSYGLTGRKDEKGQNIFVYRKPLEALTIPMVEKIVDPDVRDIVKRRLTEKGIDINGSERSIPKEVWKEPLYMKTTKSDKKVPIKKVRITSVSSNVIEINDELGKIYRVVEPGNNHHVEIFEYTDEKGRTKRDGRVVTMFDAVQRSRQGKPVICKDYGDGRKFVCSLSINEMFLLKTENGDSVLHRVQKITQNGSIILRPHIYSGKVSDSDRPPLIQRRSPNTLEGSKVTVDMLGKICPAND

SEQ ID NO: 19281 - protein, 1229 aa, unidentified
  REGION 1..1229: note = Cas Enzyme sequence
MAVTLGLDIGSNSVGSAWVDSDKKEIVLGVGVFPAGVDETENKRGSPKNQARRQKRSQRKNLARRAARKSRLRELLTSAGLLPADPIERKTLMETDPWVLRRKGLTQPLNPREFGRVLVHLNQRRGAWGVQTDPEDQEEGQVKEAIDHLKAAMREYDAKTFGQFIADLMDKRRHPVRVAKPRRPKCHFDDPPPSCPPNCEKQDQNCRFYPGAVRNRRDTFEFHATRDLIQKEFDLLWDKQKELGGELAGLLTDELRKELDDPNGNETWRQRGVIFGQRKTYWNLGTLGRCDLEPSDRCCPLADMHAQEFRVLETVNNIRIEERSKAPRALTPQERANLIAVLREQKTASVATVRKALNLNRKAVKEFFSLNIERDKDREINTDWFYREIVRVALGEDAWARMDGGKRESVNRAVLKFDPESPADTKRLRTGATDWWGLPPEAADRFIEAWKTRPRLEMRLNLSRRAILNLLPYMQEWGCSVTEAKQLFAEDGDNNATPEQRERYALGGSILTKAGRRFLRKHPDLLPPAPMLANPVVRKAIHEVRRHVMAYLHKFGRKPDRIVIELAKSARQTEEVRNKILSANRKREKERKEIIAEFGLAGQSLSQQRAAIERVTLCREQRGICPYSNLKPGAQGELISDDQAAKGEDVEIDHIIPLSRSQDNFLSNKVLCRRRANRGKGNRTPKEWLTAEQFALLEQRMAHWEKESPRKWENLHRDPLPEKEFLASQLAATAYAAEQVGTYLSDSLYGGEREGRRRVFFTKGTYTAMLRKDWQLFQTLRDANEDAAVDTTSGPQQPGDPGKKNRADHRHHAIDAVVVALTGPEIIQDVARLAAEREEYHERTGHWPKRNPLPPPWSEVEDFRRQVLSLLFDVFDKANTDGTRAEGAETGTPLVVSHRPAKRKAKGFLHKEDLWGAVDEEQGVFRIRCAVADLTPKMLQMPVDEDDSQVHQRLVRELKRGGLDQSQAKTVAGERLRHGHFTRCKMNPPLGKGGLVRDWDLRHAIRKCLEGNNMDPDNFTPKQMQDFARSGKLRMPSGVPIRTVVTIGPISDPVKIPVTDPYTGRQAVNLKTGRPLFRYHISRNNHHVEIMQDDKTGNWFPRDGRCVTMFEAAQRVRPSKNSNRVRAKSPDPVNRADEPGQTFVMSLSEGETVYATRPDRPERPDYSVVVKLDSNRIYFAPHWDAQSEKEQDRWSTTYPNLKSCGPAKDTPPYKVRVNPLGEVAPLHHD

SEQ ID NO: 19282 - protein, 1183 aa, unidentified
  REGION 1..1183: note = Cas Enzyme sequence
MTKILGLDLGTNSAGWALIDTSNNKIIDAGVRIFPEGVNREKGREVSKNETRRMARQRRRLYFRKALRKEKLVKVLTPIGMFPNTDNYRVEVQKLLLDKNLIEFFRLDPYQLRKRAAEGERLTLLELGRIFYQFSQRRGYRENLQAPLDEKSNLNLGDKELGKVGIDDTLKEMRNQTLGQYLAGLDPHKQRIRNRYTTRKMFLDEFEVIWESQKKFYLDVLTDDLKKGLGEPNHGIIFFQRPLRNQSFLRGKCSLEADQDRISDSAPLFELYRMFAFINNMRIYGRELNIEQRSKILNLFFVSGTPKTVESIKKVLLAKDEISGLNYEDDVKLPSCKSISLICDAKGKEYRNNFIRLIGSFDEKIINQELEQIEKIWKIKKEARDSTWLKHHLHAKFGIDPDLGQKLVKARFSDKFGSLSRKAISRILPYMLKGYNLSDAIVLGGVRNVYGNKWQNLTSSETTLIEDNVLSVAYTDKEELALDKVTQVISQFNAPTNRLNKLYHASDQRQRGDQIQKEDLGTYINKMKNPIVRAVLFETKSLVEAVIKQYGDLDAIKIEMARELKKGKKEREQDQIRNSRNERENDECRAQLLELGFATSGSNILKMRLWRECKNTDPYTGETIGIDDLFIKNIYQVEHIIPYSISLDDSFANKTLCRSEKNQEKGNRTPFEAFGNSGIWQAMADRAFKLLPYPKAKRFVSPKREDLEDFISRQLNDVRYITRECASLLNAFAPTSITQGGVTGILRKSWGLNGIINQRYLLLDEYKPGRYCAAIDEYDRVDENTMTAWVKDFNTRKTIEANNSKKGISVWGNVNKNFFYPDKTRLDHRHHAVDAIAVALSTASILQKVSKLSAQGVEVQDIDVEMPWANFYSHAEKAVNNILVSFKNRKRITSNWRRKLFNKNTGKIIIKEGKVWYGAGISARDQLHNETYYGLYKGKDEVEYLHNRVALESRKNFKQIDEIVDQAVKKAVLRHLESLGVDISDPKFEVPKSTPENPVYFKIDEEGRKRPLVFLEGKSGAIPIKKVRIKGISQNKIQLHGINRYVEPGNNHHALIYLDHAQSIQSVTVSFWEAVERLKQKEPIIKLPENGKEVKAVFMTNHLFLLGIKEEIDWSNQNLLSKHLYRVQKISNWDFNFRKHFASTLIYDAELIRIRSSKGWLINNPIAVKIDKLGKILPLQVND

SEQ ID NO: 19283 - protein, 1183 aa, unidentified
  REGION 1..1183: note = Cas Enzyme sequence
MGKVLGLDLGTNSIGWALINKVENKLIDAGSRVFPEGVNREKGREVSKNEDRRLARQRRRLYFRKSLRKQKLVQVLMPLGMFPQSAHFLSDVQQLVLEEELLYFFRMNPYELRAKAAEGHKLSLLELGRIFYQFSQRRGYKENLQSPLDEKSDLNTGEVESGKIGIEETIAGIGGSTLGSYLSKLNPHIQRIRNRYTTRKMYLDEFELIWSKQASHYPNVLTGDLKTNLGDPVIGVLFFQRPLRSQAHLRGKCSLEPSKDRIADSAPIFELYRMFSFINNIKSAERDLNFDERSRIIELFISHGPPKKFDVIRKKIVKGDSNIKLNFDDDVKIPQCKTISLISDALGKIERKQIISQLSNQSVKDVFDILPRFEQIWKLKREARNPEWLQSKLYSDFGIEPEEAKKLVKSRFSNDFASLSHKAILNILPYTIQGHTLSDAVILGGVRNVFGSKWESIAPEQRTIIEDNVLSVAYTDKNELALDKVKFILSSEFKAPMNRLRKLYHASDYRQRGGIVKRQEVGAAILKIKNPIVQSVLFEVKALVEDIIKHYGEIDEIKIEMARDLKKSKKLREKEQIQIYKNERENDECRALLNENNLKPSGANLLKMKLWRECNRTCPYSGETIGLYELFETNKYQVEHIIPYSISLDDSLANKTLCKLELNQEKGNRTPFEAFGKTGQWEAMKDRAFKLMPYIKAKRFVDPTRKDLEDFIERQINDTRYISRECSQLLNAYAKTSITQGGLTAILRRSWGLNDILNPRQLLLDEYKPGRCCAAFDEKDQIIEDTLTAWVKDFKLRKKIEDDLAKKGKVAWGMVRKQFFYPEKSRLDHRHHAVDAITIAFSSTSLLQEISKLSGQGAEVADIDIELPWNSFHSDCRRMIDSILVSHKNRRRVISNWRRKLFDKTNGKLIIKNDKQWYGSGIASRDQLHKDTYYGLYTQKDGTQYLHNRVALESRKKKKLIEEVVDPGVRQAIYDRLKAIGVDTDQKDFDVPTESADNPVFFSTDADGKKVSLVFMPNKNAEPIPIKKVRIRGISKTKIQLHGINRYVEPGNNHHVLIYRDHNTNLNSSIITFWEAVERTKQKTPLFQLPADGAESIAVLMKNHLFILGYEGEIDWNDQRKLKDYLYRVQKLSDGDWNFRKHNASTLDFEVEEVRVQSLKAWNKLSAKKVILNRLGKIIQIID

SEQ ID NO: 19284 - protein, 1237 aa, unidentified
  REGION 1..1237: note = Cas Enzyme sequence
  REGION 1227..1229: note = misc_feature - Xaa can be any naturally occurring amino acid
MCPLTQKELDGWVKWDKSKPSEERRRFPQSPRFREWLALDPYRLRAEAVDTPLEDDPDGGFTAREKLGRILYSIIQHRGFLSSRSGKEDGSIYTSTMEKDGKVGIDETRAALGDRTLGQYLYSIAPKEGDPFSDQTERVRSRYTLREMYVEEFDRIWTRQAPVLGLDREQVETVHYRYFTGKSDSYEARRRLERYRTKDPSAVIETLSGDEHRFVYKTTTSLKEHLAGKIWYDKDGTIRFVSKESTLFWQRPLRSQKGMLDKCSLESHKVKGRGTNRFITQGPTVVSASHPYYELYRVLQTLLNMRTRDRKLDLMRLQSMLDKLLTYGKNTKVSKLKKDLRLTLDLNFPDDYELPGCPTISGITKLLDSKKMPSRKGDASPVDRLVIPFDLDLYTRIWEKLFFYDDNHLLAQGLRGIEGAAFVEDLEDKLAKLHLSEDYGNLSLHALRNILPYLLRGEELYSAVLLGGIRNAVRDDALVDDHDDALRSWIHTQGPLARGEMIDRIVALLQDPDGPFHLSTPELKLRQRLYHPSQGTAKHRLMDQLPPVENLRNPMVEQALWAMRRLVNYLLNNYRSTIRPDFTFDEIHVELARDLKLSTQKRAEVRTRQKKAEEDNDMARDYLRSQGLSTSRENLQKYKLYMELAGRSMGVVTCPYTGKVIRGLSAALDGNSMFQIEHIVPRTMTYDDSFANKTLCDADFNRKKGNLTPWQFYQQDPSPKLWGADSWEEVEHRAFRLLPYRKATRFVSKTIEDQLSGDQLVDTAYISRKAKEYLSYICPQDHIRLYPGRVTARLRQLWGLNSILSQGPTITKGQLPAELSLSGDQIPAIVIGKKKNGVLSRILPKYTSRPEREESDVVLLVRVQKGKVYSARYSELLLSWDKAASLADGTYYFVLRRSEVVRVERMFTDQPRLREDQLRARVTIELNKDGQPKLSSREMDVRILKDVPLPTAPGNYWLTIPLVSVPEVTPEHPRAKVATDTIKVSGSVEQGVFVSKVYRQGGVAMEDGLAQVILTPDLSEVSFTKIKLDAPAITSGEVVLTGAIDRSDLFVCDQDDELRVQIDSFDEPGKYYAVFSFDPTASYILSYDQTPNLSSDEVVLEGDLIYNDKDDRVHFSPAKNRDDHRHHALDAIVIACTGQGVLTAMSTYNAHADDYERGTGTKPTFASPWEGFRDDVREAIEAVLVKHKQSTKILNKVTKQITKDGRTHRSKGLAVRGKLHKETFYGXXXLLWAATVT

SEQ ID NO: 19285 - protein, 1129 aa, unidentified; identical to SEQ ID NO: 15512
  REGION 1..1129: note = Cas Enzyme sequence

SEQ ID NO: 19286 - protein, 1208 aa, unidentified
  REGION 1..1208: note = Cas Enzyme sequence
MYDPVKQRHYIQGPRVAAVSHPTSEFHRALQVLSNVRVEGRTLYNMGLFQTSLDFLCSKNSNTIKVADLKRHLIVSKLNYDDDQDLPGCPTIASITDLFEKGALSYHYGETDTIYIDIWQKLLFYNDERLLEKSIAKYAKGKRLKLKADFAKRLEGINLVDDYGSISIHAMDNIIPFLLQGRSHTEAIFLGGVKNAFGSRYCDFEKKEQMWQELLQIINEPASKGEKIDRLIEFLSDPDEQTGLDEKRLRMKLYHPTQSVQKIEIQNRLGKVDNLRNPIVEQALWAVRRQVNALIDQMIKQTGNPNFRFDRITIELSRDLKSSKKRRDKIQQEQKANLAENEEAVMWLRALKLPVTSDNILKYRLHKELRLKGDGIARCPYTGKDIGLSQLYDGNNLFQIEHIIPRSISLDDSFGNKTLCESNFNREKGNMTPYEFYSVNSSKTLWGAEDWDEITHRVRQVLPARKASRFLSKRSAQEQLEGLPSKMLNDTAYMSVKAREYLTSICGDVRTVSGSITANLRRLWRLNKILGETYECVQGAVSQELAAREEKEVYAILDTKSKVITRVVPKFNRIPDRTEDEIRIPVVVKGTKLYRDGKEYPKPAHLDLNGVTGKALLTYHAVGGTPHCQPLFNPRPSNKGVLVVTATRSGKKNLISNDIDVLDKIKKSRYPTDPGKYWVTLQLKEDPIWELPSNKKRVVANAVRVPGRLKGNTFVSPFFKTEVEDSVVNMEEHRNRTAYLNLDYDTAEFTKMLRPAPEVGEGELLLTGVVNHGSLLLDQCDGKTIDVQHLNLKEQTRYYVLLQYGKNLSSKERVTIYPIYNKAPKSRKDEVLLEGKLFALDKNKSLYALEPVKNRDDHRHHAVDALVIALAKQNYVTELSTYNRQNDSRRQGEALKPRFDLPWDGFREEAEQFINDILVVHKKKRVVPLSKVTRKITKNGKVYTFKGNAVRGALHKATIYGRRKAPGQTDYGYHLRKGIAEVTNMKQLNKVVDAAIRKEMLRILKEELGLDTSNPSLTFPKKAFIDENGKTKVYLPNRNGGEPVPVKKVRMCDNLSNAVRLKEINQYVDLKNNHHVLIYEALDGRLQESVVTMWDVVDRLNRGEEIFQLPPDGKRILFKLIIDQMYLIGVKRDDVIHNLSNTDYLIRYLYRVQNLSSVDYVFRKATASTINYDREMIRVQSLTFFEPDKDNIHSVEITLTGQVILKDD

SEQ ID NO: 19287 - protein, 1214 aa, unidentified
  REGION 1..1214: note = Cas Enzyme sequence
MTKLTFSFDAGTNSLGSAVIDKEAGKILHSGVSIFPMGVNLEKGTKEESRNLIRRLKRQGRRQNFRSRMRKEKLAQLLIAKRMFPDVDTLYQKYFEGDGQSFRDRWEKVIRMTPLPEELQDYFHKDPYQIRHRAFKEERLSLHEIGRALYHFAQRRGYKETLQDDSEEKGKIYQGDPESGKTGIDETKELVAQFGTLGNGLYHQDPHDKRHRNRYTLRSMYTNEFDTVFRGQQPYHPEVLTEELYQKLGGIHPSDTQQNGVLFYQRPLRSMKHLIGKCSLESGKPKAPASTLEFERFRAWQTINQIKFEGHELEEDEKRLLLDYILSAKKKLKFEQLAKKLKKPVERFNYEPKDSIAASPVHANFQSIFKKKWDQFSDKEREDLWHLKYWAEDPEWLEKQLEGKYGLSEEEIKAFKGFKMTKDYANLSRKAIKNILLFMEKGYRYDEAVLLAGVRNALKPEWFDELELYEQNEMEDRVLKAARRKEKGSTSIDRVRAYLSKEHEVDEKHLDKLYHHSMKEEGDGSMKYLPAPEELKNPIVMQALYQLRKVYNALVDEFGEPEEVRIELARELKTNKENRAKIRKRQQELEVENDEIKERLDKEGVPHSPANIQKLKLMKEIERIAGRFANPFRPDENFGITKSFFSEGAVQVEHIIPYSISMNDSLANKTLCDADTNRLKGNKTPYQYFKEHRPDEWEEIKQRIFKILPYQKAKRFVSEQNPDADDFISRQLNDTRYISRQAVAYLKKTCKKVEITEGSVVSMLRYYWGLDGVLTPSLTLEAPDGEYLAALDERDDIISHTVYHPQTKKKDTVALAKLGEVVHGQVKDGRFYLIKQRDDHRHHALDAIVVAFANRSYLQKVSTLLGEGLERKEIKYSRDHQLEKPWDRFYTDVRKAIENVLVHHQHNDRVVSKVKKRLYNHEGEVKRKPNGEEMFAEGLAARGQLHEESVFGMHAGENGELYFHKRDSLNSIKGYKQWRSIVSPRVREAIYERVKELYPKEKLVNGKLPETWSISDLDKEDQNHVFFITDEEKNPIPQIFLGNKSGEPVPVKKARFREKIGRPVQVKESINQYVKPGSNHHCMAYISAGNELQFEFVTFWDAVERKKQGAPLFQLPAGGKEVKNIFLRNRIYVLEIGSDELDELIEKEQYSAIGNYLYRVEQMSPASYYVQFRKHTAARLDNKNDWRGFSSAKAYGLLNPQEVTVDVLGRIKRR

SEQ ID NO: 19288 - protein, 979 aa, unidentified
  REGION 1..979: note = Cas Enzyme sequence
HPEVLTEELYQKLGGIHPSDTQQNGVLFYQRPLRSMKHLIGKCSLESGKPKAPASTLEFERFRAWQTINQIKFEGHELEEDEKRLLLDYILSAKKKLKFEQLAKKLKKPVERFNYEPKDSIAASPVHANFQSIFKKKWDQFSDKEREDLWHLKYWAEDPEWLEKQLEGKYGLSEEEIKAFKGFKMTKDYANLSRKAIKNILLFMEKGYRYDEAVLLAGVRNALKPEWFDELELYEQNEMEDRVLKAARRKEKGSTSIDRVRAYLSKEHEVDEKHLDKLYHHSMKEEGDGSMKYLPAPEELKNPIVMQALYQLRKVYNALVDEFGEPEEVRIELARELKTNKENRAKIRKRQQELEVENDEIKERLDKEGVPHSPANIQKLKLMKEIERIAGRFANPFRPDENFGITKSFFSEGAVQVEHIIPYSISMNDSLANKTLCDADTNRLKGNKTPYQYFKEHRPDEWEEIKQRIFKILPYQKAKRFVSEQNPDADDFISRQLNDTRYISRQAVAYLKKTCKKVEITEGSVVSMLRYYWGLDGVLTPSLTLEAPDGEYLAALDERDDIISHTVYHPQTKKKDTVALAKLGEVVHGQVKDGRFYLIKQRDDHRHHALDAIVVAFANRSYLQKVSTLLGEGLERKEIKYSRDHQLEKPWDRFYTDVRKAIENVLVHHQHNDRVVSKVKKRLYNHEGEVKRKPNGEEMFAEGLAARGQLHEESVFGMHAGENGELYFHKRDSLNSIKGYKQWRSIVSPRVREAIYERVKELYPKEKLVNGKLPETWSISDLDKEDQNHVFFITDEEKNPIPQIFLGNKSGEPVPVKKARFREKIGRPVQVKESINQYVKPGSNHHCMAYISAGNELQFEFVTFWDAVERKKQGAPLFQLPAGGKEVKNIFLRNRIYVLEIGSDELDELIEKEQYSAIGNYLYRVEQMSPASYYVQFRKHTAARLDNKNDWRGFSSAKAYGLLNPQEVTVDVLGRIKRR

SEQ ID NO: 19289 - protein, 989 aa, unidentified
  REGION 1..989: note = Cas Enzyme sequence
MANYVLGLDLGANSVGWAIIAQDGGQTTDGKRVLTGVRVFPEGVDKLNTKKEKPRGQDRRLARGQRRMHQRRRHRRQKLLAVLRSAGLLPQDSGDLLNLLASDPYPLRAKGLDQRLGLHELGRALFHLSRRRGFKSNRKQEKSKEEGDVAKETAELRRKIDESGGRTLGEYLARLGEHFRHDSLESERIRNRYTLRSMYEVEFEKLWPAQVPHYPDVLTNELKEKVKDAIFFQRPLRFDPDVIGQCELEPGEKRCPRAHWVAQKFRMLQDINLLKVIDPTGEERPLNARERATLAEALAPKKEMTFDEIRRLLGFLESQTFNLEELSKRKSLKGNPVEAALSKKPLDKWYQDLPQGTREKVYDSLAEEQDEQKLRALAMTEWALNDAQADKLLKITLPTGHFKVSLKAIRKMMPHLQSGHIYSEAKELAGYGFVPQGEVRECLPPVEEAVKHLTNPLVRRALTEARKVVNAIVRDFGKPGEIVVELARDMKNTAEKRRELFWENVERREQNDEIRKRLVSEFNLASPSRDDVIKFRLWEECARTCPYTGRSIPANKLFTPEIQIEHIFPYSRTLDDSFMNKSLCYEDENRRKHNRTPYEAYSQDQPKYDGILQRTAKFPYTKRRKFSQKEVELDECVRRQLNDTRYVSRAAVGYLRVLYDDPQKVRCVKGGTTAELRHQWGLDEVLGLKGEKNRDDHRHHAVDAVVIALTTRSALQRLSSVKYNPQRPRFDPPWEGFREEVAASVTVINVSHRPTRRLAGALHEETAYGPGKEPNTFVHRVPVENLTGNQVSQIRDPVIRKIVQEAAKERGLGKALVNPPLRMPSGVPIRKVRIETVEKTAFHIRTDDQGRPIKCLLPGGNHHVEIFELPDGSWTGRAVSRFDANQRLLQGKPVVNRNPSDGARFVMWLCNNDMLLIDKNSQPLLYRVQNISVSSPLLVLRLHTAARTDDKEKTIKATRHLVATWDSFRKLAPKKVTVGFLGRVHPCND

SEQ ID NO: 19290 - protein, 1039 aa, unidentified
  REGION 1..1039: note = Cas Enzyme sequence
MVKQESKRKVLGLDLGSNSIGWALLEEENGTPNKIIDLGVRVFPKAVEEKTPTPKNQKRRNKRLARRVIQRRARRKMRLLRYLISLELLPKELLDHDQPEIILNGLGDPYSLRAKALDKPLSKFELGRVLLHLVQRRGFLSNKKITLGDMIDDPDVQEVLEEFEKEEDTSSDRAKEETAFKKDISLLKEKITSNKCRTLGEYLATIDSSQCRRNRFHDGGHLRTDRQMYRDELDLIWEQQTEHHNVLSEKVKGEIESIIFYQRPLKLRADRIGRCSLEPSRKRSKIARLEYQRFRYHQDINNLNYIDPYSDTIKQLTDEDRERLIEFFEVTPSITFPKIKKLLGLDRGIEFNLEEGGNKKLKGNITACTVREVLPDWDALNYDKQIELVEDLTTIQKKSVLKKRLIEHWCFTPTIAVNLCMLEFEPGHGNLSLKAINLLLPYLIKGYLYSDARQAAGYGYDQEEIAIAERLQRPPETTNPIVNKGLHELRRVVNALIAEYGRPDAIRIEMARDLEMNTKRYKARMKQQRENTKANDRAIDTYQGIAQKNSQLGLSRYPSRNDKIRFRLWEDQDHLCAYSCKSINLTTLFSAEIEVDHILPLSESLDDSYMNKVVCFASENRQKEQRTPIDAFGNNTKKWEQISQALSRWNKKLNSKKNRFYMKKADVQKRDFINSQLNDTRYISRVALEYLSSICSDISTSKGVTTSWLRHQWGLNSLIGESDKKERTDHRHHAIDAVVVATVDRRLYKTLVGSAKEIEGSQTGITMNDLYLDPPWSSIRSDLEQQLEGVIVSHCPLTKISGALHKETGVGFIKGKGCVYRIPLNTEFKNTHASKIIDNSVREIVINHMNQYNGDSKAAFADGVSVFHKDEKTPIKRVRILQSATSLSKLKQSKFGVRNQQGEVFKWHAYGNTHHVEIIKNNKNGRVKGQFVTMMEAAQRARGIGTEKQPIIQTKHGDDIEFLMALHINDLVSIEEDDECKYFRVQKLEGDGNQISLRLNTASTISNDTEKRRLTIHKPLITEKKLHKIRLNVIGKIIN

SEQ ID NO: 19291 - protein, 1010 aa, unidentified
  REGION 1..1010: note = Cas Enzyme sequence
MESNAGISQLHCFKRINKQGTVCKERFMLSTATLGLDLGTNSIGWALVRFDENQQPFELIDCGVRIFQEAVEAKTRAPKNLARRKARGARKLVARRRMRREALAKLLSDNGMLDPKLFFEWNEQAVNDLGDPYSLRMRGLDEKLSLVEFGRVLMQLCKHRGFQSNRKSKGDDDGVVKKSISELYQKMKQKGVRTLGEYLVAEPTKRGRYTHREMYKDEFEQLWAAQATHHSSTLTATLKVKIHNTIFFQRPLKLQKHLIGKCPFEPDRKRAPRALLEAQRARLWQDLNNLEVKNPITRAYRKLDTSEKSKLAALLEKQKTVSWGKAKKTLGLHENELFNLEEGKKSELIGNRTAYAMRDAMNDAWDAMPIDKQRELITDILTIDNDAGFLRRMREHWKFDEKIAQALAQTELEPGNGRLSSKALHKILPELQKGFRYDEACKEAGYNHSKPTQTKVLPKLDEPPMLRNPVVQKALYETRRVVNAIIKKYGAIDVIRVEMARDMKLSAKQKEAAQKQNKANEKLNKEATEIAAEHGIQHAKRDDRLRYRLWKECALTCVYTGKTISQEMLFSGEVDIEHIIPYSLCLDDSYMNKTLCMSEENRKVKKNKTPFEAYSGNENNYLQILARTKDLPHSKRRKFEQKDVKTDDFVSRQLNDTRYICVEVKNYLTRLGRPVEVSKGAATSDLRWHWGMDLLLNTDGEYKKNRADHRHHAVDAIVIALTTRSLFMKLSHKFDVGYLLPRPWASFDKDIRAKVDAIIVSHAATRKIYGALHEATAYGAGFIWNKNKKGESVEESIFTYRKPLDDKFTEKHAASIRDERVKEIVLARLAEFDGDSKKAFGNSDYPLLHEDGKTPIHSVRVVTRMNPATVHGIKDKSGKPYKFVSYGNNHHVEIIEHVETGKRRGVFVTAMEAARRVRIAKLAVTQKDHGTDWKFVMSLSINDSVRLNDQIWRVQMLSGGEQFVIALKGNRDTLSEYNAHSKWLKSEGATSNIQAKVSIDALGCIATCND

SEQ ID NO: 19292 - protein, 1039 aa, unidentified
  REGION 1..1039: note = Cas Enzyme sequence
VGDVKRRGDFLAQLVGEFGMARRVLGLDLGPNSIGWAVLTLDEEGEPCGIVDAGVRVFPEGVDRDTQGREKSKNEQRRLARGARRGRWRRSRRKAKLGAMLREHGLLPEGADELKGLLRTEPYSLRAKGLDEALTRFELGRVLFHLNQRRGFLSNRKEQGAKKERGVVDESTAALEKAIEDVGCRTLGEYFHRIGSEGRERIRGRYTLRKMYAEEFEKLWQKQREFHGDVLTEELKRKLKDETIFYQRPLKPADHLIGKCECERDEARCPRGNWLSQQFRILKEVNNLEIRRSDGSNDRLTEDQREKVAEALGRVKEMTFDKIRKLLGLLESETFNLEESALGRKGAKRSKLKGNTIEAALVKAFGKRWDHLDEEDREQKREGVFEVESPEAFRAMVEGDWELDEKGVAGLMGVDLPSGYGAYSRKALEKMLPHLMEGKNEWEAKAACGYDRAEALATYDRLPRPEKDDGKGWVTNPIVVQALYEVRKVVNAIIREYGKPDRIVVEMAREMKRSAAEREEMILRIRDNEREREASRNRLREEFGVGNPSGTDILALRLWEQQGHLCPYTGRCISDTPLRAHFQGKGELDIDHILPYSRSLDDSQNNKVLCFASANREKGNQTPREWLEGKPEYERMLQCVESMRGSGMAYGKRRRFSQKEVELDQFIARQLTDTAYISREVRRYLEYLYSGDRVEREKHVWTTRGQVTADLRWQWGLDGILNPQGDGKKLRDDHRHHAVDAMVVGMTTRKRLHGLSQTRGPAKVSFEHPWVNFWDDVKGVIEGIHVSHRVSRGVAGALHEETNYGPTGRPDTFAYRVDVKALTGAMVEKIRDATIREIVRQRCVEKGFDPAEVGSKKFPAEVFAEELRMPSGVPIKRVRVETTMKPGTYEFFNNPDGKEKYRAVKLGSNHHIEILEITEGNDKGKYAGVVVSTFEAAQRTRRREPIVNRNDRNGMRFVISLSKGESVVLKDAGGDHLCVLQKMSGTREPSSRMDLSFRLHTDAREVSKSKPHSRITSLKTLAFQKMSVDPLGRIHRAND

SEQ ID NO: 19293 - protein, 1266 aa, unidentified
  REGION 1..1266: note = Cas Enzyme sequence
MKTLGLDLGTNSIGWAVIESSNGVTSLLDKGVHTFPKGVGDSKSGEYSLAAERTGYRAARRMKFRRKLRKIGVLKVLVSNGFAPFMPDESLKKWQNEKIYPTETAFREWLKTDDAADQNPYSARNMAASFKLDISEEKNRFLLGRAFYHMAQRRGFKSNALDSTEDSDGKVASSIGALQEAKGDLTLGQFFYREFYGQHGKQDKAGALERIRSRYTDREQDYHAEFKKIVELQQLSPDFAKELEKELFFQRPLRSQRHNVGKCPFEKGKTCAPSSHPMFEIFRMLQFINSIRIKTPEDNEPRGLTEEERRKLEAAFHVKENFKFAKLAKLLIPSKKAFGRLGDRETTASYLFNYHPEQTIASCSVIASFMNLFGTPKGDYPALLAAVRSAYSLAKNKSPEECLYDLWHVLFTFESQEKRIEFARSRLGFDDDKASEFNKIKLPGDYAKISIKAIRKFIPLLEAGNIYSHAAFIANIPALFKNASMPDLSSLYDEVFKVIDRVGHENNIIAAANVLVSKARDDSRPWNYNAESIREYRDVAESSCAAAFGTKKWGKLDESKRAAVVNELIDIFGDRQSSNSERRKFFKSTTIKESINSFLKGKFGFSDEELQVLYHPSAMETYRKADPAPDGRIYLGDPSLSALKNPVFMRTMHRLRALINELIKRDVIDQDTRVHIEMARELNDGNRRNAIYAWQRQQEKNNATYKAEIEKYYAGKNISHIASDTEILKYKLWVEQKEECPYTGKKIGIHEFLGSNPVYDIEHTFPRSRCWDNSDENKTLTHRDFNRKEKRNKIPAELPQHDLILQRLQSFGWKDRIDSLEKQIAKLKNVQVSVKAERDKIVSRRHLLSIELNYWKDKLSRFTEKEITPGFVNRQLNDARIICKYAKMFLETVFDRVVSLKAVALKPCYEAWGLDDKSRLLHANHCIDAVIAACLDREMYKIIAEYFHQYDQARFDNKAAPRPPMPWKNFPEDVNFILLEELTPTMHQRDKLFKKTKRKIRNKDGSVAFVTGDSARGQLHQETFYGAVAENGKIRYAVRKNINDLSKADIPKIIDPVVRKIVEDNFDKIAANQIIWMNEEKHIPIRKVRMFAKPTEPIVLKEHRDASKQEHKRNYYVTNSANYGMAVYGKLDGDIKSKQVVGLLDAVKARKEGENIFPETDAKGNPLKGVIQVDGLVLLYRDSGDELKNMSSRELNKRLYRVVGIEGVGRLKLRHNSAAAQPNEETGDANIDYDKPKRRLYCRTKGMLVEHYDFEVDILGNISFLR

SEQ ID NO: 19294 - protein, 1168 aa, unidentified
  REGION 1..1168: note = Cas Enzyme sequence
MKGCVLGIDVGVASVGAALIEVDVVNGVLHYRGIIDGVSHIFPAADGAAERRLQRSIRKRYQRQTHRLKDLRGYLSNLFAVPPGFDDVLPDAGQAYIAACKAAGEPAILSANSRFRLRALALEQKLTPGDLARTILHVAKNRGMRLTRVLESGKDDKGEKQARAEASGMAQEAEQTRSLMVESKATTPGSFLWQREQDATKGNQRPALRNRKGRDGGFLFTRQQIEAEFDTLLAKQAEFYPDILTADVMETLRVRVFWEKDAPEPEIGPCLYFPDRERRLPEASDLFQRKRIYEQVNSLLVKFSNESKERLTPDQRDRLIAELMTGKDLGGSEIKKILELDKGRKLSLDAGYGKRKDAVKIKGHRLAHEFAKVPELQAVYADLTPERRESLVELLRKERDREIVVRSLCDDFGLSPVAAGDAVEEVILPAGYAATGPTATRLLFETLRDEVMEDGPNAGRVMFPYDAEQWLDQKQGFQKAGAQVVAASRLPYYGMVFPHLVRGRMKPEDRGYPAATNEEKFGRIPNPVVHVSLNRIRKVVNALLARHEKTHGLPLRVHVELAREMSMSEEEREAYARQTTKQYKQNSEDDREIVRNGGIAGRKARRMLRLAREQGWKCPYSLKQIEVNRLFQDFDLDHILPRSQTLDDSLGNLVVAWRDANRVKGQQHPHKAFGDGKDYKRDDGVLISHEQMIENIRNTKGMAHKAWRFGPDAMERYADDNDFTERFLNDTRYIAKWVAQYLQCIIRPDSSGKTKPVVALNGRVVGDLRYGWGLKDMVEQIALDQEPDGYKADAKQGTGKKNRDDHRHHLLDAIVAALTPPRLVQILKIEAKRQAEANNGRIGQLTPPHPWEHFAQDILLFLAESRANHKPDRNINAGLHEATCLGVVARLGDGSYLVRNRKRLVPGMVVDPKKLEDAICLPERYINALAKGLKDGSAHVFWPSRDPVGDLKRIATDLKDVHQAIMALYDQQPEAETVVRDAGEPDASTQTRVIKPEERLGRAIARYVDQTGRRTVRVYGMSQAVIVAENDNGVPSRSYRAGNNAWLDVYRGADGKTVYEIVRNIDAMKPGFTPQWQEDPENTALLRLYQGDTVELTDKEGQRRICVFRENSDGDWSFQPVNLALNVRDTPLRSRLRFSFNRLLQADPRLIVVDAAGQVVWRSPKRNW

SEQ ID NO: 19295 - protein, 1040 aa, unidentified
  REGION 1..1040: note = Cas Enzyme sequence
MSYILGLDVGSKSIGWAVVASSNGTPSRVEAVGVRVFQAGVQGDPETGAGEPPGAKRRQTRQQRRLTDRHARRMKKLCHLLQRQGLLPAGEADQVLRQLDSSLYSRYVRKRATPSEETGRVAHLLPYLLRARALDQPLEPHELGRALYHLAQRRGFLSNRRAPIRGDDRGKVRPAITELEQKMNSAGARTLGEYFATLDPEQERIRRRYTSRAMYVEEFEKIWDAQAPFYPHILTDDFKKAVRRAIFYQRPLRKQKNLIGACEFEPRRKRAPWALLGAQRFRMLQMVNNTRVLTLDGRERELIPEERAALIQKLETDGDLTFAKAKKLLSLKRDESFNWETGEESRFVGNRTNAKLAKIFGQRWWKLTEDERERVVEDVRSIERPATLAARGQRAWGLRPEEAEAVSRVELEPGYCRLSRQALAKLLPLLQQGLPYMKAVEKAYPDYRMARDPVDLLPPVSEAVPELRNPAVARALTELRKVANSIVRTYGKPEAVRIELARELRKTRQQRQTATKRNRQVERQRKEAAQKITAEAGIQNPKRADIEKVMLAEECNWQCPYTGNCISMASLFGPNPQFDVDHIIPFRRSLDNSFFNKTLSDVAENRNVKGDRTPYEAYAGRPEKYKEIIERVSRFQGRAASEKLARFQLEQVQDIEQYADQELNDTKYASRMAADYVGLLYGGQVDATGKRRVQPTRGRVTAFLRNLWGLNGILGPGPEKSRDDHRHHAVDAVVIALTDAAAIKALSDAAARGRKLGRRWAALPEPPWPGLLNETSTAVDMVVVSHRPSRKLSGALHEETLYSPPRDDAGRPAADGKWVHVRKPLAKLTKPELEKIVDPAVRDAVRAKLAALGATDPKRAFKPVENHPCLKTRTGRLVPIHKVRIRRAESPVTIGSGARERHVKPGDNHHIEIVELRDKKGRSKWEGHLVTRLEAARRFRARQPVVRRDHGPDKRFLFSLAGGDTIELDWEGSRQLFVVRTMTRDASGARIWFVHLNEARPEKQIVAAKQWHSMRMQPLRKANCRKVSVGTLGEVHPANH

SEQ ID NO: 19296 - protein, 909 aa, unidentified
  REGION 1..909: note = Cas Enzyme sequence
MGRILGLDLGTNSIGWAIIDANINDDGGVKSYNSILDSGVRIFPEGIDPATLGQGDKEKSKNAERRENRQKRRQFYRKRLRKIKLLDLLISHEMCPLRPEELLLWKKWDKNNKSAARKFPSSDHFIAWLRLNPYALRDKALKEDLSLHEFGRILYHLIQRRGFVSSRKEKDKGAIYSGKDDKTGITETIENMEKRTLGQYLYSIIPQKGEPYKEYKDEEGKIIRARSRYTLRDMYIEEFYHIWNRQAKHLGLDGIRVIQTKTRNIKGSLQAKRNINKINKLKTIYGENNIVISGNKVLSRQEVPLLKYLAGDIWMENGKVCHKYTEDSVLFWQRPLRSQKNLLGKCRYEHQYLNINGKKIESGKTPCYLSHPEFEMFRTYQFVSNIEYGTNQKLDEKQKSLVIGLINSKKGSFKFQEIIKKLKLTSERFNYDNDFSVAGNATISQLKPLFDEDIWENKYDEIWHCFHFYNDNDKLFNKLKSDYGCKCDSADKIENISLKDGYASLSLKAIRNINPFLKKGFNLSTAVILGGIKNAFGNELWQKYSDQHHTIEKNVIRMMKEKNAEGQLIQKVKDYLSKGNGNIDFGFLPNDKRFKKLYHPSVEIQTSYNTLREEVPPVPNLRNPLVQRALTEMRHVVNALLKEYGYMDIIKIEMGRDLKNTKSARQEMTYRIRDNQKKNEFAREKLTEFGLAHSRQNIRKYLLYKEIEEQAGHVVCPYTGKTIRINDLLGTGNLFQIEHIIPYSTSLDDSFGNITLCESNFNRDKGEKTPYEYYKSNPDPKAWGGAASWEEVEMRAFSLLPYNKAKRFTSKKSYESETFISRQLNDTRYISKEAVNLMRSVCEDVRVLPGSLTSELRHLWGLNSILQPVNDVDLTKGTVSAKNHSFPKSIACSRARSKRRSSHLKYSGI

SEQ ID NO: 19297 - protein, 1184 aa, unidentified
  REGION 1..1184: note = Cas Enzyme sequence
MKLLGLDIGSNSVGSAWIDTEAKTIKMGVSVFPAGVEEQTDKRGAPKNQARRSQRQQRRSTERRAKLKRRLRQHLIKKSWIPTEKERLQKWENLNPWILRKDALHRKLNELEFGRILLHLAQRRGAWWFDEEPEETESGKKKKKDPAEIPGTVEYTKKMMKDKGAETFGELIAIEYENRKTITANNKIRNTRIRNRADALGEKESEFVADRHMILMEFFKIWEEQKSFGGQLAKQLTDDCKKEIYNPKKTETWRCQGVLFSQRKAYWNLGTLGRCDLEPTDMKCPKADMYAQEFLVLTSVNNIRITPPMEASRKLTEEEREKVVSAVRKQKTATESTIRKALGIDKGKNKTLYTLNTEGDKFTVNGDWFYSQIVCNTFDEDTWLSFDDGKKDSVNRAILKFDPKDEADENKLKTGCKEWWKLDDKQTESFLEAWKKRPKKESRVNLSRKAIKNLLPYLREGWSVTEARDMYAEDASNGADDITRRRYSTREIVINKRIRHFQDKHPNLLPPVTEGISNPVVRKSIHEVKKHLMEYIRQFGKPPDKVVIELAREARQSEKVISKRIQKNKAIDALKKEIIETHNLNAPGITSTQRERAIQRVRLCRQQREMCAYSGATITDKIAADGSGLEVDHIVPRSRNGNNGMNNLVLCYATANQGKGNRTPIDWLNKEHFGQLELRFKHLEGSKKDKSAITKDNVDMMDNAKWNNLHRKTPKEGFTEEQLRSTAYAATQTTDWINKVLYGSEDRGKRFVFASRGDYTGILRRDWGLFFDENGERSEKGRKMRGDHRHHAVDAAIIAMSTPQHLQEIKKSFIDFEKQKENKNVKPQWKTVEQPWEGFSEQIAEEYKKLKVSHRDYNKQIAGYLHKDTIYGPAIIYEKDPNGNVTICQDGKPKLKKGLYIKSIPAIGIKQNHLRMPIGWDKLKEEYKNATTKLQRKAIRQKMLALEDATPAKSGIIRDIELRDKIRDWLKEHNFEDMGKAKAYIKENGLIINGTPVRKVRVLWKLSEVIEIPRKSFNFETDKIVKNYKRKALRVYQTQNNHHIEIREKTNKKGIFKWSGEVITNFDATRRVRAEKKPIVDKNENKNGKFVMSLARGEMVRMRHPETKEANYFVVFKIDPSKSIHFTKHTDANPASSKQEGVKLREDISLVPDKLRQYIILNENCVPEKVKISPIGEVKVLERD

SEQ ID NO: 19298 - protein, 996 aa, unidentified
  REGION 1..996: note = Cas Enzyme sequence
MSNYTLGLDIGSNSIGWAILDLGDKPSIACLGVRVFPEGVDRDTKGLEKSKNATRREARGARRTHHRRNLRKQQLLNILQANGLLPKDVSQIKSIFQREPYGLRKKGLNEKLEPYEFGRILYHLSQRRGFKSNRKSGKAKEDGVIEKDAKALSAEIDKKGCRTIGEYFSQLNPEEQRIRGKYTFRSMYEKEFDLLWEKQKEFYPEVLFEDLRKKIRDEIIFFQRPLKPTNELIGECELEPGEKRCPRGDWYARRFRLLQDVNNLIIQNPNGIEELLSTERRKILLDELGQKEKLTFDKIREKLGLIESQKFNAEYKISRSGKRVESMKGDVFAAGMRSKNVFGSKRWEGMDEQEKIKLNEWIVELEDDQLKEKLQSEYGFDDKQIEAVLKISLPQGYMSFSRKAIIKLLTSMEKGKRTDEALDEVYPDRNKMDEDEQKNKLDLPPDLRNPIVQKALFEVRKVVNAIVREYGRPARIKIEMARDVQGSSRQREELHWKKFENEKRNEEARKRLREDIGITNPKRDDVIKYNLWEECGKTCPYTGRQISQEALFGSNPEFQVEHILPYDRSLDDSYMNKTLCEVHENIHVKKGQTPYEAYSHDQEKYEQIKQNIKVLPWPKRQKFLQKEIDLDQHIARELNDTRYICREVVRYLKQLGVYVKGTRGKITAELRHQWGLDGIFEELGVRRDDDHRRHAVDAVVVGVTENEHLRKLARSKYSVTGILFEKPWPDFREEVREKVKHIDVSHRACRKVSGKLHEETNYGPTGEMDENGQDIYVYRKPLDALTLPMVEKIVDPVVQEIVKNRLIEKGINLEAGNRKIPKEVWKETLYMKRTKSNKQVPIKKVRVRDIFNNMILFKDDSGKKYRAVTPGSNHHVEIFERTDKNGCIKRDSKVITMFEAVQRSQKGEPVVKRDYGDGKKFVCSLSINDMVMMKNKAGETDLYRVQKMDANKMVRFRHHTASNLDRKETYIDKTAHLFEGYKVTVDPLGRVLLAND

SEQ ID NO: 19299 - protein, 1164 aa, unidentified
  REGION 1..1164: note = Cas Enzyme sequence
MKSLGLDIGTNSVGSAWVDTKERRIWMGDSVFPAGVEESDMKRGAPKNQARRGYRSQHRNTRRRSERKHQMRTFLLEKGWMPAESTRQNEWLKHKNPWILRSEGLERKLKPFEFGRVLLHMAQQRGAYGLIEDEDEKEDGKIKKAVSHVRREMNQCKARTFGELMALKFCERRKKVGKKNKEIHMPIRNRTNAAKEGVYEFCADRRLIREEFDNLWKRQKSFGGELGLELTDECRRELDDPSGDETWRYRGILFGQRRTYWDIGTMARCDLEPTDLRCSKGDMYAQEFLVLQTVNNIRIMQRGEQKRPLSEEERRAVIDVLEQQKKANEGTIRKALGIHRGERKTQFTLSLEKDPERGLNTSWFRRDIVIGAIGKDLWEGMSIEKKDSVNKAILKFDPNDEKDVKRLREGCSKWWGFDKKRSERFVEAWKGRPRIDDRINYSRRAVKNLLPYMREGFPVNEARKLFVEDATHGASDEQRRRYSFGAQPGNRALRRYMEKHPDLLPPVPEDINNPVVRKAIHEVRHHIQAYIRRFVCRPDRVVVELVREARQSAFVRNRQLAENRAREKERKKIIEEFNLTGETKTQQRKTVDRVLLSREQRFWCAYCSDTISERDAARGNDVEVDHIIPQSRGGNSFLSNLILCHTRCNRGKGNKTPMEWLTKEEFGLIERRLKHLEKENKVKWENLHSEAPDLDKFVESQLTDTAYAARQVVAWLEKTLYGDKNDGSRHVFTTKGRYTAILRRDWRLFPDKNAGEKNRADHRHHAVDAVLIALSGPERLSQLACSAEKWELAKGEGKAPPEREPLGAPWGDRDSFRAEVMKEWQRLVVAHRPEKRKITGPLHNDTQFGPVLDEKGHLTGEFTIRKFAAELTPNHLRVPEGWEQLRTKLENCNSKAEKRGIRAKMLAIADVKCGKSGIVRDRWFREELRDCLRRNGLNVDVCKEKDKNLREKKMMEFTKKLKEIVKGEGLFLESGVPLRRITLVRNPTVVEIRRKRWNSDTEKMEYDPNRRSWRYYEPQNNHHIEIRESGKGRWVGEVISNFDAVKRVRPSKESGFQPQPAVNRNDTKKGRFVMSLSIGEMIYMKHPETGEPEYFVVFKLDGKGYIHFTPHWDAGKDKATEKHPAREDIRLSARKLQGLGVGPDKCPTKQWVGPLGDSKPLYCD

SEQ ID NO: 19300 - protein, 996 aa, unidentified
  REGION 1..996: note = Cas Enzyme sequence
MGNYTLGLDIGSNSIGWALLDNSAEAARIIDMGVRVFPEGVDRDTKGLEKSKNATRREARGARRTHQRRHQRKRCLVRAIREVGLLPRDEAELRSLLQTNPYEIRKRGLDEKLDLYELGRALYHLSQRRGFKSNRKSATLKEDGTVKKQAGELQREIDASGSRTIGEYFAGLDPEQQRIRGRYTFRSMYERDFDFLWAKQGEFYPEVLTEGLRKKVRDEILFFQRPLKSAKNLIGDCELEPAEKRCPRADWYARRFRLLQDVNNLIIQNPDGSEQKLSADQRIVLLDELGQKDKLEFDRIRKKLGLLETQKFNAEYRTGPNGKKVETLKGDVFAAAMRSKNAFGLDAWDALDEQRKIHLSEMFVELEDDDLAQKLETEYGLTGKQVEAAMKVSLPQGYMSFSRKAILKLLPFMEAGALTHEAIDQAGYKREEATQTDAVTKLPLPPDLRNPIVQKALYEVRKVVNAIVREYGKPAKIKIEMARDVQGSSRQREEIHWKNVENRARNERVRTRLREDVDITDPSRDDVIKYKLWEECGRCPYTGREISQEALFGANPEFQIEHILPYDRSLDDSFMNLTLCEAHENIHVKRNQTPFEAYGNDPERYEEIKQRIKGLPWPKRQKFLQQEINLDTHISRELNDTRYICREAVAYLKHLGVNVRGTRGKITSELRHQWGLDGIFTELGVRRDDDHRRHAVDALVVAVTDNEHLRRLAASKYAVTGPRFETPWVLFRDEARVKVKSMSVSHRVCRKVSGSLHEETNYGSTGLKDEAGQNIYVYRKKLEELTIPMIDAIADNIVRGIVQDRLREKGIGPGGTNRKIPKEVWKEPLYMRRTKSDKLVQIKKVRIRDVMTNAIPLCDKTDRPYRAVKPGSNHHIEIFEYVDERGRTRREGRVITMFEAVQRSLRGEPVVRRNYGDGKRFLWSAAINETFMLRLGSGPEELFRVQKISANQQIFFRHHTFSGDLQESKGISRMPNTLVGRKVSVDPLGRIWPAKD

SEQ ID NO: 19301 - protein, 1172 aa, unidentified
  REGION 1..1172: note = Cas Enzyme sequence
MKLLGLDIGSNSVGSAWVDTDKKLLEMGVGVFPAGVEESETKRGAPKNQARRGHRSQRRSIERRADRKHKMRMFLAERVWIDPDEKKWMGLNPWILRRDGLNRKLSPYEFGRILLHLAQRRGAWWFDDAPEETAKDVEENEEEKAAEAKDKEAKKIKGAIEQTKKEIGKSGARTFGELMAIKFEEQRKIVGRENKQIGLPIRNRTTASGEGTYEFCADREMIWEEFDKLWNKQKSFGGDLAVQLTDECRKKLDDPSEDAAWRYKGILFGQRKTYWDIGTMGRCDLEPTDQKCSKADMYAQEFLVLETLNNIMITPPGELKRHLNDDERKKVLSLLKTEENVTESKVRKALGLHKGENKTLYTLSLEKDPKRGLNTWWFYREIIAGAIGEAVWERISAEQKESINKAILKFDPIEEKDKETLAEGCRKWWGFNEKQTERFLEAWNKRPKVDDRVEYSRRAIKNLLPYMREGFTVNKARKRFCEDADNNATLEQRERYSFYGGRANHRTRQYLEKHPDLLPPAPEDISNPVVRKAIHEVRSHIQEWIRKFGCKPDRVVVELVREARQSAIVRNKQLAENRQREKDRKKIIEDYNLSQLTRTQQNRAVDRVRLCREQRNMCAYSEQTITESMAAKGDGLEIDHIIPESRGGNSYLSNLLLCFDGTNRGKVNKTPKEWLIDEDFRRLEQRLGHLKKENKVKWDNLHSDAPDIDKFTDSQLTDTAYASRQVAEWLRAVLYDGEKDRVRKVFTTKGRYTNWLRRDWQLFPDGTNAWTIEKDRGDHRHHALDALVVALSLEHLQPLAWALEKCEQAKAEGKAIPRREPLPPPWGPVESFRKQVMERYEKMIVSHRAARRRLAGELHKDEHFGPISGDTEHFTKRIFAVELTPNHLRVPKGWEELREKLEQTTSKAEKRYILSQMLSIEDAKPEKSGIVRDRWFREELRDCLRRNGFDPDSFGEDKESKKRFKELVKSKGLLLKSGVPVRRIMLLRTLGEPVEIKRKRFNVLTGKMEEDVDPQSERQRLRVYDSQNNHHIEIRENKKGRWIGDVITNWKAALRVRPPKSSGEQPQLAVDRSNNEKGRFVMSLSIGEMVYMKHPETCKPDYFVVFKIDGTDTIHFTGHRDAGRDKATEKCTKREDIHLSPAQLQKLGVPPANQPQKVWVGPLGDVKVLNRD

SEQ ID NO: 19302 - protein, 1004 aa, unidentified
  REGION 1..1004: note = Cas Enzyme sequence
MSKTATENYPSKFILGLDLGPNSIGWAIIRTDTPDEQSPMGIVRTGVRIFQEAVDAKTRTPKNQARRDARGARRLLARYRMRRDLLVKICVSAALLPADEAKRNELLKDLNNYDPYDLRKKGLDNELTPYEFGRVLYHLNQRRGFKSNRKGKKDAESGEIKESIKNLKAAFESKGLRTLGEYLATVDHRRNRFPHHDRYTERSMYEHEFNLLWRKQAECNPGQYTPALRAAIFKAIFFQRPLKIQKHLVGLCTLESTRKRAAWAREATQRFRYLQDVNNLQLRDPITRSFRPLLADERAKLIAALESNDISWDKARKLLGLHAGEKFNLEESKSKGLRGNRTAKALTKAIGNRWGQFTDEQKYNLLTDLLTIGDSDALQRRLSSHWHFEQLEVDALMTAELEQGYARLSEKAIKKLLPFLTTGQRYDEAVLQAGYNFSAKQATENLVTVLPPPSQLRNPVVQRALFEVRRVVNAITKKYGKPMSIRVEMARDLKMGPRQLAEHNSEQRQREKENDIGLSILRQEFNFPNPSRADLEKYKLWNEMGKICPYSGRTISADMLFSPEVEVEHIIPFSRCLDDSFMNKTVSLTAMNRQKGDLTPHEMFVSRPAEYLQLLKRIEDLPPAKRARFEQQSIAIDDFIARQLNDTRYICTEVKKYLEVLAVPVQVTRGQLTAMLRRAWGLNDLLGSAPDGKSKVRDDHRHHAVDATVIALTTPKMLRVVATCTSRFDGGASRLRLTLPEPWAGFRQSVQKSIKEIIVSHAATRKLTDALHEATAYGPTTESNCFVTTKTLGPNITANQIDSIRDPVIKSLVKARFESANHKSKIAFGDPLTPVLHKDGKTPIRKVRILTTMSRDGLLAVKDNTGKPYKFFPLGNNHHAMIIKTKSGKYEAQFVTMIEAARRARQMKQKIAPTPEGIEPGNAFTLCRNDIVYYHSENQETRLYRVQKMSKGTNTFEITLRDIYAASTQSGDKTQEIRLTSAKYLSRLKKVSIDILGASSVNND

SEQ ID NO: 19303 - protein, 995 aa, unidentified
  REGION 1..995: note = Cas Enzyme sequence
MEKNQARILGLDLGPNSIGWALLNVDPAGECRSLEAAGVRIFQEAVDAKTRTPKNLARRTARNARRCLARYRMRRDRLLKLLTAAGLLPSHTEERQRILTDLKNYDPYALRAHGLDRELTLYEFGRALFHLNQRRGFLSNRKQKSDNEEGKIKTAISALRKEIAASNCRTLGEYLYHQTRRRNRAPYFDRYTERSMYCEEFSQLWEKQRQFKPEILSQVLRAKIYRTIFFQRPLRIQKYLVGRCSFEPLRRRIAKGRLEFQRYRYLQDVNHLQVRDPIERTWRPLSVSERAILISNLEEGDLTFDKVRHLLGLHQGEELNLEVAKSTGKLKGNRTAATLKKALGNTWTAMSIEDQLSLVTDLLTIHNEEHLHNRLSNKWKFSDQQTQAVLAVELEPGYGMLSLKAIRRILPHLENGCIYSEAVSKAGYNHSRPNCPVLSAILPLPPSLRNPVVQKALYEVRKVVNAIIRKYGRPGIIRVEMARDLKMGRAALAEYTKEQKKRAKENERIRQLLTTDFGRPTPTNADVEKYRLWKEAECLCPYTGQVISNSMLFSPEVEVEHIVPFSRSLDDSFMNKTIAMASVNRIKGNKTPYEMFEGRRDEYLNVLKRLSSMPRAKRARFEQKEAEIDDFISRQLNDTRYICREVKKYLEQLGSEIQVTKGALTAALRSAWGLNRILSPDGANSKNRVDHRHHAIDALVVALTSPSLLQSVSRLTADHINRAGRIRLTLPPPWNSFFDDAQIMISRIIVSHAASHKLSGALHEETAYGFIPGEGVYVTRKPLDGSISEAQIEAIRDPVVKALVQKRFEECGKDSKKAFGDPMRPLIHGDGRTVIRRVRIQERFSAEGVLSIKDSSGAPYKYYPLGNNHHIEIFRYPARGEYKARVVTTLEAARRARQSKTSIVNRELDDGAEFVMSLCPNDIVEYNDSRLGRNLFRVQKLSLGQRFQIALRLIHVSGTEKGWENGQVLIQSKKNLAGLKKVAVGVLGEVMPGDD

SEQ ID NO: 19304 - protein, 985 aa, unidentified
  REGION 1..985: note = Cas Enzyme sequence
MSEVVLGLDIGSTSVGWALIDSKKPKIVDTGVRIFQEGVNRDTGGAEISKNQTRREARLARRQRYRKNNRKKQLKNLLVSSKLLPTDESEYKKLLIPDPYALRAKGLDDRLGLFEFGRVLFHLNQRRGFKSNRKSGKSSDDGVVIKGANELQEKIDTAKKRTIGEYFACVDTCEERVRGKYTFRAMYEHEFELLWDKQASYYLAILTDQLKEKIRDEIIYFQRPMKWDIDTIGNCELEPEEKRCPRADWFARRFRILQDVNNLIIQNPDGTSATLTKEQREILLDNLYQKDKLTFDKMRSLLDLIKSQEFNLEKNSKTLKGDVFVHAMQNKKLFGPKAWDEMELDEKVALNEACVEMEDDDLEDFLKEKYNFNEEQIEKVFKISLPDKYTSFSLKAIKKLTPYMEKGLLTNEALDKAYPDRASQYDFEETDKLPLPEDLRNPIVNKALFEIRRVVNSIVQEYGKPDKIKIEMARDVKGSLRERKEIRYKQKENEKRNEDAYQKLKHEYGVNKPSRDDIIKYKLWQECGYRCPYTGMEISQHQLFGATPEFQTEHIIPYSRSLDDSYMNKTLCWTTENRLKDDKTPCEYYSDKPEQYEQVLQRIKTLPYPKRKKFIQKEVKLDECIARELNDTRYINRETVKYLRQLGCTVAGTRGKITSELRHCWGLNNILDLTGMDIKNRDDHRHHAIDAAVVALTTNKHLRELARSKYSIVEKGFAPPWEDFRQELEHSVNLINISHRVTRKISGQLHKETSYGLTSLKDSKGQNIFVYRKPLISLTAKMVEKIVDPVVKKLVKERIDSVGGDMKKAWQEPLYMKSKDPDKKVPIKKVRIRDVFNNMIPICDDTGKSYRYVAPGNNHHIEIFEYKDEKGKIKREGKVITLFEAIKRSRANEPVIKKDYGDGKKFICSLAQNESFMLKTEGVDSVPHRVQKLGQDGTIVLRPHNFAGQVKDSDSPPLIQRKSPNTLKGYKITVDPIGRIFPAND

SEQ ID NO: 19305 - protein, 970 aa, unidentified
  REGION 1..970: note = Cas Enzyme sequence
LAKQLTDECKKEIYNPQKTNTWRCQGVLFSQRKTYWDIGTLGRCDLEPTDEKCPKADMYAQEFLVLTSVNNIRITPPTEPIRKLFEEERAKVVNAVRRQKTASESTIRKALGIDKGENKTLYTLNTDGDKFTVNGDWFYSQIVCGVFGEDAWASFDSKKKDSVNGAILKFDPDEEADKDRLKVGCEKWWGLDAKQTKNFIAVWEKRPKKDSRVNLSRKAIKNLLPYLREVWSVTEARNMFAEDATNGADDLTRKRYSTKEVVVGKRIRQFQEKHPGLLPPVSDGISNPVVRKSIHEVRKHIAEYMKQYGRPDRIVIELARKARQSEKVIAKKIQKNKAIDALKKEIVEKHNLKAPDITSTQRESAVKRVRLCKQQREMCAYSGVTITDAMAADGSSLEIDHIVPRSRGGDNRMSNLVLCYATANQGKGSRTPIDWLNEENFRHLEQVFKHLEGSEKAQSAITKDNVDMVDKTKWKNLHRKTPKEGFTEEQLRSTAYAATQTTDWINKVLYSVEDRGRRYVFASNGDYTGILRRDWGLFFDENGERSEKGRKIRGDHRHHAVDAAVIAMTTQYLPKIKESFIDFEKQEENKNVEPNWKTIEQPWEGFSEQVAEEYKKLKVSHRAYNKKITGHLHKDTIYGPAVIYERYKEDDENEGIKKGDVKIDKDGNPVLKEGMYIKSIPAIGIKQNHLRMPNDWDKLKEEYKNATAKPQRRNIRRKMLALEDVPPAKSGIIRDIELRDKIRDWLKEHHFADMGQAKAYIKENGLIINGTPVRKVKLLWKLNEIVEIPRKKFDFESGKIVKDNNFKSLRVYQTQNNHHIEIREKVSKKGEVEWTGEVITNFDAAKRVRVKPPKPRPAGWAPPSAVNREDTDKGRFVMSLSKGEVVHMKHLKTQESNYFVVFKIDPNKTIHFTPHMDANPASSKKDGVKIREDIPLVPDDLRKNIIFNEKGVPEKVKISLLGKIEVLAND

SEQ ID NO: 19306 - protein, 987 aa, unidentified
  REGION 1..987: note = Cas Enzyme sequence
KQLTDDCKKELYNQRKTDTWRCQGVLFSQRKAYWNLGTLGRCDLEPTDMKCPKADMYAQEFLVLTSINNIRITRRTENSRKLEPEERRKVISAVRRQKTASEGTIRKALCIHRGEEKTNCSLNTDGDKFTVNGDWFYSQIVCDVFGEDTWQEFDTNKKEVINRAILKFDPGDDSHVAKLTSGCRKWWKLDDEQTEKVIEVWRKRPKIDTRVNLSRKAIKNLLPHLREGWSVTEARDMYAEDALHEADDLTRSRYSTTKVVVNKRIRHFQHKHPDILPPVSEGISNPVVRKSIHEVRRHLMEYVKRYGSNPDRVGIELARKARQSERVIARRIQRNKAIDELKKEIIGKHNLDAPNITTTQRERAIERVRLCRQQRYICAYSGLNEETEKYACAYSGRAITEAQAVNGEGLEVDHIVPRSKGGDNGMSNLVLCYSSANQGKGSRTPIDWLSKEDFGQLELRFKHLQVSKTEKGKRAITKDTVDSVDNTKWENLHRRTPPEGFTEEQLRSSAYAATQTSDWINKVLYGHEDRKKRYVFASGGQYTGILRRDWGLFFDENGQRSEKGIKNRGDHRHHAVDAAIIAVTSQCLAKIKQSFIDFENQKENKRIRPVWKTIDEPWDGFIEQLAEEYKKLKVSHRAYNRQIAGRLHKDTLYGPAVIYEIHRRNDNKKGIKKGDIAQDEKGNPVFQQGLYIKSIAASELRGAHLKMPRDWSDWKKQLQEAENKDERKRIWQKMYALDAVAPGKSGIVRDVSFRNEIRDWLTDNGIKNIENIKKVNGSKTNELRTFETLVKEKGIVINGTPVRKVRLLWKLKEVKEIRRNGFDYENSTAEKQRKSLRVYQTQNNHHIEIREKVNKKGVVRWSGDVITNFEAATRARTNGVPIVDKSEKKKGKFVMSLSKGEVVYMKLPEAQGPDYFVVFKIDSSKTIHFTPHTDANPATSNKKHVTLRKDIRLVPNDLRQNIVLSDNGVPKKVKISPLGEEKLLMKD

SEQ ID NO: 19307 - protein, 995 aa, unidentified
  REGION 1..995: note = Cas Enzyme sequence
VSKYTLGLDIGSNSIGWALLDTGKAPKIIDLGVRVFPEGVDRDTNGAELSKNATRREARGARRNRWRRAYRKDKLVRMLRRAGLLPGEPNSLEKLMESNPYPLRAKGLDERLTMHEFGRVLFHINQRRGFKSNRKTGEAKEDGIVKKSASSLQKAIDEAGFRTLGEYFAKIDPEEERIRRHYTFRSMYEHEIDLLWQKQSEFYPDILTDQLREKIKDKAIFYQRPLKPTDELIGECSLEAGEKRCPRSDWYSRRFRIFQDVNNLKIYNPDGKSEKLNPEQQQLVLKEMLNKKDVFFDSLRKKLGLIETQTFNVEEGQVDKKKAKLKGDEFAAQMRSKKILGAKKWNSLDIKEQVEINEALIADEIDDVTFVKMLIEQHALTEEQATATLDVRLPRRYMNFSQLAIQKLLPHMENGLLTPEAIKKVYGEKAIEEENLSLDKLLMPEDLRNPVVNQALFEIRKVVNAIIKEYGKPAKIAIEMARDVHGGKKQREETHLKMWKNQQRNEQARKELIENTDIKNPTRDDIIKYKLWEECGKVCPYTGRSIPQYALFGDNPEFQVEHIIPYSRCLDDSFMNKTLCEVHENIHVKKNQTPYEAYGSDPKKFEAILQRIKVLLYPKRKKFWQEKTELDDFIKRQLNDTRYITRETIKYLKRLGVHVYGTKGKITGELRHSWGLNNILDFTGSGLKNRDDHRHHAIDAAVVAVTRNKHLRELARTKYVVDDNSFEQPWPNFRQEVQKKINKINVSHRATKKISGQLHEETSYGPTGLKDDKGQDIFVYRKKLEDLTMPMVGKIVDPIVKQIIIKRLKEHGLNPDNRKSIPKEVWSKPVYMKSKKGQGPKIKKVRIRDVFNNMIFLKDEGRPYRAVKPGSNHHIEIFEYTDKKGNVKRDSKVVSMFEAVQRNRKGEPVIQRDHGEGKKFICSLSINEMVMMKNKHGKMSLYRVQKMDQNKIIRFRHHTAATIDKNETYIDKTAHLFEGYKVTVDPLGGIHKAND

SEQ ID NO: 19308 - protein, 996 aa, unidentified
  REGION 1..996: note = Cas Enzyme sequence
MCTLGLDIGSNSVGWAILDPGASKVIDAGVRIFQEGVDRDTKGAEVSKNANRRAARSARRNRNRRNYRKDKLLRLLIRNHLLPQNTQELQQVFTKDPYFLRAKGLDEQLEPYELGRVLYHLNQRRGFWSNRRSEKKKDEGVVTKSVTALQQQVTQTGCRTLGEYFSQVNPHENPIRGCYTFRSMYEDEFERLWQVQSSYYQAILTEPLKKEIKDRTIFYQRPLKPSEDLIGECELEPGEKRCPKADWYARQFRILQTLNNLKIQNPDGTESVLTDEQRKVVLEELLNNKNVKFDALRNKLGLLETQTFNLEEGPRGKKKETLQGDEFNAHLRKVLGKKGFARLSQTDMIEINELLLDDSLSDGEAAEQLMERYGFSEEEAESVLASPLPQKYMSFSRLAIQKLLPFLEKGRLTHEAIRTVYGDSQARKPLQELDRLPFPEDLRNPIVNRALWEVRKVVNALLRVYGKPRKIQIEMARGLKGSAREREEIQFQQRRNEEENKKAQEELVRMGILSPSRDDIIKYKLWQECGQVCPYTGRPISQSALFGPHPEFQVEHILPYSRTLDDSYMNKTLCAVDENRRKGDKTPYEFYHGTEQFEQILQRIAKLPYPKRRRFWQEEVELDTFIRRQLNDTRYISRKVAEYLKNLGCIVQGTRGQITAELRHQWGLNSILDDSGLVEKNRDDLRHHAIDAAVTAVTENIHLRELARSKYTPAGQAAVRFAPPWENFRQQLKEIVNQINVSHRVCRKVSGPLHEETSYGPTGLKDEKGQDIYVYRKPLEALTLAMVLKIADPVVRQIISERLAAFGLSPGGKGTIPKEVWKEPLYMKTKSGRPGPQIKSVRIRDVFNNLIPIKDKEGKPYRYVAPGSNHHIEIFEYTDRKGRLKQEGRVITMFEAVQRSRNKQPVICRDYGDGKRFVCSLAINESFMLEVEDGGLVLHRVQKLDQNGRIILRPHTFGGKLKDNDSPPLIQRKSPNTLRGYKVTVDPIGRIFPAKD

SEQ ID NO: 19309 - protein, 996 aa, unidentified
  REGION 1..996: note = Cas Enzyme sequence
MCTLGLDIGSNSVGWAILDPGASKVIDAGVRIFQEGVDRDTKGAEVSKNANRRVARSARRNRNRRNYRKDKLLRLLIRNHLLPQNTQELQQVFTKDPYFLRAKGLDEQLEPYELGRVLYHLNQRRGFWSNRRSEKKKDEGVVTKSVTALQQQVTQTGCRTLGEYFSQVNPHENPIRGCYTFRSMYEDEFERLWQVQSSYYQAILTEPLKKEIKDRTIFYQRPLKPSEDLIGECELEPGEKRCPKADWYARQFRILQTLNNLKIQNPDGTESVLTDEQRKVVLEELLNNKNVKFDALRNKLGLLETQTFNLEEGPRGKKKETLQGDEFNAHLRKVLGKKGFARLSQTDMIEINELLLDDSLSDGEAAEQLMERYGFSEEEAESVLASPLPQKYMSFSRLAIQKLLPFLEKGRLTHEAIRTVYGDSQARKPLQELDRLPFPEDLRNPIVNRALWEVRKVVNALLRVYGKPRKIQIEMARGLKGSAREREEIQFQQRRNEEENKKAQEELVRMGILSPSRDDIIKYKLWQECGQVCPYTGRPISQSALFGPHPEFQVEHILPYSRTLDDSYMNKTLCAVDENRRKGDKTPYEFYHGTEQFEQILQRIAKLPYPKRRRFWQEEVELDTFIRRQLNDTRYISRKVAEYLKNLGCIVQGTRGQITAELRHQWGLNSILDDSGLVEKNRDDLRHHAIDAAVTAVTENIHLRELARSKYTPAGQAAVRFAPPWENFRQQLKEIVNQINVSHRVCRKVSGPLHEETSYGPTGLKDEKGQDIYVYRKPLEALTLAMVLKIADPVVRQIISERLAAFGLSPGGKGTIPKEVWKEPLYMKTKSGRPGPQIKSVRIRAVFNNLIPIKDKEGKPYRYVAPGSNHHIEIFEYTDRKGRLKQEGRVITMFEAVQRSRNKQPVICRDYGDGKRFVCSLAINESFMLEVEDGGLVLHRVQKLDQNGRIILRPHTFGGKLKDNDSPPLIQRKSPNTLRGYKVTVDPIGRIFPAKD

SEQ ID NO: 19310 - protein, 996 aa, unidentified
  REGION 1..996: note = Cas Enzyme sequence
MYTLGLDIGSNSVGWAILDPGASKVIDAGVRIFQEGVDRDTKGAEVSKNANRRAARSARRNRNRRNYRKDKLLRLLIRNHLLPQNTQELQQVFTKDPYFLRAKGLDEQLEPYELGRVLYHLNQRRGFWSNRRSEKKKDEGVVTKSATALQQQVTQTGCRTLGEYFSQVNPHENPIRGCYTFRSMYEDEFERLWQVQSSYYQAILTEPLKKEIKDRTIFYQRPLKPSEDLIGECELEPGEKRCPKADWYARQFRILQTLNNLKIQNPDGTESVLTDEQRKVVLEELLNNKNVKFDALRNKLGLLETQTFNLEEGPRGKKKETLQGDEFNAHLRKVLGKKGFARLSQTDMIEINELLLDDSLSDGEAAEQLMERYGFSEEEAESVLASPLPQKYMSFSRLAIQKLLPFLEKGRLTHEAIRTVYGDSQARKPLQELDRLPFPEDLRNPIVNRALWEVRKVVNALLRVYGKPRKIQIEMARGLKGSAREREEIQFQQRRNEEENKKAQEELVRMGILSPSRDDIIKYKLWQECGQVCPYTGRPISQSALFGPHPEFQVEHILPYSRTLDDSYMNKTLCAVDENRRKGDKTPYEFYHGTEQFEQILQRIAKLPYPKRRRFWQEEVELDTFIRRQLNDTRYISRKVAEYLKNLGCIVQGTRGQITAELRHQWGLNSILDDSGLVEKNRDDLRHHAIDAAVTAVTENIHLRELARSKYTPAGQAAVRFAPPWENFRQQLKEIVNQINVSHRVCRKVSGPLHEETSYGPTGLKDEKGQDIYVYRKPLEALTLAMVLKIADPVVRQIISERLAAFGLSPGGKGTIPKEVWKEPLYMKTKSGRPGPQIKSVRIRDVFNNLIPIKDKEGKPYRYVAPGSNHHIEIFEYTDRKGRLKQEGRVITMFEAVQRSRNKQPVICRDYGDGKRFVCSLAINESFMLEVEDGGLVLHRVQKLDQNGRIILRPHTFGGKLKDNDSPPLIQRKSPNTLRGYKVTVDPIGRIFPAKD

SEQ ID NO: 19311 - protein, 996 aa, unidentified; identical to SEQ ID NO: 19308
  REGION 1..996: note = Cas Enzyme sequence

SEQ ID NO: 19312 - protein, 996 aa, unidentified
  REGION 1..996: note = Cas Enzyme sequence
MYTLGLDIGSNSVGWAILDPDASKVIDAGVRIFQEGVDRDTKGAEVSKNANRRAARSARRNRNRRNYRKDKLLRLLIRNHLLPQNTQELQQVFTKDPYFLRAKGLDEQLEPYELGRVLYHLNQRRGFWSNRRSEKKKDEGVVTKSATALQQQVTQTGCRTLGEYFSQVNPHENPIRGCYTFRSMYEDEFERLWQVQSSYYQAILTEPLKKEIKDRTIFHQRPLKPSEDLIGECELEPGEKRCPKADWYARQFRILQTLNNLKIQNPDGTESVLTDEQRKVVLEELLNNKNVKFDALRNKLGLLETQTFNLEEGPRGKKKETLQGDEFNAHLRKVLGKKGFARLSQTDMIEINELLLDDSLSDGEAAEQLMKRYGFSEEEAESVLASPLPQKYMSFSRLAIQRLLPFLEEGRLTHEAIQAVYGDSQARKPLQELDRLPFSEDLRNPIVNRALWEVRKVVNALLRVYGKPRKIQIEMARGLKGSAREREEIQFQQRRNEEENKKAQEELVRMGILSPSRDDIIKYKLWQECGQVCPYTGRPISQSALFGPHPEFQVEHILPYSRTLDDSYMNKTLCAVDENRRKGDKTPYEFYHGTEQFEQILQRIAKLPYPKRRRFWQEEVELDTFIRRQLNDTRYISRKVAEYLKNLGCIVQGTRGQITAELRHQWGLNSILDDSGLVEKNRDDLRHHAIDAAVTAVTENIHLRELARSKYTPAGQAAVHFAPPWENFRQQLKEIVNQINVSHRVCRKVSGPLHEETSYGPTGLKDEKGQDIYVYRKPLEALTLAMVLKIADPVVRQIISERLAAFGLSPGGKGTIPKEVWKEPLYMKTKSGRPGPQIKSVRIRDVFNNLIPIKDKEGKPYRYVAPGSNHHIEIFEYTDRKGRLKQEGRVITMFEAVQRSRNKQPVICRDYGDGKRFVCSLAINESFMLEVEDGGLVLHRVQKLDQNGRIILRPHTFGGKLEDSDSPPLIQRKSPNTLRGYKVTVDPIGRIFPAKD

SEQ ID NO: 19313 - protein, 996 aa, unidentified
  REGION 1..996: note = Cas Enzyme sequence
MSSYIFGLDIGSNSIGWALVENKPKQCLLAVGARVFPEGVDRDTKGAEISKNQTRRLARGARRNRSRKAYRKDKLVRNLQFKDFLPKQTEALEKLFVLNPYALRAKGLDEQLTRHEFGRVLYHLNQRRGFWSNRKNGKATEDGLVKKQASELQSNIDESNCRTLGEYFYKINNDATKIRGHYTFRSMYEKEFDMLWARQAEYYPELKDEDFRIKICHKTIYYQRPLKPQDDKIRNCELEPNEKCCPRSNYYARRFRLLQDVNHLKIRQPDGNEDNLTLDQKKIVFKILGEKKDVTFDEIRKKLGLMETQTFNLEEGKADKKTAKMKGDEFAASLRNILKKNYSKLNEDDIALLNDYVEDDSLSDGQVEKAIIDKFGFTAEQAGKIKDISLPEKYAAFSKTAIRKLLLCMEKGYITSDAILAVYGERKKDIVITDTLGFPEDTRNPLVNKALWEVRKVVNAIVREYGKPDKIAIEMARDIKGSLEERKELQQKIKDNERENDRAREELLKMEISRPSRDDIIKYKLWQECGQVCPYTGRPISQAALFGSTPDFQIEHILPYSRSLDDSYMNKTLCYVHENRLKGNETPYEYYNGKEQYDQIKQRIRVLPYPKRIRFSQKEVQLDNFIQRQLNDTRYISRQVVAYLKTLGVDVFGTKGQTTAELRHQWGLNNILDLTGSGLKNRDDHRHHAIDAIVIALTTRDHLTKLATSKYNKTKEVFDEPWDGFRKEAEEKVNQILVSHRSTRKVSGALHEETNYGPTGLKDDKGQDVYVYRKKIEDLTGSMVSKIVDPVVQKIIRDRLWSFGIDPEKNSGKVGKEVWKEPLYMKAKNGGGPQIKSVRIRDVFNNMIGLKNPHGKIYRAVSSGSNHHIEIFEYKDGKNSLKRDARVVTMYEATQRIRSGKPVVCRESKDGNTFMFSLAKNDLFLMKINDSEEKLHRIQKFGLVGGSVVIIMRPHTYAGQLSDSDKPPLIQRKSPNTLVGYKVQIDPLGRITRAND

SEQ ID NO: 19314 - protein, 1061 aa, unidentified
  REGION 1..1061: note = Cas Enzyme sequence
VDFDQGAKMASYTLGLDIGSNSIGWAIVQKDHGLNIKETGVNMFPEEGQAGKVSKGGKTVKVSQRAMRGFISRARKNRDRRSRRKEKLIHILTSNNMLPPEYNERDALLLDMDVIKKDRSLRPYRLRSKGLDKQLTLFEIGRVLFHLNQRRGYHSNRKSGDPSEDKKVGKEADALEKDVFGNDCWTLGEYLYKIISKREKTKNENEIERIRQRYTFRKTYLKEFNLLWEEQKKYYPNILTDPLKKQIQIETIYYQRPVKSPKPKRCEFEPHSYTCKKANWHARWYVLYQNVNNIKTEIIGREPKPLTEDQRKIALKFFSQNEKVKFSDLKKHIGLTKDVQLNYEEGGKNKQMKGDGFLADVRDIFRGDVWDNYDEDVQRKTINAFAYFNDPELVKYLKTRFNFDDKQIDKALKIPIPEGRMPYSMIALKKMNSYLQKGKLQYEALSLAYPEDDQTVIKPVGQVISVPETENHVVLKALYELKKTVNSIIAEYGKPGRIHIEMARDINKSPEERDRIKRKIKDAEDENAQRWDELKALITENQLNIRPDKKTLLKYKLWKEAKEKCVFCGVYIHPKNLFEPNIQIEHILPRSRSFDNSYANKTIAHSKCNYLKDKYTPYEVYNNRPEDYRQLLKWVYESDMSKQKINRFLQENLDETEALDRNLNDTRHANKAAFKMLRQIGCPISGIKAMFTSTIRELWDFNKILNPFANIKNRFDNRHHAIDAIIVALADEKLISNLKKHFENPHLHKFELPNGFWDQAKKYVEKINVSYRPSYVEGHHISDKYHQDNPLGPTKEVVKYFNEGNMKQISPRVWLCNEKLPYIKRKSLQDAIETIGDVESVIPESCQHIRDVIYQAAKEAGVNTNDKNENIPSQILGSIFLTDKDKNKIPVKKIRCVVYESNTVVFTDKDGKPYKAYPTGNNHHIEIIEYADGVRKGNIVTEIEAARRQAEGKPIIQKEHDAARFIMSLAQNDMFNVKLNNTMALHRIEKISSPDNIILRPHTYGGPCKDQDKKPLVLRVNPRTLMGFKVKVDSIGRVTQLSEFLNEHNSTEKNLEDNKGE

SEQ ID NO: 19315 - protein, 1091 aa, unidentified
  REGION 1..1091: note = Cas Enzyme sequence
MRGFLLKRAWMPNDSDEEKKWLADNNPWLLRRDGLKRELKPEEFGRVLLHMAQRRGAYGFDVDEEQEDAGKIKDAINETRKAMEKCQARTFGELMASKYEERRREAGQKGKKIGTPIRNRTKASGEGTYEFCADRRMIREEFDKLWKKQESFGGELAKQLSDECRQELDNPKGDATWRYKGTLFGQRKTYWDVGTMARCDLEPTDMKCPKVDMYAQEFLALETVNNIRITPRGELKRALTKEERDKVIAALEKQKTATEATIRRALGIDKGQKKSEYTLSVEKDPKRGLNTSWFKREIVGAIGKKEWAEFDAKKRESINAAILKFDPQEEKDVQRLMDGCGKWWGFDSGQAARFIKAWKGRPKIDDRVNYSRKAIKNLLPYMREGFTPNEARNLFAEDATNGASDAQRQRYSFGARAGNRRLRQYIEKHPDTLPPAPEDISNPVVRKAIHEVRRHIQGYIRKFGCKPDRVVVELAREARQSAIVRNKQLARNRAREKERKEIIEKFGLAGETRTQQQKAIRRVLLCREQKFRCAYSGETISEKQAAEGTGLEIDHIIPESRGGNSFLSNLVLCFDGTNRGKGNKTPMEWLTKEDFALLEQRLKHLEKENKVKWDNLRTEVPDLDGFVASQLTDAAYASRQVVGWLEKTLYGERNDGKRHVFTTKGRYTAILRRDWGLFPDKKEGRQEDEKNRADHRHHAIDAVAIALSGPERLSQLARAAEAVEVGSEPRRKAIAPSWGDFDSFRADVMKEYDKIIVAHRPESRKITGALHKDNPYGPVVDKNGNLTGEFTIRKFAADLTPKHLRVPKGWDQLQAQLEKCSSRSDKRRIRAQMLALRDVSGGISGLVRDRWFREELRSALRREGLDPDHFTSNEMKDLLKRKELLLESKVPVRRVTLVRRPTVTPPIIRRRWNAVTGRMEKEKDPRANRYYEPQNNHHIEIRENKKGKWVGEVITNFEAAKRVRVKRPKPKPKGWSPPPAVNREDTKKGKFVMSLSIGEMVYMKHPGTGEPDYFVVFKIDGTGPIHFTPHWDAGRARETEKCPAREDIKLPGKKTGGLSATQLQDLGVEEGKGPEKVWVGPLGDVKVLHRD

SEQ ID NO: 19316 - protein, 1212 aa, unidentified
  REGION 1..1212: note = Cas Enzyme sequence
MENDTKQRILGIDTGTNSLGWAVVDRLSEGYELVDKGVHIFQEGVNIEKGTIEKSRAAERTAHRSLRKQYWRRKVRKIRVLAVLSNAGLCPSLTSEELHAWRAEGKYPLENEAFMRWQRTDENKGINPYAARCKCVEQTLDLEERHNRYLVGRALYHIAQRRGFLSNRKDQTDEKETGAVKEGIQELTQKIQDAGCEYLCQYFYQLYQNGERIRNCYTDRKEHYEKEFEAICEKQHLDDGLVKELRKVIFEQRPLKSQRQGVAKCPFEPSKHCAPVSHPLFEEFRMWSFIRSIKLQTPEDKELRALNHEEVQKILPLWFRKSKANFNFEDIAKTLAGKGKYCYYKSVESKPFRFNYYLDSNVAGSPISAQLKDIFGEEILKDRTALDKIWQALDFYTDDLKLREWGIKHYNLSDEQADALVKIRLPQGYASLSLKAMENIVPLMRDHGLIYSSATLIAKLRDLLKGYDFDEEVDAYLINDIEDYLTIPTDKDGKPLMSREERRNRLHDQWKQHYHLSDKDLQKLYHPSMIEEYRKVENKTDGVFQLGSPRISAFKNPMAMRSLFRMKAVVNQLLKDGTIDENTIVHIEFSRSLNDANHRAALRQYQNALRKEREEAIEAIKDIVPNPSNDDILKYLLWKEQDKKSIYTGEDIPLPALYQGTEFDIEHTIPRSMGGSTIRENLTICEARFNRDTKRTLLPSQLSEQYQAIILAHIQPWKDKYEDLEKQIHRLQKQSSGAATKEAKDRIITRMRLLQLQCKFWRDKYEAFTISEDEVKGFTRRQGTDISVINRYGRLYLLSLFSRVDVVKGTMTAAFREAWDIQEPYEKKDRTNHVHHCIDAITIACMGKREYDTLSAYCHEAEENRRSLHKIRIPKPWSTFTEDIKNIEKEILVAHYTPDPMGKQTKKKLRDSSGHILRDEQGKPLYTTGDTARVQLHDDMIYGKITNSHAIDPKHPVGRLCAVKRIPLQDVKVDEVVDPVVKQVIANAIAKYGDIKKAIEAEQENGDGAIWFNKDKGVKLKTVRCFQDHALNAEPIRSLRDGSPQEYKRFHYHRTNGNYVSAIYEGVNAKGKREREFTIITNFEASKRLNNHLPVVPEKSPKGYPLLFTIKKGDLVLLYENTPDELRNASKEELFKRLYRIIKMDGGGLTIKHHQEAREAGVLKEIYGFPQTGAFIQTQGIYPQRRISHGQFNALVNGIDFDMSDTGKIIFK

SEQ ID NO: 19317 - protein, 1056 aa, unidentified
  REGION 1..1056: note = Cas Enzyme sequence
MTSPQTRINYNIADDTELSRDSQQKNREFRRFFMKSYTLGLDIGSNSVGWALLEDGEQGAILDIGVRVFPEGVDRDTKGAELSKNANRRMARGGRRIKYRRSLRKNKLLREMQDTGLWPRGADETARLLGTNPYPLRAKGLDEKLELFELGRVLFHINQRRGFLSNRKTGKASDNNTVAKSANELQRLINEAGCRSLGEYLSGLDKHQQRIRERYTFRSMYVDEFDKIWDKQAEYWPDVLTEDLGRQFRNETIFFQRPLKPSDHLIGMCDLEPEERRSPKGNYYARRFRLLQDVNNLRIQNADGSEQMLTEEQRSALLYELSHKKELSYDKMRQLLQLLDSQQFNLEEGGKNKKLKGDEFAAGMIAVFGESKWEKMYEEEKVEINDAVLERDDEELQVYLREKYDLDDKRIEKVKKISLPQKYMSFSVKAIKKLLGPMEAGAITSDAIGGVYGWDSASPDAEHVLDRLPLPDDLRNPIVNKAMFEVRKVVNAIIRQYGKPARIVVEMAREVKGSLSEREDIQFKMRQNQNRNEEADQVLMTEMDIRNPKYDDRLKYKLWLECGKICPYTGKSICQRALFGSEPEFQIEHIIPYSRSLDDSYMNKTLCWVDENRRKGEKMPYEFYEGTSQYEEILQRIACLPWPKRRKFLQKEIELDKCIERELNDTRYICKQIIAYLRQLGVIVKGTRGKVTAELRHGWGLNNILDLTGAGLKNRDDHRHHAVDAAVVAVTTNEHLRMLAHSKYSVTGEKFTEPWLGFRQSLAEAVNKINVSHRVTRKASGQLHEETSYGLGEDVREFFKQGEFNKEDIRQLSTNVWLCQKKFEYIYSRPPVDILKQIKDIDSITPDAVNIRDAIAKRLIDNGIDPTDKQANIDKLFKDNLFIEGKDGKKTIVKKVRVKTNMGNMLIFCDKQGKPYRASPTGGNHHVEIFRSTQHFDKKGKAKMAAKVISLFEVVQRSRHGQPIIQKDYTYYKNNADDMKFVCSLAINDMVMLPDKDGQENLYRVQKMDINGQIYFRHHTAATIGSESTVIRRQATVFDGYKVSIDPLGEIHKAND

SEQ ID NO: 19318 - protein, 988 aa, unidentified
  REGION 1..988: note = Cas Enzyme sequence
VGYTLGLDLGTNSIGWALINHDEDGRPIQLETCGTRIFQEAVDAKTRTPKNQARRAARMARRLISRRRRRRERLLGLLVSKGLLPSDWLNRTSAESHYNALGNPYELRRKGLDQPLTPHEFGRVLVHLCQRRGFESNRKSKPKDEGEIKQAISQLQVEIQTAGCRTLGEFLAGQKEKKRERHTGREMYRQEFELLWESQSRFHPATLTMDFKVIVHNVIFHQRPLKVKSGSVGRCTFEPRRFRASRAWPDAQRFRLLQDLNHLQIKSPTTREYRNLDSEEREKLLDLLEQQKTVSWKKARRTLGLHEGELFNLEEGKKKELLGDQTSYALRKVLGEKWDELSKERRDALVCDLLTIENNAGVLNRLQTHWGFNNEMAESVAKLELEDGYFRLSLKAIRKILPYLEQGMIYDKACAAAGYSHTGNGSGHGVAKLGNPPQLRNPVVQKALYEARKVVNAVIRRYGKPLVIRVEMARDMKLTKKQKDNLAKQNKQNETLNSQAEEALRARDIQQPSRDDKVKYRLWKEAGGVCPYTGQQISEAMLFSQDVDIEHILPYSRTLDDSYMNKTLCLAQENRTVKHNRSPYEAYSPTPEKYEAILQRIRSLPWPKRRRFEQKEIDTDGFIARQLNDTRYICREVKDYLATLGVNVEVSKGEATAWLRHTWGLNRILAGDGPPEKNREDHRHHAVDAVVIALTSRRLFQHLSKLSAQQRGPVSLRRLSINEPWMDFYRTVDDKIQGVVVSHAPVHKIRDAFHEDTAYGYSEATRSFVYRVPLDGSFKETAIKEIRDAAVRELVKTRLDETGGDIKRAFGDPNNPLRHVDGVTPIRSVRIKARVSRETVAPVRDRNGAEYKFFKYGNNHHVEIIEHNETGRRQGIFVTTMEAARRARIAKLPIVQRQPPWTDGGKTYGDGWSFVMSLCINDLVGIEDSGKNRVMRVQKLAASNGNVILRDHIDAKTKQDSQYSKSAATLRCKKAQIDPLGNISFAHD

SEQ ID NO: 19319 - protein, 1005 aa, unidentified
  REGION 1..1005: note = Cas Enzyme sequence
VLGLDLGTNSAGWALIEHSVDADGLAKPTRLVDAGVRIFPEGIEAKSSESRNVARRAARGMRRQHDRRNRRRDALRHRLQRAGLLPREKTELAAVLSANPYALRARGLDEKLEPFELGRALYHLGNRRGFKSNRKTERKTNKKDKDTVQTAITDLQKKIEDAKARTLGEYLSRIDPFKERTRCRYTSRAMYEHEFDALWDAQRPNHPAILTDDLRRQIHETIFNQRPLKVQKNLVGKCELEPTRKRAPKGLWYAQQFRLLQDVSHLEVLDIKTGEIRKLNDGERKELIAELQKKQTMTFDQIRKTLGMLDGQKFNFETANHRDKLKGNSTEARLRKALAKSYDQLTAQTRDEIVRDLLYLDDADVIRSHAISRWKLNEEAAEKLAGIDLESGYLHLSERALRKLIPHLEQGLSYMEAVVAAGYERPDQRKIEVRKELTREDMPDLRNPIVTVAMNQTRRLVNAIVREHGKPARIRVEMARDLKVSLKKRSEILSENKKNRLENETTDKILEQDFGISNPSRDDRVRYRLWKEAGYACPYSGQTIPKQSLFSPDWEVDHILPLPLSGDDSYLNKVLCATAANRDKGDRTPWQAWHGEETRWDEIVHRIKVLPWPKRKRFEVKEIDTDVFIARQLNDTRYIAREARSYLETLTGKNGVQVGKGGVTAALRRRWGLNGILSDSGEKTRADHRHHAIDAVVIALTTVGVVKRMSRLSALGRRPEDAGFPPPWEHFRDDVKRRVETMLVSHQAQRGLRGPLHEETNYGILGLKDEKGNELFAVRKSLAAMTQSELERVADNNVREIVKAHLRAHGADPEARNAEKTEQWKKAMTPPNYPTLPNGNGAPVPIKKVRLHKPSGGMIRMKNRDGVEYRAVESGSNHHIVIFEHTAEGKKKGGWDGEVVSMFEAAQRIRRHEPIIRRDLGEGKKFVMSLSINEIVKVTENGESAYWRVQKIDAGNMRVTFRPQNDARKSEDKSFEKTIGVGPLKKLAPAKVTIDPVGREHPAHD

SEQ ID NO: 19320 - protein, 1087 aa, unidentified
  REGION 1..1087: note = Cas Enzyme sequence
MISEGHAKRQYVLGLDIGSTSIGWACIESYQGKPKAVLATGVRLFDAGMSGDFEMGKEASNAIERRQKRLARRQFHRKAVRRWKVYKLLQNSGLFPNFGIASLKEFSPHIEKLDRMLGKKYKIGSDHVSSQLLVYKIREKATKEAIDLHDLGRAIFHLAKRRGFNSNLRGVSKKDEDEGEIKSNIKSLANELESRGVTLGEYFASENPIEKRIRARWTGRDMFIKEFDRIWEVQSKYHKELTPELYKKLRKAIFFQRPLRSSKGLVGKCSIVKNKRRLIAAHPLAQEVRMLQFVNNVRVCEPGKVDRQLNPQEREAAISKLTESEKLTIKQFRDCAGLPKKAKLNFENDDDTHAYGMGTTSSFRAILGDGWDKLNPISQEKLIHDVISFNKRDALIRHLIQRWQFDQDQAIALSDLNLEPGYASHSRVALEAIRGLLANPDNSTGVWLTYSEAKQKAFPDAKSSQSYPVLPPVRDVISNITNPSVIRALTEVRKVVNELIGRYGIPSVIRIELARELKKSKKERKKIEDLIREQTKKRRSALSRIREEITGYPEKVGYDRGIEMILLAEECNWQCPYTGEQITSVKDLMGDNSRFDIEHIFPRRYLDDSFSNKTLCLNHENRNVKKDQLPAIAYQSNPERFEEIIGRVRRFKGVAASRKLERFLATEVPSDFVSRQLDETRYMSRAAADYLGLLYGGRIDDAGKQRVFTITGGLTAILRGQWKLNQILGLVDEKNRADHRHHAVDSIVIACTDMSIVQALQSAASQGWNLGGTRRYPQIDPPFAELLEESRRSILQVVVSHRPNRKLNGPLHADTLYSVKKNAAGKYDSKIRKPLKDLTEMQIDRIVDETVKKIVQAKYRQLLAVNKPPKKAGDLFASVENHPFIENADGSCTPIHSVRIWEYTNADKPQQKQITTKGGTRFLSSIGGSNYCSRFYSILDPRGQEIGWRDRVLSRLEAMKLFGKGKSKKKVVLQEIDESTSTAGLGAQEFDENLFVFDLFIHDFILMNNKQQVPTLFRVMSLSSGDIEVRVHTDGRRSDAVKKSGDRVRIGAKSILRRGFRKVFISPAGMLVDAITGEILEKTCFVD

SEQ ID NO: 19321 - protein, 1215 aa, unidentified
  REGION 1..1215: note = Cas Enzyme sequence
MKEKVLGIDLGTNSIGWAIVEKEDENCKLLDKGVVIFQEGVARDKGNEKPMVQTRTDARASRRHYFRRRLRKIELLRVLISNNLCPNLSEQQLIDWKTKHSYPLDKEFIEWQRTDDNCDRNPYHDRYIALTKKLDLSDVNQRYILGRALYHLCQRRGFLSNRKDSTKELDGTVKQAISDLSTKMEQAGCKYLGEYFYKCYQSGEKIRGLYTSRNQHIRAEFDAICDKQDLPDELRNAIARAIFYQRPLKSQKGLVGKCTFEHDKSRCPISHPSYEEFRMLQFVNNIKVKTLYDTEYRQLDESERAQIAPLFFRKSKLSFDFEDIAKKLAGKPMYYSHLEEKPNAAYKFNFAMSTSINNCPVISCFVEIFGNDWRNELKSRYKKAGNKSENEIINDVWHALFSFDDDDKLRQWAIDNLSLDEDQADTFIKCPIHQGYASLSLNAINKMLPYLRQGLRYDTAVFLANIEAVLPIQVKEDADQLDGIKSQVVDLINDYESNPILQKYTKAELINDMLLGIPGVEYNDIQKLYHPSQLQTYPEAQLNKNGELLLGSPRTSSIRNPMAMRALFQLRHLINTLLREHKIDRTAKINIEFARSLNDANMRKAIERYQRENEAKRKQYKDRLIKEYKGITGRDIIPSDDDILKYQLWEEQDHKCIYTNTQIDISEFLGANPKYDIEHTVPRSRGGDDSMMNKTLCECRYNRAEKRAKLPAELADHEIILAHVDALGWKDKIEDLRKQINRTKGRYFASKEQKDNNTQYRHYLELQLKYWQGKYSRFTMTEIPKGFSNRQGVDIGIIGRYAKEYLASVFHTPDHNLIYTVKGATTADFRKMWGLQEEYTSKERINHCHHCIDAIVIACIGKAQYDQWAHYCNQKELASWDCTEKPTFPKPWDTFTQDVKNIASELLVTHHTADNTLKQSKKALRIRGKIQRTPDGKTIYQQGDTARAQLHLQTFYGAIKRDGELKYVIRKQVDALEPKDIKNIVDDTVKSIIEEQISAKGFAKAIAEPIWMNEAKQIPIKKVRLYAANVTKPIHLKKQRDLSVKDYKQDYHVSNDGNYCLAIYEGYNAKGKVKRSYKLINNLSAVRSRKNSSLIPLSDDNEYPLKWTLKVGMMVLLYEKSPDEVYNAPQSELVRRLYKVTGLSTLPVGPGYGSIVLRYHQEARPAGEYKNKNGAWVIGEEIRPSIFVYHTQFNALVQGQDFEITDSGEIKFFKI

SEQ ID NO: 19322 - protein, 1215 aa, unidentified
  REGION 1..1215: note = Cas Enzyme sequence
MKEKVLGIDLGTNSIGWAIVEKEDENCKLLDKGVVIFQEGVARDKGNEKPMVQTRTDARASRRHYFRRRLRKIELLRVLISNNLCPNLSEQQLIDWKTKHSYPLDKEFIDWQRTDDNCDRNPYHDRYIALTKKLDLSDVNQRYILGRALYHLCQRRGFLSNRKDSTKELDGTVKQAISDLSTKMEQAGCKYLGEYFYKCYQSGEKIRGLYTSRNQHIRAEFDAICDKQDLPDELRNAIARAIFYQRPLKSQKGLVGKCTFEHDKSRCPISHPSYEEFRMLQFVNNIKVKTLYDTEYRQLDESERAQIAPLFFRKSKLSFDFEDIAKKLAGKPMYYSHLEEKPNAAYKFNFAMSTSINNCPVISCFVEIFGNDWRNELKSRYKKAGNKSENEIINDVWHALFSFDDDDKLRQWAIDNLSLDEDQADTFIKCPIHQGYASLSLNAINKMLPYLRQGLRYDTAVFLANIEAVLPIQVKEDADQLDGIKSQVVDLINDYENNPILKKYTKAELINDMLLGIPGVEYNDIQKLYHPSQLQTYPEAQLNKNGELLLGSPRTSSIRNPMAMRALFQLRHLINTLLREHKIDRTAKINIEFARSLNDANMRKAIERYQRENEAKRKQYKDRLIKEYKGITGRDIIPSDDDILKYQLWEEQDHKCIYTNTQIDISEFLGANPKYDIEHTVPRSRGGDDSMMNKTLCECRYNRAEKRAKLPAELADHEIILAHVDALGWKDKIEDLRKQINRTKGRYFASKEQKDNNTQYRHYLELQLKYWQGKYSRFTMTEVPKGFSNRQGVDIGIIGRYAKEYLASVFHTPDHNLIYTVKGATTADFRKMWGLQEEYTSKERINHCHHCIDAIVIACIGKAQYDQWAHYCNQKELASWDCTEKPTFPKPWDTFTQDVKNIASELLVTHHTADNTLKQSKKALRIRGKIQRTPDGKTIYQQGDTARAQLHLQTFYGAIKRDGELKYVIRKQVDALEPKDIKNIVDDTVKSIIEEQISAKGFAKAIAEPIWMNEAKQIPIKKVRLYAANVTKPIHLKKQRDLSVKDYKQDYHVSNDGNYCLAIYEGYNAKGKVKRSYKLINNLSAVRSRKNSSLIPLSDDNEYPLKWTLKVGMMVLLYEKSPDEVYNAPQNELVRRLYKVMGLSINPSGPGYGCVTLRYHQEARPAGEYKYKSGVWIHDEEIRSGIYMLHTQFNALVQGQDFEITDSGEIKFFKI

SEQ ID NO: 19323 - protein, 1220 aa, unidentified
  REGION 1..1220: note = Cas Enzyme sequence
MTEKVLGIDLGTNSIGWAIVEKEDASCSLLDKGVVIFQKGVAEEKGNEKPMVQTRTLARATRRHYFRRKLRKIELLKVLTAGGFCPTLTAEQLQAWKTQRTYPLDPEFIEWQRTNEDADKNPYHDRYVALTRQLDLSQRSQRYLLGRALYHLCQRRGFLSNRKESTKELDGTVKQAIGDLSEKMEQAGCKYLGEYFYMCHKSHEKIRGLYTARNQHIRAEFDAICERQNLPDDLRKQLARAIFYQRPLKSQKGAVGKCTFEPTKSRCPISHPAYEEFKMLSFVNNIKVKTTSIFDGGDYRQLTPEEREQIYPLFLRKSKLSFEFEDIAKKLAGKPIYYGYMEEKPNALYKFNFAMSTSVSNCPVTAYLADIFGEDWRNELRARYKKAGNKTRGEVINDVWHALFSFDDDERLHHWAMANLSLTPEQADAFVKCPIHQGYASLSLNAINKMLPYLRQGFRYDTAVFLANIEAVLPIDVKEDAELLTKIKQQVITLINDYEADQQQKTYTKVELINDFLLSIPGVECSDLHKLYHPSQLQVYPAAQPNSRGEVLLGSPRVSAIRNPMAMRALFQLRHLINTLLLERKIDRTTKINIEFSRELNDANMRKAIQRYQRENEATRKKYRERLIKEYRDKTGREIIPSDTDILKYQLWEEQQHLCLYTNQQIDISEFLGDNPKYDIEHTVPRSRGGDDSMMNKTLCDCRYNRSVKRAKLPSELADHARILAQVEELGWREKIDDLRNQINRTKGRYFATKEQKDQNIQRRHYLELQLKYWRGKYERFVMTEVPQGFSNRQGVDIGIIGRYARMYLASVFHAQDRNLIYTVKGATTSDFRKMWGLQEEYTSKERVNHCHHCIDAIVIACIGKAQYDAWAQYCERRELAAWDCAEKPSFPKPWETFTQDVKGVVDELLVVHHTPDNTLKQSKKALRVRGKIKKTADGRPIYQQGDTARAQLHLQTFYGAIERDGEIRYVIRKQVDSLEQKDVKNIVDDAVRAKVEEQIAAKGFAMAIAEPIWMNEAKRIPIKKVRLYANNITKPIHLKPQRDLSRKEYKRDYHVANDGNYCLAIYEGCNDKGKVKRSYKLINNLTAVRSRTDDRLVPLSDDNEYPLKWILKVGMMVLLYEKSPEEVYNATKEELVKRLYKVTGLALYPTGPGYGGIVMRYHQEARPAGEYKNKNGAWTIGEVIRPSIFVYHTQFKGLVEGQDFEISDSGEIKFFRMNI

SEQ ID NO: 19324 - protein, 1220 aa, unidentified
  REGION 1..1220: note = Cas Enzyme sequence
MTEKVLGIDLGTNSIGWAIVEKEDASCSLLDKGVVIFQKGVAEEKGNEKPMVQTRTLARATRRHYFRRKLRKIELLKVLTAGGFCPTLTAEQLQAWKTQRTYPLDPEFIEWQRTNEDADKNPYHDRYVALTRQLDLSQRSQRYLLGRALYHLCQRRGFLSNRKESTKELDGTVKQAIGDLSEKMEQAGCKYLGEYFYMCHKSHEKIRGLYTARNQHIRAEFDAICERQNLPDDLRKQLARAIFYQRPLKSQKGAVGKCTFEPTKSRCPISHPAYEEFKMLSFVNNIKVKTTSIFDGGDYRQLTPEEREQIYPLFLRKSKLSFEFEDIAKKLAGKPIYYGYMEEKPNALYKFNFAMSTSVSNCPVTAYLADIFGEDWRNELRARYKKAGNKTRGEVINDVWHALFSFDDDERLHHWAMANLSLTPEQADAFVKCPIHQGYASLSLNAINKMLPYLRQGFRYDTAVFLANIEAVLPIDVKEDAELLTKIKQQVITLINDYEADQQQKTYTKVELINDFLLSIPGVECSDLHKLYHPSQLQVYPAAQPNSRGEVLLGSPRVSAIRNPMAMRALFQLRHLINTLLLERKIDRTTKINIEFSRELNDANMRKAIQRYQRENEATRKKYRERLIKEYRDKTGREIIPSDTDILKYQLWEEQQHLCLYTNQQIDISEFLGDNPKYDIEHTVPRSRGGDDSMMNKTLCDCRYNRSVKRAKLPSELADHARILAQVEELGWREKIDDLRNQINRTKGRYFATKEQKDQNIQRRHYLELQLKYWRGKYERFVMTEVPQGFSNRQGVDIGIIGRYARMYLASVFHAQDRNLIYTVKGATTSDFRKMWGLQEEYTSKERVNHCHHCIDAIVIACIGKAQYDAWAQYCERRELAAWDCAEKPSFPKPWETFTQDVKGVVDELLVVHHTPDNTLKQSKKALRVRGKIKKTADGRPIYQQGDTARAQLHLQTFYGAIERDGEIRYVIRKQVDSLEQKDVKNIVDDAVRAKIEEQIAAKGFAMAIAEPIWMNEAKRIPIKKVRLYANNITKPIHLKPQRDLSRKEYKRDYHVANDGNYCLAIYEGCNDKGKVKRSYKLINNLTAVRSRTDDRLVPLSDDNEYPLKWILKVGMMVLLYEKSPEEVYNASQEELVKRLYKVTGLSFFPGGSGYGCIVMRYHQEARPAGEYKNKNGAWTIGEVIRPSIFVYHTQFKGLVEGQDFEISDSGEIKFFRMNI

SEQ ID NO: 19325 - protein, 1220 aa, unidentified
  REGION 1..1220: note = Cas Enzyme sequence
MTEKVLGIDLGTNSIGWAIVEKEDASCSLLDKGVVIFQKGVAEEKGNEKPMVQTRTLARATRRHYFRRKLRKIELLKVLTAGGFCPTLTAEQLQAWKTQRTYPLDPEFIEWQRTNEDADKNPYHDRYVALTRQLDLSQRSQRYILGRALYHLCQRRGFLSNRKESTKELDGTVKQAIGDLSEKMEQAGCKYLGEYFYMCHKSHEKIRGLYTARNQHIRAEFDAICERQNLPDDLRKQLARAIFYQRPLKSQKGAVGKCTFEPTKSRCPISHPAYEEFRMLSFVNNIKVKTTSIFDGGDYRQLTPEEREQIYPLFLRKSKLSFEFEDIAKKLAGKPIYYGYMEEKPNALYKFNFAMSTSVSNCPVTAYLADIFGEDWRNELRARYKKAGNKTRGEVINDVWHALFSFDDDERLHHWAMANLSLTPEQADAFVKCPIHQGYASLSLNAINKMLPYLRQGFRYDTAVFLANIEAVLPIDVKEDAELLTKIKQQVITLINDYEADQQQKTYTKVELINDFLLSIPGVECTDLRKLYHPSQLQVYPAAQPNSRGEVLLGSPRVSAIRNPMAMRALFQLRHLINTLLLERKIDRTTKINIEFSRELNDANMRKAIQRYQRENEATRKKYRERLIKEYRDKTGREIIPSDTDILKYQLWEEQQHLCLYTNQQIDISEFLGDNPKYDIEHTVPRSRGGDDSMMNKTLCDCRYNRSVKRAKLPSELADHARILAQVEELGWREKIDDLRNQINRTKGRYFATKEQKDQNIQRRHYLELQLKYWCGKYERFVMTEVPQGFSNRQGVDIGIIGRYARMYLASVFHAQDRNLIYTVKGATTSDFRKMWGLQEEYTSKERVNHCHHCIDAIVIACIGKAQYDAWAQYCERRELAAWDCAEKPSFPKPWETFTQDVKGVVDELLVVHHTPDNTLKQSKKALRVRGKIQKTADGRPIYQQGDTARAQLHLQTFYGAIERDGEIRYVIRKQVDSLEQKDVKNIVDDAVRAKVEEQIAAKGFAMAIAEPIWMNEAKRIPIKKVRLYANNITKPIHLKPQRDLSRKEYKRDYHVANDGNYCLAIYEGCNDKGKVKRSYKLINNLTAVRSRTDDRLVPLSDDNEYPLKWILKVGMMVLLYEKSPEEVYNATKEELVKRLYKVTGLALYPTGPGYGGIVMRYHQEARPAGEYKNKNGAWTIGEVIRPSIFVYHTQFKGLVEGQDFEISDSGEIKFFRMNI

SEQ ID NO: 19326 - protein, 925 aa, unidentified
  REGION 1..925: note = Cas Enzyme sequence
MAQGGWRTVGEMLYRHEAFAFHKRNKADEYLSTVGRDMVAEEASLLFQRQRELGCAWATPELQAEYLSILLRQRSFDEGPGGNSPYGGNQVEKMVGRCTFEPDEPRAAKAAYSFEYFSLLQKINHIRLVENGETRPLTQPQRQQLLSLAHKTPDISLARIRKELALPETVQFNGVRCRANETLEESEKKEKFACLPAYHKMRKALDGVVKGRISSLSISQRDAAATALSLYKNEDTLRAKLTEAGFQAPEIDALAGLTGFSKFGHLSLKACGRLIPHLEQGLNYDQACTAAGYDFKGHGAGERAFTLPAAAPEMEQITSPVVRRAVAQTIKVVNGIIREMDASPAWVRIELARELSKTFGERQEMDRSMRENAAQNERLMQELRDTFHLLSPTGQDLVKYRLWKEQDGVCAYSLRRLDVERLFEPGYVDVDHIVPYSLSFDDRRSNKVLVLSSENRQKGNRLPLQYLQGKRREDFIVWTNSSVRDYRKRQNLLREKLSGDEAEGFRQRNLQDTQHMARFLYNYISDHLAFAQSEALGKKRVFAVSGAVTSHLRKRWGLSKVRADGDLHHALDAAVIACTTDGMIRRISGYYGHIEGEYFQDADGAGSRHARTKERFPAPWPRFRDELIVRLSEQPGEHLLDINPAFYCEYGTEHICPVFVSRMPRRKVTGPGHKETIKGAAAADEGLLTVRKALTELKLDKDGEIKDYYMPSSDTLLYEAIKAQLRRFGGDGKKAFAKPFYKPKADGTPGPLVRKVKTIEKATLTVPVHGGAASNDTMVRVDVFLVPGDGYYWVPVYTADTLKPELPNRAVVQGKPYSEWKEMREEDFIFSLYPNDLVYVEHKSGLKFTLQNADSTLEKTWVPKASFAYFVGGDISTAAISLRTHDNAYGLRGLGIKTLKVLKKYQVDVLGNISPVHRETRQRFR

SEQ ID NO: 19327 - protein, 1422 aa, unidentified
  REGION 1..1422: note = Cas Enzyme sequence
MGKILGLDLGTNSIGWAIVEIEDGIYKLLAKGVRIFQEGVKIEKGIESSKAAERTGYRSARRIKYRRKLRKIEVLKVLSEQGYCPPLSEEELKLWRYKKIYPQNNAFKEWYLTDNEGDITERKALTKNPYYYRYLAATEKFDFTTEQDRHRFGRAIYHLAQRRGFLSNRLDSTPENENSKVTSAISYLNKLIKAADCKTLGQYFYQKYLQGEKIRSQYTHREEHYLSEFNFICEAQNIPVEVKTLLYKAIFYQRPLKSQKGLIGKCVFETNKQRCATSRPEFEEFRMLSFINNIKIKTPDDEKLRFLNEDEKQKIIPQFFRVSKDHFDFIDLAKKLANEKQCKFYKSKDVNPEDTLFNYSMNTTVSGCPVTARFKSLFGDDYLNLAISYTREKDNKESTITMDDVWHVLNTFDSNEKLAEFAQKRLGFDDDQIKSFVNTKLKNDYASLSLKAINKINRYLKAGLIYSHAVFLANMENAIPKEIWNEEENQRIIQEEILRIIETQNEEKLIIDVVNGIIKTAKNEKSTWSNEAAQLYKEDILRQLKAIIGPKRFASYTPEKQNQLHKDAFALLEEYMPKNNGIGEFIKVQTIDERIKGFISDNFNIEAASLEKLYHPSALDIYKAPYKGKDGKYYLGSPMVTSVRNPMAMRAMHQLRKVTNELIKNELIDKDTKIHIEMARDLMNANERAGLKNYQKARENQRESYRKAITEHFEEQNIKADPSEDDILKYQLWEEQKRVCLYTGDPIALSDFIGADPKYDIEHTIPRSLSFNDSQENKTLCEGVFNRKIKRNKIPSELANHSEILERITHWKEEYEKVDKLISIQAKKAKTAFDKNQKDKAIQERHKLTLERNYLRNKYTSFARLDVPSGFKNSQLVDTGIITKYARLYLQSLFNKVYTVKGNTVADFRKCWGLQDNYSKKARVNHVHHCIDAITIACMSKQNYELLAKHYHDMEDSFVKNNEKKPFFPKPWKTFTEDIKNIENEILVSHHTPDNLPKQSKRILRKGGKKQYDQTGKEIFLKGDTVRGSLHKDTFYGAIIQKNKNSNGKTETVTKYVKREWLDPLNDTQLKNIVDDRIREIVSNGRKEQKLLEKSIAKLKAQLTKAEEHEEPAIKASIEGLKNDITNIYCLPNKNGAPIPIKKVRVYQPSVSSPIILNKKQRDVNSRNPKPHKENYYVVNDGNYLMAIYDGTDAKGMVKRDYKLINNLEGGDFFKKSTKDTLLPQNKHTINDLINSGLDDDVTIKYVLKQGQSALLYTESPDELWEMNNHELGQRLYVIRGLDKDGIKLYYHQEARPTTDVIKFMNEVIDTGYRNECKIDTKKTSSLLKSLGIKISDKEINTIAKESNGKYLVLNNDGETLATLDEIDSLLKTSKLSTPKGGDVIGRKDEFPYIKFKAGNFKALVEGVDFELDTLGQITRLN

SEQ ID NO: 19328 - protein, 905 aa, unidentified
  REGION 1..905: note = Cas Enzyme sequence
KAVFLANIPSLIGRSCWESRQEEIISIVETEMSHITREKNITDIVNGLISQYNNLPYNQRFARNTPEYTLDSDDHQDIGQAIGHYFGTGKWSQLSPEDHSLYRQQIAVLYEQALRLSTSGELSFIKPPRLESNLKKALGTALGIDPGEKLLNKLYHPSEIESFLPALDAPGMVARKILNSPRTDSIRNPMAMRTLHELRKLVNYLIENDLVDDHTHVIVEMARELNDSNKRQAIERYQRERQAVNQKYAGEIQKIFKEQNRTLPQDLSTYIDRYRLREEQPARACLYTGQTISDSDLFDEFTTDVEHTIPRSLSFDDSLQNKTIAFKYYNNEIKDKLLPSQLPNYTEEAHGYSSIQPRLREWQDKVDQYQERIDRAIRKSRSASTKEAKDHAIQERHFCSLHHRYWKGKLERFEMTDITDGFKNSQLIDTQIIAKYGVLYLKTLFFHVRSTKGEITDKIKRIWGALSKDEKKDRSRHSHHAADAIIQTLLYKERNKPDIYNILAASYKTAEDNKWKEPKVPNPWGLDPGTFYTIMQNLMEDILVYHADRDNVLKQTKKKIRSNGSIVYSKDGGNNVPVYQKGRGIKGSLHKDTFYGAIKIPVKENGKLISDPGGRLVLQKDEDGNDIIKYRTGFVFNGNTLDAIRKAIENIVDDRLRQLAEETGAAVIQKQGYFEIPPSEQRKRRDALAQSTKVYKVKIFADKMQNPIKLKRHVEGAPEHKQWYYVQTDGNYLMAFYENGRQRDFKIINLYELAGLVGESQGLYPLYKEKTIRGKKIVLPLARRNNKDLVLKQNLKVLLYEKSPEEIISDQTNRNLSDRLYKVTGLSIQRAKFEGEMYLYGIITLTHHLEARRNSLLKMESGDYKFGDGKTFRKLSHNKFKGFIENIDFTISHEGTIQILPSVNE

SEQ ID NO: 19329 - protein, 1022 aa, unidentified
  REGION 1..1022: note = Cas Enzyme sequence
LLGGIKNTFGSRWEYFKDYHSDIEQFIKDLCNGKKYHEGEIIQNIKEYLSSTVNNFGFNPNDKAFLKLYHPSREVGPEKKGDYISPVENLRNPLVQIGLNEMRRLVNYLLKKYRSMPEFGPDFCFDRIHVEVGRDLKNNKKRRQEIRKENAINEQKNKEARERIIEAGLKPSRDNIIKYLLYSEIEQKNGIVICPYTGKTIRLSDLLGPHNFFQIEHIIPYSVSLDDSFGNKTLCEANFNRSKGELTPYQFYLKNSSKSLWNADSWEEIEQRVFQILPYKKARRFTSKKPAMLDDFIQRQLNDTRYISKKSVQILREICDDVRSFPGQLIADLRRLWGLNDILSEPITDIPLNDLNINESEPTIHYLIVDENNHVKKAIPKINFKPIPMDNELAIPGEIKKETGNKFYFESDSKYYASLKIPANGFETGKYWAFIKAQAAQEFIPRFTPQPQISENVIIIKGNLKKKRFINESHGINFNTNKIIEDGYYWAIIPVIKAEIKQNDINDNRKNENKISIQGRVSNQKFISSIYSCEAQLINGFYTALLDFDVNNADFLPALNLPRPPENYYTLNGTVDSQGIFCPDMDYNWKLKADVAPGRYFIYFKIQEIINFQPIENPKPIIDKNNNEKIIESLIRVDTETGEIIIDPKKNREDQRHHAIDAIVIASATTSYYQKLSTYFGNLKNKQRNLAPKPKFEQPNPHFQNAVKEAISKILVSYRTNYRVLVPVYKRIRKNHDTYVSKGYSVKGQLHKDTFYGGYILDQGEGKIVSAAKYLPGIKPQQYHVRCNITEIKDHKHVAKIVDTTIKKLIENRLQNVFNIDISKPYNIPNGFFFDKDKNPAIRLPNRKGGDPVPVYTVRIFEYKGNAVKLKPNINCYVDPRNNHHCIIYKDVEGNLKFEMVKFWDAVNRLRHKQPLYQLPPDGSQIIATVQENDMFIFNYLYASDISEDMKIPYEELSKYLYRVQKISSTEGGIFLTFRHHLASTIKNPEEELRIQSLRSWERHQPIKVKINMDGTVNKIIK

SEQ ID NO: 19330 - protein, 1459 aa, unidentified
  REGION 1..1459: note = Cas Enzyme sequence
PLSLNSLKKWKNWNNELKSDGRKFPNDPEFIEWLKMNPYALRKKALEEDLSLEQLGRIFYHFIQRRGFYSSRKGKDSGKIYQGENNTIGILETEKEIGYNKTLGTTLYEMILPEHQTYIYRTDENRRPLRARNRYTLREMYVKEFHAIWEKQAPHLGLNDKTVTIFKSFHLSGNNDSERNKQRINKIYLQYGIENVTITGKTIKVAQQISLKTLFGGRIEINDETHEILYRSQDSLLFWQRPLRSQKHLLSKCTFEKRIMFDKTTNKWIETGPTPCPISHPDFELYRAWQLINNIRYGRKEQPLDASQRQTVLNVISYQDKVFDFKVIIDALKLQNEYFNYDADQKVSGCPTIKKLKSLFPTEIWVQNKHEIWHDFMFFEDEELLTQRLIKKYHFTEEKAQKSAKITLEDGYASISLKAIHNILPFLEKGFIFQQAVLLGGIKNTFGSRWEYFKDYHSDIEQFIKDLCNGKKYHEGEIIQNIKEYLSSTVNNFGFNPNDKAFLKLYHPSREVGPEKKGDYISPVENLRNPLVQIGLNEMRRLVNYLLKKYRSMPEFGPDFCFDRIHVEVGRDLKNNKKRRQEIRKENAINEQKNKEARERIIEAGLKPSRDNIIKYLLYSEIEQKNGIVICPYTGKTIRLSDLLGPHNFFQIEHIIPYSVSLDDSFGNKTLCEANFNRSKGELTPYQFYLKNSSKSLWNADSWEEIEQRVFQILPYKKARRFTSKKPAMLDDFIQRQLNDTRYISKKSVQILREICDDVRSFPGQLIADLRRLWGLNDILSEPITDIPLNDLNINESEPTIHYLIVDENNHVKKAIPKINFKPIPMDNELAIPGEIKKETGNKFYFESDSKYYASLKIPANGFETGKYWAFIKAQAAQEFIPRFTPQPQISENVIIIKGNLKKKRFINESHGINFNTNKIIEDGYYWAIIPVIKAEIKQNDINDNRKNENKISIQGRVSNQKFISSIYSCEAQLINGFYTALLDFDVNNADFLPALNLPRPPENYYTLNGTVDSQGIFCPDMDYNWKLKADVAPGRYFIYFKIQEIINFQPIENPKPIIDKNNNEKIIESLIRVDTETGEIIIDPKKNREDQRHHAIDAIVIASATTSYYQKLSTYFGNLKNKQRNLAPKPKFEQPNPHFQNAVKEAISKILVSYRTNYRVLVPVYKRIRKNHDTYVSKGYSVKGQLHKDTFYGGYILDQGEGKIVSAAKYLPGIKPQQYHVRCNITEIKDHKHVAKIVDTTIKKLIENRLQNVFNIDISKPYNIPNGFFFDKDKNPAIRLPNRKGGDPVPVYTVRIFEYKGNAVKLKPNINCYVDPRNNHHCIIYKDVEGNLKFEMVKFWDAVNRLRHKQPLYQLPPDGSQIIATVQENDMFIFNYLYASDISEDMKIPYEELSKYLYRVQKISSTEGGIFLTFRHHLASTIKNPEEELRIQSLRSWERHQPIKVKINMDGTVNKIIK

SEQ ID NO: 19331 - protein, 1138 aa, unidentified
  REGION 1..1138: note = Cas Enzyme sequence
VFDFKVIIDALKLQNEYFNYDADQKVSGCPTIKKLKSLFPTEIWVQNKHEIWHDFMFFEDEELLTQRLIKKYHFTEEKAQKSAKITLEDGYASISLKAIHNILPFLEKGFIFQQAVLLGGIKNTFGSRWEYFKDYHSDIEQFIKDLCNGKKYHEGEIIQNIKEYLSSTVNNFGFNPNDKAFLKLYHPSREVGPEKKGDYISPVENLRNPLVQIGLNEMRRLVNYLLKKYRSMPEFGPDFCFDRIHVEVGRDLKNNKKRRQEIRKENAINEQKNKEARERIIEAGLKPSRDNIIKYLLYSEIEQKNGIVICPYTGKTIRLSDLLGPHNFFQIEHIIPYSVSLDDSFGNKTLCEANFNRSKGELTPYQFYLKNSSKSLWNADSWEEIEQRVFQILPYKKARRFTSKKPAMLDDFIQRQLNDTRYISKKSVQILREICDDVRSFPGQLIADLRRLWGLNDILSEPITDIPLNDLNINESEPTIHYLIVDENNHVKKAIPKINFKPIPMDNELAIPGEIKKETGNKFYFESDSKYYASLKIPANGFETGKYWAFIKAQAAQEFIPRFTPQPQISENVIIIKGNLKKKRFINESHGINFNTNKIIEDGYYWAIIPVIKAEIKQNDINDNRKNENKISIQGRVSNQKFISSIYSCEAQLINGFYTALLDFDVNNADFLPALNLPRPPENYYTLNGTVDSQGIFCPDMDYNWKLKADVAPGRYFIYFKIQEIINFQPIENPKPIIDKNNNEKIIESLIRVDTETGEIIIDPKKNREDQRHHAIDAIVIASATTSYYQKLSTYFGNLKNKQRNLAPKPKFEQPNPHFQNAVKEAISKILVSYRTNYRVLVPVYKRIRKNHDTYVSKGYSVKGQLHKDTFYGGYILDQGEGKIVSAAKYLPGIKPQQYHVRCNITEIKDHKHVAKIVDTTIKKLIENRLQNVFNIDISKPYNIPNGFFFDKDKNPAIRLPNRKGGDPVPVYTVRIFEYKGNAVKLKPNINCYVDPRNNHHCIIYKDVEGNLKFEMVKFWDAVNRLRHKQPLYQLPPDGSQIIATVQENDMFIFNYLYASDISEDMKIPYEELSKYLYRVQKISSTEGGIFLTFRHHLASTIKNPEEELRIQSLRSWERHQPIKVKINMDGTVNKIIK

SEQ ID NO: 19332 - protein, 1381 aa, unidentified
  REGION 1..1381: note = Cas Enzyme sequence
MSRILGLDMGTNSIGWAVRDTQAGTGLEQIIHKGSVIFDKGVGELKGKEFSLAAERTKHRSARRRSQRKRWRKIDLLSILIEHGMCPLSVDELARWKDPKRKATRKYPDSQEFKTWLRLDFDNNGVPDYANPYALRAEALIRRLSLQEIGRLAYHMNQRRGYLSNRSDKAQDAFDTEPDEEETSSRPVTSRRLGKIAGAIKELEDRLDGHTIGQKLHEAIKAGDRARRRTDEGTNISRLTLQAEFLKIAEFQLLPTQLTERIRRTIFDQRPLRSQKATVGHCVYEKDKSRCPISHPEYELYRMWQVLNNIKYSDDDRKTWHSLNPVERITIQKKFFRKSNPTFEFADIRKLFLRQHPHRIFNYNDAQTIAGCPTLAGLISIVGEERVWQMRKAALARLHWEAVEKRASPIAYPSKQLDLFDLWHWLFAMDNDKDQEIIRRKVQFSLGLTDREASQFVAIPLKPGYGNLSLKAIRKINHWLEQGERYDTAVFLANVPHLIGNSIWELTKTSLMSAVRQAIEGIGQEKASIDIANRLISQYNNLPYHHRFAKIEGYTLDEDDHKDINTALIGYFGEARWQEFPESLQYNYYERLQNLYSNALKNIGNGDLPYIKPPRLDENIKHAIYRITGLDPASHLLDKLYHPSDIESFAPAVIEVDNSSGRPTGRKLLNTPATNSIRNPMAMRTLYELRRLINYLIRKDIIDEHTQVMVEMARELNDANRRKAIERFQNERKEENVRFEQELKKIFQEQGRTLPADLSAYVERYRLREEQPKRVCMYTGRTISDADLFDENTTDIEHTLPRSLTFDDRMENKSIAYKSYNNTVKNKLFPSQLPNYATDTPEFTAIEPRLLNWESLVAEFEAKTEMAKRRSRLAATKEAKDKAIQDRHYYAMHHRYWMSKLERFTLTQVTQGFKNSQLVDTQLISKYGVLYLKTVFFNVRATKGLITDKIKRIWGAQGIGENKDRSNHAHHTIDAIIQTLLYKERNKPDIYNLLAEAYKEAQEHRWKEPRLSNPWGLEPAAFYNAMQRLAADTIVYHADRDNVLKQTKKKVRLKGKIEYRKNDDGSFLQDKQGEKIPFYQTGRGLRASLHKDTFYGAIKPPGKEVVQYRTSFQFRGSSVEDIRKNIPKIVDARLRKLAEEASATNIQKLGYFEIPPSEERKKRDAAAQPTKVFKVKIFADDLKNPIKLKRHAEATREHKAWYYVQTDGNYLVALYDNGREKDFELVNTFDLAGLAGERQGLYPLYKEKIFRGKTFRIPLSRRNGKDVVLRQGTKVLLYEESANEIYADPSPGNLTDRLFKVQGLSIQRIGGKYDYATIHLIHHLEAQPTSRLKVQDGEYKWGDGKKYRKMNHNQLRALIEGVDFHLTHVGTIIFINNVADE

SEQ ID NO: 19333 - protein, 1211 aa, unidentified
  REGION 1..1211: note = Cas Enzyme sequence
MDWQATDEATQKNPYCYRALAVEQKLDLNSAEDRYKIGRAFYHLTQRRGFLSNRLEGTKESDGAVKKSISEINTLKGEKTLGQYFYGKYQKGEKIRNVYTHREEHYLDEFNRICEFQKLDSQFVAKLKKAIFYQRPLKSQKGLVGKCVFEPNKPRCSVSRPEFEEYRMLCFVNSIKIKTPGDDRKSKDYFDFEDLAKQLAPKQQYKYYKSRDIYPEDWLFNYSMKTTVSGCPVSARFKDLFGDNFMDLKLPYKREKDGKESVIDIHDVWHVLFSFDSDEKLKEFAEKRLLLTGEQVSDFLKIRLKKDYASLSLKAINKILPFLRAGLLYSHAVFLANMEEAIPDVIWKKEENRTIIKEEIEKIIANHQDEKQICEIVNGIIKNSHKDESAWSEEASELFKKDLFNKIKAYFGERTYNSFTEEKKNQIETDAFELLKKQMKKNGGRGEFISIQRIEEKVKSFLTDNFEVEGKSLKKIYHPSAIDVYKPPIRKDDGKLYLGSPMVSSIRNPMAMRALHQLRKVINELIKKEIIDSETRIHIEMARGLMNANERKAYQNWQRDRENQRKAYAQKIKEHFSSDKEPSETDILKYQLWEEQNHKCIYTGREIALNEFLGANPSFDIEHTIPRSVSLDNSQENKTLCENEFNRKIKRNRIPFELANHTEILTRIEHWKEKYEDLNKQINKTDFLVKRNSDNKDLKDNFIRKRHELRFQRDYWQNKYRRFTMKDVPEGFKNSQLVDTGIITKYSRLYLNTLFDKVYTVKGSTIADFRRLWGLQDEYEKKARVNHIHHCIDAITIACITKEAYENLAQAYHKWEEVDRMKMSDMPRVNPPWSSFVPDLKSIENEVFISHYTPDVLPKQTKKKLRERGRIIKNKNGSPVYQQGDTVRGSLHQQTFYGAVERTEVNKKGELEKIIKYVVRKPLDLLDDNGIKNIVDEQVRNIVEHARTEEKKLKKEIEVQRKKFARAEEEEESYINAEIEKLNHQIKELYTMPNKNGDPVPIKKVRVYQPMVTNPLPDFKKHRDLSGKEYKQQYNVANDGNYAMAVYEGIDRNEKLKRSIIMVNNFDAGKFFNGKLEESPFPDKHPKNGLYLKYLLKTGTLVLFWEKSPEELRSKNVDKVQRLYKITKMNKDGRITFKYHQEARNDENLRLDYENEHGVKAPKSLTNGESFINFINPFPKLLLSPPNFNFIVENYDFKISSTGKIKWLDVY

SEQ ID NO: 19334 - protein, 1337 aa, unidentified
  REGION 1..1337: note = Cas Enzyme sequence
MAKILGLDLGTNSIGWAVVEKERDSNFKLIDKGVRIFQEGVKIEKGQESSKAAERTGFRSARRLKYRRKLRKIEVLKILSANGFCPTLTNQELSDWRYKKEYPKNSLFMDWQATDEATQKNPYCYRALAVEQKLDLNSAEDRYKIGRAFYHLTQRRGFLSNRLEGTKESDGAVKKSISEINTLKGEKTLGQYFYGKYQKGEKIRNVYTHREEHYLDEFNRICEFQKLDSQFVAKLKKAIFYQRPLKSQKGLVGKCVFEPNKPRCSVSRPEFEEYRMLCFVNSIKIKTPGDDHLRFLTEDEKKKLVPPFYRKSKDYFDFEDLAKQLAPKQQYKYYKSRDIYPEDWLFNYSMKTTVSGCPVSARFKDLFGDNFMDLKLPYKREKDGKESVIDIHDVWHVLFSFDSDEKLKEFAEKRLLLTGEQVSDFLKIRLKKDYASLSLKAINKILPFLRAGLLYSHAVFLANMEEAIPDVIWKKEENRTIIKEEIEKIIANHQDEKQICEIVNGIIKNSHKDESAWSEEASELFKKDLFNKIKAYFGERTYNSFTEEKKNQIETDAFELLKKQMKKNGGRGEFISIQRIEEKVKSFLTDNFEVEGKSLKKIYHPSAIDVYKPPIRKDDGKLYLGSPMVSSIRNPMAMRALHQLRKVINELIKKEIIDSETRIHIEMARGLMNANERKAYQNWQRDRENQRKAYAQKIKEHFSSDKEPSETDILKYQLWEEQNHKCIYTGREIALNEFLGANPSFDIEHTIPRSVSLDNSQENKTLCENEFNRKIKRNRIPFELANHTEILTRIEHWKEKYEDLNKQINKTDFLVKRNSDNKDLKDNFIRKRHELRFQRDYWQNKYRRFTMKDVPEGFKNSQLVDTGIITKYSRLYLNTLFDKVYTVKGSTIADFRRLWGLQDEYEKKARVNHIHHCIDAITIACITKEAYENLAQAYHKWEEVDRMKMSDMPRVNPPWSSFVPDLKSIENEVFISHYTPDVLPKQTKKKLRERGRIIKNKNGSPVYQQGDTVRGSLHQQTFYGAVERTEVNKKGELEKIIKYVVRKPLDLLDDNGIKNIVDEQVRNIVEHARTEEKKLKKEIEVQRKKFARAEEEEESYINAEIEKLNHQIKELYTMPNKNGDPVPIKKVRVYQPMVTNPLPDFKKHRDLSGKEYKQQYNVANDGNYAMAVYEGIDRNEKLKRSIIMVNNFDAGKFFNGKLEESPFPDKHPKNGLYLKYLLKTGTLVLFWEKSPEELRSKNVDKVQRLYKITKMNKDGRITFKYHQEARNDENLRLDYENEHGVKAPKSLTNGESFINFINPFPKLLLSPPNFNFIVENYDFKISSTGKIKWLDVY

SEQ ID NO: 19335 - protein, 1514 aa, unidentified
  REGION 1..1514: note = Cas Enzyme sequence
MAKILGLDLGTNSIGWAVVDTSEKKIVDTGIRIFPEGVEPKTIGQGDKEQSKNATRRDKRQMRRQFYRKRMRKIKLLEILIEQGMCPLSTEELGKWKNWNRTQKTEGRKFPDTDEFNSWIKLNPYDLREKALEEELTLYELGRIFYHMIQRRGFLSSRKGKEDSTIFTKGKPDENILPINETKEQIANKTLGKYLKSISYQDGKPYSTVTDKDGKELRIRGRYTVREMYVEEFEKIWRVQSQFLDIDNRKVEGRKIRELKGTISSTRNRKRIEYLKRKYGEDNVQIATGKKGRIKVITTEALPLKEYLAGKIEFIHDENGEEKLQFKSNESVLFWQRPLRSQKGLLSNCRFEDSLPVIKENGDFLRKQNGEIQTRSKKPCPLSHPEFELFRAYQFINNITYGKNNKLSREQRAIVLDLINKNDKNFDFSKIPDVLKLNYEKFNFDDKQKVAGNPTIKALKPLFENEIWEEHFEEIWHCFYFYDDDIKLYGKLVKDFGFKKGIEAVEGIRLKEGYGNVSLKAIRNILPFLQKGNQYDRAVILGGVKNAFGKRWEHFSEFHDNIEKEIVDILKEDNKDGEAIEKIKEHLASPVFNYGFEKDDAHFLHLYHHSQEVEKRENLLPEIPEVENLRNPIVQQGLNETRRLVNFLLRKYRKIYGSDFHFDRINVEMGRDLRNNKEGRREMSFRISENEKKNDEARDRLAEYGLQPSRDNVQKYLMFREIEERAGKAQCPYTGKTISVADLLGRDNAIQIEHIIPFSVSLDDSFGNKTLCEANFNREKSEKTPYQFYKENPSPKLWGVSSWEAVEERAFRLLPYRKAKKFTAKREFEKSDFIQRQLNDSRYIAKKSVELLSNICHDVRVMPGQLTAELRHLWGLNNILQPVQNLDSHSFDVDGENSIPHYVVTNESGEVVSIHRKQNERPGTVSNEILVTGNINKKKFSSKYFKIDMETPELPDGKYWAKLNVSEPLKMVPKFIGKPQSDEKSIVFKGSVEKGYFKNDTYGRIKADIDDGSYWAKFEVLKVKFESPQKDKQPKTGRNQVLLFGTVYNGEFKCFIYQCETNLRDGKYWIILDLNPDNVEFIRSVNPRPEINDNELLLTATVDETGVLTADLDKEFQVQTSKVSGKFYVVLEILSKEPKLYRIENEPPVLEKGKQLVEGNIWVDKYTGEIKFDPKKNREDHRHHAIDAITIALTEQGYLQRLSTYNAQRKEKQRQKLDSSEKFPEPWEGFQNDAKKAVAQILVSHKKNNKTLTKNKKGFSVRGQLHKENVFGKRQAPNQDPGFHRRKKITEITDYKLVDKIVDVTIQNLIRNYLREKFNLDVGDPKGYKIPKEAFFKDGKWQVYLPNKKGDDIPIKKVRIKETLGNAAQLKSDLNQFVNPRNNHHVVIYKDHDGNLHEDVVQFWTVVERIRQGEETYQLPENGDSVVNVLEINDMFLLGLSDEEYVSNKDNSAFLSDYLYRVQKISSSYYTFRYHLASSLDDIKTEFSIRSFKSWEEKNPIKVKIDILGNIERI

SEQ ID NO: 19336 - protein, 1409 aa, unidentified
  REGION 1..1409: note = Cas Enzyme sequence
MSKKKLGLDIGTNSIGWAILEKENRKYHFLEKYDKQGNLIPTKGSYIFPKGVDGQEKSKAATRRGFRSARRRIDRIRRRKAATLQVLSDNGLCPKLSNEEIRNWRYTKTYPCNNEAFIKWQRTGVKGGDIETEKLKQPYYLRYLAATKHGLMDSQLGRFQIGRAFYHLAQRRGYLSIEEEQADDAIEQFKIAVKNLLEESSNAPAFKEPFETIADTYKNDKKSKSLTTKIKRQLKKESSLDVIKEFILKEFDKKENLGKVATEINELSQQIAESGQPTLGCYFYSIYAQKNGDGTTRRIRGKYVDREKHYLREFNYICDKQKIKPELRKKLHSAIFFQRPLKSQKDLVAKCPLEPKRKRIAISHPLFEEFRKWESINRIKIKTEQDERLRSLNKTEKELISDQFDYIKDVEFKKLADKLCGGKDYRYIQDKEKLTAEIEFNFPETTTFPGCPTIKTLKSILGKDKHGNYSYDNLPLLNTGYKDEKGKTQISIEDIWHCLFIDSFGEKKKQEARKEFAEKHLPNIDADAFSKIKLKKGYGNLSKSAIKKILPYLKDGMLYSHAVFTANIEKVLGRKATEKEIKTIAVSIKEALSLHEKEKKVNAVVNNYIEKYKTGENGIGDEPNSQWAHKNGISDEIISWFSTAELYAMTEEEQADLEQQCWDKFIEQVTNKRPQNVEYLSTKTITDFIKEDLNDKFPDETIDISKLYHPSAMEVYPKAEKRMGNPEISSIKNPVFNKAMHQIKHLVNKLIEEELVDKDTEVNVELAREINSATYRRALAQYQKDQKFIRDWARRKIIECYDEEKRSTIQPTDRQIIKYILYAEQKQHCLYTGETITPRTFFAEQKYDIEHTIPRSKWNDNSLINKTLANANFNRNYKQDQFPANLDLTFNNQQIDADTIIQNRNQWLKSYSISNNEVHFSVSLESLKLQYRNFKSAAKAAAGDAAKHDELMEKAHYVRLRLDYLARKYKTFEREEIPAKFNNANLVDTRLITKYARAYLNSYFNKVNVINGQVTDTLRKIWGLQGEYEEKDRSNHIHHCIDAVTVACVEKGTANRMSEAFHQYERDYFRGDLSAKVHLPEPMENFVETMKQLKNEVFIYYKQVDRIKPLLDELKKENPQKLNLRGALNKPNPYGRIKMDGQDLYVQRSLVKDIQDKDIPSIIDDMIRERIYDLKRQNGDVKIDKLKKDGVIILPEFSYIDKNGKTKILKEVVLRKIRLKAYKQGQYPLKEIRKTDHSEKEYKRDVYVLKEKGSNYEALLFGDLIPDNPEGRTKFKKREYFLINSIDLVKNSVSITPNYQFLFAIHPDDPFLVFDKHYDEIIWENNEDMNTRLFKIKKFDEDQNIILQRNSHAAVDKAIYANESNLRDMTAFLLKKVPSSFRAIPTRIDELGRLDIEYSKQFIEKHLNR

SEQ ID NO: 19337 - protein, 1524 aa, unidentified
  REGION 1..1524: note = Cas Enzyme sequence
MAKILGLDLGTNSIGWAVVDATIRNKKVESYICIDRTGVRIFPEGVEPNTIGQGDREQSKNATRRQHRQSRRHFYRKKLRKMKLLEALIDLEMCPLTIEGLNQWRKWDNSKKTEGKSFPTEPEFVEWLKMNPYELRKRGLEEEISLMELGRIFYHFIQRRGFLSNRIGSDDGAIYKGKENMTGINETSEQIKDKTLGKYLYDISFKEGEKYNTKKDAEGKELRVRARYTQRDMYISEFQKIWDNQAENLNLENKKIRTSKTRYLKGNINNNRNNAKIAHYNNVYGKENVIIDKNKITTFSEVPLKEFFAGEIYYKDGNLRFKSNESLLFWQRPLRSQKNLLDNCRFENELPVIMGNGKFRMKNGEMVKRSKKPCPVSHPEFELFRAHQFINNIKFGKGNKLNEEQRQIVLDLINSKDAGFKFEQIPKRLNLTYEKFNYDNDQKIAGNPTIKKLEALFPAKIWEKHYEEIWHCFYFYDDNDLLLEKLQKNFDLKAHDVEKISKIKLQEGYSNVSLKAIRNISPFLGKGYQYDRAVILGGVKNAFGDRWTDFSEFHEQIEKDVIQILKEENTEGEAIEKIKDYLSEPSNFYGFDKNDPHFSHLYHHSQEIEKKSKTKIVPEVENLRNPIVQQALNETRRLVNSLLAHYRQDDPNFNFERVHVEMGRNLKNSKTKRQELSRRISENEKKNDAARERLAEFGLRPSRENVQRYLLFDEIQKHVSGPVQCPYTGKVINLNDLLGGDNLVQIEHMIPFSVSLDDSFGNKTLCESNFNRLKGERTPYEYYEMNPDPKLWGADSWNAVSERAFKILPYNKAKRFTAKKKFEKSQFIERQLNDSRYISKKAVELLSTICDDVKMLPGQVTSELRHLWGINNILNPVHGIEDLNAEVKEERHYYYVVTDENDKAVSIHRKENEKPQTDENQITVTGNVKNGKFFSKYLSMKVETPDLKDGKYWIVLNVSEPHSFQPVFIPKPDADESKVIFKGRIENQYFNNDTIGKRLKTDSEDGSYWAKISIKSKEFKRADTKGRIKTTGSRVALFGSVEDGTFSSHIYECKTNLPDGKYWSILELDFDDIEFIHAIKPRPETTDKQLLSYATIDEDGKMVADIDPGYTKNTQLTPGRYYCRFDIDSIEKEKYRVENDPPELKKGEKLAEANVWVDEATGEIKYDPKKNREDHRHHAIDAITVALTEQGFLQRLSTHHALEKEKQRGINSTEKFPEPWNGFNHDVQKAADSILVSHKKNNKVLTKVSKKIIKDGKTYLSKGYEARGQLHKEFVFGKRKPQNQKEGFHIRKPISDLKTNKHINKVVDPTIRDLILDHLKNDCGVDTSKSSFIVPKDAFFRDGEPRVFLPNRKGGEPVPVKKVRLRENIGKAVNLKTEVNQFVNPRNNHHVLIYKDDEGNYQEDVVTFWTVTERQLQNQPKYQLPEDGKEIVTTLEINDMFLLGLSDEEFESNKNNTAFLSSYLYRVQKISDMYYNFRFHLASTLDKKEEEIYIQSLGAWEKYNPIKVKINILGNIEKVKQTKP

SEQ ID NO: 19338 - protein, 1591 aa, unidentified
  REGION 1..1591: note = Cas Enzyme sequence
MAKILGLDLGTNSVGWAVINAKMANGKVEEYLSIDDTGVRIFPEGVEPTTIGQGDKEQSKNASRREHRQMRRQFYRKKLRKVKLLETLIDLKMCPLSEEGLNQWRKWYKDKKTEGKQFPTEDAFVEWLKLNPYELRAKALTDTLSLMELGRILYHFIQRRGFLSSRKGTEDGAIFKGKDNMSGIDATRSLINGQTLGKTLYDISFKEGEKYNRKKDEEGNELRVRARYTQRNMYISEFQQIWEKQAETLGLDTKEIKIKKVRFLDGNPGNNRNRKKISGYYKTYGKENVLIEGKRITTFKYIPLKTFLAGEIEVENEQLKFKSNESLLFWQRPLRSQKGLLDNCRFENKLPVIMGNGTFRMKNGKVLKRSKKPCPLSHPEFELFRAYQLINNIKYGKGRLLTKEQRELVLELINSKDSNFNFDLIPKALNLTYEKFNYEGDQKIAGNTTIKKLKPLFPEDVWNANYEKIWHCFYFFEDNDKLFAKLREDFSLNTNDSEKIAKIRLKEGYSNVSLKAIRNINPFLEKGYSYSDAVILGGIKNAFGKRWEYFEVDDFIERLEKDVIGIFYENNKEGEAIEKVKSYLSDPFNSYGFTKNDPCFTQLYHHSQEISEKELQDFVPEVENLRNPIVQQGLQEMRRLVNSLLNKYRVNYPDFKFDRIHVEMGRDLKNTKTKRRELTLKIRDNEQKNDEARKRLAEFGIRPTRDNLLRFLLYDEIQKQISGPVLCPYTGKVIGISDLLGGGNAVQIEHIIPYSVSLNDSFANKTLCEAKFNSLKAEKTPYEFYLQNPDPKLWGIKKYENTEDGWSEIAERAFKLLPYPKARRFTSKRKFEKATFIERQLNDTRYISRKAVELLSAVCEDVRMLPGQVTAELRHLWGINNILNPVNGFENFKAEVRGEERLAYYVVADENNRVVDICRKTNDRPNAVNNQLVISGSADKGSFTSKYLSLKVDVPELSNGNYWALFNVSEPHSFQPVFADKPESNEEQIVLKGRVEKEIFINDSVNKRIKTPGYGNGSYWARFSIVNKEFKFAEGRGKIKATGSKIALFGEVKEGLFTCHIYQCDTNLVDGKYWVLLELDFEKAEFTRTVNPKPEVDERQLLSYATVDETGAMAADPDPAYQLKTNQSAGRYYCIFDIQSVDETFFPMENEPPKFQKDQRLTEAVVWVDKATGEIKYDPKKNRDDHRHHAIDAITVALTEQGYLQRLSTYHAQNENAKRGIDSTENFPEPWDGFARDVKKAAEAMLISHKQNNKVLTKISKTVFKNGKRYQSVGNSVRGELHEMTLYGKKSYCKEKEFTTRVPISKLKFARTKGQAVYLDDVIDLGIRDAIFSTIKTCLKEKELVVLNSIEERIANIPTLFKVKEIEKEKKEINKLKKSITNSVELILQQQQFFLRNDGMRSKRLHKYDETEKRDPVPIKKVRVKRVINNAALVKSLNTYSSKKEKVVTGHQFVNPGNNHHVLIYEDFDGNLRENVVSFIEVVERQKQGEPLVQLPKDDGKRVITTLEINDMFLLGLNDEVEICKENAAVLNKHLYRVQKVSSSYYTFRHHLASTLDNKNEEISIQSFGAWRKFNPIKVNIDPLGNIKRIN

SEQ ID NO: 19339 - protein, 1364 aa, unidentified
  REGION 1..1364: note = Cas Enzyme sequence
MIKFPTFNIIFFSKPFITTIKMAKILGLDLGTNSVGWAVVEKQDGEFSLLDKGVRIFQEGVKIEKGIESSKAAERTEHRSARRLKFRRKLRKVKTLKVLSEYGYCPPLTNEELDLWRYKKIYPQNVSFRNWWHTDEKSEKHPYFFRNLAITQQLDLTNEEDRHKLGRAFYHMAQRRGFLSNRLESTPENETGKVIGSIKELQKKKGDRTLGQYFYEDCYLKGEKIRDQYTGRNDDYLDEFKRICAFQNIPVELQQKLHKAIFYQRPLKSQKGLIGKCVFEPNKPRCAVSRPEFEEYRMLCFVNNIKIKTPDDEKLRPLNVEERKKIIPQFFRKSKDHFDFEDLAKQLAPKKQYKFYKDRTKAPEDYLLNYSMKTTVSGCPVSARFKDLFGADFIDDDFNFVKDSNNRTPKLITDAWHVLYTFDSDKKLKEFALNRLNFTDEQCTTFLKIRLKQDFASLSLKAINKILPYLRDGLIYSHAVFLANMEETVPVHIWKNEENRKVIRTAIKEIIENHSDNTTIVNMVNGFITNARRENEVWSEEAKQFYFRDLDKRIKATFGAKRFENFSEYKKSNLINKAQQLITEFMPKNLGKGEHAKVERLDEAVLSFLADNFGKENLNPKKLYHPSAIETYKPAKRGEDGKLYLGSPITSSVRNPMAMRALHQLRLVMNEMIKNGLIDTNSKINIEMSRGLLNANERTGLKRWQDDRKNKRKEYIDRIKEHFSPDYQPSEDEVLKYQLWEEQRRICLYTGKPISIEDFLGADPKFDIEHTIPRSQSYDNSQENKTLCENEFNRKVKRNRIPYELTNHAEIIVRIEHWKEEIEKLEKEIQKAVRQAKGAVDKDQKDKAIQKRHQLSYERNYWQNKYKRFTMEEVPEGFKNSQMVDIGIITKYSRLYLKTVFSKVYTVKGNTVADFRKMWGLQDIYTKKARVNHVHHCIDAVTIACMDKSNYETLAKFYHDSENAFERGHEAKPEVDKPWPTFTEDVKGIENEILVAHHTPNVLPKQSKMKLRKRGKIQYNKNGEPIYQQGDSVRGSLHKDTFYGAIEREILNKKGETEKQIKYVVRKSLDGLEDSAIKNIVDDRVREIVSHARKEEKEIQKQIDALLKQRRKAEENEEAEIDNKIAELKQQIVELYSLPNKNGAPVPIKKVRVYQNSVTNPLHIKAQRDKSTKQPKPHKEFYHVANDSNYIMAIYEGKDAKGKIKRDFQLLNNLEAGEFFKYSVQKDLKEQGLNQIQNLIPDKKTNGKLELPFKAVLKIGTMAILWENSPEEVWDLTKEDMVRRLYKIVGLSQQIIQGKYFFATIVMRHHAEAKPSTELKVMDGVFKNDEEYMAMRKMNHNQFNALIEGIDFKIDPLGNIKRIN

SEQ ID NO: 19340 - protein, 1294 aa, unidentified
  REGION 1..1294: note = Cas Enzyme sequence
LGTNSIGWAIVETENNKNFELLDKGVHIFQEGVKIDKGIEGSKAEERTKYRSARRLKFRRRLRKINTLRILIDNDFCPKLTEKELHDWRFKKKYPENEDFRKWLLSKEEANKNPYYYRNLAVTEKLDLSVLENRHILGRAFYHLAQRRGFLSNRLEGTKESDGAVKKSIVELTEKKGNRTLGQYFYEKYTEGEKIRNHYTHREDHYLEEFNKICDIQEIENTIRNAIQKAIFHQRPLKSQKGLIGKCPFEKNKQRCSTSHPLFEEYRMLCFINNIKIKTPNDNQLRPLSDQEKEKIIPLFFRKSRNKEHFDFEDIAKKLAPKNQYKFYKSSQKYPEDYLFNYSMKTTISACPVSARFASIFGENWKELKIKHTRKSDGKESFLDIYDVWHVLFTFDNDDKLTLFAGNKLGLEDEKQKEFADIKLKHEYGSLSLKAIKKVLPYLREGLIYSHAIFLANMEEVISKEIWADNDNKNLIQSEVFKIIQTQNQEKRVVDAINGLIKKCRENNWHWSEKAKPQFKQDIEKNIIHEFGKDRWDKIDEEKQKQIINDACHHFEIQIQKNNGKGEFSRVATIEERVKGFLRDNFDIIDGRLGKLYHPSAIEVFKTPRRSEDGRKYLGSPMVSSVRNPMAMRALHQLRKLINELIKQDLVDENTKINVEMARDLNNANERKALQNWQRNREKLHQEYAARIQEHFDSAGIKRKPSEDDILKYQLWEEQEHRCIYTGDNIGIADFLGNSPSFDIEHTIPRSLSFDNSQQNKTLCQNKFNRHIKRNKIPTELANHNEILARIEKWKEKYNEVDKLIQIQVRKSSTATTKETKDSAIQRRHQLSLERNYWKNKYECFAMKGVPAGFKNSQIVDTGIITKYSRLYLKTLFDKVYTVKGNTVADFRKIWGLQEEYVKKERNNHIHHCIDAITIACMTKDNYEALAGFYHDWEENYVPGKENKPKVDKPWTTFTEDVKEIEKEVLVSHYTPDNLPKQSKKKLRKRGVIQKNKEGKIIYQKGDTVRGSLHKETFYGAIKKKVINKDGEKEEKVLYVVRKPIDSLSAGDIKNIVDNTVRDKVQSAIDQKGLKQALNEPIWMNEEKKIPIQKVRCYTPTVTNPIHLKDHRDLSKHEYKQSYHVTNDGNYLMAIYEGLDNKGKIKRDFEIVNNLCAGKFFKQSTRNRLEAHGINNLDGLIPDSKEAKNTLLPRKYIIKTGTMVLLWEEIPDEIWDLDISQRNVRLYKIVKFDKSGRIYFRPHNEARPASELKEVYNLNADIHCEQLRLSVNNFNALVEGFDFKINILGQIEKI

SEQ ID NO: 19341 - protein, 1322 aa, unidentified
  REGION 1..1322: note = Cas Enzyme sequence
MGKILGLDLGTNSIGWAIVETENNKNFELIEKGVHIFQEGVKIKKGIEGSKAEERTKYRSARRLKYRRKLRKISTLRVLITNDYCPALTEQELNDWRYKKVYPTNEEFRKWLSTDDNINKNPYCFRNLAVSEKLDLSIKENRYKLGRAFYHLSQRRGFLSNRLESTKESKGDILKEISALTELLGDKTLGQYFYEKYNTGEKIRSQYTHREDHYLEEFNKICEIQEIESNIKDGVKKAIFFQRPLKSQKGLIGKCPFEKNKQRCSSSHPLFEEYRMLCFVNNIKIKTPDDEKLRFLNKQEKEKIAPLFHRKSKEHFDFDDIAKQLAPKNQYKFYKASLKHPEDYLFNYSMKTTVSACPVSARFESIFGKNWKELKIEHKREKDGKTSVIDIFDVWHVLLTFNDVDKLVQFAMNKLGLKDEKLKEFINLNLKNDYSSLSLKAINNVLPYLREGLIYSHAIFLANMGNAISKDIWNQEENRKLIQKEVLELIQTQNQEKLIIDVVNGLIKKSKDNKWYWSEEAKEQYKKDIESNIISEFGKGRWGKFDNEKQMNIIDNAINQFKKQIQKNNGKAEFLRVETIDERVKSFLADNFDTNREDLEKLYHPSAIEVFKQPNRSEDGRKYLGSPMVSSVRNPMAMRALHQLRKLINEMLKQDIIDENTKINIEMSRDLKNANERKALRSWQRDREKLHKEYYARIKEHFDSSGVKREPSETDILRYQLWEEQEHKCIYTGDSIGISDFLGNSPSFDIEHTIPRSLSFDNSQQNKTLCQNKFNRDIKRNKIPSELANHSEILGRIDNWKEKYEALEKQVQIQVKKSRSATTKDSKDFAILRRHKLVVERDYWRNKYQRFTMPEVKSGFKNSQMVDIGIITKYSRLYLNTLFNKVYTVKGNAVADFRKIWGLQNEYEKKARINHIHHCIDAITMACITKQNYENLAKYYHDSEEMFIARINKKPQVSKPWPTFIEDVKGIEKEVLVSHYTPDNLHKQSKKKLRKRGVIVKNKNGNVIYQKGDTVRGCLHKETFYGAIKRDVVNKKGEKEEKIFYVVRKPLEYSDFGFKTINAVNKIVDEGVRNIVLKAINEKGIKLALSEPIWMNEEKQIPIKKVRCFAPTVTNPIHLKKHRDESKHDYKQSYHVTNDGNYLMAIYEGKDDKGKIKRDFEIANNLKAGEYFKQSVQETLKAQGINNLEGLVPSSKTVKKIDAPLKYIIKTGTLVLFWKDSVQEIWDLNNTEIRNRLYKIIKQNKDGRLAFKFQQEARNDEELKRDYEKKNNAKAPKSLTNGESKVNFNNPYPKLLLSPSNFNMLVEGYDFKINVLGQIEKI

SEQ ID NO: 19342 - protein, 1538 aa, unidentified
  REGION 1..1538: note = Cas Enzyme sequence
LLQWQFFINFRKKINYNFIIMKILGLDLGTNSIGWAVVEKDEGRILDVGVRIFPEGVVKETIGTGDKEQSKNATRRDKRQMRRHFYRKRLRKIKLLEILISLQMCPLNLEELMKWKNWDKARKTDGIKFPDTDEFREWLKMNPYFLREKALHEEITLQEFGRVLYHMIQRRGFLSSRKSKEDSTIFTKGKPDENILPINETKEKIGDKTLGSYLYSISRKTGVPYRKLTDETDKEIRLRGRYTTREMYIAEFDKIWRRQAVHLELDNRMIEIKKTREIRGTLEGNRNRTKINALIKKYGADNIAIEKTDNKNVTKITSKQIKPLKEALGGIIEVKTDENGRDTIDFSSHESILFWQRPLRSQKKLIANCRFEDELPVIDSKGRFVTNKNGGIQHRSKKPCPLSHPEFELFRAHQFINNIRFGRNIKLTDNQRQAVLELINRNDSNFDFKKIPDALNLTYEKFNFEDKQKVPGNTTIKQLRALFEDTIWEEHYDTIWHCFYFYDDNVKLFKKMKRDFGFNGDMEAIKKVKLKDGYSNVSLKAIRNILPFLEKGYHYDKAVILGGVRNAFGNKWDDLIGLHEEIIEDVISILKEDNEEGVAIEKIKDYLSSPLFGFGFSKNDPRFTRLYHHSQSIEQNKLLEDSIPELENLRNPIVQQALYEMRRLVNTLLVKYRKQFGNKFHFDRINVEMGRELRNNKTQRQELSWRISENEKKNDEARARLAEFGLQPSRENIHKYLMFREIEERVSGPVQCPYTGRIIKISDLFGRDNSIQIEHIIPYSTSLDDSFGNKTLCEANFNREKGEKTPFEYYSANPDPKLWGINSYSKAEDGWNEIADRAFRLLPYNKAKKFTSKKTFQKADFIERQLNDTRYISRKAVELLSHICYDVRVMPGQLTAELRHLWGLNNIIQPVRNLEVKDFNFNEDYAVPCYLLTDDNGEIVSIHPKLNDMPPVGNEEILIPFSVDNKKPYSKYYTFSIEVPLLEDGKYWARLRVTEPIRLIPQFIDRPALNERVIVLKGRIEKGVFIHDNIGRIKTSLEDGRYWAKFRVTDKKFEQPSSDKPPKSSRSQILLFGTVEANVFMSYIYECKANVPDGKYWIFLDCNLDDIEFIRAENERPELNDQQIYITGTVDDDGFFSSEATPFQRKIQEKPGKYYAILSVSSENPEIFRIENEPPKAEKGLSLVEGNIWVDKYTGEIKFDPKKNREDHRHHAIDAIAIALTEQGYLQRLSTYNAQLKDKQRGKLDSTEKYPEPWVGFDSDVKKAIDGILVSHKKSNKTLTKNRKGFSVRGQLHKESIFGKHHDLNENEGYHIRVKITELETNKHVEKIVDIAIKERIKHFLQDEYGIDIQDPKGYKIPKDAFITDGEWRLFLPNKRGEPVPIKKVRIKENLGKAAQLKSDLNQWVNPRNNHHVLIYKDYDGNLKEDVVQFWTVVERILQGGSIYQLPEDGKEIITTLEINEMFLLGLSDSDYESNKYNFSFLRKNLYRVQKISDGDYSFRLHTASAINNPEEEVRIKSMKAWLVFNPIKLKINVLGDY

SEQ ID NO: 19343 - protein, 1326 aa, unidentified
  REGION 1..1326: note = Cas Enzyme sequence
LGTNSIGWAVVDKDYSEFTLLQKGVRIFQEGVKIEKGNESSKAAERTKYRSARRLKYRRKLRKINVIKVLVKYQYCPEIPDQELDLWRYKGIYPRNIEFREWLRTDEKGNRTPYYFRNLAVSEKLDLNNVSARYQIGRAFYHLAQRRGFHSNRLESTNENEGIVKQAISEINEEKGDRTLGQYFYEKYLAGEKIRDTYTHREDHYLAEFNRICEFQNLPQGLCSEMGKAIFYQRPLKSQKGLVGKCVFEKNKPRCPVSRPEFEEFRMLSFINNIKIKMPDDDKLRPLTQAEKQKILPLFLRKSKDYFEFEDIAKNLAPKKQYKYFKDNKKNPEDWLFNYSLKTTVSGCPVSARFIEIFGDQYMLFKTEYLNKTNGGRGIIDINDVWHVLFSFDSDKKLADFARDKLNLSTEKIDKFLKIKLKKDYSTLSLKAIKKILPFLRMGLIYSHAVFLAKLDDILPSEIWNIEKNRRIISDAVSEIIRSQNQEKSIIDIVNGYIKDNRENNSTWSEEAKEIYRIELNSRIENYYGKKTYSFFPEERKTQIENKAFTLFESQMKRNWGKGDFASIQRIDEQVKAFISDNFNISAQKLEKLYHPSAIDVFDPPKRRADGRLYLGSPMVSSIRNPMAMRSLHQLRKLINELIENDVIDANTRVNVEMARDLKNANERKALKRWQEARETLHKEYADLIKQHYIANGLNIEPSSDDILKYQLWEEQNHKCLYTGSEIKVSDFIGSNPAYDIEHTIPRSISLDNSQVNKTLCSNRFNRSVKRNKMPSQLDNHSEILSRIEQWKGKYEELDKQVHSLTRVVKNAADKEMKDRLIQKRHYLVFERDYWREKYYRFIMEDVSDGFKNSQLVDTGIITKYARLYLKTYFDKVYTVKGNTVADFRKAWGLQSEYEKKERVSHIHHCIDAITIACITKENYELLAKFYHDWEEAEMAGSKSKPKIEVPWPTFITDVLGVEKEVLVSHYTPDNLSKQSKKKLRARGIIKRNENGQPVFQKGDTVRGALHKETNYGAIKVLVNNRYGVKEERIIYVFRKSLDALTASDIKNIVDPHIREIVTVDKTKEGEIKKELDNLNKQIKNSEDEHEINRLNSLINDLKHELSALFHIKNKNGSITPIKKVRCIASNITNPIQIKKHRDLSLHDYKQYSNFENDRNYLIAIYEGVNNKGIIKRDFILVNYLEAGQYYCGKLDYEIVPKIHPRSSFPIKQIIKIGTLVLLIENNSDEIDRLSFPDIQKRLYKVIGLSVQRIKSTAGKINEYATIVLRHTCEARLSKELKIQDGIFRMDEPYIAQRKLNQNQFKALVEGFDFTMSATGIVHFKD

SEQ ID NO: 19344 - protein, 1309 aa, unidentified
  REGION 1..1309: note = Cas Enzyme sequence
MTRILGLDLGTNSIGWAVVDKEKNQFSLIDKGVRIFQEGVKIEKGIESSKAADRTKYRSSRRIKFRRKLRKIQTLKTLVEFGYCPGIDIEELNIWRYKKVYPQNEQFRDWWKTDDEHNINPYFFRNLVVTEKLDLTKTENRFKIGRAFYHISQRRGFLSNRLENTKESDGLVKSSIEEISLAKGDLTLGQYFYKKYISSEKIRDTYTHREEHYLEEFERICNFQGLPIEFVDKLRKSIFYQRPLKSQKGAIGKCVFEKKKARCAVSHPLFEEYRMLCFVNNIKIKTPNDEKLRFLNKVERAKAIERFFLKREHFDFEDIVKYLAPKKQYKFYKDRNINQEDYLFNYSMNTTVSGCPVLARFKDLFGETFIDERYNIIVSDHGDVAKNVQDAWHVLLTFNSEIKLKEFAINKLGLNDEQVSEFVKIKLKQDYASLSLKAIKNILPFLREGIIYSHAVFIANMKSALPKTLWIQPENQKEISDQIKIIINTQKDEKDLVEIVNGIIKTCRENGECWSNEAEIYFKQDLIKRLEGFYGKNKFNSFSEKFKTDVEDKSFRLLKKQMLLNNSRGEFAKVETIDERLKHYIIDTFKVGAENLSKIYHPSAIEIYKQPIRSEDGNIYLGSPMVSAVRNPMAMRALHQLRKVINELIKNEVVDQNTKINIEMARDLMNSNERKAYQNWQRDRENLRKTYSDRIKEYYRSQNINLEPSEDDILKYQLWEEQKHKCLYTGKEILLSGFLGANPKFDIEHTIPRSLSLDNSQANKTLCDNVFNRSVKKNRIPSELENHKEILSKIVDWRKKVEDLEEDISKAVRQSKNAADKDGKDRAIQKRHKLSYERDYWRNKYKRFEMEDVPDGFKNSQIVDTGIITRYARMYLNTIFDKVYTVKGNTVADFRKIWGLQEEYVKKERINHIHHCVDAITIACITKENYENLAKFYHEWEELEHAGVKTKPVFEKPWRTFTEDLKTIENEVLISHNTSDVLLKQTKKIKRKRGIIQRNADGKVEFEKGNTARGSLHLETFYGAIERPIIDENGKEERQIKYVLRKSILKLKLNEVDKIVDEIVKEKVKNSIADNTLIITSGENQQNILSNTIWMNEEKRIQIKKVRIYQAAVTNPIKLKKNRDKTVKQRKEYKEYVNVLNEENYALGVYEAIVKDKVKKRFEALSNFKASSALEFKIDKGLFKSKILFEQSKIINGREYKLKNIIKVGNLVILYENFPEEIWDLDLDTLSKRLYKVYGFRGDDGRVKLRHHQEARPDKDQDKAVSQIDFNKSNSKLIISLGNLKCLVEGIDFVMSVTGKIEQKNINIC

SEQ ID NO: 19345 - protein, 1322 aa, unidentified
  REGION 1..1322: note = Cas Enzyme sequence
MTRILGLDLGTNSIGWAVVNKEKNQFSLIDKGVLIFQEGVKIEKGIESSKAAERTKYRSARRIKYRRKLRKIQTLKVLSEYGFCPTLTDSDLNLWRFKKLYPENIDFRNWWLTDDENNTNPYFFRNLAVTTKLDMSKKEDRFKVGRSFYHITQRRGFLSNRLETTKESDGVVTSSINELSEAKGDLTLGQYFYQKYLNSEKIRDTYTHREAHYLEEFEKICLLQELPIEFVEKLRKAIFYQRPLKSQKGLIGKCVFEKNKPRCAVSHPLFEEYRMLCFVNNIKIKTPNEDKLRFLNSQERAKVIERFFLKRDNFEFEDIAKVLSPKKQYKFYKDRNINVEDYLFNYSMSTTVAGCPVTARFADLFGELVITENHKLVISDDGSLNKSVQDAWHALLTFDNDNKLKEFAVKKLLLDNIKSEEFIKIRLKQDFASLSLKAIKKILPYLREGIIYSHAVFLANMHSCLPKKIWDLPENQYDISNQITTIINTQKQEKDIIELVNGIIKNCHENGECWSAEAEGYFIKDVQKALINYFGKNTYTEFSEANKEELESKTYELLKNQIQLNNGRGVFAVAETIDERLKDYISKTYNVDSTKLFKIYHPSAIDVYKKPERSADGYRYLGSPMISAIKNPMAMRALHQLRKVINELIKNGVIDQNTRISIEMARDLMNANERKAYQSWQRDREKLRDTYRQRIQEYYASQNSNLNPTDDDILKYQLWDEQKHKCFYTGKEILLSGFLGANPSFDIEHTIPRSLSFDNSQANKTLCDNVFNRSIKKNKIPSELENHSDILIRIEDWRKKIEDLEIDISKAIRQAKNAPDKDFKDRAIQKRHKLSFEKDYWFNKCKRFDMKDVPDGFKNSQIVDTGIITKNARMYLNTIFDKVYTVKGSTVADFRKIWGLQDEYVKKERSNHIHHCIDAITIACITKDNYENLAKFYHDWEEMARATMSSKPKFEKPWSTFTEDLKNIENEVLISHYTADVLPKQSRIKLRKRGKIVKNNLGQPIIQKGDTVRGSLHKETFYGAIERTVLNKKGEEEKQIKYVVRKSILDIKAPDIDKIVDEVVAERVSNAVESGILVFTGANQKNKLNGKIWMSENKGVEIKKVRIFVPSVTNPIHLKENRDKTLKNRKAHKQFTHVANDSNYAMAIYEGVDEKGKLKRDFELVSNIEAANFYKISVKRLLNHQNAGNNSELFPSFKINGKDSLNLKGIVKIGTLVILYEFSPSEIWDLELTEIRKRVYKIIGLSNQRIIRPSGKVDEYATIVLRFHQEASAAVDLKTFDGKFERNEEYKGQRKLNHNQFNALISGIDFKLTNRGKIIKLN

SEQ ID NO: 19346 - protein, 1231 aa, unidentified
  REGION 1..1231: note = Cas Enzyme sequence
MNTRILGLDTGTNSLAWAVVDRDANGNYTLVKRGDVIFSEGVKIEKGVESSKAAERTGHKSLRVQYARRRLRKIDTLKVLVSLDLCPYLSDEQLSHWKAKKTYPLTDDFMLWQRSGSAEENNPYYCRYRCLTQKLDLTDQSQRFLLGRAFYHLAQRRGFLSNRLDTTADSEESSKVKSGIAQLSVEMEKAGCTFLGEYFYQLYKQHGNTVRLRSRYTDREEHYIKEFLAICEKQELDAQWVEKLQSALYFQRPLKSQRKGVGKCTFEPKKPRCAESHPDYEAFRMLCILNNIKIKTPNDTSLRPLNAQEREKIWPLFFRKSKPNFDFEDIAKALAGKNNYAWYKDAGEKPYRFNYRMHQGVPGCPVTAQLIDIFGSDWKAGIAETYMAVEKKNGTKTINEMADDVWNVLYSFSSKDKLKAFATEKLQLDEASATKFANAKLPHGFAALSLKAIRNILPFLRQGFIYAHAVHLAKIPDIVTKAVWNDAHKREQILSGLMEIIENYNPKDRGVEGTIDFCIKSHLQDVVDLRPGAADALYHPSMIETYPDAKLNKMGVFQLGSPRTNAIRNPMAMRSLHILRSVVNQLLRDGTIDRDTEVHVEYARELNDANKRKAIADYQKDIERKRADYRKRIIELYKEECHKEIEPTDSDILKFQLWEEQNHKCLYTDSEIGICDFLGDNPKFDIEHTIPRSVGGDSTQMNLTLCDAMFNRQVKGARLPSQLPNHADILVRIAPWKSKCEDLRKKLDKIRTFSGMAKEIKDSQIQKRHRLKMELSYWQGKYERFTMTEVPEGFSRRQGAGIGLVSKYAGLFLKSLFHSADNPNKSNVYMVKGVTTAEFRRMWGLQGEYEKKSRLNHCHHCIDAITIACIGKAEYDKMAQYYHDEEVSRWHGSAGKPQFKKPWPIFTKDVLALEQSLLVKHLTKDNMPKQAKRRVRTAKGKHLAQGDAARGSLHRDTYYGAIEQEGEIRYVLRKPISKFEKESELENIVDQAVKEKIKAAVAGKNFKAAIAEPIFMNKEKGIRINKVRCYVKAKERLKIRQQRDLSTKEYKQFFCVENENNYLLAIYEGEVKGKKERDFCVVNNLDAAAYLKRSNKGKAAPLVPERSAERNLPLLAVLQRGTQVLFYEDSPEEILFDNPQDLVRRLYKVVGINTKRDVKKGKTYLYGNIELRFHQNAQKKDDVKMESGGYKNNEAPHQGIVLSHNQFKALVEGIDFEFNILGEIKKKEHHA

SEQ ID NO: 19347 - protein, 1231 aa, unidentified
  REGION 1..1231: note = Cas Enzyme sequence
MITRILGLDTGTNSLAWAVVDRDANGNYTLVKRGDVIFSEGVKIEKGKESSKAAERTGHKSLRVQYARRRLRKINTLKVLVSLDLCPYLSDEQLSQWKAKKTYPLTDDFMLWQRSGSAEENNPYYCRYRCLTQKLDLTDQSQRFLLGRAFYHLAQRRGFLSNRLDTSADSEESGKVKSGIAQLSVEMEKAGCHYLGEYFYQLYRQHGNTVRLRSRYTDREEHYKKEFLAICEKQELDAQWVEKLQRALYFQRPLKSQRKGVGKCTFEPKKPRCAESHPDYEAFRMLCILNNIKIKTPNDTSLRPLNAQEREKIWPLFFRKSKPNFDFEDIAKALAGKNNYAWIKDAGEKPYKFNYRMHQGVSGCPVTAQLIDIFGPDWKAGIAETYTAVEKKNGTKTIDEMADDVWNVLYSFSSKDKLKAFATEKLQLDEASATKFANAKLPHGFAALSLKAIRNILPFLRQGFIYAHAVHLAKIPDIVTKAVWNDAHKREQILSGLMEIIENYNPKDRGVEGTIDFCIKSHLQDVVDLRPGAADALYHPSMIETYPDAKLNKMGVFQLGSPRTNAIRNPMAMRSLHILRSVVNQLLRDGVIDRDTEVHVEYARELNDANKRKAIADYQREQEKKRKQYRDDIITLYKSECHKEIEPTDTDILKFQLWEEQNHLCLYTGTQIGICDFLGDNPKFDIEHTIPRSVGGDSTQMNLTLCDATFNRQVKGAKLPTELSNHADILVRIDHWKSKCEDLRKQLDKIRTYGGMEKAMKGRLIQKRHRLKMELDYWQGKYSRFTMTEVPEGFSRRQGAGIGLVSKYAGLFLKSLFHNEQNPNKSNVYVVKGVTTAEFRRMWELQGEYEKKSRLNHCHHCIDAITIACIGEAEYQKMAQYYHDEEMSRWHGSANKPQFKKPWPTFTKDVLALEQSLLVKHLTKDNMPKQAKRRVRTAKGKHLAQGDAARGSLHRDTYYGAIEQEGEIRYVLRKPISKFEKESELENIVDQAVKEKIKAAVAGKNFKAAISEPIFMNKEKGIRINKVRCYVKAQERLKIRQQRDLSTKEYKQFFCVENENNYLLAIYEGEVKGKKERDFCVVNNLDAAAYLKRSNKGKAAPLVPERSAERNLPLLAVLQRGTQVLFYEDSPEEILFDKPQDLVRRLYKVVGINTKRDVKKGKTYLYGNIELRFHQNAQKKDDVKLESGGYKNNEAPHQGIVLSHNQFKALVEGIDFEFNILGEIKKKEHHA

SEQ ID NO: 19348 - protein, 1231 aa, unidentified
  REGION 1..1231: note = Cas Enzyme sequence
MITRILGLDTGTNSLAWAVVDRDANGNYTLVKRGDVIFSEGVKIEKGKESSKAAERTGHKSLRVQYARRRLRKINTLKVLVSLDLCPYLSDEQLSQWKAKKTYPLTDDFMLWQRSGSAEENNPYYCRYRCLTQKLDLTDQSQRFLLGRAFYHLAQRRGFLSNRLDTSADSEESGKVKSGIAQLSVEMEKAGCHYLGEYFYQLYRQHGNTVRLRSRYTDREEHYKKEFLAICEKQELDAQWVEKLQRALYFQRPLKSQRKGVGKCTFEPKKPRCAESHPDYEAFRMLCILNNIKIKTPNDTSLRPLNAQEREKIWPLFFRKSKPNFDFEDIAKALAGKNNYAWIKDAGEKPYKFNYRMHQGVSGCPVTAQLIDIFGPDWKAGIAETYTAVEKKNGTKTIDEMADDVWNVLYSFSSKDKLKAFATEKLQLDEASATKFANAKLPHGFAALSLKAIRNILPFLRQGFIYAHAVHLAKIPDIVTKAVWNDAHKREQILSGLMEIIENYNPKDRGVEGTIDFCIKSHLQDVVDLRPGAADALYHPSMIETYPDAKLNKMGVFQLGSPRTNAIRNPMAMRSLHILRSVVNQLLRDGVIDRDTEVHVEYARELNDANKRKAIADYQREQEKKRKQYRDDIITLYKSECHKEIEPTDTDILKFQLWEEQNHLCLYTGTQIGICDFLGDNPKFDIEHTIPRSVGGDSTQMNLTLCDATFNRQVKGAKLPTELSNHADILVRIDHWKSKCEDLRKQLDKIRTYGGMEKAMKGRLIQKRHRLKMELDYWQGKYSRFTMTEVPEGFSRRQGAGIGLVSKYAGLFLKSLFHNEQNPNKSNVYVVKGVTTAEFRRMWELQGEYEKKSRLNHCHHCIDAITIACIGEAEYQKMAQYYHDEEMSRWHGSANKPQFKKPWPTFTKDVLALEQSLLVKHLTKDNMPKQAKRRVRTAKGKHLAQGDAARGSLHKDTYYGIVEKDGKLYHVLRKPIDKFKKESELENIVDQAVKEKIKAAVAGKNFKAAISEPIFMNKEKGIRINKVRCYVKAQERLKIRQQRDLSTKEYKQFFCVENENNYLLAIYEGEVKGKKERDFCVVNNLDAAAYLKRSNKGKAAPLVPERSAERNLPLLAVLQRGTQVLFYEDSPEEILFDKPQDLVRRLYKVVGINTKRDVKKGKTYLYGNIELRFHQNAQKKDDVKLESGGYKNNEAPHQGIVLSHNQFKALVEGIDFEFNILGEIKKKEHHA

SEQ ID NO: 19349 - protein, 1210 aa, unidentified
  REGION 1..1210: note = Cas Enzyme sequence
MKKRILGIDTGTNSLGWAVVDKIEDGSYSLIRKGSLIFQEGVKVEKGIESSKAADRTSHRALRKQYFRRRLRKIEVLKVLIEFDWCPYLSPEALHQWHVNKTYPMDEAFISWQRTNDNFEENPYYYRHICLHRKLDFSEKSERYVLGRAMYHLAQRRGFLSNRLDQGNEDETGKVKEAISSLSKRMTDAGCEFLGDYFYKIYKEKGNTERIRTHYTDREEHYKKEFYAICEQQHLSEDQVEKLEKALYFQRPLKSQRQGVGKCTFEPKKPRVPDSHPAFELFRMLSFVNNIKVKGSHDVELRPLSADEYEKAKPMFFRKSKPQFNFEDIAKAIAGKGKYQYIKEEGIKEYKFNYRMSQSVTGCPTIANLMTIFGDDYVNAIAERYTLSDNKSPEQMLNDVWNVLYSFSDKDKVKQWGKEKLQLDDEDAEKFSKIKLTHSFASLSLAAVNKILPWLERGLIYSHAVLMAKVPDIVGEEVWRSRGESITNELLSLIANFNPKDVTMQGTLDLCIKDILKDMCDLQPGAAEKLYHPSMIETYPDAKKNSQGVYQLGSPRTNSVRNPMAMRSLHQLRKVINTLLRDGTIDSQTEVHIEYARELNDANKRKAIAQWNKNRENKRKKYAEDIRLLYKQECGKDIEPTEDDIVKFQLWEEQNHICLYTGELIDITQFVGPNPSYDIEHTIPRSVGGDSTLENMTLCSSKFNREVKKTKLPSQLLNHDAIMSRIEEWRTKIEKLRKDVDHVKTYSGMDKAVKDRLIQKRHLLKLELDYWLGKYKRFQMEEVPEGFARRQGAGIGLVGKYAGLYLKSLFHKADDRTKSNVRVIKGATTAEYRKMWGIQDEYEKKSRDNHVHHCIDAITIACIEPGEYNATASYYQQLEEYERTKANKPSFPKPWSTFTEDIKAITQEMLVVHSTPDNMPKRARKYVQTSNGKKLAMGDSARGSLHNDMFYGAIERDGQIKYVIRKELRSIKETDIENIVDEVVKEKVKEAIVEKGFKKAMEEDIFMNEEKGIKIKKVRCYTPSVTNPLHIRTHRDASRKEYKRQFHVTLDGNYCMAIYEGEVKGKMKRTFEIVNMIDAASYFKESADLTKHYPIAPESKNGLKYRCTVRTGTQIILLQNDNEEINLANKEELAKRFYYVAVMRSDGRIVLRYNQDARDATTLKKERKSGAYRFGEPYRSEIMLSLSDFHALVEGVDFKINVVGEIEMLK

SEQ ID NO: 19350 - protein, 1212 aa, unidentified
  REGION 1..1212: note = Cas Enzyme sequence
MKKRILGIDTGTNSLGWAVVERNEEGDYHLLRKGSFIFQEGVKVEKGIESSKAAERTSHRATRKHYFRRRLRKIEVLKILIKYGWCPELSEEQLHLWHTKKQYPASDAFIAWQRTNENFEQNPYYYRHVCLHDKLDLTNKAEAYILGRALYHLAQRRGFLSNRLDQSEEDESGAVKSSISNLSKEMENSGCEFLGDYFYKLYSEQKNNVRIRNRYTDREAHYKKEFYAICKTQELTDTQITELEKALYFQRPLKSQRQGVGKCTFEPRKPRCADSHPDFEKFRMLTFLNNVKIKGPKDIELRNLNEEEIKKALPMFYRKSKDNFDFADIAKSIAGKDNYQYIKDAGDKPYKFNYRMTQGVSGCRTTAQLREIFGEDYANGIAEVYVKGDGKTLQQMVNDVWNVLYSFPDKQKVKQWAKDNLQLDEEMSEKFSKIKLSHNFASLSLNAIRNIIPWLEKGLIYSHAVTMAKIPDIVGHEVWQEHKETITNELIEFILNFNPKDESMQGTLDYCIKDYLKNNFDLKPNAADVLYHPSMIETYPDAKKNKDGIYQLGSPRTNAVRNPMAMRSLHQLRKVINELLREGVIDNNTEVHIEYARELNDANKRWAIGEWNKRQEKKRKEAYDEIKKLYKEKTKKDIEPTDDDITRFLLWREQNTICIYTNATIGITQIVGPDPDFDIEHTIPRSIGGESIMSNFTLCSKRYNRDVKKAKMPTELSPADYEGICTRISAWKEKIEKLRKELDKKRTNPNMAKDIKDKRIREKNLLKIELDYWKDKYNRFIITEAPDGFARRQGAGIGLVGKYAGLYLKTLFHKKEDRNKTNVRTIKGTTTAEFRKMWGLQDEFEKKSRDNHIHHCIDAIVVACIDTGNYNQVARYYQQLEEYERNKNNKPSFPKPWPTFTEDIMALKNEILVVHDTPDNMPKHARKYVRTANGKVLAKGDCARGSLHNDTYYGAIERDGEIRYVVRKSLSDLKENDIENIVDETVKSIIKQAIANKDFKKAMAEDIFMNKEKGIKIKKVRCYVPTVTSPLHIRHQRDTSKNEYKRQYHVTIDGNYCMAIYEGEIKGKTKRSYEIVNMLDAAAYFKKSANLTQLYPIAPENKNGLNYRCFVRTGTHIILLQSDEEEIDVTNEKELAKRLYFVAVMKKDGRIVLRYHQDAREATILKKERKAGAYKDGENYRSEISLSLSDFHALVEGVDFRINALGEITMLK

SEQ ID NO: 19351 - protein, 1223 aa, unidentified
  REGION 1..1223: note = Cas Enzyme sequence
MKKRILGIDTGTNSLGWAVVDKQENGKYSLVSKGSLIFQEGVKMENNGKESSKAADRTAHRAFRKQYFRRRLRKIKVLKVLIEFGWCPYLSPEALHQWHVKKEYPMDEAFISWQRTNDNFDENPYYYRHRCLHEQLDLNEKSDSYILGRAMYHLAQRRGFLSNRLEQGDDDETGKVKEGISSLSKSMADAGCEYLGDFFYKLYKEKGNTERIRTRYTDREEHYKKEFYAICERQNLSAEQISKLEKALYFQRPLKSQRQGVGKCTFEPKKARVADSHPAFELFRMLSFVNNIKIKGPQDVELRPLSQEEFEKAKPMFFRKSKPQFDFEDIAKAIAGKGKYQHIKDDGDKPYKFNYRMSQGVTGCPTIASLISVFGDDYENAIAERYILSDGKTPEQMVSDVWNVLYSFDDKEKLKQWGKDKLQLSDEEAEKFSKLRLTHSFASLSLAAVRKILPWLEQGLIYPHAVLMANVPDIVGREVWKSRGETITNELLSLITNFNPKDVAMTGTLDFCIKDVLKDMCSLNPGATEKLYHPSMIDTYPDAKKNSQGVYQLGSPRTNAVRNPMAMRSLHQLRKVINTLLREGAIDSDTEVHIEYARELNDANKRKAIAQWNKERETRRKKYAEDIRTLYKQECGKDIVPTNDDIIKFQLWEEQDHICLYTGDSIGITEFVGPNPSYDIEHTVPRSVGGDSTLENMTLCSSKFNRDVKKAKLPTQLSNHAAIMERLEEWRKKIEKLRKDADRVKTHSGMDKAVKDRLIQKRHLLKLELEYWVGKYKRFQMEEVPEGFARRQGAGIGLVGKYAGLYLKSLFHKADDRNKSNVRVIKGATTAEYRKMWGIQDEYEKKSRDNHVHHCIDAITIACIEPGEYNATARYYQQLEEYERTRAAKPSFPKPWATFTEDIKAIAQEMLVVHSTPDNMPKHARKYIQTVKGRKLAMGDSARGSLHNDTYYGAIERDGEIKYVVRRPVSSFEKASDIESIVDPAVKEIIKRAIEQKGFKQAVSEVIYMNEEKGIKINKVRCYVTSSISGKIIDVRDQRDKSVKKYKRRFYVENGDNYVMGIYEGLNGKKVCREYDLANMIDASTFYNDKTADSLLPYKILKDEIDYHLKYRLFKGLHVILFEKSSDEVDFSTTKDIVPRLYIITGLSTSSTTTGGKTYRYGMVSMKHAQEARPSSECKEKKGLFKNGEEYRAKIVMNHNQFDALVEGVDFKINVLGEIEMLK

SEQ ID NO: 19352 - protein, 1247 aa, unidentified
  REGION 1..1247: note = Cas Enzyme sequence
MKFSCTYKKICLILRKIIEKHMKKRILGLDTGTNSLGWAVVDKDENNNYTLIDRGVLLFQEGVKIEKGIEKSKASERTGHKALRKQYFRRRLRKISVLKVLVANNLCPYVSDEDLHEWHVHKRYPKNDDFMLWQRTNENELKNPYYYRHLCLTTELDLDNIEDRYILGRALYHLAQRRGFLSNRLDNSQDDGDSGKVKKGITDLSEEMQEAGCDYLGEYFFQLYSNEANRVRLRTRYTDREEHYKKEFYAICDKQHLDKALVDSLEKALYFQRPLKSQRQGVGNCTFEPNKKRCALSHPAYEEFRMLSVINNIKIKGPHDIDLRSLNDEEVKSILPLFYRKKQIQSNNFEFEDIAKKIAGANKYAYIKDDVDKPYKFNYRMSQGISGCPVTTQLRDIFGDNWKAAIAESYTKMETKLGMKSADQAVNDIWNVLYSFSSQEKLKEFAITQLQLDEESAIKFSKIKIPSGYAALSLKAVNKILPFLRNGYIYSHAVLLANIPTIVGKDVWKNTDQRDFIVNQLTDLIVNFNPKDESMQGTLNFCIQDFLMNNYDLPSGAAAKLYHPSMIDTYQDAKCNADGIYKLGSPRTNAIRNPMAMRSLHELRKLINVLLSKRIIDNKTEVHVEYARELSDANRRKAIADYQKNLDNQRKKYREEIIHFYEEEGYSLEPTETDILKFQLWEEQEHKCLYTGRQIGLADFLGKNPKFDIEHTIPRSAGGDSTRENMTLCESRFNREVKKAQLPSQLANHEDILARISMWKEKVEKLSRDIDKAHTFTGMAKGAKDGTLQKRHRLIMERDYWYGKYKRFVMSEVPEGFSRRQGAGIGLISKYAGLYLKSLFHDPNDRNKSNVFVIKGKTTSEFRKMWGLQSEYEKKSRDNHVHHCIDAITLACIGKYDSQLMSRYYHDVEAFEAGFGKKPQFPKPWPTFTEDVLNIQKELLVVNDTPDNMPKHAKRNAKLSNGKKIVLQGDCARGSLHNDTYYGAIEHDGEIRYVVRKQLSSFEKESDLETIVDEAVKQTIKDAVAGKNFKEAIKEDIYMNKEKGIRIKKVRCFANAVKNPISIRQHRDVSKKEYKRQFHVTNETNYLMAIYEGEVKGKVKREFEMVQMIDAALFYKNSMDRDSYSTIVPSQKNNCNLKAILKKGTRVLLYEKSSDEIDFSSIKDISKRLYVVSGLSVSTIQKIYKYGMVTLKHHQEARPDSELNPKKGEYKSDEAYRPVIVLSHKQINALVESVDFEVNVLGEIKLK

SEQ ID NO: 19353 - protein, 1111 aa, unidentified
  REGION 1..1111: note = Cas Enzyme sequence
MAWQRTDDNIGDNPYYFRYLCLTEKLDLTNLKNRYIVGRAIYHLNQRRGFLSNRKENARENDGKVKQGIETLAQSMKDCETEYLGEYFNLLYQKGEKIRSHYTSRVDCERELLAICKKQGLSEELTQELRHTIITQRPLKSQKHVVGRCVYEPSKPRCPMSHPLYEQYRMYAFINNIKMQGPGDHILRPLTEVEKQVIIPLFLRKSKKEFKFEDIAKKLSGGKKVFCYYKDKTECAYRFNYYMDTLVSGCSVIAQLSEVFDVKGNVDDWLERACEVYTHGDGKNRYEIMNDIWHVLFFFDSEDKLKEFALEKLQMDEAHAILFSKIHLPSDYASLSLKAIRKILPYMKEYGMIYSHAVFLANLPSVIPCKVDKEALLPMLLREEADDIVRAFYEYDPSMSAIRTQEEYVKRYIAYKYNLDEKDERKLKNLYHPSMIETFPKVRQQTAEGYYQLGSPRTNSMRNPMAMHSLFRLRHVINALLKEGKIDEYTTIRIEFARELNDANKRAAIRQWQNENNKKNTEATERIKEHLGKDYVPSSTDILKYQLWEEQNHLCLYTGETINLADLFDSNKYDIEHTIPRSVGGDSTAMNLTVCNSRYNRKVKLAQIPTQLSCHEQILERIASWKETIEKLGKEIRKINTRGVSGKEVKDRMIQKRYRLMLERDYWKGKYDRFVMTEVPEGFSRRQGVDISVISKYARLYLKSLFHNVYIVKGIVTSDFRKIWGIQDEYEKKQRVNHCHHAIDAVTIACIGKTEYDKLAQYYHDEERWEWGLDSRRAEFPKPWKTFTEDMKRLDETLLVSHYTTDNMNKQTRKKVRKNGKFMGQYMQGDTARGSLHEDTYYGAIERNGTIKYVVRKPLSQLDEKDVKNIVDDVVRKKVEEAIKEHGTLKNALDFDIWMNQEKCIKINKVRIYAAQNKRIFKVRQQRDLSPKEYKRPFYAANDSNYAMGIYVGKDKNGQEKRDFEVVSCLEAAEYYSSGVSVQNIDLLPLESRKGYLLKWKLKAGTMVLLYDDVETLNDIYDLDIRELCKRLYKITGISKTVDDGYICGMLSLVFHQEARPIKEAAFRKGAFKCGEPTRPRIVLRHTQFKALVQGYDFEIDDLGKIKFKNR

SEQ ID NO: 19354 - protein, 1222 aa, unidentified
  REGION 1..1222: note = Cas Enzyme sequence
MKKRILGIDTGTNSLGWAVVDRDSNGTCSLVSKGSLIFQEGVKVEKGIESSKAAERTSHRALRKQYFRRRLRKIRVLEALIEYDWCPYLSPEALHLWHVKKKYPLDEAFMAWQRTNDNFDENPYYYRHLCLHEQLDLNERANRYALGRALYHLAQRRGFLSNRLEQGDEDETGKVKEGISSLSKGMAEAGCEYLGDYFYKLYKEKGNTERIRTRYTDREEHYKKEFYAICKQQRLSAEQISKLEKALYFQRPLKSQRQGVGKCTFEPKKPRVADSHPSFELFRMLSFVNNIKVKGPYDVELRPLTADEFEKAKPMFLRKTKPQFDFEDIAKAIAGKGKYQHIKDAGDKAYKFNYRMTQSVTGCPTIASLVSVFGDDYEAAIAERYTLSDGKTVEQMVNDVWNVLYSFTDKDKVRQWGKERLQMSDEEAEKFSKIRLTRSFASISLAAVKKILPWLEQGLIYPHAVLMAKVPDIVGEDVWQSRGEYIAKELSSLISNFNPKDIAMTGTLDFCIKDTLKDICSLAPGAADKLYHPSMIDVYPDARKNPQGVYQLGSPRTNAVRNPMAMRSLHQLRKVINALLRDGTIDSQTEVHIEYARELNDANKRWAISQWNKERETLRKKYAEDIRTLYKKDTGKDIVPTEDDIVKFQLWEEQKHICLYTGSSIGITEFIGPNPSYDIEHTVPRSAGGDSTLENMTLCSSKFNRDVKKAKLPTQLPDYEDILQRLEGWREKIEKLRKDVDRVKTHSGMDKAVKDRLIRKRHLLRLDLDYWVGKYKRFQMTEVPEGFARRQGAGIGLVGKYAGLYLKSLFHKADDRNKSNVRVVKGATTAEYRKMWGIQDEYEKKSRDNHVHHCIDAITIACIEPGEYNATARYYQQLEEYERTKAAKPTFPKPWPTFTEDIKAIAQEMIVVHSTPDNMPKHARKYVQTANGRKLAKGDSARGSLHNDTYYGAIERDGEIRYVVRRPISSFEKASDVDSIVDPKVKEIIKQTIEEKGFKRAVSEDIFMNKEKGIKINKVRCFVSGSISGKILDVRDQRDVSAKEYKRRYLVENGDNYIMGIYEGLRNGKICREYELANMLDASMFYNKKEKDSILPCKSVRGVPDLPLKYKLFKGLHVILYEKSKPEVDLSNLKDIVPRLYVITGLSTSSTTTGGKTYRYGMVSLKHAQEAKPSSECKEKKGLYKDGEEYRAKIVMNHNQFDALVEGVDFKINVLGEIVMMK

SEQ ID NO: 19355 - protein, 1215 aa, unidentified
  REGION 1..1215: note = Cas Enzyme sequence
MKKRILGIDTGTNSLGWAVVDKNENGTYSLIRKGSLIFQEGVKIEKGIESSKAADRTSHRALRKQYFRRRLRKIEVLKVLVEFGWCPYLSPEALHQWHVKKTYPMDEAFISWQRTNDNFEENPYYYRHLCLHNQLDLNKDSDKYILGRAMYHLAQRRGFLSNRLEQGDDDETGKVKEAISSLSKSMTDAGCEYLGDYFYKIYKEKGNTERIRTHYTDREEHYKKEFYAICLRQKLSDEQIAILEKALYFQRPLKSQRQGVGKCTFEPKKPRVADSHPAFELFRMLSFVNNIKIKGPHDVELRPLSKEEYEKAKPMFFRKSKPQFDFEDIAKAIAGKGKYQYIKDAGDKEYKFNYRMTQGVAGCPTIASLMSVFGDDYVSAIAERYTLSDGKTPSQMVNDVWNVLYSFSDKDKVKQWGKEKLQLDDDEAEKFSKIKLTHSFASLSLSAVNKILPWLEQGLIYSHAVLMAKVPDIVGEEVWKNRGESITKELLSLIANFNPKDITMQGTLDLCIKDILKDMCELEPGAAEKLYHPSMLETYPDAKKNEQGIYQLGSPRTNAVRNPMAMRSLHQLRKVINTLLRECTIDSQTEVHIEYARELNDANKRKAIAQWNKDRENLRKKYAEDIRTLYKQDCGKDINPTDDEIVKFQLWEEQNHICLYTGDSIGICEFIGPNPSYDIEHTIPRSVGGDSTLENMTLCSSKFNRKEKKAKLPTQLSNYDAIMSRLEEWRTKIEKLRKDVDHVKTHSGMDKAVKDRLIQKRHLLKLELDYWLGKYKRFQMEEVPEGFARRQGAGIGLVGKYAGLYLKSLFHKADDRNKSNVRVVKGTTTAEYRKMWGIQDEYERKSRDNHVHHCIDAITIACIEPGEYNATARYYQQLEEYERTNANKPSFPKPWPTFTEDIKAIAQEMLVVHNTPDNMPKRARKYVQTSNGKKLALGDSARGSLHNDTYYGAIERDGEIKYVVRRPLSSFEKVSDLDNIVDEAVKGIIKHAVEEKGLKQAIADGIFMNEAKGIRINKVRCYAKSVKKPLNIRMQRDLSPKKYKQQYHVQNEGNYLLAIYEGEAKGKVKRAYELVKSIEAVEFYKKSTSRDDYPSMVPLTKNNLPLKHQLRIGQHVLLYENTSEEINFSDVNDLSKRLYYITGLSYLPVGKGFGNIVMRHHQEARMAKDIKTSNGVFKNSDSYRPSILQLHTQFKALVEGEDFVITALGDIKSIR

SEQ ID NO: 19356 - protein, 1216 aa, unidentified
  REGION 1..1216: note = Cas Enzyme sequence
MSERTLGLDLGTNSIGWAIVERTGEICKLLDRGVTIFSEGVARDKTGEHPMVETRTNARATRRHYFRRRLKKIELLKVLVKYKLCPELTPKQLETWKKYKEYPLDKEFIEWQRTNDNCGKNPYHDRYVALNQKLDLATERDRYMLGRALYHLCQRRGFLSNRKDKSADTDGVVKSGIDNLTKKIKEEGCEYVGEYFYKLYQKGEKIRNTYMSRTEHVIKEFDAICDKQNLSDDLRKELNDAMFYQRPLKSQKGAVGKCTFEKNKARCPISHPSYEEFRMLSFMNNIRIKTLQDADYRPLNDFERKLIAPLFFRKSKDTFEFEDIAKAIAGKKAIYCTRESNADAAYRFNFDMTTSVSNSPVTAVMRDVFGEDWIGTLRSSYAKAGKKTDEQIINDVWHALFDFDSDEKLKKWAMDNLGLDEDKAGTFVKCPIHQGYASLSLNAINKMLPYLRCGERYDRAVFMANLEKILPETVLEDAESFEDVKNQIRLTLDEYNTNSELKKYTKYELVKDVLSGIAGVEYKDLEKLYHPSMIETYPEATLNKHGELLLGSPRIAAIKNPMAMRALFRLRHLINTLLRERKIDKCTKINIEFSRNLNNANERKAIERYQRENEKERKDAIERIKEHLKEQGYDIEPSEDDILKYQLWKEQGERCIYTGKQIDISDFIGDNPKCDIEHTVPRSIGGDDSRMNKTLCDAYFNRSVKRAQLPAQLSNHDEIMARIEQLGWKDKIIDLKKRINRTKGGNFATKDAKDRNIQLRHFLTMQLKYWQGKYDRFTMTEVPSGFSNRQGVDIGIIGRYAREYLATVFREPNRNLIYTVKGATTAEFRKMWGLQDEYAKKERINHSHHCIDAIVIACIGKAQYDQWAVYKQKQEQTEWDNAARFTIEKPWETFTQDVKAISDELLVVHNTPDNTLKQSKKKLRKRGKVQKTASGHAIVQQGDTARACLHKQTFYGAIERNGEIKYVIRKRIDELDAKDIKNVVDETVRQIIEQQISDKGFAKAMAEPIWMNEEKGIQIKKVRMYVPSVTKPINLKPQRDLSIKDYKQFYHVSNDSNYCLAIYEGTTNKGKIKRSYKLVNNLDAVSAPKGNSIVPSSDDNDYPLKWLLKVGQMVLLYEKTPTEIYEADKRELTRRLYVVNGLAINPTGPGYGSIALRFHQEARQSTDVKSKNGVWHIGEDIRAGIILLHTQFNALVQGQDFEISDDGEITFKRVNI

SEQ ID NO: 19357 - protein, 1176 aa, unidentified
  REGION 1..1176: note = Cas Enzyme sequence
VARDKTGEHPMVETRTNARATRRHYFRRRLKKIELLKVLVKYKLCPELTPKQLETWKKYKEYPLDKEFIEWQRTNDNCGKNPYHDRYVALNQKLDLATERDRYMLGRALYHLCQRRGFLSNRKDKSADTDGVVKSGIDNLTKKIKEEGCEYVGEYFYKLYQKGEKIRNTYMSRTEHVIKEFDAICDKQNLSDDLRKELNDAMFYQRPLKSQKGAVGKCTFEKNKARCPISHPSYEEFRMLSFMNNIRIKTLQDADYRPLNDFERKLIAPLFFRKSKDTFEFEDIAKAIAGKKAIYCTRESNADAAYRFNFDMTTSVSNSPVTAVMRDVFGEDWIGTLRSSYAKAGKKTDEQIINDVWHALFDFDSDEKLKKWAMDNLGLDEDKAGTFVKCPIHQGYASLSLNAINKMLPYLRCGERYDRAVFMANLEKILPETVLEDAESFEDVKNQIRLTLDEYNTNSELKKYTKYELVKDVLSGIAGVEYKDLEKLYHPSMIETYPEATLNKHGELLLGSPRIAAIKNPMAMRALFRLRHLINTLLRERKIDKCTKINIEFSRNLNNANERKAIERYQRENEKERKDAIERIKEHLKEQGYDIEPSEDDILKYQLWKEQGERCIYTGKQIDISDFIGDNPKCDIEHTVPRSIGGDDSRMNKTLCDAYFNRSVKRAQLPAQLSNHDEIMARIEQLGWKDKIIDLKKRINRTKGGNFATKDAKDRNIQLRHFLTMQLKYWQGKYDRFTMTEVPSGFSNRQGVDIGIIGRYAREYLATVFREPNRNLIYTVKGATTAEFRKMWGLQDEYAKKERINHSHHCIDAIVIACIGKAQYDQWAVYKQKQEQTEWDNAARFTIEKPWETFTQDVKAISDELLVVHNTPDNTLKQSKKKLRKRGKVQKTASGHAIVQQGDTARACLHKQTFYGAIERNGEIKYVIRKRIDELDAKDIKNVVDETVRQIIEQQISDKGFAKAMAEPIWMNEEKGIQIKKVRMYVPSVTKPINLKPQRDLSIKDYKQFYHVSNDSNYCLAIYEGTTNKGKIKRSYKLVNNLDAVSAPKGNSIVPSSDDNDYPLKWLLKVGQMVLLYEKTPTEIYEADKRELTRRLYVVNGLAINPTGPGYGSIALRFHQEARQSTDVKSKNGVWHIGEDIRAGIILLHTQFNALVQGQDFEISDDGEITFKRVNI

SEQ ID NO: 19358 - protein, 1216 aa, unidentified
  REGION 1..1216: note = Cas Enzyme sequence
MSERTLGLDLGTNSIGWAIVERTGEICKLLDRGVTIFSEGVARDKTGEHPMVETRTNARATRRHYFRRRLKKIELLKVLVKYKLCPELTPEQLETWKKYKEYPLDKDFIEWQRTNDNCGKNPYHDRYVALNQKLDLATERDRYVLGRALYHLCQRRGFLSNRKDKSADTDGVVKSEIDNLTKKIKEEGCEYAGEYFYKLYQKGDKIRNTYMSRTEHVIKEFDAICDKQNLSDDLRKELNDAMFYQRPLKSQKGAVGKCTFEKNKARCPISHPSYEEFRMLSFMNNIRIKTLQDVDYRSLNDFERKLIAPLFFRKSKDTFEFEDIAKAIAGKKAIYCTRESNADAAYRFNFDMTTSVSNSPVTAVMRDVFGEDWIGTLRSSYAKAGKKTDEQIINDVWHALFDFDSDEKLKQWAMDNLGLDEDKAGTFVKCPIHQGYASLSLNAINKMLPYLRCGERYDRAVFMANLEKILPETVLEDADSFDDVKNQIRLTLDEYNTNSDLKKYTKYELVKDVLSGIAGVEYKDLEKLYHPSMIETYPEATLNNHGELLLGSPRIAAIKNPMAMRALFRLRHLINTLLRERKIDKCTKINIEFSRNLNNANERKAIERYQRENEKERKDAIERIKEHLKEQGYDIEPSEDDILKYQLWKEQGEQCIYTGKQIDISDFIGDNPKCDIEHTLPRSIGGDDSRMNKTLCDAYFNRSVKRAQLPAQLSNHDEIMARIEQLGWKDKIIDLKKRINRTKGGNFATKDAKDRNIQLRHFLTMQLKYWQGKYDRFTMTEVPSGFSNRQGVDIGIIGRYAREYLATVFREPNRNLIYTVKGATTAEFRKMWGLQDEYAKKERINHSHHCIDAIVIACIGKAQYDQWAVYKQKQEQTEWDNAARFTIEKPWETFTQDVKAISDELLVVHNTPDNTLKQSKKKLRKRGKVQKTASGKAIMQQGDTARASLHKQTFYGAIERNGEIKYVIRKRIDELDAKDIKNVVDESVRQIIEQQISDKGFAKAMAEPIWMNEEKGIQIKKVRMYVPSVTKPINLKPQRDLSIKDYKQFYHVSNDSNYCLAIYEGTTNKGKIKRSYKLVNNLDAVSAPKGESIVPSSDDNDYPLKWLLKVGQMVLLYEKTADEIYEANKRELVRRLYKVVGLSYLPVGTGYGSIVLRYHQEARPAGELKIQKGAWHAGEELRPSLFLYHTQFNALAQGQDFEISDDGEITFKRVKI

SEQ ID NO: 19359 - protein, 1216 aa, unidentified
  REGION 1..1216: note = Cas Enzyme sequence
MSERTLGLDLGTNSIGWAIVERTGEICKLLDRGVTIFSEGVARDKTGEHPMVETRTNARATRRHYFRRRLKKIELLKVLVKYKLCPELTPKQLETWKKYKEYPLDKEFIEWQRTNDNCGKNPYHDRYVALNQKLDLATERDRYMLGRALYHLCQRRGFLSNRKDKSADTDGVVKSGIDNLTKKIKEEGCEYVGEYFYKLYQKGEKIRNTYMSRTEHVIKEFDAICDKQNLSDDLRKELNDAMFYQRPLKSQKGAVGKCTFEKNKARCPISHPSYEEFRMLSFMNNIRIKTLQDADYRPLNDFERKLIAPLFFRKSKDTFEFEDIAKAIAGKKAIYCTRESNADAAYRFNFDMTTSVSNSPVTAVMRDVFGEDWIGTLRSSYAKAGKKTDEQIINDVWHALFDFDSDEKLKKWAMDNLGLDEDKAGTFVKCPIHQGYASLSLNAINKMLPYLRCGERYDRAVFMANLEKILPETVLEDAESFEDVKNQIRLTLDEYNTNSELKKYTKYELVKDVLSGIAGVEYKDLEKLYHPSMIETYPEATLNKHGELLLGSPRIAAIKNPMAMRALFRLRHLINTLLRERKIDKCTKINIEFSRNLNNANERKAIERYQRENEKERKDAIERIKEHLKEQGYDIEPSEDDILKYQLWKEQGERCIYTGKQIDISDFIGDNPKCDIEHTVPRSIGGDDSRMNKTLCDAYFNRSVKRAQLPAQLSNHDEIMARIEQLGWKDKIIDLKKRINRTKGGNFATKEAKDRNIQLRHFLTMQLKYWQGKYDRFTMTEVPSGFSNRQGVDIGIIGRYAREYLATVFHEPNRNLIYTVKGATTAEFRKMWGLQDEYAKKERINHSHHCIDAIVIACIGKAQYDQWAVYKQKQEQTEWDNAARFTIEKPWETFTQDVKAISDELLVVHNTPDNTLKQSKKKLRKRGKVQKTASGHAIVQQGDTARACLHKQTFYGAIERNGEIKYVIRKRIDELDAKDIKNVVDETVRQIIEQQISDKGFAKAMAEPIWMNEEKGIQIKKVRMYVPSVTKPINLKPQRDLSIKDYKQFYHVSNDSNYCLAIYEGTTNKGKIKRSYKLVNNLDAVSAPKGNSIVPSSDDNDYPLKWLLKVGQMVLLYEKTPTEIYEADKRELTRRLYVVNGLAINPTGPGYGSIALRFHQEARQSTDVKSKNGVWHIGEDIRAGIILLHTQFNALVQGQDFEISDDGEITFKRVNI

SEQ ID NO: 19360 - protein, 926 aa, unidentified
  REGION 1..926: note = Cas Enzyme sequence
LQDADYRPLNDFERKLIAPLFFRKSKDTFEFEDIAKAIAGKKAIYCTRESNADAAYRFNFDMTTSVSNSPVTAVMRDVFGEDWIGTLRSSYAKAGKKTDEQIINDVWHALFDFDSDEKLKKWAMDNLGLDEDKAGTFVKCPIHQGYASLSLNAINKMLPYLRCGERYDRAVFMANLEKILPETVLEDAESFEDVKNQIRLTLDEYNTNSELKKYTKYELVKDVLSGIAGVEYKDLEKLYHPSMIETYPEATLNKHGELLLGSPRIAAIKNPMAMRALFRLRHLINTLLRERKIDKCTKINIEFSRNLNNANERKAIERYQRENEKERKDAIERIKEHLKEQGYDIEPSEDDILKYQLWKEQGERCIYTGKQIDISDFIGDNPKCDIEHTVPRSIGGDDSRMNKTLCDAYFNRSVKRAQLPAQLSNHDEIMARIEQLGWKDKIIDLKKRINRTKGGNFATKDAKDRNIQLRHFLTMQLKYWQGKYDRFTMTEVPSGFSNRQGVDIGIIGRYAREYLATVFREPNRNLIYTVKGATTAEFRKMWGLQDEYAKKERINHSHHCIDAIVIACIGKAQYDQWAVYKQKQEQTEWDNAARFTIEKPWETFTQDVKAISDELLVVHNTPDNTLKQSKKKLRKRGKVQKTASGHAIVQQGDTARACLHKQTFYGAIERNGEIKYVIRKRIDELDAKDIKNVVDETVRQIIEQQISDKGFAKAMAEPIWMNEEKGIQIKKVRMYVPSVTKPINLKPQRDLSIKDYKQFYHVSNDSNYCLAIYEGTTNKGKIKRSYKLVNNLDAVSAPKGNSIVPSSDDNDYPLKWLLKVGQMVLLYEKTPTEIYEADKRELTRRLYVVNGLAINPTGPGYGSIALRFHQEARQSTDVKSKNGVWHIGEDIRAGIILLHTQFNALVQGQDFEISDDGEITFKRVNI

SEQ ID NO: 19361 - protein, 1223 aa, unidentified
  REGION 1..1223: note = Cas Enzyme sequence
MKRILGIDTGTNSLGWAVVERNDNNTYRLIRKGSLIFQEGVKIEKGIESSKAADRTSHRALRKHYFRRRLRKIEVLRVLVKFGWCPKLTDEQLHLWHTKKQYPNSEAFMAWQRTNENLEQNPYYYRHVCLHDKLDLNNEAEAYILGRALYHLAQRRGFLSNRLDASEEDENGTVKTEINKLSQEIEDAGCQYLGDYFYKLYSENGNNVRIRNRYTDREAHYKKEFYAICKTQELSEQQIKALEKALYFQRPLKSQRQGVGKCTFEKGRQRCADSHPAYELFRMLTFLNNVKVKGPHDIEFRPLNNDEYEKALPMFYRKSKANFDFEDIAKAIAGKGNYQYFKDEGEKPYKFNYRMSQGVSGCPTTSRLREIFGEDYAQGIAEVYSKGAGKAPEQMVNDVWNVLYSFSDNNKLMQWGIENLQLNKEQAEKFSKIKLTHNFASLSLCAISKIIPWLEQGLSYSHAVSMAKIPDIVGKAIWEEHKDSITKELIDLITNFDPKDESMQGTLDYCIKDYLKNNFELKAGATDKLYHPSMIETYPDAKPNANGIYQLGSPRTNAVRNPMAMRSLHQLRKVINELLKEGTIDQNTEVHIEYARQLNDANKRWAIGDWNKSQEKKKKEASDEIKKLYKEATGKDIEPTQDDITKYLLWEEQKHLCIYTNESIGITDFIGSNPSFDIEHTIPRSMGGESVMSNLTLCASWYNRDVKKAKMPSQLNKKDYEAILERISHWKEDIERLRKEKDKLRTHSGMAKDVKDRLIRKRHLKDIELKYWQDKYNCFLLKEAPEGFARRQGAGIGLVGKYAGLYLKTIFHKKDDRTKTNVRTIKGSTTAEFRKMWGIQDEFEKKSRDNHIHHCIDAIVIACIDTGSYNEVARYYQQLEEYERTKDNKPSFPKPWSTFTEDILALKDEMLVVHSTQDNMPKHAKKRIRIAGKKLIAKGDAARGALHNDTYYGAIERDGEIKYVVRRALSSFEKESDLENIVDDAVKDIIKKAVAEKGFKKALSEDIFMNESKGIKIKKVRCYVSGSVSGKLIPIRKHRDNSKYEYKSPYYAENGDNYIMAIYEGMKGKKKHREYEIANMIYSSKYFNERNELPILPEKSVKGIPDLPIKYVLRKGLHVILYENSKEEIDIDNKTDLTPRLYIVTGLSTSSVTTGGKTYKYGMVSLRHAQEARPSNECNERKGVYKNGEEYRAKAVMNHNQFNALVEGEDFIITPLGDIKPIH

SEQ ID NO: 19362 - protein, 1217 aa, unidentified
  REGION 1..1217: note = Cas Enzyme sequence
MKRILGIDTGTNSLGWAVVERNDNNTYRLIRKGSLIFQEGVKIEKGIESSKAADRTSHRALRKHYFRRRLRKIEVLRVLVKFGWCPKLTDEQLHLWHTKKQYPNSEAFMAWQRTNENLEQNPYYYRHVCLHDKLDLNNEAEAYILGRALYHLAQRRGFLSNRLDASEEDENGTVKTEINKLSQEIEDSGCQYLGDYFYKLYSENGNNVRIRNRYTDREAHYKKEFYAICKTQELSEQQIKALEKALYFQRPLKSQRQGVGKCTFEKGRQRCADSHPAYELFRMLTFLNNVKVKGPHDIEFRPLNNDEYEKALPMFYRKSKANFDFEDIAKAIAGKGNYQYFKDEGEKPYKFNYRMSQGVSGSPTTSRLREIFGEDYAQGIAEVYSKGAGKAPEQMVNDVWNVLYSFSDKNKLMQWGIENLQLNKEQAEKFSKIKLTHNFASLSLCAISKIIPWLEQGLSYSYAVSMAKIPDIVGKAIWEEHKDSITKEIIDLITNFDPKDESMQGTLDYCIKDYLKNNFELKAGATDKLYHPSMIETYPDAKPNANGIYQLGSPRTNAVRNPMAMRSLHQLRKVINELLKEGTIDQNTEVHIEYARQLNDANKRWAIGDWNKSQEKKKKEASDEIKKLYKEATGKDIEPTQDDITKYLLWEEQKHLCIYTNESIGITDFIGSNPSFDIEHTIPRSMGGESVMSNLTLCASWYNRDVKKAKMPSQLNKKDYEAILERISHWKEDIERLRKEKDKLRTHSGMAKDVKDRLIRKRHLKDIELKYWQDKYNCFLLKEAPEGFARRQGAGIGLVGKYAGLYLKTIFHKKDDRTKTNVRTIKGSTTAEFRKMWGIQDEFEKKSRDNHIHHCIDAIVIACIDTGSYNEVARYYQQLEEYERTKDNKPSFPKPWTTFTEDILALKDEMLVVHSTQDNMPKHAKKRVRIAGKKLIAKGDAARGALHNDTYYGAIERDGEIKYVVRRALSSFEKESDLENIVDDAVKDIIKKAVAEKGFKKALSEDIFMNESKGIKIKKVRCYAKSVKKPLNIRKQRDISNKEYKRQYHVQNESNYLLAIYEGEIKGKVKRGYELVKNIEAAEFYKASTSKGDYPSIVPEKDEKGLPLKHLLTIGKHVLLYESSASEIDFKDIHDLSKRLYKITGLSYLPVGKGFGNIVMRHHQEARASSEIKIKNGAYKNNEEYRPSILMLHTQFHALVEGEDFIITPLGDIKPIH

SEQ ID NO: 19363 - protein, 1217 aa, unidentified; identical to SEQ ID NO: 19362
  REGION 1..1217: note = Cas Enzyme sequence

SEQ ID NO: 19364 - protein, 1115 aa, unidentified
  REGION 1..1115: note = Cas Enzyme sequence
MAWQRTNENLEQNPYYYRHVCLHDKLDLNNEAEAYILGRALYHLAQRRGFLSNRLDASEEDENGTVKTEINKLSQEIEDAGCQYLGDYFYKLYSENGNNVRIRNRYTDREAHYKKEFYAICKTQELSEQQIKALEKALYFQRPLKSQRQGVGKCTFEKGRQRCADSHPAYELFRMLTFLNNVKVKGPHDIEFRPLNNDEYEKALPMFYRKSKANFDFEDIAKAIAGKGNYQYFKDEGEKPYKFNYRMSQGVSGCPTTSRLREIFGEDYAQGIAEVYSKGAGKAPEQMVNDVWNVLYSFSDNNKLMQWGIENLQLNKEQAEKFSKIKLTHNFASLSLCAISKIIPWLEQGLSYSHAVSMAKIPDIVGKAIWEEHKDSITKELIDLITNFDPKDESMQGTLDYCIKDYLKNNFELKAGATDKLYHPSMIETYPDAKPNANGIYQLGSPRTNAVRNPMAMRSLHQLRKVINELLKEGTIDQNTEVHIEYARQLNDANKRWAIGDWNKSQEKKKKEASDEIKKLYKEATGKDIEPTQDDITKYLLWEEQKHLCIYTNESIGITDFIGSNPSFDIEHTIPRSMGGESVMSNLTLCASWYNRDVKKAKMPSQLNKKDYEAILERISHWKEDIERLRKEKDKLRTHSGMAKDVKDRLIRKRHLKDIELKYWQDKYNCFLLKEAPEGFARRQGAGIGLVGKYAGLYLKTIFHKKDDRTKTNVRTIKGSTTAEFRKMWGIQDEFEKKSRDNHIHHCIDAIVIACIDTGSYNEVARYYQQLEEYERTKDNKPSFPKPWSTFTEDILALKDEMLVVHSTQDNMPKHAKKRIRIAGKKLIAKGDAARGALHNDTYYGAIERDGEIKYVVRRALSSFEKESDLENIVDDAVKDIIKKAVAEKGFKKALSEDIFMNESKGIKIKKVRCYVSGSVSGKLIPIRKHRDNSKYEYKSPYYAENGDNYIMAIYEGMKGKKKHREYEIANMIYSSKYFNERNELPILPEKSVKGIPDLPIKYVLRKGLHVILYENSKEEIDIDNKTDLTPRLYIVTGLSTSSVTTGGKTYKYGMVSLRHAQEARPSNECNERKGVYKNGEEYRAKAVMNHNQFNALVEGEDFIITPLGDIKPIH

SEQ ID NO: 19365 - protein, 1234 aa, unidentified
  REGION 1..1234: note = Cas Enzyme sequence
VKFIGAQIHFSKFTENLYDMEKVLGLDLGTNSIGWAIVQHNDDLSYTLLDKGVNIFQDGVAHDKSGEKPMVSERTAARSSRRHYFRRRLRKIELLQVLRKYDLCPYLSDEDLQEWKNHKIYPLREEFLDWQRTDDNLNKNPYHDRYVCLTEKLDLSVVSNRYMLGRALYHMAQRRGFLSNRKENKKDDDGKVKDNIKNLTKAMRESGCDYLGEYFYRLYERGGKIRKNYTDRVEHYKKEFSAICERQNLNIELRQALENAIFYQRPLKSQKGQVGHCTFEKGKTRCPISHPRYEEFRMWCFINSIKVKTWEDDDYRPLDLNEVEQIIPLFFRKTKSQFEFDDIAKKIAGKGNYCDKTDKVEKAYRFNYKKFTSVSGCPVTAGLRGLYGDDWLNQICGVYSLGEGKTQDQILSDIWHVLFSFDNEEKLKEWAKVKLQMSSEEADAFEKISVPQGYASLSLNAINKILPYLRKGYRYDEAVIMANLSVVMGCDAERLPDEVAENVAIIMKDNISNPLEKKKSIHQSVTEYLRDCQNVDGKRIEKLYHPSMIETYQAALPIDGIYKLGSPRTSSVRNPMAMRALFRLRKLLNELLRDDKIDSDTLVRIEFSRELNDSNMRKAIGTYQREQKRLHDDCSAKIKEHMGDDYVPSDDEILKYQLWEEQNHRCPYTGTQIGLEDFLGASPKYDIEHTVPRSRGGDNSQMNKTLCESKYNRDVKKGMLPAELANYREVMANVDSFGWQEEIDSLRERLERTRSYSATKEEKDRKIQDRHYLKMKLDYLEGKLKRFAMTEVPDGFSNRQGVDIGIIGRYARMYLQTVFKRVFTVKGATTAEFRKMWGLQDYYSKKERVNHAHHCVDAITIACIGRNEYDRWAQYMRDEERYRLSAADRPHFPKPWDTFTEDVLAVSDSILVPHYTPSNLSKHTKKRLRIRGKLQYGPNGERLYVQGDTARCSLHEQTFYGAIKKNDEIKYVVRKSLDSLEPKDVDKIVDDVVREKVKTAIAEKGFKKAMSEDIWMNEELQIPIKKVRIYTPTVTSPIKLKCHRDKSVHEHKKCLHVKNDGNYCMAIYEGNNDRGKVIRSYKLVNNLAAVNYFNGKTGLDNLVPYSDEKDLPLKCVLKIGTMVLFYEKSPKELYECGMEELSKRLYKVIKMFKDGRLAFKYHLEARNDDKLKVDYRNEFNEEPPKSLTNGYSHINFSTPFAKLLLSKDNFNMLVEGYHFNITASGQIIFKNLAW

SEQ ID NO: 19366 - protein, 1215 aa, unidentified
  REGION 1..1215: note = Cas Enzyme sequence
MEKVLGLDLGTNSIGWAIVQHNDDLSYTLLDKGVNIFQDGVAHDKSGEKPMVSERTAARSSRRHYFRRRLRKIELLQVLRKYDLCPYLSDEDLQEWKNHKIYPLREEFLDWQRTDDNLNKNPYHDRYVCLTEKLDLSVVSNRYMLGRALYHMAQRRGFLSNRKENKKDDDGKVKDNIKNLTKAMRESGCDYLGEYFYRLYERGGKIRKNYTDRVEHYKKEFSAICERQNLNIELRQALENAIFYQRPLKSQKGQVGHCTFEKGKTRCPISHPRYEEFRMWCFINSIKVKTWEDDDYRPLDLNEVEQIIPLFFRKTKSQFEFDDIAKKIAGKGNYCDKTDKVEKAYRFNYKKFTSVSGCPVTAGLRGLYGDDWLNQICGVYSLGEGKTQDQILSDIWHVLFSFDNEEKLKEWAKVKLQMSSEEADAFEKISVPQGYASLSLNAINKILPYLRKGYRYDEAVIMANLSVVMGCDAERLPDEVAENVAIIMKDNISNPLEKKKSIHQSVTEYLRDCQNVDGKRIEKLYHPSMIETYQAALPIDGIYKLGSPRTSSVRNPMAMRALFRLRKLLNELLRDDKIDSDTLVRIEFSRELNDSNMRKAIGTYQREQKRLHDDCSAKIKEHMGDDYVPSDDEILKYQLWEEQNHRCPYTGTQIGLEDFLGASPKYDIEHTVPRSRGGDNSQMNKTLCESKYNRDVKKGMLPAELANYREVMANVDSFGWQEEIDSLRERLERTRSYSATKEEKDRKIQDRHYLKMKLDYLEGKLKRFAMTEVPDGFSNRQGVDIGIIGRYARMYLQTVFKRVFTVKGATTAEFRKMWGLQDYYSKKERVNHAHHCVDAITIACIGRNEYDRWAQYMRDEERYRLSAADRPHFPKPWDTFTEDVLAVSDSILVPHYTPSNLSKHTKKRLRIRGKLQYGPNGERLYVQGDTARCSLHEQTFYGAIKKNDEIKYVVRKSLDSLEPKDVDKIVDDVVREKVKTAIAEKGFKKAMSEDIWMNEELQIPIKKVRIYTPTVTSPIKLKCHRDKSVHEHKKCLHVKNDGNYCMAIYEGNNDRGKVIRSYKLVNNLAAVNYFNGKTGLDNLVPYSDEKDLPLKCVLKIGTMVLFYEKSPKELYECGMEELSKRLYKVIKMFKDGRLAFKYHLEARNDDKLKVDYRNEFNEEPPKSLTNGYSHINFSTPFAKLLLSKDNFNMLVEGYHFNITASGQIIFKNLAW

SEQ ID NO: 19367 - protein, 1200 aa, unidentified
  REGION 1..1200: note = Cas Enzyme sequence
PLDLGTNSIGWAITTQQDSSFTLLERGVYIFQEGVNRTKTGEEPMVKIRTDARAIRRHYYRRRLRKIELLKVLVANNLCPYLSNEQLDAWRYEKQYPLVDEFMLWLHSCNNSNPYADRFRSLTEVLDLKKIDDRYILGRALYHLSQRRGFLSNRKDSESSEDGVVTGCIKRLDEDMAAAGCTYLGEFYYKLFLAGKKIRTGDGYGYAGRIAHYEKEFNAICETQRLSDDLRKALYRAIFYKRPLKSQKGLVGSCTFEKDKARCPISHPRFEEFRMWCFLNNVKVKTYLDDEYRPLNEEEIAKALPMFYRKSNFDFEDIAKAIAGKKRGSYAYKDDQCDAPYHFNFRMSTSVSGCPVTAHLREIFGNEWERSICEVYLKGEGKSQEQIVNDVWHTLYFFDDNDKRFAWAKTNLQLNDEEAEKFVKIRIQQDFASLSLCAIDKILKWLRLGYRYDEAVFLANLPWVVAADAWRNEVKREKIISAVAGVVAEGYNTRGNRKESAIYNALLDCGLCGDEIRIDRLYHPSMIETYQDAKPDEQGLTLLGSPRTSSLRNPMAMRALFRMRDLINHLIKEGKIDDETKINIEFARGLNNANKRKAIEVYQREQEKRHKEYAENIRKLYKEECGVDIEPTEDDILKYQLWEEQSHLCLYTGQTIGISDFIGANPRFDIEHTVPRSRGGDNSQMNKTLCESNFNRNIKKGKLPAELATHAEVLARIEQIGWEAKCEELHKQIERTKGTFSTKEIKDAMIQKRHRLMMELDYWKGKLIRFTMTEVPEGFSNRQGVDIGIIGRYARLYLKSLFKRVYVVKGATTADFRRAWGLQDEYSKKERVNHIHHCIDAITIACIDSKSYQAWAAYQKEVEYTERYRTSRPQFQKPWSTFTEDVKAIAEDLLVSHHTAVNLPKHTRKKLRVRGKVQLNSDGQPIYVQGDTARASLHQQTFYGAIKRDDDIKYVVRKSLDSLQQSDVDKIVDDAVRECVKAAIERDGFKALAKPICFNEAKGVYIKKVRIYTPSVTSPIRLKRHQMLSRFDHKQEYYVANDGNYCMAIYEGTDARGKTKRTFQIVNNLEAAKFYNGKTNRYDLVPQSDSNDYPLKYILRTGTMVLFYENSSEELYECSRSELSKRLYKVTGMAADGRIKFTYHQEARDDKSISAECGMGISSVDVLNPVARLRLTLGSLNMYVDGYDFELTVTGEIKFK

SEQ ID NO: 19368 - protein, 1208 aa, unidentified
  REGION 1..1208: note = Cas Enzyme sequence
MEKILGLDLGTNSIGWAIVQHNDDLSYSLLDKGVNVFQDGVAHDKSGEKPMVAERTAARSSRRHYFRRRLRKIELLRVLVKYNMCPYLSDEDLLEWKNHKVYPLNDEFLDWQRTDDDLNKNPYHDRYICLTQKLDLSVMSNRYMLGRALYHIAQRRGFLSNRKENKKDDDGKVRDSIKSLTKAMQECGCDYLGEYFYRLYEKGGKIRNSYTDRLEHYKKEFSAICEKQKLDAELIKALEDAIFYQRPLKSQKGQVGHCTFEKKKTRCPISHPRYEEFRMWCFINNIKVRTFEDDEYRHLRSDEVEQIVPLFFRKTKNQFDFEDIAKKIAGKGNYCDKTDKAEKAYRFNYKLFTSVSGCPVTAGLRSLFGDEWLNQICSMYSLGEGKDKEQILNDIWHVMFSFDDEDKLKEWAMDKLQMSSEEADAFEKISVPQGYASLSLNAINKILPYLREGYRYDEAVIMANLPVVMGCDVENIPDEVVENIAIIMEDKCSNPLEKKKSAHQCVAEYLRDCRNVDSRHVDKLYHPSMIETYQAVLPVCGIYKLGSPRTSSVRNPVAMRALFRLRKLLNELLRDGKIDPETLVRIEFSRGLNDSNMRRAIEAYQREQKRLHDDYSAKIKEQMGDGYIPSDDEILKYQLWEEQKHRCPYTGAQIGLEDFLGASPKYDIEHTVPRSRGGDNSQMNKTLCESKFNRDIKKGMLPAELANHEEIMANVDTFGWREEIDSLKKRLERTRSYSATKEEKDKKIQDRHYLKMKLDYLEGKLKRFTITEVPEGFSNRQGVDIGIIGRYARLYLQTVFKRVSTVKGATTAEFRKMWGLQDYYSKKERVSHAHHCVDAITIACIGRNEYDRWAQYMKDEERYLLSAADRPHFPKPWPTFTEDVLNVSEYILVPHYTPSNLSKHTKKRLRVRGKLQYGPNGEKLYIQGDTARCSLHEQTFYGAIKRNDEIKYVVRKTLDSLDPKDVEKIVDDAVREKVKSAIAEKGFKKAVSETIWMNEELQIPIKKVRIYTPTVTNPIRLKGHRDKSVHEHKRYLHVKNDGNYCMAIYEGNNDRGKVIRSYKLVNNLDAVNYYNSKTGLDNVVPYSDERELPLKCLLKTGTMVLFYEKSPKELYECGVEDLSKRLYKVTGMSVSTITQGEKKYDYGMVTCRYHLEARRSSDLKVKKGEWKSGEDYRPIIELSHKQFNACVEGYDFDMTASGQIKFKH

SEQ ID NO: 19369 - protein, 1244 aa, unidentified
  REGION 1..1244: note = Cas Enzyme sequence
VVRCRTYVTNITKIIGAQILFPKFTENLFGMEKVLGLDLGTNSIGWAIVQHNDDSSYSLLDKGVNIFQDGVAHDKSGEKPMVSERTAARSSRRHYFRRRLRKIELLKVLVKYNLCPYLSDEDLSEWKNHKKYPLKDDFLEWQKTDDDLDRNPYHDRYVCLTQDLDLSVISNRYMLGRAFYHMVQRRGFISNRKETKKDDEGKVKDSIKSLTKAMQESGCDYLGEYFYRLYEKGGKIRKNYTDRVEHYKKEFSAICEKQHLDVELVKALENAIFYQRPLKSQKGQVGHCTFEKSKARCPISHPRYEEFRMLCFINNIKVKTWNDDDYRTLDSDEVKQIIPLFFRKSKSQFEFEDIAKKIAGKGNYCDKVDKSEKPYRFNYKMFTSVSGCPVTAGLRSVFGDDWLNQICGVYSLGEGKTQDQILNDIWHVLFSFDDEEKLKEWAKEKLQMSDEEAEAFEKISIPQGYASLSLNAINKILPYLRKGYRYDEAVIMANLPAVMGCDAEHLPGEVAENIAVIMEDHVSNPLEKKKSIHQSVTEYLRDCQNVDSKCIEKLYHPSMIETYQAALPVDGIYKLGSPRTSSVRNPMAMRALFRLRKLLNELLRDGKIDSDTLVRIEFSRDLNDSNMRKAIEINQREQKRLHDDYSAKIKEQMGEDYVPSDEEILKYQLWEEQKHRCPYTGAQIGLEDFLGASPKYDIEHTVPRSRGGDNSQMNKTLCESRFNRDVKKGMLPAELANHIEVMANVDSFGWQEEIDSLRKRLERTRSYSATKEEKDRKIQDRHYLKMKLDYLEGKLKRFAMTEVPEGFSNRQGVDIGIIGRYARMYLQTVFKRVSTVKGATTAEFRKMWGLQDYYSKKERVSHAHHCVDAITIACIGRNEYDRWAQYMRDEERYRLSAADRPHFPKPWDTFTEDVLSVSDSILVPHYTPSNLSKHTKKRLRIRGKLQYGPNGERLYVQGDTARCSLHEQTFYGAIKKNDEIKYVVRKSLDSLEPKDVDKIVDDVVREKVKKAIDEKGFKKAMSEVIWMNEELQIPIKKVRISTGLKNPIRLKAHRDKSVHEHKRCLYVKNDGNYCMAIYEGNNDRGKIIRSYKLVNNLDAVNYFNGKTDLDNIVPYSDDKDLPLKCILKTGTMVLFYEKSPRELYECGVEELSKRLYKVIVMNKDGRVAFKYHLEARNDEKIKEDYWKEFKSEPPKLLTKGYSSINFVEPYPKLLLSKDNFNMMVEGYHFNITSAGKIILKNVLW

SEQ ID NO: 19370 - protein, 994 aa, unidentified
  REGION 1..994: note = Cas Enzyme sequence
FSAICEKQHLDVELVKALENAIFYQRPLKSQKGQVGHCTFEKSKARCPISHPRYEEFRMLCFINNIKVKTWNDDDYRTLDSDEVKQIIPLFFRKSKSQFEFEDIAKKIAGKGNYCDKVDKSEKPYRFNYKMFTSVSGCPVTAGLRSVFGDDWLNQICGVYSLGEGKTQDQILNDIWHVLFSFDDEEKLKEWAKEKLQMSDEEAEAFEKISIPQGYASLSLNAINKILPYLRKGYRYDEAVIMANLPAVMGCDAEHLPGEVAENIAVIMEDHVSNPLEKKKSIHQSVTEYLRDCQNVDSKCIEKLYHPSMIETYQAALPVDGIYKLGSPRTSSVRNPMAMRALFRLRKLLNELLRDGKIDSDTLVRIEFSRDLNDSNMRKAIEINQREQKRLHDDYSAKIKEQMGEDYVPSDEEILKYQLWEEQKHRCPYTGAQIGLEDFLGASPKYDIEHTVPRSRGGDNSQMNKTLCESRFNRDVKKGMLPAELANHIEVMANVDSFGWQEEIDSLRKRLERTRSYSATKEEKDRKIQDRHYLKMKLDYLEGKLKRFAMTEVPEGFSNRQGVDIGIIGRYARMYLQTVFKRVSTVKGATTAEFRKMWGLQDYYSKKERVSHAHHCVDAITIACIGRNEYDRWAQYMRDEERYRLSAADRPHFPKPWDTFTEDVLSVSDSILVPHYTPSNLSKHTKKRLRIRGKLQYGPNGERLYVQGDTARCSLHEQTFYGAIKKNDEIKYVVRKSLDSLEPKDVDKIVDDVVREKVKKAIDEKGFKKAMSEVIWMNEELQIPIKKVRISTGLKNPIRLKAHRDKSVHEHKRCLYVKNDGNYCMAIYEGNNDRGKIIRSYKLVNNLDAVNYFNGKTDLDNIVPYSDDKDLPLKCILKTGTMVLFYEKSPRELYECGVEELSKRLYKVIVMNKDGRVAFKYHLEARNDEKIKEDYWKEFKSEPPKLLTKGYSSINFVEPYPKLLLSKDNFNMMVEGYHFNITSAGKIILKNVLW

SEQ ID NO: 19371 - protein, 1238 aa, unidentified
  REGION 1..1238: note = Cas Enzyme sequence
VVRCRTYDTNITKIIGAQILFPKFTKILFGMEKVLGLDLGTNSIGWAIVQHNDDLSYSLLDKGVNIFQDGVAHDKSGEKPMVSERTAARSSRRHYFRRRLRKIELLKVLVKYDLCPYLSEEELSEWKNHKKYPLKDEFLEWQKTDDELDRNPYHDRYMCLTQDLDLSVISNRYMLGRAFYHMVQRRGFISNRKETKKDDEGKVKDSIKSLTKAMQENGCDYLGEYFYRLYEKGGKIRKNYTDRVEHYKKEFSAICEKQHLDVELVKALENAIFYQRPLKSQKGQVGHCTFEKNKTRCPISHPRYEEFRMWCFINNIKVRTWKDENYRSLNQEEVELILPLFYRKSKTQFDFDDIAKRIAGKGNYCDRIDKAEKAYRFNYKMYTSVSGCPVTAGLRNVFGDDWLNQICGVYSLGEGKTQDQILNDIWHVLFSFDDEDKLKEWAKAKLQLSDEEAEAFEKISAPQGYASLSLNAINKILPYLRKGYRYDEAVIMANLPAVMGCDAEHLPDEVTENIAIIMEDNISNPLEKKKSIHQSVTEYLRDCQGIDSRHIEKLYHPSMIETYQAALPVAGIYKLGSPRTSSVRNPMAMRALFRLRKLLNELLRDGKIDSDTLVRIEFSRGLNDSNMRKAIETYQREQKRLHDDYSAKIKEQMGDDYVPSDDEMLKYQLWEEQKHRCPYTGAQIGLEDFLGVSPKYDIEHTVPRSRGGDNSQMNKTLCESKFNRDIKKGMLPAELTNHSEIMANVESFGWQEDIDSLKKRLERTRIYSATKEEKDRKIQDRHYLKMKLDYLEGKLKRFKMTEVPEGFSNRQGVDIGIIGRYARMYLQTVFKRVSTVKGATTAEFRKMWGLQDYYSKKERVSHAHHCVDAITIACIGRNEYDRWAQYMRDEERYLLSAAARPRFPKPWDTFTEDVLAVSDSILVPHYTPSNLSKHTKKRLRIRGKLQYGPNGEKLYVQGDTARCSLHEQTFYGAIKKNDEIKYVVRKSLDSLEEKDIKNIVDDVVREKVKMAVDEKGFRKAVSETIWMNEELHIPIKKVRIYTPTVTNPIKLKGHRDKSVHQHKRYLHVKNDGNYCMAIYEGNNDRGKVIRSYKLVNNLDAVNYFNGKTELDNLVPYSDEKDLPLKCVLRTGIMVLFYEKSPKELYECGVEELSKRLYKVTGMSVSTITQGEKKYDYGMVTCRYHLEARRSSDLKAKKGEWKLGENYRPVIELSHKQFNAYVEGYDFDITSSGQIKFKH

SEQ ID NO: 19372 - protein, 1244 aa, unidentified
  REGION 1..1244: note = Cas Enzyme sequence
VVRCRTYVTNITKIIGAQILFPKFTENLFGMEKVLGLDLGTNSIGWAIVQHNDDSSYSLLDKGVNIFQDGVAHDKSGEKPMVSERTAARSSRRHYFRRRLRKIELLKVLVKYNLCPYLSDEDLSEWKNHKKYPLKDDFLEWQKTDDDLDRNPYHDRYVCLTQDLDLSVISNRYMLGRAFYHMVQRRGFISNRKETKKDDEGKVKDSIKSLTKAMQENGCDYLGEYFYRLYEKGGKIRKNYTDRVEHYKKEFSAICEKQHLDVELVKALENAIFYQRPLKSQKGQVGHCTFEKSKARCPISHPRYEEFRMLCFINNIKVKTWNDDDYRTLDSDEVKQIIPLFFRKSKSQFEFEDIAKKIAGKGNYCDKVDKSEKPYRFNYKMFTSVSGCPVTAGLRSVFGDDWLNQICGVYSLGEGKTQDQILNDIWHVLFSFDDEEKLKEWAKEKLQMSDEEAEAFEKISIPQGYASLSLNAINKILPYLRKGYRYDEAVIMANLPAVMGCDAEHLPGEVAENIAVIMEDHVSNPLEKKKSIHQSVTEYLRDCQNVDSKCIEKLYHPSMIETYQAALPVDGIYKLGSPRTSSVRNPMAMRALFRLRKLLNELLRDGKIDSDTLVRIEFSRDLNDSNMRKAIEINQREQKRLHDDYSAKIKEQMGEDYVPSDEEILKYQLWEEQKHRCPYTGAQIGLEDFLGASPKYDIEHTVPRSRGGDNSQMNKTLCESRFNRDVKKGMLPAELANHIEVMANVDSFGWQEEIDSLRKRLERTRSYSATKEEKDRKIQDRHYLKMKLDYLEGKLKRFAMTEVPEGFSNRQGVDIGIIGRYARMYLQTVFKRVSTVKGATTAEFRKMWGLQDYYSKKERVSHAHHCVDAITIACIGRNEYDRWAQYMRDEERYRLSAADRPHFPKPWDTFTEDVLSVSDSILVPHYTPSNLSKHTKKRLRIRGKLQYGPNGERLYVQGDTARCSLHEQTFYGAIKKNDEIKYVVRKSLDSLEPKDVDKIVDDVVREKVKKAIDEKGFKKAMSEVIWMNEELQIPIKKVRISTGLKNPIRLKAHRDKSVHEHKRCLYVKNDGNYCMAIYEGNNDRGKIIRSYKLVNNLDAVNYFNGKTDLDNIVPYSDDKDLPLKCILKTGTMVLFYEKSPRELYECGVEELSKRLYKVIVMNKDGRVAFKYHLEARNDEKIKEDYWKEFKSEPPKLLTKGYSSINFVEPYPKLLLSKDNFNMMVEGYHFNITSAGKIILKNVLW

SEQ ID NO: 19373 - protein, 1245 aa, unidentified
  REGION 1..1245: note = Cas Enzyme sequence
PSAYSLIVVRCRTYDTNITKIIGAQILFPKFTKILFGMEKVLGLDLGTNSIGWAIVQHNDDLSYSLLDKGVNIFQDGVAHDKSGEKPMVSERTAARSSRRHYFRRRLRKIELLKVLVKYDLCPYLSEEELSEWKNHKKYPLKDEFLEWQKTDDELDRNPYHDRYMCLTQDLDLSVISNRYMLGRAFYHMVQRRGFISNRKETKKDDEGKVKDSIKSLTKAMQESGCDYLGEYFYRLYEKGGKIRKNYTDRVEHYKKEFSAICEKQHLDVELVKALENAIFYQRPLKSQKGQVGHCTFEKNKTRCPISHPRYEEFRMWCFINNIKVRTWKDENYRSLNQEEVELILPLFYRKSKTQFDFDDIAKRIAGKGNYCDRIDKAEKAYRFNYKMYTSVSGCPVTAGLRNVFGDDWLNQICGVYSLGEGKTQDQILNDIWHVLFSFDDEDKLKEWAKAKLQLSDEEAEAFEKISAPQGYASLSLNAINKILPYLRKGYRYDEAVIMANLPAVMGCDAEHLPDEVTENIAIIMEDNISNPLEKKKSIHQSVTEYLRDCQGIDSRHIEKLYHPSMIETYQAALPVAGIYKLGSPRTSSVRNPMAMRALFRLRKLLNELLRDGKIDSDTLVRIEFSRGLNDSNMRKAIETYQREQKRLHDDYSAKIKEQMGDDYVPSDDEMLKYQLWEEQKHRCPYTGAQIGLEDFLGVSPKYDIEHTVPRSRGGDNSQMNKTLCESKFNRDIKKGMLPAELTNHSEIMANVESFGWQEDIDSLKKRLERTRIYSATKEEKDRKIQDRHYLKMKLDYLEGKLKRFKMTEVPEGFSNRQGVDIGIIGRYARMYLQTVFKRVSTVKGATTAEFRKMWGLQDYYSKKERVSHAHHCVDAITIACIGRNEYDRWAQYMRDEERYLLSAAARPRFPKPWDTFTEDVLAVSDSILVPHYTPSNLSKHTKKRLRIRGKLQYGPNGEKLYVQGDTARCSLHEQTFYGAIKKNDEIKYVVRKSLDSLEEKDIKNIVDDVVREKVKMAVDEKGFRKAVSETIWMNEELHIPIKKVRIYTPTVTNPIKLKGHRDKSVHQHKRYLHVKNDGNYCMAIYEGNNDRGKVIRSYKLVNNLDAVNYFNGKTELDNLVPYSDEKDLPLKCVLRTGIMVLFYEKSPKELYECGVEELSKRLYKVTGMSVSTITQGEKKYDYGMVTCRYHLEARRSSDLKAKKGEWKLGENYRPVIELSHKQFNAYVEGYDFDITSSGQIKFKH

SEQ ID NO: 19374 - protein, 1214 aa, unidentified
  REGION 1..1214: note = Cas Enzyme sequence
MEKVLGLDLGTNSIGWAIVQHNDDSSYSLLDKGVNIFQDGVAHDKSGEKPMVSERTAARSSRRHYFRRRLRKIELLKVLVKYNLCPYLSDEDLSEWKNHKKYPLKDDFLEWQKTDDDLDRNPYHDRYVCLTQDLDLSVISNRYMLGRAFYHMVQRRGFISNRKETKKDDEGKVKDSIKSLTKAMQESGCDYLGEYFYRLYEKGGKIRKNYTDRVEHYKKEFSAICEKQHLDVELVKALENAIFYQRPLKSQKGQVGHCTFEKSKARCPISHPRYEEFRMLCFINNIKVKTWNDDDYRTLDSDEVKQIIPLFFRKSKSQFEFEDIAKKIAGKGNYCDKVDKSEKPYRFNYKMFTSVSGCPVTAGLRSVFGDDWLNQICGVYSLGEGKTQDQILNDIWHVLFSFDDEEKLKEWAKEKLQMSDEEAEAFEKISIPQGYASLSLNAINKILPYLRKGYRYDEAVIMANLPAVMGCDAEHLPGEVAENIAVIMEDHVSNPLEKKKSIHQSVTEYLRDCQNVDSKCIEKLYHPSMIETYQAALPVDGIYKLGSPRTSSVRNPMAMRALFRLRKLLNELLRDGKIDSDTLVRIEFSRDLNDSNMRKAIEINQREQKRLHDDYSAKIKEQMGEDYVPSDEEILKYQLWEEQKHRCPYTGAQIGLEDFLGASPKYDIEHTVPRSRGGDNSQMNKTLCESRFNRDVKKGMLPAELANHIEVMANVDSFGWQEEIDSLRKRLERTRSYSATKEEKDRKIQDRHYLKMKLDYLEGKLKRFAMTEVPEGFSNRQGVDIGIIGRYARMYLQTVFKRVSTVKGATTAEFRKMWGLQDYYSKKERVSHAHHCVDAITIACIGRNEYDRWAQYMRDEERYRLSAADRPHFPKPWDTFTEDVLSVSDSILVPHYTPSNLSKHTKKRLRIRGKLQYGPNGERLYVQGDTARCSLHEQTFYGAIKKNDEIKYVVRKSLDSLEPKDVDKIVDDVVREKVKKAIDEKGFKKAMSEVIWMNEELQIPIKKVRISTGLKNPIRLKAHRDKSVHEHKRCLYVKNDGNYCMAIYEGNNDRGKIIRSYKLVNNLDAVNYFNGKTDLDNIVPYSDDKDLPLKCILKTGTMVLFYEKSPRELYECGVEELSKRLYKVIVMNKDGRVAFKYHLEARNDEKIKEDYWKEFKSEPPKLLTKGYSSINFVEPYPKLLLSKDNFNMMVEGYHFNITSAGKIILKNVLW

SEQ ID NO: 19375 - protein, 1231 aa, unidentified
  REGION 1..1231: note = Cas Enzyme sequence
LGLKYFFLNLRKIFFAMEKVLGLDLGTNSIGWAIVQHNDDLSYSLLDKGVNIFQDGVAHDKSGEKPMVAERTAARSSRRHYFRRRLRKIELLKILVKYDLCPYLSEEDLAEWKNHKKYPLKDDFLEWQRTDDDLDRNPYHDRYVCLTQELDLSVISNRYMLGRAFYHIVQRRGFISNRKETKKDDEGKVKDSIKSLTKAMQESGCDYLGEYFFRLYEKGGKIRKNYTDRVEHYKKEFSAICEKQHLDAELVKALENAIFYQRPLKSQKGQVGHCTFEKSKARCPISHPRYEEFRMWCFINNIKVRTWNDDDYRTLDSDEVKQIIPLFFRKSKNQFEFEDIAKKIAGKGNYCDKTDKADKSYRFNYKMFTSVSGCPMTAGLRSVFGDDWLNQICGVYSLGEGKTQDQILNDIWHVLFSFDDEEKLKEWAREKLQMSSEEADDFEKITVPQGYASLSLNAINKMLPYLRKGYRYDEAVIMANLPAVMECDAEHLPAEVAENIAVIMEDHISNPLEKKKSVHQSVTEYLRDCQNVDSKHIDKLYHPSMIETYQAALPVDGIYKLGSPRTSSVRNPMAMRALFRLRKLLNELLRDGKIDSDTLVRIEFARELNDSNMRKAIEINQREQKRLHDDYSAKIKEQMGDDYAPSDDEILKYQLWEEQKHRCPYTGAQIGLEDFLGASPKYDIEHTVPRSRGGDNSQMNKTLCESRFNRDVKKGMLPTELANHLEVMANVDSFGWQEEIDSLRKRLERTRGYSATKEEKDRKIQDRHYLKMKLDYLEGKLKRFTMTEVPEGFSNRQGVDIGIIGRYARMYLQTVFKRVFTVKGATTAEFRKMWGLQDYYSKKERVSHAHHCVDAITIACIGRNEYERWAQYMRDEERYRLSAADRPHFPKPWDTFTEDVLSVSDSILVPHYTPSNLSKHTKKRLRIRGKLQYGPNGERLYVQGDTARCSLHEQTFYGAIKKNDEIKYVVRKSLDSLEPKDVDKIVDDVVREKVKTAIAEKGFKKAMSEDIWMNEELQIPIKKVRIYTPTVTNPIKLKGHRDKSVHEHKRYLHVKNDGNYCMAIYEGNNDRGKIIRSYKLVNNLDAVNYFNGKTGLDNLVPFSDDKDLPLKCILKTGTMVLFYEKSPRELQECGVEELSKRLYKVIKMSKDGRLAFKYHLEARNDDKLKVDYRNEFNEEPPKSLTNGYSCVNFSKPYPKLLLSKDNFNMLVEGYHFNITASGQIIFKNLAW

SEQ ID NO: 19376 - protein, 1216 aa, unidentified; identical to SEQ ID NO: 16427
  REGION 1..1216: note = Cas Enzyme sequence

SEQ ID NO: 19377 - protein, 1210 aa, unidentified
  REGION 1..1210: note = Cas Enzyme sequence
MKKRILGIDTGTNSLGWAVVDKNDDGEYSLIHKGSLIFQEGVKVEKGIESSKAADRTAHRSLRKQYFRRRLRKIKVLEVLVEFGWCPYLSSEALHLWHVNKTYPMDEAFMSWQRTNDNFEENPYYYRHLCLHRYLDLNEQSNRYILGRAMYHLAQRRGFLSNRLDQGNEDETGKVKEGISSLSKSMEEAGCEYLGDFFYKIYKEKGNTERIRTRYTDREEHYKKEFYAICKQQRLSEEQISKLEKALYFQRPLKSQRQGVGKCTFEPKKSRVADSHPLFELFRMLSFVNNIKVKGPHDVELRPLTTEEFEMAKPAFFRKSKPQFDFEDIAKAIAGKGKYQYIKEIGEKPYKFNYRMSQSVTGCPTIANLMSLFGDDYEEGIAERYTLSEGKTPKQMLNDVWNVLYSFSDKDKVKQWGKEKLQLSDEEAEKFSKIRLTHAFASLSLAAINKILPWLEQGLIYPHAVLMAKVPDIVGEEVWKSRSEAITKELLSLISNFNPKDIGMTGTLDFCIKDILKDMCDLAPGAVEKLYHPSMIETYPDAKKNSQGIYQLGSPRTNAIRNPMAMRSLHQLRKVINTLLQEGTIDNQTEVHIEYARELNDANKRKAIAQWNKERENKRKKYAEDIRSLYKQESGKAIEPTEDDIVKFQLWEEQNHICLYTGESIGITDFIGPNPSYDIEHTVPRSVGGDSTLENMTLCSSKFNRDVKKAKLPTELPNHDDILGRLEGWREKIEKLRKDADHVKTYSSMDKATKDRLIQKRHLIRLELDYWVGKYKRFQMEEVPEGFARRQGAGIGLVGKYAGLYLKSLFHKADDRSKSNVRVVKGATTAEYRKMWGIQDEYVKKSRDNHVHHCIDAITIACIEPGEYNSTARYYQQLEEYERNNAPKPSFPKPWPTFTEDIKAIAQEMLVVHSTPDNMPKRARKYVQTSNGRKLAMGDSARGSLHNDTYYGAIERDGEIKYVVRKTLSSLKETDIENIVDDAVKERVKNAVAEKGFKEAMAGDIFMNEMKGIKIKKVRCFTPAVTNPLHIRTHRDESRKEYKRQYHVTLDGNYCMAIYEGEVKGKLKRTYEIVNMMDAAAYYKKSAGMTSLYPIAPENKNGLRFRCVVRTGTQIILLQSDNEEINLTDKEDLAKRFYFVAVMRSDGRLVLRYNQDARDATTLKKERKSGAYKTGEQYRSEIMLSLSDFHALIEGVDFKINVLGEIVMFK

SEQ ID NO: 19378 - protein, 1210 aa, unidentified
  REGION 1..1210: note = Cas Enzyme sequence
MKKRILGIDTGTNSLGWAVVDKNDDGEYSLIHKGSLIFQEGVKVEKGIESSKAADRTAHRSLRKQYFRRRLRKIKVLEVLVEFGWCPYLSSEALHLWHVNKTYPMDEAFMSWQRTNDNFEENPYYYRHLCLHRYLDLNEQSNRYILGRAMYHLAQRRGFLSNRLDQGNEDETGKVKEGISSLSKSMEEAGCEYLGDFFYKIYKEKGNTERIRTRYTDREEHYKKEFYAICKQQRLSEEQISKLEKALYFQRPLKSQRQGVGKCTFEPKKSRVADSHPSFELFRMLSFVNNIKVKGPHDVELRPLTTEEFEMAKPAFFRKSKPQFDFEDIAKAIAGKGKYQYIKEIGEKPYKFNYRMSQSVTGCPTIANLMSLFGDDYEEGIAERYTLSEGKTPKQMLNDVWNVLYSFSDKDKVKQWGKEKLQLSDEEAEKFSKIRLTHAFASLSLAAINNILPWLEQGLIYPHAVLMAKVPDIVGEEVWKSRGEAITKELLSLISNFNPKDIGMTGTLDFCIKDILKDMCDLAPGAVEKLYHPSMIETYPDAKKNSQGIYQLGSPRTNAIRNPMAMRSLHQLRKVINTLLQEGTIDNQTEVHIEYARELNDANKRKAIAQWNKDRENKRKKYAEDIRSLYKQESGKAIEPTEDDIVKFQLWEEQNHICLYTGESIGITDFIGPNPSYDIEHTVPRSVGGDSTLENMTLCSSKFNRDVKKAKLPTELPNHDDILGRLEGWREKIEKLRKDADHVKTYSSMDKATKDRLIQKRHLIRLELDYWVGKYKRFQMEEVPEGFARRQGAGIGLVGKYAGLYLKSLFHKADDRSKSNVRVVKGATTAEYRKMWGIQDEYVKKSRDNHVHHCIDAITIACIEPGEYNATARYYQQLEEYERNNAPKPSFPKPWPTFTEDIKAIAQEMLVVHSTPDNMPKRARKYVQTSNGRKLAMGDSARGSLHNDTYYGAIERDGEIKYVVRKTLSSLKETDIENIVDDAVKERVKNAVAEKGFKEAMAGDIFMNEMKGIKIKKVRCFTPAVTNPLHIRTHRDESRKEYKRQYHVTLDGNYCMAIYEGEVKGKLKRTYEIVNMMDAAAYYKKSAGMTSLYPIAPENKNRLRFRCVVRTGTQIILLQSDNEEINLTDKEDLAKRFYFVAVMRSDGRLVLRYNQDARDATTLKKERKSGAYKTGEQYRSEIMLSLSDFHALIEGVDFKINVLGEIVMFK

SEQ ID NO: 19379 - protein, 1216 aa, unidentified
  REGION 1..1216: note = Cas Enzyme sequence
MKRVFGIDLGTNSIGWSIVEQLENGKYRHIKSGVDIFKDGVDHDKSGEHPCVQLRTNARGLRRHYFRRRLHKIELLKILIEERMCPPLTDEDLKRWRFKKIYPKEDNFMEWQRTNDNLEKNPYHDRYVALTRKLDLSIESDRYILGRAFYHLSQRRGFLSNRKDSTKEQEGEVKAAISELSDKIKEAGCSYLCEYFYKLYQAGDKIRGHYTARKEHYLKEFQAICDKQSLGADLCKRLNNAIFYQRPLKSQKGNIGRCTFELGKQRCSTSHPAYEEYRMLCFINNIRLHRQGEDSDFRVLTKEEVDAIIPKFVCKSQFKFEKLAKELAHKKENYGFKYDSDESTLKFNYRKETSIAGSPVTAGLKEIFGEEWKSEICSVYMKSEGKTEDRIIDDVWHVLYSFDNDENIRDWAKKNLQLDDEQAEKFAKIKIERDYASLSLNAIRKILPYLRRGLRYDEAVFCANIPAALGNVEDVDEYRKIEDDIVACVRNFKSCEVAGRKNTLEKEVAELLEEKYGVDKRHLGKIYHPSKTETYPTAQPDNNGLRLLGSPRTASVRNPMAMRALFRLRALTNELLKKGEINSETVVNIEFARGLNDANMRKAIENYQREIADRHQKYAKEIKDCYLKETGKNIEPTENEILKYQLWEEQNHQCLYTGKMISVADFIGANPKFDIEHTLPRAAGGDDSQVNKTLCDSRFNREVKKAHLPSELANHAEILLKAKNLWQKKIYELTKQIEGTKGYAADKNAKDGKIQRRHLLKMKRDYYIGKLQRFEMKEVPTGFSNRQGVDIGIIGKYAKLYLHTVFDKIFVVKGATTAAFRKVWGLQSVYEKKERINHVHHCVDAITIACIGKKQYDDWKCYQEAEDMYYRGETGRPSMDKPWSTFTEDVKQLTEGLLIHHYVPDNAGKASKKKLRVRGRIQRNAEGRALYATGDCARLSLHQQTFYGAIKQDDEIRYVVRKPLDSLEKKDIEKIVDPEVRQKVKEAVDAKGIKDAVADGIWMNEEKRIPIKKVRIYTSIANPLRLKRQRDLSVHDYKRDYYVANDGNYCMGIYEGTDAKGKKKKTFKIVNNMDAANYFKARQRGEDVELLPMSDGNDFPLKCVLKTGSVVLFYQDTPKELKECSKKELAKRLYRVVGMSEMKIKQKTGKIDCYGMLSLTFHQEARPSSDLKDKNGEWRIGEDVRPKIKLTHNQTNFLVEGIDFRLTLSGDVEWLK

SEQ ID NO: 19380 - protein, 1216 aa, unidentified
  REGION 1..1216: note = Cas Enzyme sequence
MKRVFGIDLGTNSIGWSIVEQLENGKYRHIKSGVDIFKDGVDHDKSGEHPCVQLRTNARGLRRHYFRRRLHKIELLKILIEERMCPPLTDEDLKRWRFKKIYPKEDNFMEWQRTNDNLEKNPYHDRYVALTRKLDLSIESDRYILGRAFYHLSQRRGFLSNRKDSTKEQEGEVKAAISELSDKIKEAGCSYLCEYFYKLYQAGDKIRGHYTARNEHYLKEFQAICDKQCLGADLCKRLNNAIFYQRPLKSQKGNIGRCTFELGKQRCSTSHPAYEEYRMLCFINNIRLHRQGEDSDFRVLTKEEVDAIIPKFVCKSQFKFEKLAKVLAHKKENYGFKYDSDESTLKFNYRKETSIAGSPVTAGLKEIFGEEWKSEICSVYMKSEGKTEDRIIDDVWHVLYSFDNDENIRDWAKKNLQLDDEQAEKFAKIKIERDYASLSLNAIRKILPYLRRGLRYDEAVFCANIPAALGNVEDVDEYRKIEDDIVACVRNFKSCEVAGRKNTLEKEVAELLEEKYGVDKRHLGKIYHPSKTETYPTAQPDNNGLRLLGSPRTASVRNPMAMRALFRLRALTNELLKKGEINSETVVNIEFARGLNDANMRKAIENYQREIADRHQKYAKEIKDCYLKETGKNIEPTENEILKYQLWEEQNHQCLYTGKMISVADFIGANPKFDIEHTLPRAAGGDDSQVNKTLCDSRFNREVKKAHLPSELANHAEILLKAKNLWQKKIYELTKQIEGTKGYAADKNAKDGKIQRRHLLKMKRDYYIGKLQRFEMKEVPAGFSNRQGVDIGIIGKYAKLYLHTVFDKIFVVKGATTAAFRKVWGLQSVYEKKERINHVHHCVDAITIACIGKKQYDDWKCYQEAEDMYYRGETGRPSMDKPWSTFTEDVKQLTEGLLIHHYVPDNAGKASKKKLRVRGRIQRNAEGRVLYATGDCARLSLHQQTFYGAIKQDDEIRYVVRKPLDSLEKKDIEKIVDPEVRQKVKEAVDAKGMKDAVADGIWMNEEKRIPIKKVRIYTSIANPLRLKRQRDLSVHDYKRDYYVANDGNYCMGIYEGTDAKGKKKKTFKIVNNMDAANYFKARQRGEDVELLPMSDGNDFPLKCVLKTGSVVLFYQDTPKELKECSKKELAKRLYRVVGMSEMRITRKKGKIDCYGMLSLTFHQEARPSIDLKDKNGEWRIGEDVRPKIKLTHNQTNFLVEGIDFRLTLSGDVEWLK

SEQ ID NO: 19381 - protein, 1216 aa, unidentified
  REGION 1..1216: note = Cas Enzyme sequence
MKRVFGIDLGTNSIGWSIVEQLENGKYRHIKSGVDIFKDGVDHDKSGEHPCVQLRTNARGLRRHYFRRRLHKIELLKILIEERMCPPLTDEDLKRWRFKKIYPKEDNFMEWQRTNDNLEKNPYHDRYVALTRKLDLSIESDRYILGRAFYHLSQRRGFLSNRKDSTKEQEGEVKAAISELSDKIKEAGCSYLCEYFYKLYQAGDKILGHYTARNEHYLKEFQAICDKQSLGADLCKRLNNAIFYQRPLKSQKGNIGRCTFELGKQRCSTSHPAYEEYRMLCFINNIRLHRQGEDSDFRVLTKEEVDAIIPKFVCKSQFKFEKLAKVLAHKKENYGFKYDSDESTLKFNYRKETSIAGSPVTAGLKEIFGEEWKSEICSVYMKSEGKTEDRIIDDVWHVLYSFDNDENIRDWAKKNLQLDDEQAEKFAKIKIERDYASLSLNAIRKILPYLRRGLRYDEAVFCANIPAALGNVEDVDEYRKIEDDVVACVRNFKSCEVAGRKNTLEKEVAELLEEKYGVDKRHLGKIYHPSKTETYPTAQPDNNGLRLLGSPRTASVRNPMAMRALFRLRALTNELLKKGEINSETVVNIEFARGLNDANMRKAIENYQREIADRHQKYAKEIKDCYLKETGKNIEPTENEILKYQLWEEQNHQCLYTGKMISVADFIGANPKFDIEHTLPRAAGGDDSQVNKTLCDSRFNREVKKAHLPSELANHAEILLKAKNLWQKKIYELTKQIEGTKGYAADKNAKDGKIQRRHLLKMKRDYYIGKLQRFEMKEVPTGFSNRQGVDIGIIGKYAKLYLHTVFDKIFVVKGATTAAFRKVWGLQSVYEKKERINHVHHCVDAITIACIGKKQYDDWKCYQEAEDMYYRGETGRPSMDKPWSTFTEDVKQLTEGLLIHHYVPDNAGKASKKKLRVRGRIQRNAEGRALYATGDCARLSLHQQTFYGAIKQDDEIRYVVRKPLDSLEKKDIEKIVDPEVRQKVKEAVDTKGMKDAVADGIWMNEEKRIPIKKVRIYTSIANPLRLKRQRDLSVHDYKRDYYVANDGNYCMGIYEGTDAKGKKKKTFKIVNNMDAANYFKARQRGEDVELLPMSDGNDFPLKCVLKTGSVVLFYQDTPKELKECSKKELAKRLYRVVGMSEMKIKQKTGKIDCYGMLSLTFHQEARPSSDLKDKNGVWRIGEDVRPKIKLTHNQTNFLVEGIDFRLTLSGDVEWLK

SEQ ID NO: 19382 - protein, 1216 aa, unidentified
  REGION 1..1216: note = Cas Enzyme sequence
MKRVFGIDLGTNSIGWSIVEQLENGKYRHIKSGVDIFKDGVDHDKSGEHPCVQLRTNARGLRRHYFRRRLHKIELLKILIEERMCPPLTDEDLKRWRFKKIYPKEDNFMEWQRTNDNLEKNPYHDRYVALTRKLDLSIESDRYILGRAFYHLSQRRGFLSNRKDSTKEQEGEVKAAISELSDKIKEAGCSYLCEYFYKLYQAGDKIRGHYTARNEHYLKEFQAICDKQSLGADLCKRLNNAIFYQRPLKSQKGNIGRCTFELGKQRCSTSHPAYEEYRMLCFINNIRLHRQGEDSDFRVLTKEEVGAIIPKFVCKSQFKFEKLAKVLAHKKENYGFKYDSDESTLKFNYRKETSIAGSPVTAGLKEIFGEEWKSEICSVYMKSEGKTEDRIIDDVWHVLYSFDNDENIRDWAKKNLQLDDEQAEKFAKIKIERDYASLSLNAIRKILPYLRRGLRYDEAVFCANIPAALGNVEDVDEYRKIEDDIVACVRNFKSCEVAGRKNTLEKEVAELLEEKYGVDKRHLGKIYHPSKTETYPTAQPYNNGLRLLGSPRTASVRNPMAMRALFRLRALTNELLKKGEINSETVVNIEFARGLNDANMRKAIENYQREIADRHQKYAKEIKDCYLKETGKNIEPTENEILKYQLWEEQNHQCLYTGKMISVADFIGANPKFDIEHTLPRAAGGDDSQVNKTLCDSRFNREVKKAHLPSELANHAEILLKAKNLWQKKIYELTKQIEGTKGYAADKNTKDGKIQRRHLLKMKRDYYIGKLQRFEMKEVPTGFSNRQGVDIGIIGKYAKLYLHTVFDKIFVVKGATTAAFRKVWGLQSVYEKKERINHVHHCVDAITIACIGKKQYDDWKCYQEAEDMYYRGETGRPSMDKPWSTFTEDVKQLTEGLLIHHYVPDNAGKASKKKLRVRGRIQRNAEGRALYATGDCARLSLHQQTFYGAIKQDDEIRYVVRKPLDSLEKKDIEKIVDPEVRQKVKEAVDAKGMKDAVADGIWMNEEKRIPIKKVRIYTSIANPLRLKRQRDLSVHDYKQDYYVANDGNYCMGIYEGTDAKGKKKKTFKIVNNMDAANYFKARQRGEDVELLPMSDGNDFPLKCVLKTGSVVLFYQDTPKELKECSKKELAKRLYRVVGMSEMKIKQKTGKIDCYGMLSLTFHQEARPSSDLKDKNGAWRIGEDVRPKIKLTHNQTNFLVEGIDFRLTLSGDVEWIK

SEQ ID NO: 19383 - protein, 1216 aa, unidentified
  REGION 1..1216: note = Cas Enzyme sequence
MKRVFGIDLGTNSIGWSIVEQLENGKYRHIKSGVDIFKDGVDHDKSGEHPCVQLRTNARGLRRHYFRRRLHKIELLKILIEERMCPPLTDEDLKRWRFKKIYPKEDNFMEWQRTNDNLEKNPYHDRYVALTRKLDLSIESDRYILGRAFYHLSQRRGFLSNRKDSTKEQEGEVKAAISELSDKIKEAGCSYLCEYFYKLYQAGDKIRGHYTARNEHYLKEFQAICDKQSLGADLCKRLNNAIFYQRPLKSQKGNIGRCTFELGKQRCSTSHPAYEEYRMLCFINNIRLHRQGEDSDFRVLTKEEVDAIIPKFVCKSQFKFEKLAKVLAHKKENYGFKYDSDESTLKFNYRKETSIAGSPVTAGLKEIFGEEWKSEICSVYMKSEGKTEDRIIDDVWHVLYSFDNDENIRDWAKKNLQLDDEQVEKFAKIKIERDYASLSLNAIRKILPYLRRGLRYDEAVFCANIPAALGNVEDVDEYRKIEDDVVACVRNFKSCEVAGRKNTLEKEVAELLEEKYGVDKRHLGKIYHPSKTETYPTAQPDNNGLRLLGSPRTASVRNPMAMRALFRLRALTNELLKKGEINSETVVNIEFARGLNDANMRKAIENYQREIADRHQKYAKEIKDCYLKETGKNIEPTENEILKYQLWEEQNHQCLYTGKMISVADFIGANPKFDIEHTLPRAAGGDDSQVNKTLCDSRFNREVKKAHLPSELANHAEILLKAKNLWQKKIYELTKQIEGTKGYAADKNAKDGKIQRRHLLKMKRDYYIGKLQRFEMKEVPTGFSNRQGVDIGIIGKYAKLYLHTVFDKIFVVKGATTAAFRKVWGLQSVYEKKERINHVHHCVDAITIACIGKKQYDDWKCYQEAEDMYYRGETGRPSMDKPWSTFTEDVKQLTEGLLIHHYVPDNAGKASKKKLRVRGRIQRNAEGRALYATGDCARLSLHQQTFYGAIKQDDEIRYVVRKPLDSLEKKDIEKIVDPEVRHKVKEAVDAKGMKDAVADGIWMNEEKRIPIKKVRIYTSIANPLRLKRQRDLSVHDYKRDYYVANDGNYCMGIYEGTDAKGKKKKTFKIVNNMDAANYFKARQRGEDVELLPMSDGNDFPLKCVLKTGSVVLFYQDTPKELKECSKKELAKRLYRVVGMSEMKIKQKTGKIDCYGMLSLTFHQEARPSSDLKDKNGVWRIGEDVRPKIKLTHNQTNFLVEGIDFRLTLSGDVEWLK

SEQ ID NO: 19384 - protein, 1025 aa, unidentified
  REGION 1..1025: note = Cas Enzyme sequence
MKRVFGIDLGTNSIGWSIVEQLENGKYRHIKSGVDIFKDGVDHDKSGEHPCVQLRTNARGLRRHYFRRRLHKIELLKILIEERMCPPLTDEDLKRWRFKKIYPKEDNFMEWQRTNDNLEKNPYHDRYVALTRKLDLSIESDRYILGRAFYHLSQRRGFLSNRKDSTKEQEGEVKVAISELSDKIKEAGCSYLCEYFYKLYQAGDKIRGHYTARNEHYLKEFQAICDKQSLGADLCKRLNNAIFYQRPLKSQKGNIGRCTFELGKQRCSTSHPAYEEYRMLCFINNIRLHRQGEDSDFRVLTKEEVDAIIPKFVCKSQFKFEKLAKVLAHKKENYGFKYDSDESTLKFNYRKETSIAGSPVTAGLKEIFGEEWKSEICSVYMKSEGKTEDRIIDDVWHVLYSFDNDENIRDWAKKNLQLDDEQAEKFAKIKIERDYASLSLNAIRKILPYLRRGLRYDEAVFCANIPAALGNVEDVDEYRKIEDDIVACVRNFKSCEVAGRKNTLEKEVAELLEEKYGVDKRHLGKIYHPSKTETYPTAQPDNNGLRLLGSPRTASVRNPMAMRALFRLRALTNELLKKGEINSETVVNIEFARGLNDANMRKAIENYQREIADRHQKYAKEIKDCYLKETGKNIEPTENEILKYQLWEEQNHQCLYTGKMISVADFIGANPKFDIEHTLPRAAGGDDSQVNKTLCDSRFNREVKKTHLPSELANHAEILLKAKNLWQKKIYELTKQIEGTKGYAADKNAKDGKIQRRHLLKMKRDYYIGKLQRFEMKEVPAGFSNRQGIDIGIIGKYARLYLNTVFDKIFVVKGATTAAFRKVWGLQSVYEKKERINHVHHCVDAITIACIGKKQYDDWKCYQEAEDMYYRGETGRPSMDKPWSTFTEDVKQLTEGLLIHHYVPDNAGKASKKKLRVRGRIQRNAEGRALYATGDCARLSLHQQTFYGAIKQDDEIRYVVRKPLDSLEKKDIEKIVDPEVRQKVKEAVDAKGMKDAVADGIWMNEEKRIPIKKCVYTHQLLILCD

SEQ ID NO: 19385 - protein, 1237 aa, unidentified
  REGION 1..1237: note = Cas Enzyme sequence
MEICNILFNFTRNNFFHMAKVLGLDLGTNSLGWALADEYEQGYALLDKGVEIFQEGVARDKNNEKPAVQDRTDARALRRHYFRRRLRKIDLLRVLVRYDLCPPLTEEQLSTWRQKKQYPLDEEFLRWQRTDDNEDRNPYHDRYVALTERLDLENRVQRWLLGRAFYHLAQRRGFLSNRKEAGNEKEDGTVKESIKNLSAEMEAAGCRYLGEYFYGLYQHKERIRGKYTSRNEHYLTEFNAICDRQQLPDKWRRALHRAIFFQRDLKSQKGSVGRCTFEPTKSRCPVSHPRFEEFRMWSFINNIRVTGPDDGTPRPLTPKEIETIRPLFFRKSKSYFDFEEIARKIAGKGRYACKEERIEAPYRFNFARTTTVSGCPVTASLMDIFGKEWLREIRSLYLLGDGKTEEQVLNDIWHALFSFKDEERLRDWACEKLQLSEEQAKAFAAIKLPQDYAAMSLNAINKILPYLRCGYRYDEAVFLANLRAALPKEVYADENRRHNIEQEIASLLLDYKRNPYDKFDSKERRIADYFSDHGLDMSRLDRLYHPSKIETYPDAKPNAEGIMQLGSPRTSAIRNPMAMRALFRLRDLINTLLREGRIDRDTKIRIEFARGLNDANRRKAIEQYQREREAENRKFAEEIRRQYTAETGREMEPSDDEVLKYRLWEEQQHICPYTGRQIRISDFIGANPGFDIEHTLPRALGGDDSQMNKTLCENRFNRETKRAKLPAELSNHAEIMERIESFGWREKVESLQKQIEAQVRRSKGAATKPEKDSAIQRRHYLQMQLDYWRGKYERFTMTEIPEGFSNRQGVDIGIIGKYARLYLKTVFDRIYTVKGSTTAAFRKMWGLQEEYIRKERVNHIHHCIDAITIACIGRREYDRWAQYAGDEERFNYGESDKPRFEKPWPTFTEDVKAVADELLVAHHTPDNMTKQTRKKLRVRGRVKLSADGKPIYQQGDTARCRLHQETFYGAIKREDEIRYVVRKSIKLLQPTDIDKIVDDAVRDRVRMAIDEVGFKTAINPDEYTIWMNREKGIPIRKVRIFTPGVTQPIALKKQRDLSDKKYKQDYHVANNGNYCMAVYEGKDKKGKLKRSFELVSNLEAAQYFKASADRETYPDMVPLADANGFPLKCILKTGTMVLFYENSPAELYECSRKELVKRLYKVTAMAAEGRVQFLFHQEARDQKTLTALYGAGTSQFCQSNPSPKLRLSVSNFNMLVEGYDFELTITGEIKFKGDRPC

SEQ ID NO: 19386 - protein, 1222 aa, unidentified
  REGION 1..1222: note = Cas Enzyme sequence
MAKVLGLDLGTNSLGWALADEYEQGYALLDKGVEIFQEGVARDKNNEKPAVQDRTDARALRRHYFRRRLRKIDLLRVLVRYDLCPPLTEEQLSTWRQKKQYPLDEEFLRWQRTDDNEDRNPYHDRYVALTERLDLENRAQRWLLGRAFYHLAQRRGFLSNRKEAGNEKEDGTVKESIKNLSAEMEAAGCRYLGEYFYGLYQHKERIRGKYTSRNEHYLTEFNAICDRQQLPDKWRRALHRAIFFQRDLKSQKGSVGRCTFEPTKSRCPVSHPRFEEFRMWSFINNIRVTGPGDLQPRPLSREEAEAIKPLFFRRSKNKVYFDFEEIARRIAGKGKYACREERIEAPYRFNFARTTTVSGCPVTASLMDIFGKEWLREIRSLYLLGDGKTEEQVLNDIWHALFSFKDEERLRDWACEKLQLSEEQAKAFAAIKLPQDYAAMSLNAINKILPYLRCGYRYDEAVFLANLRAALPKEVYADENRRHNIEQEIASLLLDYKRNPYDKFDSKERRIADYFSDHGLDMSRLDRLYHPSKIETYPDAKPNAKGIMQLGSPRTSAIRNPMAMRALFRLRDLINTLLREGRIDRDTKIRIEFARGLNDANRRKAIEQYQREREAENRKFAEEIRRQYTAETGREMEPSDDEVLKYRLWEEQQHICPYTGRQIRISDFIGANPGFDIEHTLPRALGGDDSQINKTLCENRFNRETKRAKLPAELSNHAEIMERIESFGWREKVESLQKQIEAQVRRSKGAATKPEKDSAIQRRHYLQMQLDYWRGKYERFTMTEIPEGFSNRQGVDIGIIGKYARLYLKTVFDRIYTVKGSTTAAFRKMWGLQEEYIRKERVNHIHHCIDAITIACIGRREYDRWAQYAGDEERFNYGESDKPRFEKPWPTFTEDVKAVADELLVAHHTPDNMTKQTRKKLRVRGRVKLSADGKPIYQQGDTARCRLHQETFYGAIKREDEIRYVVRKSIKLLQPTDIDKIVDDAVRDRVRMAIDEVGFKTAINPDEYTIWMNREKGIPIRKVRIFTPGVTQPIALKKQRDLSDKEYKQDYHVANNGNYCMAVYEGKDKKGKLKRSFELVSNLEAAQYFKASADRETYPDMVPLADANGFPLKCILKTGTMVLFYENSPAELYECSRKELVKRLYKVTAMAAEGRVQFLFHQEARDQKTLTALYGAGTSQFCQSNPSPKLRLSVSNFNMLVEGYDFELTVTGEIKFKGDRPC

SEQ ID NO: 19387 - protein, 1229 aa, unidentified
  REGION 1..1229: note = Cas Enzyme sequence
MATILGLDLGTNSLGWAVVEETEHGYTLKEQGVDIFQEGVAREKNNEKPAVQDRTNARALRRQYFRRRLRKIDLLRVLVRYDLCPPLSGEQLTAWRKEKRYPLDEAFLQWQRTDDNADRNPYHDRYVALSEQLDLGNRQHRYLLGRALYHLAQRRGFISNRKEAGKEQEEGTVKSSIRSLTAEMEAAGCRYLGEYFYQLYQHKEKIRGKYTSRNEHYLAEFEAICERQQLPDEWRKALHRAIFFQRDLKSQKGAVGRCTFEPRKSRCPVSHPRFEEFRMLQFINNIRITSPQDAAPRPLTQEEVDAIHPLFYRKSKPHFEFEEIARKIAGKGKYACGEERTEAPYRFNFARTTTVSGCPVTASLIAVFGSDWLREMCSLYLLGEGKSEEQVLNDAWHVLFFFKDEECLRTWALEKLQLTAEQAKAFAAIRLPQDYAALSLNAINKILPYLRLGYRYDEAVFLANLKAVLPKEAYDNEERRHEIEHDIAELLLGYKRNLYDKYDSKERRIANYFSDHGLGLSRFDRLYHPSMIETYRKAQPDAAGILQLGSPRTPAVRNPMAMRALFRLRALVNRLLRDGKIDRDTKLRIEFARELNNANLRKAIEQYQREREAENRKFAEEIRSQYAAETGRTIDPTDDEVLKYRLWEEQQHVCPYTGRQIRISDFIGADPGFDIEHTIPRARGGDDSQMNKTLCENRYNRAVKRSRLPAELSDHAEIMARIESFGWQEKVEALQKQIDAQIRKSKAAATKTEKDSAIQRRHYLKLQQDYWRGKYDRFTMTEVPEGFSNRQGVDIGIIGRYARLYLKTVFDRIYTVKGATTSDFRKIWGLQAEYEKKARVNHVHHCIDAITIACIGHREYLAWKRYAEEAERYQLGEGDRPDIEKPWPTFTEDVKAVADELLVSHHTADNMAKQTRKKLRVRGRIRLNDAGKPVYMQGDTARALLHKDTFYGAIEREGEIRYVVRKSLGQLQPGDENKIVDEVVRERVREAIAAVGFKTAMNADEYTIWMNREKGVPIRKVRIYTPSVTQPVALKKQRDLSVKEYKQDYHVVNDGNYCMAIYEGADKKGKKRRTFEIVSNLEAAQYFKASTDRNDRPDLVPVADTNGYPLKCILKTGTMVLFYENTPAELYECTRRELAKRLYKVSGMSTLTLKRSNGKVDKYGTMTLKHHQEARPAGELKAKNGEWEQNEEYRPVISLLHTQLNAYVEGYDFELTITGEIKFKHAMPC

SEQ ID NO: 19388 - protein, 1237 aa, unidentified
  REGION 1..1237: note = Cas Enzyme sequence
MEICNILFNFTRNNFFHMAKVLGLDLGTNSLGWALADEYEQGYALLDKGVEIFQEGVARDKNNEKPAVQDRTDARALRRHYFRRRLRKIDLLRVLVRYDLCPPLTEEQLSTWRQKKQYPLDEEFLRWQRTDDNEDRNPYHDRYVALTERLDLENRAQRWLLGRAFYHLAQRRGFLSNRKEAGNEKEDGTVKESIKNLSAEMEAAGCRYLGEYFYGLYQHKERIRGKYTSRNEHYLTEFNAICDRQQLPDKWRRALHRAIFFQRDLKSQRGSVGRCTFEPRKSRCPVSHPRFEEFRMWSFINNIRVTGPDDGTPRPLTPKEIETIRPLFFRKSKSYFDFEEIARRIAGKGKYACREERIEAPYRFNFARTTTVSGCPVTASLMDIFGKEWLREIRSLYLLGDGKTEEQVLNDIWHALFSFKDEERLRDWACEKLQLSEEQAKAFAAIKLPQDYAAMSLNAINKILPYLRCGYRYDEAVFLANLRAALPKEVYADENRRHNIEQEIASLLLDYKRNPYDKFDSKERRIADYFSDHGLDMSRLDRLYHPSKIETYPDAKPNAEGIMQLGSPRTSAIRNPMAMRALFRLRDLINTLLREGRIDRDTKIRIEFARGLNDANRRKAIEQYQREREAENRKFAEEIRRQYTAETGREMEPSDDEVLKYRLWEEQQHICPYTGRQIRISDFIGANPGFDIEHTLPRALGGDDSQMNKTLCENRFNRETKRAKLPAELSNHAEIMERIESFGWREKVESLQKQIEAQVRRSKGAATKPEKDSAIQRRHYLQMQLDYWRGKYERFTMTEIPEGFSNRQGVDIGIIGKYARLYLKTVFDRIYTVKGSTTAAFRKMWGLQEEYIRKERVNHIHHCIDAITIACIGRREYDRWAQYAGDEERFNYGESDKPRFEKPWPTFTEDVKAVADELLVAHHTPDNMTKQTRKKLRVRGRVKLSADGKPIYQQGDTARCRLHQETFYGAIKREDEIRYVVRKSIKLLQPTDIDKIVDDAVRDRVRMAIDEVGFKTAINPDEYTIWMNREKGIPIRKVRIFTPGVTQPIALKKQRDLSDKEYKQDYHVANNGNYCMAVYEGKDKKGKLKRSFELVSNLEAAQYFKASADRETYPDMVPLADANGFPLKCILKTGTMVLFYENSPAELYECSRKELVKRLYKVTAMAAEGRVQFLFHQEARDQKTLTALYGAGTSQFCQSNPSPKLRLSVSNFNMLVEGYDFELTVTGEIKFKGDRPC

SEQ ID NO: 19389 - protein, 1225 aa, unidentified
  REGION 1..1225: note = Cas Enzyme sequence
MATILGLDLGTNSLGWAVVEETEHGYTLKEQGVDIFQEGVAREKNNEKPAVQDRTNARALRRQYFRRRLRKIDLLRVLVRYDLCPPLSGEQLTAWRKEKRYPLDEAFLQWQRTDDNADRNPYHDRYVALSEQLDLGNRQHRYLLGRALYHLAQRRGFISNRKEAGKEQEEGTVKSSIRSLTAEMEAAGCRYLGEYFYQLYQHKEKIRGKYTSRNEHYLAEFEAICERQQLPDEWRKALHRAIFFQRDLKSQKGAVGRCTFEPRKSRCPVSHPRFEEFRMLQFINNIRITSPQDAAPRPLTQEEVDAIHPLFYRKSKPHFEFEEIARKIAEKGKYACGEERTEAPYRFNFARTTTVSGCPITASLIAVFGSDWLREMCSLYLLGEGKNEEQVLNDVWHALFFFKDEECLRTWALEKLQLTAEQAKAFAAIRLPQDYAALSLNAINKILPYLRLGYRYDEAVFLANLKAVLPKEAYDNEERRHEIEHDIAELLLGYKRDLDDKYDSKEHRIANYFSDHGLDLSRFDRLYHPSMIETYRKAQPDAAGLLQLGSPRTPAVRNPMAMRALFRLRALVNRLLRDGKIDRNTKLRIEFARELNNANLRKAIEQYQREREAENRKFAEEIRSQYAAETGRTIDPTDDEVLKYRLWEEQQHVCPYTGRQIRISDFIGADPGFDIEHTVPRARGGDDSQMNKTLCENRYNRAVKRSRLPAELSDHAEIMACIESFGWQEKVEALQKQIDAQIRKSKAAATKTEKDSAIQRRHYLKLQQDYWRGKYDRFTMTEVPEGFSNRQGVDIGIIGRYARLYLKTVFDRIYTVKGATTSDFRKIWGLQAEYEKKARVNHVHHCIDAITIACIGHREYLAWKRYAEEAERYQLGEGDRPDIEKPWPTFTEDVKAVADELLVSHHTADNMAKQTRKKLRVRGLVRLNDAGKPIYMQGDTARALLHKDTFYGAIEREGEIRYVVRKSLGQLQPGDVDKIVDDAVRERVREAIEAVGFKTAMNADEYTIWMNREKGVPIRKVRIYTPSVTQPVALKKQRDLSEKEYKQDYHVVNDGNYCMAIYEGVDKKGKKRRTFEIVSNLEAAQYFKASTDRNDRPDLVPVADTNGYPLKCILKTGTMVLFYENTPAELYECSRKELAKRLYKVTGMSTLTLQQKYRYGTITLKHHQEARPAGELKAKNGEWKQNEEYRPVISLLHTQLNAYVEGYDFELTITGEIKFKHAMPC

SEQ ID NO: 19390 - protein, 1224 aa, unidentified
  REGION 1..1224: note = Cas Enzyme sequence
MATILGLDLGTNSLGWAVVEETEHGYTLKEQGVDIFQEGVAREKNNEKPAVQDRTNARALRRQYFRRRLRKIDLLRVLVRYDLCPPLSGEQLTAWRKEKRYPLDEAFLQWQRTDDNADRNPYHDRYVALSEQLDLGNRQHRYLLGRALYHLAQRRGFISNRKEAGKEQEEGTVKSSIRSLTAEMEAAGCRYLGEYFYQLYQHKEKIRGKYTSRNEHYLAEFEAICERQQLPDEWRKALHRAIFFQRDLKSQKGAVGRCTFESRKSRCPVSHPRFEEFRMLQFINNIRITSPQDAAPRPLTQEEVDAIHPLFYRKSKPHFEFEEIARKIAGKGKYACREERIEAPYRFNFARTTTVSGCPITASLIAVFGSDWLREMCSLYLLGEGKNEEQVLNDVWHALFFFKDEECLRTWALEKLQLTAEQAKAFAAIRLPQDYAALSLNAINKILPYLRLGYRYDEAVFLANLKAVLPKEAYDNEERRHEIEHDIAELLLDYKRNPYDKYDSKERRIADYFSDHGLDLSHLNRLYHPSMIETYRKARPDAAGLLQLGSPRTPAVRNPMAMRALFRLRALVNRLLRDGKIDRNTKIRIEFARELNNANLRKAIEQYQREREAENRKFAEEIRSQYAAETGRTVDPTDDEVLKYRLWEEQKRVCPYTGRQIRISDFIGANPGFDIEHTIPRARGGDDSQMNKTLCENRYNRVVKRSRLPAELSDHAEIMACIESFGWQEKVETLQKQIDAQIRKSKAAATKAEKDSAIQRRHYLKLQQDYWRGKYERFTMTEVPEGFSNRQGVDIGIIGRYARLYLKTVFDRIYTVKGATTSDFRKIWGLQAEYEKKARVNHVHHCIDAITIACIGHREYLAWKRYAEEAERYQLGEGDRPDIEKPWPTFTEDVKAVADELLVSHHTADNMAKQTRKKLRVRGLVRLNDAGKPIYMQGDTARALLHKDTFYGAIEREGEIRYVVRKSLGQLQPGDVDKIVDDAVRERVREAIEAVGFKTAMNADEYTIWMNREKGVPIRKVRIYTPSVTQPVALKKQRDLSEKEYKQDYHVVNDGNYCMAIYEGVDKKGKKRRTFEIVSNLEAARYFKASTDRNERPDLVPVADTNGYPLKCILKTGTMVLFYENTPAELYECSRKELVKRLYKVTGMSTLTVANNSYGRMSLKHHQEARPAGELKAKNGEWKQNEEYRPVISLLHTQLNAYVEGYDFELTITGEIKFKHAMPC

SEQ ID NO: 19391 - protein, 1219 aa, unidentified
  REGION 1..1219: note = Cas Enzyme sequence
MAKILGLDLGTSSIGWAIVEQHDNGYSLLEKGVDIFQEGVARMKNNEKPAVQNRTDARALRRHYFRRRLRKIELLRVLVRHDLCPPLTDAQLDAWRSRKIYPLTEEFLRWQRTDDNTDRNPYRDRYHALTETLDLSARSDRHALGRALYHLTQRRGFLSNRKQADEEEEGKVKQSIKDLTADMAEAGCAYLGEYFYRLYQQKDKIRKHYTSRNEHYLAEFRAICEKQHLPEDLQQALHRAIFYQRPLKSQKGSVGKCTFEKGKSRCPASHPHFEEFRMLCFVNNIRVQTPADAEPRPLMQSEAEAIRPLFLRKSKPHFDFEEIARKIAGKGKYACKDDRNEAPFRFNFSAATTVSGCPVTAALLSVFDGDLGTIRRRYTLAGDKSDEQVVNDIWHVLFAFDDEELLLDWGREKLGLSPEDARSFAAIRLPQGYASLSLNAIDKMLPHLRAGYRYDEAVFLANLKAVLPPTVWNDRGRREHIEQGIAEVVRNYERNPYDKSDTKERRIAEWLRDHGIDTARCDRFYHPSMIEAYTQARPDKKGLMQLGSPRTAAVRNPMAMRTLFRLRDLLNQLLREGKIDRTTKINIEFARGLNDANRRRAIEQYQREREAENRAYAEEIRKEFAAATGSRIEPTDDDILKYRLWKEQDNICLYTGKQIGLSDFIGSDTRYDIEHTAPRSRGGDDSQMNKTLCEKQFNRDIKRTKLPTELTNHQEIMARIEALGWPEKIAGLQRQIEGQRRRSKNATTKAERDSAIQRRHYLQMHLDYWRGKYERFTMIEVPEDFSNRQGVDIGIIGRYAGLYLKTVFERIYTVKGATTSAFRKMWGLQEEYTAKERVNHVHHCIDAITIACIGRSEYERWAQFAGDEERYLRGEAARPRFEKPWPTFTRDVMAVADELLVAHHTPDNLPRQSRKKLRVRGKIQYGNDGKALYMQGDTARGPLHQQTFYGAIKCDDQIRYVVRKPLDQLQPSDIEKIVDEAVKARMREAIAAYGFKEAMDPMKHTVWMNEAKGIPIRKVRIYMPSVTSPIHLKKHRDLSVRKYKQDYHVANDSNYCMAIYEGTDAKGKTKRSFRLVNNLEAARYFKASTDRTACPDLVPLSDKNGYPLKCILKTGTMVLFYENSPEELHECTPNELVKRLYKVTGMSMLALQQKYYFGSLIFKHHQEARPAGELKIKSGMWKIGEDYRPVISILHTQFNACVEHDDFDLTVTGEIKFKR

SEQ ID NO: 19392 - protein, 1064 aa, unidentified
  REGION 1..1064: note = Cas Enzyme sequence
LGRAIYHLAQRRGFLSNRLEQGNDDETGKVKEAISSLSKSMSDEGCEYLGDFFYKLYKEKGNKVKIRTRYTDREEHYKKEFYAICSKQNIPKEQISKLEKAIYFQRPLKSQRKSVGKCTFEPKKSRISDSHPAFELFRMLSFVNSIKVKGPYDVEMRPLSTEEYEKAKSMFFRKSKSQFDFEDIAKAIAGRNKYQHIKDVGEKEYKFNYRMTQSVTGCPTIANLISIFGDDYETAIAERYILHKGKTTKQIVNDVWNVLYSFSDKEKVKLWGMDKLQMDENEAEKFSRIRLTHSFASLSLAAVNNILPWLEQGLIYPHAVLMAKVPDIVGKDIWKSRGTSIAKELLFLINNFDPKDISLTGTLDFCIKDVLKDMCELMPEAVDKLYHPSMIETYPDAKKNSQGIFQLGSPKTNSIRNPMAMRSLHQLRKVINTLLLDGTINNQTEVHIEYARELNDANKRKAISQWNKKRETLRKKYAEEIRILYKQECGKEIEPTNDDIIKYQLWEEQDHICLYTGKSIGITEFVGPNPSYDIEHTIPRSIGGDSTLENMTLCYSKFNREVKNAKLPTQLANYDDIIERLEKWRNKIETLRKDIDHVKTYSNMKKEKKDQQIQKRHFLKLELNYWIGKYKRFQMEDVPEGFARRQGVGIGLVGKYAGLYLKSLFHKTDDRNKSNVRVVKGATTAEYRKMWGIQDEYEKKSRDNHVHHCIDAITIACIEPGEYNETARYYQQLEEYERNKAPKPSFPKPWPTFTEDIKAIAHEMMVVHSTPDNMPKRARKYIKTVKGKKLAKGDSARGSLHNDSYYGAIERDGDIKYVIRKMLSKITENDIENIVDQTVKEIVKQAIAEKGFKEAMSGDIFMNKEKGIKIKKIRCFVPSVTKPLHIRTHRDLSQKEYKQQFHVTSDGNYCMAIYEGEVKGKVKRTYEIVNMIDAANYFKKSSDLTKQYPIAPENKNGFKYRCTVRTGTHIILLQSDNEEINLANKNDLTRRLYFVAVMQKDGRLVLRFNQEAREAKILKKERKSGAYKVGEQYRSEIMLSLSDFHALIEGVDFKINALGEIVML

SEQ ID NO: 19393 - protein, 1209 aa, unidentified
  REGION 1..1209: note = Cas Enzyme sequence
MKRILGVDTGTNSLGWAVVDKVDDKTYSLVRKGSLIFQEGVKVEKGIESSKAAERTSHRALRKQYFRRRLRKIEVLKTLVEFDWCPYLSPEALHLWHVKKQYPMSETFIAWQRTNDNTEDNPYYYRHLCLHEKLDMNNQANRYMLGRAMYHLAQRRGFLSNRLEQGNDDETGKVKEAISSLSQSMQEAGCEYLGDYFYRIYKEKGNTERIRTRYTDREEHYKKEFYAICECQELTEEQISKLERALYFQRPLKSQRQGVGKCTFESKKPRVSDSHPAYEMFRMLSFVNNIKVKGPQDVELRPLSAEEYEKAKPMFFRKSKPQFDFEDIAKAIAGKGKYQHIRDAGDKGYKFNYRMSQSVTGCPTIASLMSVFGDDYMTAIAERYTLSEGKTPEQMVNDVWNVLYSFKDKENVKQWGSEKLQLDDDEAEKFSKIRLTHSFASLSLAAVNKILPWLERGLIYSHAVLMAKVPDIVGRDVWENRSEEITKELLSLIYNFNPKDVSMQGTLDFCIKDVLKDMCELKPGATEVLYHPSMIDTYPDAKKNEQGVYQLGSPRTNAVRNPMAMRSLHQLRKVINALLKDGTINSDTEVHIEYARELNDANRRKAIAQWNKDRETKRKKYAEDIRTLYKEETGREIEPTEDDILKFQLWEEQGRICLYTGNQIGIAEFVGANPSYDIEHTIPRSVGGDSTLENMTLCSSKFNRDVKKAKLPTQLFNHDEIMTRLDEWREKIEKLRKDVDHVKTHSGMDKAVKDRLIQKRHLLKLELDYWVGKYKRFQMEEVPEGFARRQGAGIGLVGKYAGLYLKSLFHKTDDRSKSNVRVVKGATTAEYRKMWGIQDEYEKKSRDNHVHHCIDAITIACIDPGEYNATAKYYQQLEEYERNNANKPTFPKPWPTFTEDIKSIQQEMLVVHSTPDNMPKRARKYVRTANGKKLAQGDSARGSLHNDTYYGAIERDGEIRYVVRKELRSIKENDVENIVDETVKEKVKQAIAEKGFKKAMEEDIFMNEAKGIKIKKVRCFTPSVTNPLHIRSHRDMSLREYKRQYHVTLDGNYCMAIYEDEVKGKMKRTYEIVNMIDAANYFKDSSGLTKNYPIAPETKNGLKYRCSVRTGTQIILLQSDDEEINLNDLEDIVRRFYYVAVMRSDGRIVLRYSQDARDATSLKKGRKSGAYKVGEQYRSEIMLSLSDFHALVEGVDFKIDALGEIKKLK

SEQ ID NO: 19394 - protein, 1209 aa, unidentified
  REGION 1..1209: note = Cas Enzyme sequence
MKRILGVDTGTNSLGWAVVDKVDDKTYSLVRKGSLIFQEGVKVEKGIESSKAAERTSHRALRKQYFRRRLRKIEVLKTLVEFDWCPYLSPEALHLWHVKKQYPMSETFIAWQRTNDNTEDNPYYYRHLCLHEKLDMSNQANRYMLGRAMYHLAQRRGFLSNRLEQGNDDETGKVKEAISSLSQSMQEAGCEYLGDYFYRIYKEKGNTERIRTRYTDREEHYKKEFYAICECQELTEEQISKLERALYFQRPLKSQRQGVGKCTFESKKPRVSDSHPAYEMFRMLSFVNNIKVKGPQDVELRPLSAEEYEKAKPMFFRKSKPQFDFEDIAKAIAGKGKYQHIRDAGDKGYKFNYRMSQSVTGCPTIASLMSVFGDDYMSAIAERYTLSEGKTPEQMVNDVWNVLYSFKDKENVKQWGREKLQLDDDEAEKFSKIRLTHSFASLSLAAVNKILPWLERGLIYSHAVLMAKVPDIVGRDVWENRSEEITKELLSLIYNFNPKDISMQGTLDFCIKDVLKDMCELKPGATEVLYHPSMIDTYPDAKKNEQGVYQLGSPRTNAVRNPMAMRSLHQLRKVINALLKDGTINSDTEVHIEYARELNDANRRKAIAQWNKDRETKRKKYAEDIRTLYKEETGREIEPTEDDILKFQLWEEQGRICLYTGNQIGIAEFVGANPSYDIEHTIPRSVGGDSTLENMTLCSSKFNRDVKKAKLPTQLFNHDEIMTRLDEWREKIEKLRKDVDHVKTHSGMDKAVKDRLIQKRHLLKLELDYWVGKYKRFQMEEVPEGFARRQGAGIGLVGKYAGLYLKSLFHKTDDRSKSNVRVVKGATTAEYRKMWGIQDEYEKKSRDNHVHHCIDAITIACIDPGEYNATAKYYQQLEEYERNNANKPTFPKPWPTFTEDIKSIQQEMLVVHSTPDNMPKRARKYVRTANGKKLAQGDSARGSLHNDTYYGAIERDGEIRYVVRKELRSIKENDVENIVDETVKEKVKQAIAEKGFKKAMEEDIFMNEAKGIKIKKVRCFTPSVTNPLHIRSHRDMSLREYKRQYHVTLDGNYCMAIYEDEVKGKMKRTYEIVNMIDAANYFKDSSGLTKNYPIAPETKNGLKYRCSVRTGTQIILLQSDDEEINLNDLEDIARRFYYVAVMCSDGRIVLRYSQDARDATSLKKERKSGAYKVGEQYRSEIMLSLSNFHALVEGVDFKIDALGEIKRLK

SEQ ID NO: 19395 - protein, 1212 aa, unidentified
  REGION 1..1212: note = Cas Enzyme sequence
MKKRILGIDTGTNSLGWAVVDKNEDGSYSLIKKGSLIFQEGVKVEKGIESSKAADRTSHRALRKQYFRRRLRKIKVLKVLIEFDWCPYLSPEVLHQWHVKKTYPKDEAFMSWQRTNDNFEENPYYYRHICLHRQLDLNEKSERYVLGRAIYHLAQRRGFLSNRLDQGNEDETGKVKEAISSLSKSMSDAKCEYLGDYFYKIYKEKGNTERIRTHYTDREEHYKKEFYAICERQQLSEEQISKLEKALYFQRPLKSQRQGVGKCTFEPKKPRVADSHPAFELFRMLSFVNNIKIKGPHDVELRPLSTEEFEKAKPMFFRKTKPQFDFEDIAKAIAGKGKYQHIKEAGDKEYKFNYRMTQSVTGCPTIASLMSVFGDDYEAAIAERYTLSDGKTAKQMVNDVWNVLYSFSDKDKVKQWGIEKLQMNDEEAEKFSKIRLNHSFGSLSLAAVNKILPWLEQGLIYPHAVLMAKVPDIVGEEVWKTRGESITQELYNLITNFNPKDDAMQGTLDFCIKDVLKDMCNLSPGAAEKLYHPSMIETYPDAKKNSQGVYQLGSPRTNAVRNPMAMRSLHQLRKVINTLLREGTIDSQTEIHIEYARELNDANKRKAITQWNKDRENQRKKYAEDIRTLYKQACGKDIEPTDDDIVKFQLWEEQNHICLYTGDSIGITEFIGPNPSYDIEHTVPRSVGGDSTLENMTLCSSKFNREIKKAKLPTQLSNHDAIMDRLEDWREKIEKLRKDADHVKTHSGMDKAVKDRLIQKRHLLKLELDYWVGKYKRFQMEEVPEGFARRQGAGIGLVGKYAGLYLKSLFHKADDRSKSNVRVVKGATTAEYRKMWGIQDEYEKKSRDNHVHHCIDAITIACIEPGEYNATARYYQQLEEYERAKAVKPSFPKPWATFTEDIKAIAQEMLVVHSTPDNMPKRARKYVMTSNGNGRKLAMGDSARGSLHNDTYYGAIERDGEIKYVIRKELSSLKESDVENIVDDVVREKVKQAIAEKGFKQAMEEDIFMNEEKGVKIKKVRCYTPSVTNPLHIRTHRDESRKEYKRQFHVTLDGNYCMAIYEGEVKGKMKRTYEIVNMIDAAAYFKKSADMTNHYPIAPENKNGLKYRCTVRTGTQIILLQSDDEEINLKNKEDIARRFYYVAVMQKDGRIVLRYNQDARDATTLKKERKSGAYKVGEQYRSEIMLSLSDFHALVEGVDFKINVLGEIVMLK

SEQ ID NO: 19396 - protein, 1240 aa, unidentified
  REGION 1..1240: note = Cas Enzyme sequence
MPNFWSIFTENLQTYLMKTRILGLDTGTNSLGWAVVDRDENNQYTPICRGDLIFTEGVKQEKGIEFSLAAERTSYRASRRHYFRRRLRKVEVLKVLVKHKLCPPLSDEALNRWHTKKEYPLDEDFILWQRTSEADNKNPYHDRHICLHRKLNLKDSQTDRYTLGRALYHLTQRRGFLSNRLDQNEEAEETGKVKSAISELSKEMKEAGCEFLGDYFYLLYRTEGNRVRIRSRYTDREKHYLQEFKEICRVQELDEDLAKALEKTIFFQRPLKSQRQGVGKCTMEKGHSRCAVSHPLYEEYRLLCYLNNIRIKTPSDDRLRPLNAEEREKITPLFYQKSNFDFKKIAKKLAGKTPFGWIRDEEDWPYQFNYRMTQEAPACPTTAQLIKVFGEDWKAAMAEIYTMSTKQDGTLKTEDEICTDIWNVLYSFSSKEKLKEFGLEKLQLNEAQAEAFSAIRLTRDFASLSLKAIRKILFFLCTGEDYSKAIFLANIPTIVGEEIWNDIERRSRLLYKVDLALRPQEERDAEEHRTIAERIKAAVAAEVPDAPIDLLYHPSMIEAYPDAKRNERFDCYQLGSPKTNAVRNPMAMRSLHMVRKVINHLLRKHIIDEKTEIHIEYARELNDANKRQAIADWQRELSKRYTAYAQNIRQLYKAETGLEIEPTKTDVLKYQLWEEQQHVCLYTGKKIGIADFLGANPKFDIEHTIPRSRGGDSTQENLTLCDNKFNREIKRGKLPTELANYEEILARIDHWKKECFALKQKRDGIRTHSGMEKSQKDRKIRMRHLVGLEYGYKKGKYDRFTMEEVPEGFSRRQGAGIGLISKYAGLFLKSLFKDPKNPNRSNVYVVKGAITAEFRKLWGLQQADEAKSRENHTHHCIDAYTIACIGPCEYAALAAYYRSDEEFKYGRRREKPQFEKPWPTFTEDLLKLQEELLIVHQTTDKLGKRDRRKVKTPRGKFLTGGDSARGRLHQETYYGAINYDGNIKYVVRKPLDSLTEKDLDKIVDETVKGIVKGAVEAKGSLKEALADGMYMNKEKGILIKRVRIFTRLTQPLTLRSLRDQSQKEHKRKVYVTNESNYMMAIYERVVKGKTKREFDLVNNIEAAEFFRKGNNRAQGLPLLPEKSASDFPLKHTLKIGTLVLLYETSPSEIDFSDPKDIAKRLYKVVGLSTLHINKYIYGIISLRHHQEARPTGELKFKNGEFRNGEALRPAITMLHSQLNALVEGQDFDLDITGKITLKRP

SEQ ID NO: 19397 - protein, 1234 aa, unidentified
  REGION 1..1234: note = Cas Enzyme sequence
MPNFWSIFTENLQTYLMKTRILGLDTGTNSLGWAVVDRDENNQYTPICRGDLIFTEGVKQEKGIEFSLAAERTSYRASRRHYFRRRLRKVEVLKVLVKHKLCPPLSDEALNRWHTKKEYPLDEDFILWQRTSEADNKNPYHDRHICLHHKLNLKDSQTDRYTLGRALYHLTQRRGFLSNRLDQNEEAEETGKVKSAISELSKEMKEAGCEFLGDYFYLLYRTEGNRVRIRSRYTDREKHYLQEFKEICRVQELDEDLAKALEKTIFFQRPLKSQRQGVGKCTIEKGHSRCAVSHPLYEEYRLLCYLNNIRIKTPFDDRLRPLNAEEREKITPLFYQKSNFDFKKIAKKLAGKTPFGWIRDEEDWPYQFNYRMTQEAPACPTTAQLIKVFGEDWKTAMAETYTMSAKQDGTLKTEDEICTDIWNVLYSFSSKEKLKEFGLEKLQLNEAQAEAFSAIRLTRDFASLSLKAIRKILVFLRRGDDYSKAIFLANIPTIVGEEIWNDIERRSRLLYKVDLALRPQEERDAEEHCTIAERIKAAVAAEVPDAPIDLLYHPSMIEAYPDAKRNERFDCYQLGSPKMNAVRNPMAMRPLHMVRKVINHLLRKHIIDEKTEIHIEYARELNDANKRQAIADWQRELSKRHTAYAQNIRQLYKAETGLEIEPTKTDILKYQLWEEQQHVCLYTGKKIGIADFLGANPKFDIEHTIPRSKGGDSTQENLTLCDSKFNRDIKRDKLPTELDNYEEILARIEHWKKQCYALKLKRDGIRTHSGQEKSIKDSKIRRRHLIGLEYGYLKGKYDRFTMKEVPEGFSRRQGAGIGLISKYAGLFLKSLFKDPKNPNRSNVYVVKGAITAEFRKLWGLQQADEAKSRENHTHHCIDAYTIACIGPCEYAALAEYYRSDEEFKYGRRREKPQFEKPWPTFTEDLLKLQEELLIVHQATDKLGKRDRRKVKTPRGKFLTGGDSARGRLHQETYYGAINYDGNIKYVVRKPLDSLTEKDLDKIVDETVKGIVKGAVEAKGSLKEALADGIYMNKEKGILIRRVRIFSDVSEPINLKQLRDVSTKEYKRHIHLRKDENYLFAIYEGLDKKKNKKQTETATVDYLDAAKFYKDSKRRDKANSLVGDYSKKNKLPLKCILKKRQMVLFYEHSPEEIRFKDKKDLSKRLYIVTSIAKDGRVKFLHHQAATATGIQSSPSPFTNDGEHQPYYRLSASNIKVLVAGIDFDINILGEITPKL

SEQ ID NO: 19398 - protein, 1234 aa, unidentified
  REGION 1..1234: note = Cas Enzyme sequence
MPNFWSIFTENLQTYLMKTRILGLDTGTNSLGWAVVDRDENNQYTPICRGDLIFTEGVKQEKGIEFSLAAERTSYRASRRHYFRRRLRKVEVLKVLVKHKLCPPLSDEALNRWHTKKEYPLDEDFILWQRTSEADNKNPYHDRHICLHHKLNLKDSQTDRYTLGRALYHLTQRRGFLSNRLDQNEEAEETGKVKSAISELSKEMKEAGCEFLGDYFYLLYRTEGNRVRIRSRYTDREKHYLQEFKEICRVQELDEDLAKALEKTIFFQRPLKSQRQGVGKCTMEKGHSRCAVSHPLYEEYRLLCYLNNIRIKTPSDDRLRPLNAEEREKITPLFYQKSNFDFKKIAKKLAGKTPFGWIRDEEDWPYQFNYRMTQEAPACPTTAQLIKVFGEDWKAALAETYTMSAKQDGTLKTEDEICTDIWNVLYSFSSKEKLKEFGLKKLQLDEAQAKSFSEIRLTRDFASLSLKAIRKILFFLRTGEDYSKAIFLANIPTIVGEKIWSNIERRSRLLYKVDLALRPQEEDDAEEHRTIAERIKAAVAAEVPDAPIDLLYHPSMIEAYPDAKRNERFDCYQLGSPKTNAVRNPMAMRSLHMVRKVINHLLRKHIIDEKTEIHIEYARELNDANKRQAIADWQRELSKRHTAYAQNIRQLYKAETGLEIEPTKTDILKYQLWEEQQHVCLYTGKKIGIADFLGANPKFDIEHTIPRSKGGDSTQENLTLCDSKFNRDIKRDKLPTELDNYEEILARIEHWKKQCYALKLKRDGIRTHSGQEKSIKDSKIRRRHLIGLEYGYLKGKYDRFTMKEVPEGFSRRQGAGIGLISKYAGLFLKSLFKDPKNPNRSNVYVVKGAITAEFRKLWGLQQADEAKSRENHTHHCIDAYTIACIGPCEYAALAEYYRSDEEFKYGRRREKPQFEKPWPTFTEDLLKLQEELLIVHQATDKLGKRDRRKVKTPRGKFLTGGDSARGRLHQETYYGAINYDGNIKYVVRKPLDSLTEKDLDKIVDETVKGIVKGAVEAKGSLKEALADGIYMNKEKGILIRRVRIFSDVSEPINLKQLRDVSTKEYKRHIHLRKDENYLFAIYEGLDKKKNKKQTETATVDYLDAAKFYKDSKRRDKANSLVGDYSKKNKLPLKCILKKRQMVLFYEHSPEEIRFKDKKDLSKRLYIVTSIAKDGRVKFLHHQAATATGIQSSPSPFTNDGEHQPYYRLSASNIKVLVAGIDFDINILGEITPKL

SEQ ID NO: 19399 - protein, 1239 aa, unidentified
  REGION 1..1239: note = Cas Enzyme sequence
MPNFWSIFTENLQTHLMKTRILGLDTGTNSLGWAVVDRDENNQYTPICRGDLIFTEGVKQEKGIEFSLAAERTSYRASRRHYFRRRLRKVEVLKVLVKHKLCPPLSDEALNRWHTKKEYPLDEDFILWQRTSEADNKNPYHDRHICLHRKLNLKDSQTDRYTLGRALYHLTQRRGFLSNRLDQNEEAEETGKVKSAISELSKEMKEAGCEFLGDYFYLLYRTEGNRVRIRSRYTDREKHYLQEFKEICRVQELDEDLAKALEKTIFFQRPLKSQRQGVGKCTMEKGHSRCAVSHPLYEEYRLLCYLNNIRIKTSSDDRLRPLNAEEREKITPLFYQKSNFDFKKIAKKLAGKTPFGWIRDEEDWPYQFNYRMTQEAPACPTTAQLIKVFGEDWKAALAETYTMSAKQDGTLKTEDEICTDIWNVLYSFSSKEKLKEFGLKKLQLNEVQAKAFSEIRLTRDFASLSLKAIRKILFFLRTGEDYSKAIFLANIPTIVGEEIWNDIERRSRLLYKVDLALRPQEERDAEEHRTIAERIKAAVAAEVPDAPIDLLYHPSMIEAYPDAKRNERFDCYQLGSPKTNAVRNPMAMRSLHMVRKVINHLLRKHIIDEKTEIHIEYARELNDANKRQAIADWQRELSKRHTAYAQNIRQLYKAETGLEIEPTKADILKYQLWEEQQHVCLYTGKKIGIADFLGANPKFDIEHTIPRSRGGDSTQENLTLCESKFNRDTKRDKLPTELANYEEILARIEHWKKQCYALKLKRDGIRTHSGLEKSIKDSKIRRRHLVGLEYGYLKGKYDRFTMKEVPEGFSRRQGAGIGLISKYAGLFLKSLFKDPKNPNRSNVYVVKGAITAEFRKLWGLQQVDEEKSRENHTHHCIDAYTIACIGPCEYAALAAYYRSDEEFKYGRRREKPQFEKPWPTFTEDLLKLQEELLIVHQTTDKLGKRDRRKVKTPRGKFLTGGDSARGRLHQETYYGAINYDGNIKYVVRKPLDSLTEKDLDKIVDETVKGIVKGAVEAKGSLKEALADGIYMNKEKGILIRRVRIFTRLTQPLTLRSLRDQSQKEHKRKVYVTNESNYMMAIYEGVVKGKTKREFDLVNNIEAAKFFRKGNNRAQGLPLLPEKSASDFPLKHTLKIGTLVLLYETSPSEIDFSDPKDVAKRLYKVVGMKTLSGKNTYGIIKLRYHQEARPSGELKFLNKSFKNREPSLPAMLLLHTQFNALVEGQDFDLDITGEITLKRP

SEQ ID NO: 19400 - protein, 1223 aa, unidentified
  REGION 1..1223: note = Cas Enzyme sequence
MPNFWSIFTENLQTYLMKTRILGLDTGTNSLGWAVVDRDENNQYTPICRGDLIFTEGVKQEKGIEFSLAAERTSYRASRRHYFRRRLRKVEVLKVLVKHKLCPPLSDEALNRWHTKKEYPLDEDFILWQRTSEADNKNPYHDRHICLHHKLNLKDSQTDRYTLGRALYHLTQRRGFLSNRLDQNEEAEETGKVKSAISELSKEMKEAECEFLGDYFYLLYRTEGNRVRIRSRYTDREKHYLQEFKEICRVQELDEDLAKALEKTIFFQRPLKSQRQGVGKCTMEKGHSRCAVSHPLYEEYRMLCYLNNIRIKTPSDDRLRPLNAEEREKITPLFYQKSNFDFKKIAKKLAGKTPFGWIRDEEDWPYQFNYRMTQEAPACPTTAQLIKVFGEDWKAALAETYTMSAKQDGTLKTEDEICTDIWNVLYSFSSKEKLKEFGLKKLQLDEAQAKAFSEIRLTRDFASLSLKAIRKILFFLRTGEDYSKAIFLANIPTIVGEEIWSNIERRSRLLYKVDLALRPQEEDDAEVPDAPIDLLYHPSMIEAYLDAKRNERFDCYQLGSPKTNAVRNPMAMRSLHMVRKVINHLLRKHIIDEKTEIHIEYARELNDANKRQAIADWQRELSKRHTAYAQNIRQLYKAETGLEIEPTKTDVLKYQLWEEQQHVCLYTGKKIGIADFLGANPKFDIEHTIPRSRGGDSTQENLTLCESKFNRDIKREKLPTELANYEEILARIKHWKKQCYELKLKRDKIRTHSGLEKSIKDSKIRRRHLVGLEYGYLKGKYDRFTMKEVPEGFSRRQGAGIGLISKYAGLFLKSLFKDPKNPNRSNVYVVKGAITAEFRKLWGLQQADEAKSRENHTHHCIDAYTIACIGPCEYAALAEYYRSDEEFKYGRRREKPQFEKPWPTFTEDLLKLQEELLIVHQTTDKLGKRDRRKVKTPRGKFLTGGDSARGRLHQETYYGAINYDGNIKYVVRKPLDSLTEKDLDKIVDETVMGIVKGAVEAKGSLKEALADGIYMNKEKGILIKRVRIFTPLAEPLALRSLRDQSRKEHKRQVYVTNKGNYMMGIYEGLVKGKQKREIELVNNIEAAEFFRKRNNQSQGLPLMPEKSAKDFPLKQTLKIGTLVLLYETSPSEIDFSDPKDVAKRLYKVVGMNYHDGKGSAGLISLRYHQEARPAKELCFKKGAYKNGEVFRPAIILRHTQFNALVEGQDFDLDIAGKITLKRP

SEQ ID NO: 19401 - protein, 1239 aa, unidentified
  REGION 1..1239: note = Cas Enzyme sequence
MPNFWSIFTENLQTYLMKTRILGLDTGTNSLGWAVVDRDENNQYTPICRGDLIFTEGVKQEKGIEFSLAAERTSYRASRRHYFRRRLRKVEVLKVLVKHKLCPPLSDEALNRWHTKKEYPLDEDFILWQRTSEADNKNPYHDRHICLHRKLNLKDSQTDRYTLGRALYHLTQRRGFLSNRLDQNEEAEETGKVKSAISELCKEMKEAGCEFLGDYFYLLYRTEGNRVRIRSRFTDREKHYLQEFKEICRVQELDKDLAKALEKTIFFQRPLKSQRQGVGKCTMEKGHSRCAVSHPLYEEYRMLCYLNNIRIKTPSDDRLRPLNAEEREKITPLFYQKSNFDFKKIAKKLAGKTPFGWIRDEEDWPYQFNYRMTQEAPACPTTAQLIKVFGEDWKAALAETYTMSAKQDGTLKTEDEICTDIWNVLYSFSSKEKLKEFGLKKLQLDEAQAKAFSEIRLTRDFASLSLKAIRKILFFLRTGEDYSKAIFLANIPTIVGEEIWSNIERRSRLLYKVDLALRPQEEDEAEEHRTIAERIKAAVAAEVPDAPIDLLYHPSMIEAYPDAKRNERFDCYQLGSPKTNAVRNPMAMRSLHMVRKVINHLLRKHIIDEKTEIHIEYARELNDANKRQAIADWQRELSKRHTAYAQNIRQLYKAETGLEIEPTKTDVLKYQLWEEQQHVCLYTGKKIGIADFLGANPKFDIEHTIPRSRGGDSTQENLTLCESKFNRDIKREKLPTELANYEEILARIKHWKKQCYELKLKRDKIRTHSGLEKSIKDSKIRRRHLVGLEYGYLKGKYDRFTMKEVPEGFSRRQGAGIGLISKYAGLFLKSLFKDPKNPNRSNVYVVKGAITAEFRKLWGLQQADEAKSRENHTHHCIDAYTIACIGPCEYAALAEYYRSDEEFKYGRRREKPQFEKPWPTFTEDLLKLQEELLIVHQTTDKLGKRDRRKVKTPRGKFLTGGDSARGRLHQETYYGAINYDGNIKYVVRKPLDSLTEKDLDKIVDETVMGIVKGAVEAKGSLKEALADGIYMNKEKGILIKRVRIFTPLAEPLALRSLRDQSRKEHKRQVYVTNKGNYMMGIYEGLVKGKQKREIELVNNIEAAEFFRKRNNQSQGLPLMPEKSAKDFPLKQTLKIGTLVLLYETSPSEIDFSDPKDVAKRLYKVVGMNYHDGKGSAGLISLRYHQEARPAKELCFKKGAYKNGEVFRPAIILRHTQFNALVEGQDFDLDIAGKITLKRP

SEQ ID NO: 19402 - protein, 1048 aa, unidentified
  REGION 1..1048: note = Cas Enzyme sequence
RLEQGDDDETGKVRDAISSLTKSMSEAGCDYLGDYFYKIYKEKGNTERIRTHYTDREEHYKKEFYAICKQQNLSEEQISVLEKALYFQRPLKSQRHSVGKCTFEPKKPRVADSHPAFELFRMLSFVNKIKIKGPYDVELRPLSADEFEKARPMFYRKSKPQFDFEDIAKAIAGKGKYQYIKDEGAKEYKFNYRMTHSVTGCPTIANLMSVFGDDYSTAIAERYKLSDGKAPEQMVNDVWNVLYSFSDKNKVKQWGKEKLQLSDEEAEKFSKIKLTHSFASLSLSAVNKILPWLERGLIYSHAVLMAKVPDIVGKEVWEKRGESITKELLSFIANFNPKDDTMQGTLGFCIKDILKDLCDLDSGATEKLYHPSMIEAYPDAKKNAQGVYQLGSPKTNAVRNPMAMRSLHQLRKVINTLLRDGTIDSQTEVHIEYARELNDANKRKAIAQWNKDRETLRKKYVEDIHTLYKQECGKEIEPTDDDIVKFQLWEEQNHICLYTGESIGITEFVGPNPSYDIEHTIPRSVGGDSTLENMTLCSSKFNREVKKAKLPTQLTNHDDIMQRLEEWREKIEKLRKDVDHVKTHSGMDKAVKDRLIQKRHLLKLELEYWIGKYKRFQMEEVPEGFARWQGTGIGLVGKYAGLYLKSLFHKADDRTKSNVRVVKGATTAEYRKMWGIQDEYEKKSRDNHVHHCIDAITIACIEPGEYNATARYYQQLEEYERTKANKPTFPKPWPTFTEDIKAIAQEMLVVHSTPDNMPKRARKYVQTSKGKKLAMGDSARGSLHNDTYYGAIERDGEIKYVVRKELSSLKESDVENIVDEAVKEKIKQAIADKGFKEAMVGDIFMNEEKGIKIKKVRCFTPTVTNPLHIRTQRDLSKKEYKRQFHVTLDGNYCMAIYEGEVKGKMKRTYEIVNMIDAAAYFKKSADLTKLYPIAPESKNGLKFRCTVQTGTQIILLQSDDEEINLADKKDLSRRFYYVAVMRSDGRIVLRYNQDARDATTLKKERKSGAYKVGEQYRSEIMLSLSDFHALVEGVDFKINVLGEIVMLK

SEQ ID NO: 19403 - protein, 1137 aa, unidentified
  REGION 1..1137: note = Cas Enzyme sequence
VLVEFGWCPYLSSEALHLWHVKKIYPVDEAFMAWQRTNDNFEENPYYYRHLCLHEKLDLNEKANRYVLGRAMYHLAQRRGFLSNRLEQGDDKETGKVKEGISSLSKSMSDAGCEYLGDYFYKIYKEKGNTERIRTHYTDREGHYKKEFYAICERQSLSKEQVSKLEKALYFQRPLKSQRQGVGKCTFEPKKPRVADSHPAFELFRMLSFVNNIKIKGPHDVELRPLSQEEYEKAKPMFFRKSKPQFDFEDIAKAIAGKGKYQYIKEVGEKEYKFNYRMTQGVTGCPTIASLISVFGEDYVAAITERYTLSAGKTPEQMVNDVWNVLYSFSDKDKVKQWGREKLQMDEEDAEKFSKIKLTHSFASLSLAAVNKILPWLEQGLIYSHAVLMAKVPDIVGKEVWEARGESITKELLSLIANFNPKDIAMQGTLDFCLKDILKDMCDLASGATEKLYHPSMIETYPDATKNTQGVYQLGSPRTNAVRNPMAMRSLHQLRKVINALLREGVINSDTEIHIEYARELNDANKRKAIAQWNKDREALRKKYSEDIRTLYKQECGKNIEPTADDIIKFQLWEEQGHICLYTGDSIGITDFIGPNPSYDIEHTVPRSVGGDSTLENMTLCSSKFNREIKKTKLPTQLANHDAIMSRLEEWHEKIEKLRKDVDRAKTYSGMDKDSKDRQIQKRHLLKQELKYWTEKYKRFQMEEVPEGFARRQGAGIGLVGKYAGLYLRSLFHKADDRTKSNVRVVKGTTTAEYRKMWGIQDEDEKKSRDNHVHHCIDAITIACIEPGEYNATARYYQQLEEYERNESNKPSFPKPWPTFTEDIKAIAQEMLVVHSTPDNMPKHARKYVQTSNGKKLAMGDSARGSLHNDTYYGAIERDGEIKYVVRRPLSSFEKVSDIENIVDPAVKEIVKRAVEEKGLKQAVSEVIYMNEEKGIKINKVRCYAKTVKSPLNIRKQRDLSRKEYKHQFHVQNESNYMLSIYEGEVKGKKKRAYELVKSIEAVEFYKKSTDKVEFPSIVPQSKNNLPLKHKLKIGQHVLLYENSALEIEFSDVRDLARRLYVITGLSYLPVGKGFGTIVMRHHQEARMAKDIKTTNGSFKNTDPYRPSIIQLHTQFKALVEGEDFIITPLGEFKVIR

SEQ ID NO: 19404 - protein, 1223 aa, unidentified
  REGION 1..1223: note = Cas Enzyme sequence
MKTRILGLDTGTNSLGWAVVDRDEHNQYTPICRGDLIFTEGVKQEKGIEFSLAAERTSYRASRRHYFRRRLRKVEVLKVLVKHKLCPPLSDESLNRWHTKKEYPLDEDFILWQRTNEADNKNPYHDRHICLHRKLNLKDSQTDRYTLGRALYHLTQRRGFLSNRLDQNEEAEETGKVKSAISELSKEMKEAGCEFLGDYFYLLYRTEGNRVRIRSRYTDREKHYLQEFKEICRVQELDEDLAKALEKTIFFQRPLKSQRQGVGKCTMEKGHSRCAVSHPLYEEYRMLCYLNNIRIKTPSDDRLRPLNAEEREKITPLFYQKSNFDFKKIAKKLAGKTPFGWIRDEEDWPYQFNYRMTQEAPACPTTAQLIKVFGEDWKAALAETYTMSAKQDGTLKTEDEICTDIWNVLYSFSSKEKLKEFGLEKLQLNEAQAEAFSAIRLTRDFASLSLKAIRKILFFLRTGEDYSKAIFLANIPTIVGEEIWNDIERRSRLLYKVDLALRPQEERDAEEHRTIAERIKAAVAAEVPDAPIDLLYHPSMIEAYPDAKRNERFDCYQLGSPKTNAVRNPMAMRSLHMVRKVINHLLHKHIIDEKTEIHIEYARELNDANKRQAIADWQRELSKRHTAYAQNIRQLYKAETGLEIEPTKADILKYQLWEEQQHVCLYTGKKIGIADFLGANPKFDIEHTIPRSRGGDSTQENLTLCESKFNRDTKRDKLPTELANYEEILARIEHWKKRRYELKLKRDKIRTHSGLEKSIKDSKIRRRHLVGLEYGYLKGKYDRFTMKEVPEGFSRRQGAGIGLISKYAGLFLKSLFKDPKNPNRSNVYVVKGAITAEFRKLWGLQQVDEAKSRENHTHHCIDAYTIACIGPCEYAALAAYYRSDEEFKYGRRREKPQFEKPWPTFTEDLLKLQEELLIVHQTTDKLGKRDRRKVKTPRGKFLTGGDSARGRLHQETYYGAINYDGNIKYVVRKPLDSLTEKDLDKIVDETVKGIVKGAVEAKGSLKEALADGIYMNKEKGILIRRVRIFTPLAEPLALRSLRDQSQKEHKRQVYVTNKGNYMMGIYEGLVKGKQKREIELVNNIEAAEFFRKRNNRAQGLPLLPEKSASDFPLKHTLKIGTLVLLYETSPSEIDFSDPKDVAKRLYKVVGMNYHDGKGSAGLISLRYHQEARPAKELCFKKGAYKNGEVFRPAIILRHTQFNALVEGQDFDLDIAGKITLKRP

SEQ ID NO: 19405 - protein, 1225 aa, unidentified
  REGION 1..1225: note = Cas Enzyme sequence
MKTKILGLDTGTNSLAWAVVERDENGKYSLLKYGDTIFTEGVKIEKGIESSKAAERTGHKALRVHYYRRRLRKIETLKALVQLNLCPYLSGEQLAEWKRKKTYPLMSDFMLWQRSGSALEDNPYFCRHICLTQKLDLADQGQRFLLGRAMYHLAQRRGFLSNRLDTSADSEDSGKVKSGIAQLSVEMEKAGCHYLGEYFYQLYKQHGNTVRLRSRYTDREEHYQKEFFAICEKQELDAQWVETLQRALYFQRPLKSQRKGVGMCTFEPKKHRCAESHPDYEAFRMLCFINNVKIRTPKDVSLRPLNAEERETIWPLFFRKSKPNFDFEDIAKTLAGKNNYAWFDESCEKPYRFNYRMHQGVSGCPVTAQLIDIFGSDWKAGIAETYTAVGKKNGTKTIDEMADDAWNVLHSFSSKDKLKAFATEKLQLDEACATKFANAKLPHGFAALSLKAIRNILPFLRQGFIYAHAVLLAKIPDIVSNAVWDDAHKREQILSGLLEIIENYNPKDCGVEGTIDFCIKSHLQDVIDLRPGAADALYHPSMIETYPDAKPNAEGKLQLGSPRTNSIRNPMAMRSLHVLRSVVNQLLRDGIIDRNTEVHVEYARELNDANKRKAIADYQKDIERKRADYRKRIIELYKDECHKEIEPTDTDILKFQLWEEQNHKCLYTDSEIGICDFLGDNPKFDIEHTIPRSVGGDSTQMNLTLCDAKFNRQEKGAKLPVQLSNHDDILVRISPWNDKCDELRKQIDRIRTFSGMEKGMKDRLIQKRHRLKMELDYWQGKYNRFTMTEVPEGFSRRQGAGIGLISKYAGLFLKSLFHNEQNPNKSNVYVVKGITTAEFRRMWGLQGEYEKKSRVNHCHHCIDAITIACIGKGEYDRMAQYYHIEELYNWHGSTSKPHFDKPWPKFAEDVLDIEHSLLVKHLTNDNMPKQAKKHVRTAKGKYLAQGDTARGSLHKDTYYGAIEQEGEIRYVLRKSLSDFDSESELENIVDQAVKEKIKVAVAGKNFKAAIAEPIFMNKEKGIRINKVRCYADSVKNPLHIRQQRDLSDKEYKQQFHVVNDSNYMLAIYEGEVKGKVKRDFVLVNNITAASFFKRSNRRKNAETLVPKTSPKGNLPLLVILKIGMQVLLYEKSSEEIKFDKPHDLVKRLYKVVGLSIDGSCIMIDLRYNQEARQAKDVKPKKGAYMENEQFRPCIRLRHTQFKALVEGIDFEFNILGEIKKKDNHA

SEQ ID NO: 19406 - protein, 1214 aa, unidentified
  REGION 1..1214: note = Cas Enzyme sequence
LGIDTGTNSLGWAVVDYDERAQGDKYHLIDKGVNIFSEGVKIEEDRESSRAAERTEHRRHRLNYYRRKIRKIALLKLLSENGLCPPLGSEELKAWRLKKVYPCSKEFMEWQRTDDKENKNPYYYRNLCLTETLDLNNRSNRYIVGRALYHLNQRRGFLSNRKEETKESDGAVNKGINALTEKMQKSGCQYLGEYFYLRYKNGEKIRKEYTDRLGHYREELLAICKKQGLGESLTERLLKVIILQRPLKSQKHSVGKCVFEPQKPRCPISHPLFEQYRMYSFINGIRLQGPDDAEMRPLTSEEKKAIVPLFLRKSKKDFQFKEIASKLSGTKNNFCYYKDKSDKDYKFNYHEDNNVSSCPVTAQLSAVFETGKDVDEWLGAACEVYTQGEGKTRLQIMNDIWHALFFFSDSDKLKEFAYTKLQLDGEHAEAFSKIKVPSDYASLSLKAVRKILPYMKHYGMKYSHAVFLANIPAVTGRSVGEDAMLPKEDVEDLMRRIAEYNPEITGIRTLEEYLKGYITWKYKIPDGGEKVLDKLYHPSMIETFPEVLRPTEEGYFQLSSPRTSSLRNPMAMHSLFRLRHVVNTLLKEGKIDKDTTIRIEFARELNDANKRAALRAWQRERENENKEYAKKIKEHFGENYEPTDEDILRYRLWEEQDHICLYTGEKIALSDLFDGNKYDIEHTVPRSKGGDSTEMNLTICQSRFNREIKRAIFPIKDLPSYELIMERIERWKKEYEDIAKQIRKLNTRGLSDKDAKDRIIQKRHLLKLKYDYWWGKYTRFTMESVPEGFSRSQGVGIGVISKYARLFLKTVFPKVYVVKGLATSDFRKIWGLQEEYDKKQRANHCHHAIDAITIACIGKAEYDYLAQYYGNEEKRRWGLDSRRAFFPKPWATFTEDVKNIGDSLLISHYKADNIAKHTRKKVRKAGKFTGEYMQGDTARGVLHLDTYYGAIKRDDCVRYVVRRPLDSLGEKAVESIVDDAVREKVKAAVSEHGSLKEAVKAGIWMNRDKNVKINKVRVYANDVKHPLTIRKGKQRDLSKKEYKQGTFVKNDTVYSVAIYEGLGENGKISRKAIFHNTLDVAALLKQSGENHGQPIIPKYYPESDLELKHVLKIGTLVLMYENSEEEVYEDDRQGLRKRLYKVYGLASTNDKIKLIHHQEARRSKDLDKLTYYGAYRNEGIIAPRIWVSTKMFRALVQGWDFEINDIGEIKFLRR

SEQ ID NO: 19407 - protein, 1204 aa, unidentified
  REGION 1..1204: note = Cas Enzyme sequence
MNKILGIDTGTNSLGWAIVEKKGNGGYTLLEHGVNVFQEGVKIEKGNESSKASERTEHRSVRKHYWRRKVRKVRLLTILAAENLCPPVSKEELRLWRTRKVYPQNESFLDWQRTNEQENVNPYYFRYLCLTKKLDLTLLPNRYILGRALYHLNQRRGFLSNRKEETKESDGAVKQGISQLSEDMEKAGCSYIGEYFYQLYQKGERIRAHYTDRKEHYLNEFHAICEKQELDVALVEKLEKAIFTQRPLKSQKQQVGKCTFEPKKARCSASHPLFEEFRMYQFLNSIKMKSPADADLRPLTQEEKQQVVPLFMRYNKSDRTFNFEDIAKKLTGKNKYAYAGKPAGKPYLFNYQMDTKVSRCPVTAQLRNIFGDDWVTGAHEVYTLAEGKSRLEVMNDIWHVLFFYSDTEKLQEFAEKRLQLSTDEAEAFSKIQLPGEYAALSLHAIKKILPYMRDYNLIYSKAVFLANLCEVLPSYIWNTLESRETVIESIIELMDDDELYAGIPVEQRVKEFLQNRYQVSEENLKKLYHPSMIESYPRQRSNDQGIYQLGSPRINSVRNPMAMHSLFRLRKVVNTLLAEGKIDEDTTIHIEFARELNDANRRKAIQTVQRNNEKERDAVRKKIQEFYDERNIKAIPSEMEILRYQLWEEQNHVCLYTGDKIGCADFLGSNPKYDIEHTVPRSAGGDSTKMNLTLCQNKFNRETKKNMLPAQLANHEDILQRIETWKEKYEELEKQIRKLKGSSASTKDLKDLIIQKRHRLMLERDYWKGKYNRFIMTEVPEGFSRRQGTDISVISRYARLYLRSVFRKVYIVKGIATSDFRKIWGIQEEFEKKERVNHCHHCIDAITIACIGLDEYDKLAQYYHELEDFEKYGTKKPQFAKPWENFVADIKHIQDDLLVAHYTQDNLPKSARRRIVTPEGKVLSKGDVARGSLHLDTYYGAIERDGEIKYVVRKSLATLDEKDVKNIVDDEVRARVEEAIATYQGLKKAVEADGIWMNREKGVRISKVRVYTGSVKHPINIRRQRDLSVHEYKQQYHVQNNRNYLMAIYTGKTDKGKEKREFTIVSNIAAGNYYRRSRQYTESEKQLVPEINAKGYKLEYLLKIGGMVLLYQNSPEEVWNADSKEIQRRLYKVTGMSTSENSGRIFLTHHQEARPSEEVDVKIGAYVENEELRHSIRLNHTQIKALVEGKDFRMNEIGEITRLT

SEQ ID NO: 19408 - protein, 1235 aa, unidentified
  REGION 1..1235: note = Cas Enzyme sequence
LLLTNIFSNFTEINLFIMNKRILGLDTGTNSLGWAVVDWDEHAQNYELIKYGDVIFQEGVKIEKGIESSKAAERSGYKAIRKQYFRRRLRKIQVLKVLVKYHLCPYLSDDDLRQWHLQKQYPKSDELMLWQRTSDEEGKNPYYDRHRCLHEKLDLTVEADRYTLGRALYHLTQRRGFLSSRLDTSADNKENGVVKSGISQLSTEMEEAGCEYLGDYFYKLYDEQGNKVRIRQRYTDRNKHYQHEFDAICEKQELSSELIEDLQRAIFFQLPLKSQRHGVGRCTFERGKPRCADSHPDYEEFRMLCFVNNIQVKGPHDLELRPLTYEEREKIEPLFFRKSKPNFDFEDIAKALAGKKNYAWIHDKEERAYKFNYRMTQGVPGCPTIAQLKSIFGDDWKTGIAETYTLIQKKNGSKSLQEMVDDVWNVLYSFSSVEKLKEFAHHKLQLDEESAEKFAKIKLSHSFAALSLKAIRKFLPFLRKGMYYTHASFFANIPTIVGKEIWNNEQNRKYIMENVGELVFNYQPKHREVQGTIEMLIKDFLANNFELPAGATDKLYHPSMIETYPNAQRNEFGILQLGSPRTNAIRNPMAMRSLHILRRVVNQLLKESIIDENTEVHVEYARELNDANKRRAIADWQKEQDKQHKKYGDEIRKLYKEETGKEIEPTQTDVLKFQLWEEQNRHCLYTGEQIGITDFIGSNPKFDIEHTIPQSVGGDSTQMNLTLCDNRFNREIKKAKLPTELANHEEILARIEPWKNKYEQLVKERDKQRTFAGMDKAVKDIRIQKRHKLQMEIDYWRGKYERFTMTEVPEGFSRRQGTGIGLVSRYAGLYLKSLFHQADSRNKSNVYVVKGVATAEFRKMWGLQSEYEKKCRDNHSHHCMDAITIACIGKREYDLTAEYYRMEETFKQGRGSKPKFSKPWATFTEDVLNIYKNLLVVHDTPNNMPKHTKKYVQTSKGKVLAQGDTARGSLHLDTYYGAIERDGEIRYVVRRPLSSFTKPEELENIVDETVKRTIKEAIADKKFKQAIAEPIYMNEDKGILIKKVRCFAKSVKQPINIRQHRDLSKKEYKQQYHVVNENNYMLAIYEGLVKNKVVREFEIVSYIEAAKYYKRSQDRNIFSSIVPTHSAKYGLPLKTKLLMGQLVLMFEENPDEIQVDNTKDLVKRLYKVVGIEKDGRIKFKYHQEARKEGLTIFSTPYKNNDDYAPIFRQSINNINILVDGIDFTIDILGKVTLKE

SEQ ID NO: 19409 - protein, 1219 aa, unidentified
  REGION 1..1219: note = Cas Enzyme sequence
MNKRILGLDTGTNSLGWAVVDWDEHAQSYELIKYGDVIFQEGVKIEKGIESSKAAERSGYKAIRKQYFRRRLRKIQVLKVLVKYHLCPYLSDDDLRQWHLQKQYPKSDELMLWQRTSDEDGKNPYYDRHRCLHEKLDLTVEADRYTLGRALYHLTQRRGFLSNRLDTSADNKEDGVVKSGISQLSTEMEEAGCEYLGDYFYKLYHEESNKVRIRQRYTDRNKHYQHEFDAICEKQELSSELIEDLQRAIFFQLPLKSQRHGVGRCTFERGKPRCADSHPDYEEFRMLCFINNIQVKGPHDLELRPLTYEEREKIEPLFFRKSKPNFDFEDIAKALAGKKNYAWIHDKEERAYKFNYRMTQGVPGCPTIAQLKSIFGDDWKTGIAETYTLIQKKNGSKSLQEMVDDVWNVLYSFSSVEKLKEFAHHKLQLDEESAEKFAKIKLSRSFAALSLKAIRKFLPFLRKGMYYTHASFFANIPTIVGKEIWNNEQNRKYIMENVGELVFNYQPKHREVQGTIEMLIKDFLANNFELPAGATDKQYHPSMIETYPNAQRNEFGILQLGSPRTNAIRNPMAMRSLHILRRVVNQLLKESIIDENTEVHVEYARELNDANKRRAIADRQKEQDKQHKKYGDEIRKLYKEETGKDIEPTQTDVLKFQLWEEQNHHCLYTGEQIDNITDFIGSNPKFDIEHTIPQSVGGDSTQMNLTLCDNRFNREIKKAKLPTELSNHEEILTRIEPWKNKYEQLVKERDKQRTFAGMDKAVKDIRIQKRHKLQMEIDYWRGKYERFTMTEVPEGFSRRQGTGIGLISRYAGLYLKSLFHQADSRNKSNVYVVKGVATAEFRKMWGLQSEYEKKCRDNHSHHCMDAITIACIGKREYDLMAEYYRMEETFKQGRGSKPKFSKPWSTFTEDVLNIYKNLLVVHDTPNNMPKHTKKYVQTSKGKVLAQGDTARGSLHLGTYYGAIERDGEIKYVVRRPLSSFTKREELENIVDETVKRTIKEAIADKNFKQAIAEPIYMNEEKGILIKKVRCFAKSVKQPINIRQHRDLSKKEYKQQYHVMNENNYLLAIYEGLVKNKVVREFEIVSYIEAAKYYKRSQDRNIFSSIVPTHSTKYGLPLKTKLLMGQMVLMFEENPDEIQVDNTKDLVKRLYKVVGIEKDGRIRFKYHQEARKEGLPIYSTPYKNNDDYTPIFRQRIKNINILVDGIDFTIDILGKVTLKE

SEQ ID NO: 19410 - protein, 965 aa, unidentified
  REGION 1..965: note = Cas Enzyme sequence
KGVGKCTFEPKKPRCAESHPDYEAFRMLCFLNNVKIQTPSDTSLRPLNEDEREKIWPIFFRKSKPNFDFEDIAKALAGKNNYAWYKDAGEKPFKFNYRMQQGVSGCPVTAQLIDIFGSDWQTAIAETYTAVEKKNGTKTIDEMADDVWNVLYSFSSKDKLKAFATEKLQLDEASATKFANAKLPHGFASLSLKAIRNILPFLRQGFIYAHAVHLAKIPDIVTKAVWNDADKREMILSGLMEIIENYNPKDRGVEGTIDFCIKSHLQDVIDLRPGAADALYHPSMIETYPDAKLNKMGVFQLGSPRTNAIRNPMAMRSLHILRSVVNQLLRDGIIDRNTEVHVEYARELNDANKRKAIADYQREQEKKRKQYRDDIIALYKSECHKEIEPTDTDILKFQLWEEQDHLCLYTGTQIGICDFLGDNPRFDIEHTVPRSVGGDSTQMNLTLCDATFNRQVKGAQLPTQLSNHADILVRIDHWKSKCEDLRKQLDKIRTYGGMEKNMKDRLIQKRHRLKMDLDYWQGKYSRFTMTEVPEGFSRRQGAGIGLVSKYAGLFLKSLFHNEQNPNKSNVYVVKGVTTAEFRRMWGLQGEYEKKSRLNHCHHCIDAITIACIGKAEYDKMAQYYHDEELFQWRGTTTKPHFNKPWPTFTEDVLAIEQSLLVKHLTKDNMPKQAKKRVRTATGKYLAQGDTARGSLHKDTYYGAIEQDGEIRYVLRKPLNRFENEAELEKIVDQTVKEKIKEAIAGKNFKTTITEPIFMNKEKGIRINKVRCYVKPSARLKVRQQRDLSSKEYKQYFYVENDINYMVAIYEGELNGKKEREFCVVNNLTAASYFKKSSHEKADSLVPERSPKNDLPLLYVLKRGVQVLLYENSPKEIQFDDPQNLVYRLYEIVGIGLDGNALMIDLRFHQEARRSSDLDRKKGAYKENETLRPCIRLRHTQFKALVDGVDFEFNILGEIKKKERHA

SEQ ID NO: 19411 - protein, 1223 aa, unidentified
  REGION 1..1223: note = Cas Enzyme sequence
MITRILGLDTGTNSLAWAVVDRDANGNYTLVKRGDVIFTEGVKIEKGIESSKAAERTGHKALRVHYSRRRLHKIDTLKVLVELDLCPYLSDEQLSQWKAKKTYPLTDDFMLWQRSGSAEENNPYYCRHRCLTQKLDLTDQSQRFLLGRAFYHLAQRRGFLSNRLDTSADSDESGKVKSGIAELSVEMEKAGCEFLGEYFYQLYKQHGNTIKLRSRYTDREEHYKKEFLAICEKQELDPKWVEALQRAIYFQRPLKSQRKGVGKCTFEPKKPRCAESHPDYEAFRMLCFLNNVKIQTPNDTSLRPLNEDEREKIWPLFFRKSKPNFDFEDIAKALAGKNNYAWYKDAGEKPFKFNYRMQQGVSGCPVTAQLIDIFGSDWQTAIAETYTAVEKKNGTKTIDEMADDVWNVLYSFSSKDKLKAFATEKLQLDEASATKFANAKLPHGFASLSLKAIRNILPFLRQGFIYAHAVHLAKIPDIVTKAVWNDADKREMILSGLMEIIENYNPKDRGVEGTIDFCIKSHLQDVIDLRPGAADALYHPSMIETYPDAKLNKMGVFQLGSPRTNAIRNPMAMRSLHILRSVVNQLLRDGVIDRNTEVHVEYARELNDANKRKAIADYQREQEKKRKQYRDDIIALYKSECHKEIEPTDTDILKFQLWEEQDHLCLYTGTQIGICDFLGDNPRFDIEHTVPRSVGGDSTQMNLTLCDATFNRQVKGAQLPTQLSNHADILVRIDHWKSKCEDLRKQLDKIRTYGGMEKAMKDRLIQKRHRLKMDLDYWQGKYSRFMMTEVPEGFSRRQGAGIGLVSKYAGVFLKSLFHNEQNPNKSNVYVVKGVTTAEFRRMWGLQGEYEKKSRLNHCHHCIDAITIACIGKAEYDKMAQYYHDEELFQWRGTTTKPHFNKPWPTFTEDVLAIEQSLLVKHLTKDNMPKQAKKRVRTATGKYLAQGDTARGSLHKDTYYGAIEQDGEIRYVLRKPLNKFENEAELEKIVDQAVKEKIKEAIAGKNFKTAIAEPIFMNKEKGIRINKVRCYVKPSARLKVRQQRDLSSKEYKQYFYVENDINYMVAIYEGELNGKKEREFCVVNNLTAASYFKKSSHEKADSLVPERSPKNDLPLLYVLKRGVQVLLYENSPKEIQFDDPQDLVYRLYEIVGIGLDGNALMIDLRFHQEARRSSDLDRKKGAYKENETLRPCIRLRHTQFKALVDGVDFEFNILGEIKKKERHA

SEQ ID NO: 19412 - protein, 1223 aa, unidentified
  REGION 1..1223: note = Cas Enzyme sequence
MITRILGLDTGTNSLAWAVVDKDANGNYTLVKRGDVIFTEGVKIEKGIESSKAAERTAHKALRVHYSRRRLHKIDTLKVLVELDLCPYLSDEQLCQWKAKKTYPLTDDFMLWQRSGSAEENNPYYCRHRCLTQKLDLTDQSQRFLLGRAFYHLAQRRGFLSNRLDTSADSDESGKVKSGIAELSVEMEKAGCEFLGEYFYQLYRQHGNTIKLRSRYTDREEHYKKEFLAICEKQELDPKWVEALQRAIYFQRPLKSQRKGVGKCTFEPKKPRCAESHPDYEAFRMLCFLNNVKIQTPNDTSLRPLNEDEREKIWPIFFRKSKPNFDFEDIAKALAGKNNYAWYKDAGEKPFKFNYRMQQGVSGCPVTAQLIDIFGSDWQTAIAETYTAVEKKNGTKTIDEMADDVWNVLYSFSSKDKLKAFATEKLQLDEASATKFANAKLPHGFASLSLKAIRNILPFLRQGFIYAHAVHLAKIPDIVTKAVWNDADKREMILSGLMEIIENYNPKDRGVEGTIDFCIKSHLQDVIDLRPGAADALYHPSMIETYPDAKLNKMGVFQLGSPRTNAIRNPMAMRSLHILRSVVNQLLRDGIIDRNTEVHVEYARELNDANKRKAIADYQREQEKKRKQYRDDIIALYKSECHKEIEPTDTDILKFQLWEEQDHLCLYTGTQIGICDFLGDNPKFDIEHTVPRSVGGDSTQMNLTLCDATFNRQVKGAQLPTQLSNHADILVRIDHWKSKCEDLRKQLDKIRTYGGMEKNMKDRLIQKRHRLKMDLDYWQGKYSRFTMTEVPEGFSRRQGAGIGLVSKYAGLFLKSLFHNEQNPNKSNVYVVKGVTTAEFRRMWGLQGEYEKKSRLNHCHHCIDAITIACIGKAEYDKMAQYYHDEELFQWRGTTTKPHFNKPWPTFTEDVLAIEQSLLVKHLTKDNMPKQAKKRVRTATGKYLAQGDTARGSLHKDTYYGAIEQDGEIHYVLRKPLNKFENEAELEKIVDQAVKEKIKEAIAGKNFKTAITEPIFMNKEKGIRINKVRCYADSVKKPLHIRQQRDLSAKEYKHQFHVVNDNNYLLALYGKVSEAQREFVFVNNITAASFFKQSYRKKNGEMLVPITSPKDNLPLLVMLKIGIQVLLYEKSPKEIKFDNPHELVKRLYKIIGLGVDGSAIMIDLKHHQEARQAKDIKPKKGAYTENETLRPCIRLRHTQFKALVEGVDFEFNVLGEIKKKERHA

SEQ ID NO: 19413 - protein, 952 aa, unidentified
  REGION 1..952: note = Cas Enzyme sequence
RCAESHPDYEAFRMLCFLNNVKIQTPSDTSLRPLNEDEREKIWPIFFRKSKPNFDFEDIAKALAGKNNYAWYKDAGEKPFKFNYRMQQGVSGCPVTAQLIDIFGSDWQTAIAETYTAVEKKNGTKTIDEMADDVWNVLYSFSSKDKLKAFATEKLQLDEASATKFANAKLPHGFASLSLKAIRNILPFLRQGFIYTHAVHLAKIPDIVTKAVWNDADKREMILSGLMEIIENYNPKDRGVEGTIDFCIKSHLQDVIDLRPGAADALYHPSMIETYPDAKLNKMGVFQLGSPRTNAIRNPMAMRSLHILRSVVNQLLRDGIIDRNTEVHVEYARELNDANKRKAIADYQREQEKKRKQYRDDIIALYKSECHKEIEPTDTDILKFQLWEEQDHLCLYTGTQIGICDFLGDNPRFDIEHTVPRSVGGDSTQMNLTLCDATFNRQVKGAQLPTQLSNHADILVRIDHWKSKCEDLRKQLDKIRTYGGMEKAMKDRLIQKRHRLKMDLDYWQGKYSRFTMTEVPEGFSRRQGAGIGLVSKYAGLFLKSLFHNEQNPNKSNVYVVKGVTTAEFRRMWGLQGEYEKKSRLNHCHHCIDAITIACIGKAEYDKMAQYYHDEELFQWRGTTTKPHFNKPWPTFTEDVLAIEQSLLVKHLTKDNMPKQAKKRVRTATGKHLAQGDTARGSLHKDTYYGAIEQDGEIRYVLRKPLNRFENEAELEKIVDQTVKEKIKEAIAGKNFKTAITEPIFMNKEKGIRINKVRCYVKPSARLKVRQQRDLSSKEYKQYFYVENDINYMVAIYEGELNGKKEREFCVVNNLTAASYFKKSSHEKADSLVPERSPKNDLPLLYVLKRGVQVLLYENSPKEIQFDDPQDLVYRLYEIVGIGLDGNALMIDLRFHQEARRSSDLDRKKGAYKENETLRPCIRLRHTQFKALVDGVDFEFNILGEIKKKERHA

SEQ ID NO: 19414 - protein, 1223 aa, unidentified
  REGION 1..1223: note = Cas Enzyme sequence
MITRILGLDTGTNSLAWAVVDRDANGNYTLVKRGDVIFTEGVKIEKGIESSKAAERTGHKALRVHYSRRRLHKIDTLKVLVELDLCPYLSNEQLNQWKAKKTYPLTDDFMLWQRSGSAEENNPYYCRHRCLTQKLDLTDQSQRFLLGRAFYHLAQRRGFLSNRLDTSADSDESGKVKSGIAELSVEMEKAGCEFLGEYFYQLYRQHGNTIKLRSRYTDREEHYKKEFLAICEKQELDPKWVEALQRAIYFQRPLKSQRKGVGKCTFEPKKPRCAESHPDYEAFRMLCFLNNVKIQTPSDTSLRPLNEDEREKIWPLFFRKSKPNFDFEDIAKALAGKNNYAWYKDAGEKPFKFNYRMQQGVSGCPVTAQLIDIFGSDWQTAIAETYTAVEKKNGTKTIDEMADDVWNVLYSFSSKDKLKAFATEKLQLDEASATKFANAKLPHGFASLSLKAIRNILPFLRQGFIYAHAVHLAKIPDIVTKAVWNDADKREMILSGLMEIIENYNPKDRGVEGTIDFCIKSHLQDVIDLRPGAADALYHPSMIETYPDAKLNKMGVFQLGSPRTNAIRNPMAMRSLHILRSVVNQLLRDGIIDRNTEVHVEYARELNDANKRKAIADYQREQEKKRKQYRDDIIALYKSECHKEIEPTDTDILKFQLWEEQDHLCLYTGTQIGICDFLGDNPRFDIEHTVPRSVGGDSTQMNLTLCDATFNRQVKGAQLPTQLSNHTDILVRIDHWKSKCEDLRKQLDKIRTYSGMEKNMKDRLIQKRHRLKMDLDYWQGKYSRFTMTEVPEGFSRRQGAGIGLVSKYAGLFLKSLFHNEQNPNKSNVYVVKGVTTAEFRRMWGLQGEYEKKSRLNHCHHCIDAITIACIGKAEYDKMAQYYHDEELFQWRGTTTKPHFNKPWPTFTEDVLAIEQSLLVKHLTKDNMPKQAKKRVRTATGKHLAQGDTARGSLHKDTYYGAIEQDGEIRYVLRKPLNRFENEAELEKIVDQAVKEKIKEAIAGKNFKTAITEPIFMNKEKGIRINKVRCYVKPSARLKVRQQRDLSSKEYKQYFYVENDINYMVAIYEGELNGKKEREFCVVNNLTAASYFKKSSHEKADSLVPERSPKNDLPLLYVLKRGVQVLLYENSPKEIQFDDPQDLVYRLYEIVGIGLDGNALMIDLRFHQEARRSSDLDRKKGAYKENETLRPCIRLRHTQFKALVDGVDFEFNILGEIKKKERHA

SEQ ID NO: 19415 - protein, 1223 aa, unidentified
  REGION 1..1223: note = Cas Enzyme sequence
MITRILGLDTGTNSLAWAVVDRDANGNYTLVKRGDVIFTEGVKIEKGIESSKAAERTAHKALRVHYSRRRLHKIDTLKVLVELDLCPYLSDEQLNQWKAKKTYPLTDDFMLWQRSGSAEENNPYYCRHRCLTQKLDLTDQSQRFLLGRAFYHLAQRRGFLSNRLDTSADSDESGKVKSGIAELSVEMEKAGCEFLGEYFYQLYRQHGNTIKLRSRYTDREEHYKKEFLAICEKQELDPKWVEALQRAIYFQRPLKSQRKGVGKCTFEPKKPRCAESHPDYEAFRMLCFLNNVKIQTPSDTSLRPLNEDEREKIWPLFFRKSKPNFDFEDIAKALAGKNNYAWYKDAGEKPFKFNYRMQQGVSGCPVTAQLIDIFGSDWQTAIAETYTAVEKKNGTKTIDEMADDVWNVLYSFSSKDKLKAFATEKLQLDEACATKFANAKLPHGFASLSLKAIRNILPFLRQGFIYAHAVHLAKIPDIVTKAVWNDADKREMILSGLMEIIENYNPKDRGVEGTIDFCIKSHLQDVIDLRPGAADALYHPSMIETYPDAKLNKMGVFQLGSPRTNAIRNPMAMRSLHILRSVVNQLLRDGVIDRNTEVHVEYARELNDANKRKAIADYQREQEKKRKQYRDDIIALYKSECHKEIEPTDTDILKFQLWEEQDHLCLYTGTQIGICDFLGDNPKFDIEHTVPRSVGGDSTQMNLTLCDATFNRQVKGAQLPTQLSNHADILVRIDHWKSKCEDLRKQLDKIRTYGGMEKNMKDRLIQKRHRLKMDLDYWQGKYSRFTMTEVPEGFSRRQGAGIGLVSKYAGLFLKSLFHNEQNPNKSNVYVVKGVTTAEFRRMWGLQGEYEKKSRLNHCHHCIDAITIACIGKAEYDKMAQYYHDEELFQWRGTTTKPHFNKPWPTFTEDVLAIEQSLLVKHLTKDNMPKQAKKRVRTATGKYLAQGDTARGSLHKDTYYGAIEQDGEIRYVLRKPLNKFENEAELEKIVDQAVKEKIKEAIAGKNFKTAITEPIFMNKEKGIRINKVRCYVKPSARLKVRQQRDLSSKEYKQYFYVENDINYMVAIYEGELNGKKEREFCVVNNLTAASYFKKSSHEKADSLVPERSPKNDLPLLYVLKRGVQVLLYENSPKEIQFDDPQDLVYRLYEIVGIGLDGNALMIDLRFHQEARRSSDLDRKKGAYKENETLRPCIRLRHTQFKALVDGVDFEFNILGEIKKKERHA

SEQ ID NO: 19416 - protein, 1213 aa, unidentified
  REGION 1..1213: note = Cas Enzyme sequence
MEKRLGIDVGTNSLGWAIVEVDDEGCTLLDRGVDIFQEGVAREKNQEKPAVQDRTDARALRRHYFRRRLRKIALLRVLVRHDLCPALSEEQLNAWQGKGIYPLDDAFIRWQRTDDNADRNPYRDRFRCLTEELDMACREERYVLGRALYHLCQRRGFLSNRKDVGNEAEEGKVKQEIKTLSADMAAAGCEYLGEYFYRLYQRKEKIRKHYTARNEHYLAEFRAICRKQRLDEELRQALEKAIFYQRPLKSQKGLVGKCTFEKDKSRCPVSHPRFEEFRMLQFINNVRVTGPGDAEPRPLSPEEVEIVRPLFLRKSKPHFDFEDIAKKIAGKGNYACRGELLQAPYRFNCAGKSTVTGSPVSALFASVFGDDWQREICSLYTLGAGKNEEQILNDVWHVLFAFEDEERLQAWLQEKLQLSADDAKTLAAFRLPQGYASLSLNVINKILPYLRRGYRYDEAVFFANLGKVLPAEVYADPARRREVEQGISAQMDDLGDGEKTRKEERIRDYLRRYWGVEEKRLERLYHPSMIEAYPSASPNGQGLLQLGSPRIPAVRNPMAMRALFRLRVLLNELLREGKIDRGTKINIELARELNDANKRKAIERYQREREAENRKYAEEIRQQYVEATGHSIEPSEEDILKYRLWVEQGHCSLYTGKTIGISEFLGDGRRYDIEHTVPRSRGGEDAQYNKTLCEEEFNRDIKRDKLPSELANHTAILACVESCGWFERIEGLEHRVWGADRRAKSATTKSAKDFAIQDRHYWRMHLDYWRRKCEAFTMTEVPEGFSNRQGVDVGIIGRYARLYLQTVFDRVYTVKGATTAAFRRMWGLQEEYAAKERVNHVHHCIDAITIACIGSREYALWAQYVRQDELYRRGEADKPRCGKPWPTFTEDVRVTADELLISHHTPDNMPKQSRKRLRVRGKVQRNDRGEVKYMQGDTARGALHQQTFYGAIERDGEIRYVVRKSLDQLLPADVEKIVDEAVRQKVREAVEAYGFKEATDPTKHTVWMNEEKQIPIRKVRILTGVKNPILLKPHRDVSVKEYKRYYHVVNDGNYCMAIYEGRDRQGRLKRTFEIVNKLEAARYFKRSADRESRPDLVPLSDVNGYSLKYLLKTGTMVLFYENSPDELYECSVGELAKRLYKVVGMAQDGRVQFLFHQEARDQKAVTAECGMGISVFDARHPAPKLRIRVSNFKMFVEGYDFELTVTGEVKFKR

SEQ ID NO: 19417 - protein, 976 aa, unidentified
  REGION 1..976: note = Cas Enzyme sequence
LEKAIFYQRPLKSQKGLVGKCTFEKDKSRCPVSHPRFEEFRMLQFINNVRVTGPGDAEPRPLSPEEVEIVRPLFLRKSKPHFDFEDIAKKIAGKGNYACRGELLQAPYRFNCAGKSTVTGSPVSALFASVFGDDWQREICSLYTLGAGKNEEQILNDVWHVLFAFEDEERLQAWLQEKLQLSADDAKTLAAFRLPQGYASLSLNVINKILPYLRRGYRYDEAVFFANLGKVLPAEVYADPARRREVEQGISAQMDDLGDGEKTRKEERIRDYLRRYWGVEEKRLERLYHPSMIEAYPSASPNGQGLLQLGSPRIPAVRNPMAMRALFRLRVLLNELLREGKIDRGTKINIELARELNDANKRKAIERYQREREAENRKYAEEIRQQYVEATGHSIEPSEEDILKYRLWVEQGHCSLYTGKTIGISEFLGDGRRYDIEHTVPRSRGGEDAQYNKTLCEEEFNRDIKRDKLPSELANHTAILACVESCGWFERIEGLEHRVWGADRRAKSATTKSAKDFAIQDRHYWRMHLDYWRRKCEAFTMTEVPEGFSNRQGVDVGIIGRYARLYLQTVFDRVYTVKGATTAAFRRMWGLQEEYAAKERVNHVHHCIDAITIACIGSREYALWAQYVRQDELYRRGEADKPRCGKPWPTFTEDVRVTADELLISHHTPDNMPKQSRKRLRVRGKVQRNDRGEVKYMQGDTARGALHQQTFYGAIERDGEIRYVVRKSLDQLLPADVEKIVDEAVRQKVREAVEAYGFKEATDPTKHTVWMNEEKQIPIRKVRILTGVKNPILLKPHRDVSVKEYKRYYHVVNDGNYCMAIYEGRDRQGRLKRTFEIVNKLEAARYFKRSADRESRPDLVPLSDVNGYSLKYLLKTGTMVLFYENSPDELYECSVGELAKRLYKVVEMAQDGRVQFLFHQEARDQKAVTAECGMGISVFDARHPAPKLRIRVSNFKMFVEGYDFELTVTGEVKFKR

SEQ ID NO: 19418 - protein, 1213 aa, unidentified
  REGION 1..1213: note = Cas Enzyme sequence
MEKRLGIDVGTNSLGWAIVEVDDEGCTLLDRGVDIFQEGVAREKNQEKPAVQDRTDARALRRHYFRRRLRKIALLRVLVRHDLCPALSEEQLNAWQGKGIYPLDDAFIRWQRTDDNADRNPYRDRFRCLTEELDLACREERYVLGRALYHLCQRRGFLSNRKDAGNEAEEGKVKQEIKTLSADMAAAGCEYLGEYFYRLYQRKEKIRKHYTARNEHYLAEFRAICRKQRLDEELRQALEKAIFYQRPLKSQKGLVGKCTFEKDKSRCPVSHPRFEEFRMLQFINNVRVTGPGDAEPRPLSPEEVEIVRPLFLRKSKPHFDFEDIAKKIAGKGNYACRGELLQAPYRFNCAGKSTVTGSPVSALFASVFGDDWQREICSLYTLGAGKNEEQILNDVWHVLFAFEDEERLQAWLQEKLQLSADDAKTLAAFRLPQGYASLSLNVINKILPYLRRGYRYDEAVFFANLGKVLPAEVYADPARRREVEQGISAQMDDLGDGEKTRKEERIRDYLRRYWGVEEKRLERLYHPSMIEAYPSASPNGQGLLQLGSPRIPAVRNPMAMRALFRLRVLLNELLREGKIDRGTKINIELARELNDANKRKAIERYQREREAENRKYAEEIRQQYVEATGHSIEPSEEDILKYRLWVEQGHCSLYTGKTIGISEFLGDGRRYDIEHTVPRSRGGEDAQYNKTLCEEEFNRDIKRDKLPSELANHTAILACVESCGWFERIEGLEHRVWGADRRAKSATTKSAKDFAIQDRHYWRMHLDYWRRKCEAFTMTEVPEGFSNRQGVDVGIIGRYARLYLQTVFDRVYPVKGSATADFRTMWGLQEEHTRKERVNHVHHCIDAITIACIGSREYALWAQYVRQDELYRRGEADKPRCGKPWPTFTEDVRATADELLISHHTPDNMPKQSRKRLRVRGKVQRNDRGEVKYMQGDTARGALHQQTFYGAIERNGEIRYVVRKSLDQLLPADVEKIVDEAVRQKVREAVEAYGFKEATDPTKHTVWMNEEKQIPIRKVRILTGVKNPILLKPHRDVSVKEYKRYYHVVNDGNYCMAIYEGRDRQGRLKRTFEIVNKLEAARYFKRSADRESRPDLVPLSDVNGYSLKYLLKTGTMVLFYENSPDELYECSVGELAKRLYKVVGMAQDGRVQFLFHQEARDQKAVTAECGMGISVFDARHPAPKLRIRVSNFKMFVEGYDFELTVTGEVKFKR

SEQ ID NO: 19419 - protein, 1213 aa, unidentified
  REGION 1..1213: note = Cas Enzyme sequence
MEKRLGIDVGTNSLGWAIVEVDDEGCTLLDRGVDIFQEGVAREKNQEKPAVQDRTDARALRRHYFRRRLRKIALLRVLVRHDLCPALSEEQLNAWQGKGIYPLDDAFIRWQRTDDNADRNPYRDRFRCLTEELDLACREERYVLGRALYHLCQRRGFLSNRKDAGNEAEEGKVKQEIKTLSADMAAAGCEYLGEYFYRLYQRKEKIRKHYTARNEHYLAEFRAICRKQRLDEELRQALEKAIFYQRPLKSQKGLVGKCTFEKDKSRCPVSHPRFEEFRMLQFINNVRVTGPGDAEPRPLSPEEVEIVRPLFLRKSKLHFDFEDIAKKIAGKGNYACRGELLQAPYRFNCAGKSTVTGSPVSALFASVFGDDWQREICSLYTLGAGKNEEQILNDVWHVLFAFEDEERLQTWLQEKLQLSADDAKTLAAFRLPQGYASLSLNVINKILPYLRRGYRYDEAVFFANLGKVLPAEVYADPARRREVEQGISAQMDDLGDGEQTRKEERIRDYLRRYWGVEEKRLERLYHPSMIEAYPSASPNGQGLLQLGSPRIPAVRNPMAMRALFRLRVLLNELLREGKIDRGTKINIELARELNDANKRKAIERYQREREAENRKYAEEIRQQYVEATGHSIEPSEEDILKYRLWVEQGHCSLYTGKTIGISEFLGDGRRYDIEHTVPRSRGGEDAQYNKTLCEEEFNRDIKRDKLPSELANHTAILACVESCGWFERIEGLEHRVWGADRRAKSATTKSAKDFAIQDRHYWRMHLDYWRRKCEAFTMTEVPEGFSNRQGVDVGIIGRYARLYLQTVFDRVYTVKGATTAAFRRMWGLQEEYAAKERVNHVHHCIDAITIACIGSREYALWAQYVRQDELYRRGEADKPRCGKPWPTFTEDVRATADELLISHHTPDNMPKQSRKRLRVRGKVQRNDRGEVKYMQGDTARGALHQQTFYGAIERDGEIRYVVRKSLDQLLPADVEKIVDEAVRQKVREAVEAYGFKEATDPTKHTVWMNEEKQIPIRKVRILTGVKNPILLKPHRDVSVKEYKRYYHVVNDGNYCMAIYEGRDRQGRLKRTFEIVNKLEAARYFKRSADRESRPDLVPLSDVNGYSLKYLLKTGTMVLFYENSPDELYECSVGELAKRLYKVVGMAQDGRVQFLFHQEARDQKAVTAECGMGISVFDARHPAPKLRIRVSNFKMFVEGYDFELTVTGEVKFKR

SEQ ID NO: 19420 - protein, 1213 aa, unidentified
  REGION 1..1213: note = Cas Enzyme sequence
MEKRLGIDVGTNSLGWAIVEVDDEGCTLLDRGVDIFQEGVAREKNQEKPAVQDRTDARALRRHYFRRRLRKIALLRVLVRHDLCPALSEEQLNAWQGKGIYPLDDAFIRWQRTDDNADRNPYRDRFRCLTEELDLACREERYVLGRALYHLCQRRGFLSNRKDAGNEAEEGKVKQEIKTLSADMAAAGCEYLGEYFYRLYQRKEKIRKHYTARNEHYLAEFRAICRKQRLDEELRQALEKAIFYQRPLKSQKGLVGKCTFEKDKSRCPVSHPRFEEFRMLQFINNVRVTGPGDAEPRPLSPEEVEIVRPLFLRKSKPHFDFEDIAKKIAGKGNYACRGELLQAPYRFNCAGKSTVTGSPVSALFASVFGDDWQREICSLYTLGAGKNEEQILNDVWHVLFAFEDEERLQAWLQEKLQLSADDAKTLAAFRLPQGYASLSLNVINKILPYLRRGYRYDEAVFFANLGKVLPAEVYADPARRREVEQGISAQMDDLGDGEKTRKEERIRDYLRRYWGVEEKRLERLYHPSMIEAYPSASPNGQGLLQLGSPRIPAVRNPMAMRALFRLRVLLNELLREGKIDRGTKINIELARELNDANKRKAIERYQREREAENRKYAEEIRQQYVEATGHSIEPSEEDILKYRLWVEQGHCSLYTGKTIGISEFLGDGRRYDIEHTVPRSRGGEDAQYNKTLCEEEFNRDIKRDKLPSELANHTAILACVESCGWFERIEGLEHRVWGADRRAKSATTKSAKDFAIQDRHYWRMHLDYWRRKCEAFTMTEVPEGFSNRQGVDVGIIGRYARLYLQTVFDRVYTVKGATTAAFRRMWGLQEEYAAKERVNHVHHCIDAITIACIGSREYALWAQYVRQDELYRRGEADKPRCGKPWPTFTEDVRATADELLISHHTPDNMPKQSRKRLRVRGKVQRNDRGEVKYMQGDTARGALHQQTFYGAIERDGEIRYVVRKSLDQLLPADVEKIVDEAVRQKVREAVEAYGFKEATDPTKHTVWMNEEKQIPIRKVRILTGVKNPILLKPHRDVSVKEYKRYYHVVNDGNYCMAIYEGRDRQGRLKRTFEIVNKLEAARYFKRSADRESRPDLVPLSDVNGYSLKYLLKTGTMVLFYENSPDELYECSVGELAKRLYKVVGMAQDGRVQFLFHQEARDQKAVTAECGMGISVFDARHPAPKLRIRVSNFKMFVEGYDFELTVTGEVKFKR

SEQ ID NO: 19421 - protein, 1216 aa, unidentified
  REGION 1..1216: note = Cas Enzyme sequence
MEKRLGIDMGTNSLGWALVEMTEEGCVLLDRGVDIFQEGVAHGKSGERPAVQDRTDARALRRHYFRRRLRKIALLRVLVQHDFCPPLSQEQLDAWRKQGVYPVTDEFIRWQRTDDAADKNPYRDRFRALTEELDLTRREDRHALGRALYHLCQRRGFLSNRKDAGNETEDGTVKTDIKALSADMEAAGCTWLGEYFYRLYQRKEKIRSKHYTARNEHYLAEFRAICRKQRLGEELQQALERAIFYQRPLKSQKGQVGRCRFEKKKSRCPVSHPRFEEFRMLQFLNNVRVTGPGDAESRPLSQQELEAVRPLFLRKSKPHFDFEDIAKKIAGRNNYACKGDRTEAAWRFNFARGATVTGCPMSALLEAVFGNEWRRELCRLYTLGAGKSEERIIDDVWHALFAFEHEERLRQWLQEKLQISADDAKTLAAFRLPQGYASLSLNVINKILPYLRRGYRYDEAVFFANLGKVLPAEVYADPARRREVEQGISAQMDDLGDGEKTRKEERIRDYLRLYWGVEEERLDRLYHPSMIEAYPQAKPDANGILRLGSPRTAAVRNPMAMRALFRLRALINELLREGKIDRGTRINIEFSRKLNDANMRKAIERYQREREAENRKFAAKIREEYAAATGHTIEPTEEDLLKYRLWEEQKHIDLYSDTGRMIGIAEFLGAGRTYDIEHTVPRSRGGEDAQYNKTLCEERFNREVKRNKLPMELACGEEIWARIEALGWPELIDSLQGQIEGATRRVDNAVTKPEKDEAIQYRHYLKMRRDYWRRKCESFKITEVPEGFSNRQGVDIGIIGKYARQYLQTVFDRVYPVKGSATADFRTMWGLQEEHTRKERVNHVHHCIDAITIACIGKREYDRWARYVCQDERYRRGEADRPQPEKPWPTFTEDVRAVAEELLVSHHTPDNMPKQSRKRLRVRGRVQKNDKGETKYMQGDTARGALHEQTFYGAIEREGEIRYVVRKSLDQLLPTDVDKIVDETVKRKVQEAIEAFGFKEAMDPQKHTVWMNKDKNVPIRKVRILTGVKNPILLKPHRDVSVKEYKRYYHVVNDGNYCMAIYEGRDRQGRLKRTFEIVNKLEAARYFKRSADRESRPDLVPLSDVNGYSLKYLLKTGTMVLFYENSPDELYECSVGELAKRLYKVVEMAQDGRVQFLFHQEARDRKAVTAECGMGISVFDARHPAPKLRIRVSNFKMFVEGYDFELTVTGEVKFKR

SEQ ID NO: 19422 - protein, 1213 aa, unidentified
  REGION 1..1213: note = Cas Enzyme sequence
MEKRLGIDVGTNSLGWAIVEVDDEGCTLLDRGVDIFQEGVAREKNQEKPAVQDRTDARALRRHYFRRRLRKIALLRVLVRHDLCPALSEEQLNAWQSKGIYPLDDAFIRWQRTDDNADRNPYRDRFRCLTEELDLACREERYVLGRALYHLCQRRGFLSNRKDAGNEAEEGKVKQEIKTLSADMAAAGCEYLGEYFYRLYQRKEKIRKHYTARNEHYLAEFRAICRKQRLDEELRQALEKAIFYQRPLKSQKGLVGKCTFEKDKSRCPVSHPRFEEFRMLQFINNVRVTGPGDAEPRPLSPEEVEIVRPLFLRKSKPHFDFEDIAKKIAGKGNYACRGELLQAPYRFNCAGKSTVTGSPVSALFASVFGDDWQREICSLYTLGAGKNEEQILNDVWHVLFAFEDEERLQAWLQEKLQLSADDAKTLAAFRLPQGYASLSLNVINKILPYLRRGYRYDEAVFFANLGKVLPAEVYADPARRREVEQGISAQMDDLGDGEKTRKEERIRDYLRRYWGIEEKRLERLYHPSMIEAYPSASPNGQGLLQLGSPRIPAVRNPMAMRALFRLRVLLNELLREGKIDRGTKINIELARELNDANKRKAIERYQREREAENRKYAEEIRQQYVEATGHSIEPSEEDILKYRLWVEQGHCSLYTGKTIGISEFLGDGRRYDIEHTVPRSRGGEDAQYNKTLCEEEFNRDIKRDKLPSELANHTAILACVESCGWFERIEGLEHRVWGADRRAKSATTKSAKDFAIQDRHYWRMHLDYWRRKCEAFTMTEVPEGFSNRQGVDVGIIGRYARLYLQTVFDRVYTVKGATTAAFRRMWGLQEEYAAKERVNHVHHCIDAITIACIGSREYALWAQYVRQDELYRRGEADKPRCGKPWPTFTEDVRATADELLISHHTPDNMPKQSRKRLRVRGKVQRNDRGEVKYMQGDTARGALHQQTFYGAIERDGEIRYVVRKSLDQLLPTDVDKIVDETVKRKVQEAIEAFGFKEAMDPQKHTVWMNKDKNVPIRKVRILTGVKNPILLKPHRDVSVKEYKRYYHVVNDGNYCMAIYEGRDRQGRLKRTFEIVNKLEAARYFKRSADRESRPDLVPLSDVNGYSLKYLLKTGTMVLFYENSPDELYECSVGELAKRLYKVVGMAQDGRVQFLFHQEARDQKAVTAECGMGISVFDARHPAPKLRIRVSNFKMFVEGYDFELTVTGEVKFKR

SEQ ID NO: 19423 - protein, 1213 aa, unidentified
  REGION 1..1213: note = Cas Enzyme sequence
MEKRLGIDVGTNSLGWAIVEVDDEGCTLLDRGVDIFQEGVAREKNQEKPAVQDRTDARALRRHYFRRRLRKIALLRVLVRHDLCPALSEEQLNAWQGKGIYPLDDAFIRWQRTDDNADRNPYRDRFRCLTEELDLACREERYVLGRALYHLCQRRGFLSNRKDAGNEAEEGKVKQEIKTLSADMAAAGCEYLGEYFYRLYQRKEKIRKHYTARNEHYLAEFRAICRKQRLDEELRQALEKAIFYQRPLKSQKGLVGKCTFEKDKSRCPVSHPRFEEFRMLQFINNVRVTGPGDAEPRPLSPEEVEIVRPLFLRKSKPHFDFEDIAKKIAGKGNYACRGELLQAPYRFNCAGKSTVTGSPVSALFASVFGDDWQREICSLYTLGAGKNEEQILNDVWHVLFAFEDEERLQAWLQEKLQLSADDAKTLAAFRLPQGYASLSLNVINKILPYLRRGYRYDEAVFFANLGKVLPAEVYADPARRREVEQGISAQMDDLGDGEKTRKEERIRDYLRRYWGVEEKRLERLYHPSMIEAYPSASPNGQGLLQLGSPRIPAVRNPMAMRALFRLRVLLNELLREGKIDRGTKINIELARELNDANKRKAIERYQREREAENRKYAEEIRQQYVEATGHSIEPSEEDILKYRLWVEQGHCSLYTGKTIGISEFLGDGRRYDIEHTVPRSRGGEDAQYNKTLCEEEFNRDIKRDKLPSELANHTAILACVESCGWFERIEGLEHRVWGADRRAKSATTKSAKDFAIQDRHYWRIHLDYWRRKCEAFTMTEVPEGFSNRQGVDVGIIGRYARLYLQTVFDRVYTVKGATTAAFRRMWGLQEEYAAKERVNHVHHCIDAITIACIGSREYALWAQYVRQDELYRRGEADKPRCGKPWPTFTENVRATADELLISHHTPDNMPKQSRKRLRVRGKVQRNDRGEVKYMQGDTARGALHQQTFYGAIERDGEIRYVVRKSLDQLLPADVEKIVDEAVRQKVREAVEAYGFKEATDPTKHTVWMNEEKQIPIRKVRILTGVKNPILLKPHRDVSVKEYKRYYHVVNDGNYCMAIYEGRDRQGRLKRTFEIVNKLEAARYFKRSADRESRPDLVPLSDVNGYSLKYLLKTGTMVLFYENSPDELYECSVGELAKRLYKVVGMAQDGRVQFLFHQEARDQKAVTAECGMGISVFDARHPAPKLRIRVSNFKMFVEGYDFELTVTGEVKFKR

SEQ ID NO: 19424 - protein, 1213 aa, unidentified
  REGION 1..1213: note = Cas Enzyme sequence
MEKRLGIDVGTNSLGWAIVEVDDEGCTLLDRGVDIFQEGVAREKNQEKPAVQDRTDARALRRHYFRRRLRKIALLRVLVRHDLCPALSEEQLNAWQSKGIYPLDDAFIRWQRTDDNADRNPYRDRFRCLTEELDLACREERYVLGRALYHLCQRRGFLSNRKDAGNEAEEGKVKQEIKTLSADMAAAGCEYLGEYFYRLYQRKEKIRKHYTARNEHYLAEFRAICRKQRLDEELRQALEKAIFYQRPLKSQKGLVGKCTFEKDKSRCPVSHPRFEEFRMLQFINNVRVTGPGDAEPRPLSPEEVEIVRPLFLRKSKPHFDFEDIAKKIAGKGNYACRGELLQAPYRFNCAGKSTVTGSPVSALFASVFGDDWQREICSLYTLGAGKNEEQILNDVWHVLFAFEDEERLQAWLQEKLQLSADDAKTLAAFRLPQGYASLSLNVINKILPYLRRGYRYDEAVFFANLGKVLPAEVYADPARRREVEQGISAQMDDLGDGEKTRKEERIRDYLRRYWGVEEKRLERLYHPSMIEAYPSASPNGQGLLQLGSPRIPAVRNPMAMRALFRLRVLLNELLREGKIDRGTKINIELARELNDANKRKAIERYQREREAENRKYAEEIRQQYVEATGHSIEPSEEDILKYRLWVEQGHCSLYTGKTIGISEFLGDGRRYDIEHTVPRSRGGEDAQYNKTLCEEEFNRDIKRDKLPSELANHTAILACVESCGWFERIEGLEHRVWGADRRAKSATTKSAKDFAIQDRHYWRMPLDYWRRKCEAFPMTEVPEGFRNRQGVDVGIIGRYARLYLQTVFDRVYTVKGATTAAFRRMWGLQEEYAAKERVNHVHHCIDAITIACIGSREYALWAQYVRQDELYRRGEADKPRCGKPWPTFTEDVRATADELLISHHTPDNMPKQSRKRLRVRGKVQRNDRGEVKYMQGDTARGALHQQTFYGAIERDGEIRYVVRKSLDQLLPADVEKIVDEAVRQKVREAVEAYGFKEATDPTKHTVWMNEEKQIPIRKVRILTGVKNPILLKPHRDVSVKEYKRYYHVVNDGNYCMAIYEGRDRQGRLKRTFEIVNKLEAARYFKRSADRESRPDLVPLSDVNGYSLKYLLKTGTMVLFYENSPDELYECSVGELAKRLYKVVGMAQDGRVQFLFHQEARDQKAVTAECGMGISVFDARHPAPKLRIRVSNFKMFVEGYDFELTVTGEVKFKR

SEQ ID NO: 19425 - protein, 976 aa, unidentified
  REGION 1..976: note = Cas Enzyme sequence
LEKAIFYQRPLKSQKGLVGKCTFEKDKSRCPVSHPRFEEFRMLQFINNVRVTGPGDAEPRPLSPEEVEIVRPLFLRKSKPHFDFEDIAKKIAGKGNYACRGELLQAPYRFNCAGKSTVTGSPVSALFASVFGDDWQREICSLYTLGAGKNEEQILNDVWHVLFAFEDEERLQAWLQEKLQLSADDAKTLAAFRLPQGYASLSLNVINKILPYLRRGYRYDEAVFFANLGKVLPAEVYADPARRREVEQGISAQMDDLGDGEKTRKEERIRDYLRRYWGVEEKRLERLYHPSMIEAYPSASPNGQGLLQLGSPRIPAVRNPMAMRALFRLRVLLNELLREGKIDRGTKINIELARELNDANKRKAIERYQREREAENRKYAEEIRQQYVEATGHSIEPSEEDILKYRLWVEQGHCSLYTGKTIGISEFLGDGRRYDIEHTVPRSRGGEDAQYNKTLCEEEFNRDIKRDKLPSELANHTAILACVESCGWFERIEGLEHRVWGADRRAKSATTKSAKDFAIQDRHYWRMHLDYWRRKCEAFTMTEVPEGFSNRQGVDVGIIGRYARLYLQTVFDRVYTVKGATTAAFRRMWGLQEEYAAKERVNHVHHCIDAITIACIGSREYALWAQYVRQDELYRRGEADKPRCGKPWPTFTEDVRATADELLISHHTPDNMPKQSRKRLRVRGKVQRNDRGEVKYMQGDTARGALHQQTFYGAIERDGEIRYVVRKSLDQLLPADVEKIVDEAVRQKVREAVEAYGFKEATDPTKHTVWMNEEKQIPIRKVRILTGVKNPILLKPHRDVSVKEYKRYYHVVNDGNYCMAIYEGRDRQGRLKRTFEIVNKLEAARYFKRSADRESRPDLVPLSDVNGYSLKYLLKTGTMVLFYENSPDELYECSVGELAKRLYKVVGMAQDGRVQFLFHQEARDQKAVTAECGMGISVFDARHPAPKLRIRVSNFKMFVEGYDFELTVTGEVKFKR

SEQ ID NO: 19426 - protein, 945 aa, unidentified
  REGION 1..945: note = Cas Enzyme sequence
VSHPRFEEFRMLQFINNVRVTGPGDAEPRPLSPEEVEIVRPLFLRKSKPHFDFEDIAKKIAGKGNYACRGELLQAPYRFNCAGKSTVTGSPVSALFASVFGDDWQREICSLYTLGAGKNEEQILNDVWHVLFAFEDEERLQAWLQEKLQLSADDAKTLAAFRLPQGYASLSLNVINKILPYLRRGYRYDEAVFFANLGKVLPAEVYADPARRREVEQGISAQMDDLGDGEKTRKEERIRDYLRRYWGVEEKRLERLYHPSMIEAYPSASPNGQGLLQLGSPRIPAVRNPMAMRALFRLRVLLNELLREGKIDRGTKINIELARELNDANKRKAIERYQREREAENRKYAEEIRQQYVEATGHSIEPSEEDILKYRLWVEQGHCSLYTGKTIGISEFLGDGRRYDIEHTVPRSRGGEDAQYNKTLCEEEFNRDIKRDKLPSELANHTAILACVESCGWFERIEGLEHRVWGADRRAKSATTKSAKDFAIQDRHYWRMHLDYWRRKCEAFTMTEVPEGFSNRQGVDVGIIGRYARLYLQTVFDRVYTVKGATTAAFRRMWGLQEEYAAKERVNHVHHCIDAITIACIGSREYALWAQYVRQDELYRRGEADKPRCGKPWPTFTEDVRATADELLISHHTPDNMPKQSRKRLRVRGKVQRNDRGEVKYMQGDTARGALHQQTFYGAIERDGEIRYVVRKSLDQLLPADVEKIVDEAVRQKVREAVEAYGFKEATDPTKHTVWMNEEKQIPIRKVRILTGVKNPILLKPHRDVSVKEYKRYYHVVNDGNYCMAIYEGRDRQGRLKRTFEIVNKLEAARYFKRSADRESRPDLVPLSDVNGYSLKYLLKTGTMVLFYENSPDELYECSVGELAKRLYKVVGMAQDGRVQFLFHQEARDRKAVTAECGMGISVFDARHPAPKLRIRVSNFKMFVEGYDFELTVTGEVKFKR

SEQ ID NO: 19427 - protein, 1213 aa, unidentified
  REGION 1..1213: note = Cas Enzyme sequence
MEKRLGIDVGTNSLGWAIVEVDDEGCTLLDRGVDIFQEGVAREKNQEKPAVQDRTDARALRRHYFRRRLRKIALLRVLVRHDLCPALSEEQLNAWQSKGIYPLDDAFIRWQRTDDNADRNPYRDRFRCLTEELDLACREERYVLGRALYHLCQRRGFLSNRKDAGNEAEEGKVKQEIKTLSADMAAAGCEYLGEYFYRLYQRKEKIRKHYTARNEHYLAEFRAICRKQRLDEELRQALEKAIFYQRPLKSQKGLVGKCTFEKDKSRCPVSHPRFEEFRMLQFINNVRVTGPGDAEPRPLSPEEVEIVRPLFLRKSKPHFDFEDIAKKIAGKGNYACRGELLQAPYRFNCAGKSTVTGSPVSALFASVFGDDWQREICSLYTLGAGKNEEQILNDVWHVLFAFEDEERLQAWLQEKLQLSADDAKTLAAFRLPQGYASLSLNVINKILPYLRRGYRYDEAVFFANLGKVLPAEVYADPARRREVEQGISAQMDDLGDGEKTRKEERIRDYLRRYWGVEEKRLERLYHPSMIEAYPSASPNGQGLLQLGSPRIPAVRNPMAMRALFRLRVLLNELLREGKIDRGTKINIELARELNDANKRKAIERYQREREAENRKYAEEIRQQYVEATGHSIEPSEEDILKYRLWVEQGHCSLYTGKTIGISEFLGDGRRYDIEHTVPRSRGGEDAQYNKTLCEEEFNRDIKRDKLPSELANHTAILACVESCGWFERIEGLEHRVWGADRRAKSATTKSAKDFAIQDRHYWRMHLDYWRRKCEAFTMTEVPEGFSNRQGVDVGIIGRYARLYLQTVFDRVYTVKGATTAAFRRMWGLQEEYAAKERVNHVHHCIDAITIACIGSREYALWAQYVRQDELYRRGEADKPRCGKPWPTFTEDVRATADELLISHHTPDNMPKQSRKRLRVRGKVQRNDRGEVKYMQGDTARGALHQQTFYGAIERDGEIRYVVRKSLDQLLPADVEKIVDEAVRQKVREAVEAYGFKEATDPTKHTVWMNEEKQIPIRKVRILTGVKNPILLKPHRDVSVKEYKRYYHVVNDGNYCMAIYEGRDRQGRLKRTFEIVNKLEAARYFKRSADRESRPDLVPLSDVNGYSLKYLLKTGTMVLFYENSPDELYECSVGELAKRLYKVVGMAQDGRVQFLFHQEARDRKAVTAECGMGISVFDARHPAPKLRIRVSNFKMFVEGYDFELTVTGEVKFKR

SEQ ID NO: 19428 - protein, 935 aa, unidentified
  REGION 1..935: note = Cas Enzyme sequence
MLQFINNVRVTGPGDAEPRPLSPEEVEIVRPLFLRKSKPHFDFEDIAKKIAGKGNYACRGELLQAPYRFNCAGKSTVTGSPVSALFASVFGDDWQREICSLYTLGAGKNEEQILNDVWHVLFAFEDEERLQAWLQEKLQLSADDAKTLAAFRLPQGYASLSLNVINKILPYLRRGYRYDEAVFFANLGKVLPAEVYADPARRREVEQGISAQMDDLGDGEKTRKEERIRDYLRRYWGVEEKRLERLYHPSMIEAYPSASPNGQGLLQLGSPRIPAVRNPMAMRALFRLRVLLNELLREGKIDRGTKINIELARELNDANKRKAIERYQREREAENRKYAEEIRQQYVEATGHSIEPSEEDILKYRLWVEQGHCSLYTGKTIGISEFLGDGRRYDIEHTVPRSRGGEDAQYNKTLCEEEFNRDIKRDKLPSELANHTAILACVESCGWFERIEGLEHRVWGADRRAKSATTKSAKDFAIQDRHYWRMHLDYWRRKCEAFTMTEVPEGFSNRQGVDVGIIGRYARLYLQTVFDRVYTVKGATTAAFRRMWGLQEEYAAKERVNHVHHCIDAITIACIGSREYALWAQYVRQDELYRRGEADKPRCGKPWPTFTEDVRATADELLISHHTPDNMPKQSRKRLRVRGKVQRNDRGEVKYMQGDTARGALHQQTFYGAIERDGEIRYVVRKSLDQLLPADVEKIVDEAVRQKVREAVEAYGFKEATDPTKHTVWMNEEKQIPIRKVRILTGVKNPILLKPHRDVSVKEYKRYYHVVNDGNYCMAIYEGRDRQGRLKRTFEIVNKLEAARYFKRSADRESRPDLVPLSDVNGYSLKYLLKTGTMVLFYENSPDELYECSVGELAKRLYKVVGMAQDGRVQFLFHQEARDRKAVTAECGMGISVFDARHPAPKLRIRVSNFKMFVEGYDFELTVTGEVKFKR

SEQ ID NO: 19429 - protein, 1213 aa, unidentified
  REGION 1..1213: note = Cas Enzyme sequence
MEKRLGIDVGTNSLGWAIVEVDDEGCTLLDRGVDIFQEGVAREKNQEKPAVQDRTDARALRRHYFRRRLRKIALLRVLVRHDLCPALSEEQLNAWQGKGIYPLDDAFIRWQRTDDNADRNPYRDRFRCLTKELDLACREERYVLGRALYHLCQRRGFLSNRKDAGNEAEEGKVKQEIKTLSADMAAAGCEYLGEYFYRLYQRKEKIRKHYTARNEHYLAEFRAICRKQRLDEELRQALEKAIFYQRPLKSQKGLVGKCTFEKDKSRCPVSHPRFEEFRMLQFINNVRVTGPGDAEPRPLSPEEVEIVRPLFLRKSKPHFDFEDIAKKIAGKGNYACRGELLQAPYRFNCAGKSTVTGSPVSALFASVFGDDWQREICSLYTLGAGKNEEQILNDVWHVLFAFEDEERLQAWLQEKLQLSADDAKTLAAFRLPQGYASLSLNVINKILPYLRRGYRYDEAVFFANLGKVLPAEVYADPARRREVEQGISAQMDDLGDGEKTRKEERIRDYLRRYWGVEEKRLERLYHPSMIEAYPSASPNGQGLLQLGSPRIPAVRNPMAMRALFRLRVLLNELLREGKIDRGTKINIELARELNDANKRKAIERYQREREAENRKYAEEIRQQYVEATGHSIEPSEEDILKYRLWVEQGHCSLYTGKTIGISEFLGDGRRYDIEHTVPRSRGGEDAQYNKTLCEEEFNRDIKRDKLPSELANHTAILACVESCGWFERIEGLEHRVWGADRRAKSATTKSAKDFAIQDRHYWRMHLDYWRRKCEAFTMTEVPEGFSNRQGVDVGIIGRYARLYLQTVFDRVYTVKGATTAAFRRMWGLQEEYAAKERVNHVHHCIDAITIACIGSREYALWAQYVRQDELYRRGEADKPRCGKPWPTFTEDVRATADELLISHHTPDNMPKQSRKRLRVRGKVQRNDRGEVKYMQGDTARGALHQQTFYGAIERDGEIRYVVRKSLDQLLPADVEKIVDEAVRQKVREAVEAYGFKEATDPTKHTVWMNEEKQIPIRKVRILTGVKNPILLKPHRDVSVKEYKRYYHVVNDGNYCMAIYEGRDRQGRLKRTFEIVNKLEAARYFKRSADRESRPDLVPLSDVNGYSLKYLLKTGTMVLFYENSPDELYECSVGELAKRLYKVVGMAQDGRVQFLFHQEARDRKAVTAECGMGISVFDARHPAPKLRIRVSNFKMFVEGYDFELTVTGEVKFKR

SEQ ID NO: 19430 - protein, 935 aa, unidentified
  REGION 1..935: note = Cas Enzyme sequence
MLQFINNVRVTGPGDAEPRPLSPEEVEIVRPLFLRKSKPHFDFEDIAKKIAGKGNYACRGELLQAPYRFNCAGKSTVTGSPVSALFASVFGDDWQREICSLYTLGAGKNEEQILNDVWHVLFAFEDEERLQAWLQEKLQLSADDAKTLAAFRLPQGYASLSLNVINKILPYLRRGYRYDEAVFFANLGKVLPAEVYADPARRREVEQGISAQMDDLGDGEKTRKEERIRDYLRRYWGVEEKRLERLYHPSMIEAYPSASPNGQGLLQLGSPRIPAVRNPMAMRALFRLRVLLNELLREGKIDRGTKINIELARELNDANKRKAIERYQREREAENRKYAEEIRQQYVEATGHSIEPSEEDILKYRLWVEQGHCSLYTGKTIGISEFLGDGRRYDIEHTVPRSRGGEDAQYNKTLCEEEFNRDIKRDKLPSELANHTAILACVESCGWFERIEGLEHRVWGADRRAKSATTKSAKDFAIQDRHYWRMHLDYWRRKCEALTMTVGPEGFSNRQGVDVGIIGRYARLYLQTVFDRVYTVKGATTAAFRRMWGLQEEYAAKERVNHVHHCIDAITIACIGSREYALWAQYVRQDELYRRGEADKPRCGKPWPTFTEDVRATADELLISHHTPDNMPKQSRKRLRVRGKVQRNDRGEVKYMQGDTARGALHQQTFYGAIERDGEIRYVVRKSLDQLLPADVEKIVDEAVRQKVREAVEAYGFKEATDPTKHTVWMNEEKQIPIRKVRILTGVKNPILLKPHRDVSVKEYKRYYHVVNDGNYCMAIYEGRDRQGRLKRTFEIVNKLEAARYFKRSADRESRPDLVPLSDVNGYSLKYLLKTGTMVLFYENSPDELYECSVGELAKRLYKVVGMAQDGRVQFLFHQEARDRKAVTAECGMGISVFDARHPAPKLRIRVSNFKMFVEGYDFELTVTGEVKFKR

SEQ ID NO: 19431 - protein, 1213 aa, unidentified
  REGION 1..1213: note = Cas Enzyme sequence
MEKRLGIDVGTNSLGWAIVEVDDEGCTLLDRGVDIFQEGVAREKNQEKPAVQDRTDARALRRHYFRRRLRKRALLRVLVRHDLCPALSEEQLNAWQGKGIYPLDDAFIRWQRTDDNADRNPYRDRFRCLTEELDLACREERYVLGRALYHLCQRRGFLSNRKDAGNEAEEGKVKQEIKTLSADMAAAGCEYLGEYFYRLYQRKEKIRKHYTARNEHYLAEFRAICRKQRLDEELRQALEKAIFYQRPLKSQKGLVGKCTFEKDKSRCPVSHPRFEEFRMLQFINNVRVTGPGDAEPRPLSPEEVEIVRPLFLRKSKPHFDFEDIAKKIAGKGNYACRGELLQAPYRFNCAGKSTVTGSPVSALFASVFGDDWQREICSLYTLGAGKNEEQILNDVWHVLFAFEDEERLQAWLQEKLQLSADDAKTLAAFRLPQGYASLSLNVINKILPYLRRGYRYDEAVFFANLGKVLPAEVYADPARRREVEQGISAQMDDLGDGEKTRKEERIRDYLRRYWGVEEKRLERLYHPSMIEAYPSASPNGQGLLQLGSPRIPAVRNPMAMRALFRLRVLLNELLREGKIDRGTKINIELARELNDANKRKAIERYQREREAENRKYAEEIRQQYVEATGHSIEPSEEDILKYRLWVEQGHCSLYTGKTIGISEFLGDGRRYDIEHTVPRSRGGEDAQYNKTLCEEEFNRDIKRDKLPSELANHTAILACVESCGWFERIEGLEHRVWGADRRAKSATTKSAKDFAIQDRHYWRIHLDYWRRKCEAFTMTEVPEGFSNRQGVDVGIIGRYARLYLQTVFDRVYTVKGATTAAFRRMWGLQEEYAAKERVNHVHHCIDAITIACIGSREYALWAQYVRQDELYRRGEADKPRCGKPWPTFTENVRATADELLISHHTPDNMPKQSRKRLRVRGKVQRNDRGEVKYMQGDTARGALHQQTFYGAIERDGEIRYVVRKSLDQLLPADVEKIVDEAVRQKVREAVEAYGFKEATDPTKHTVWMNEEKQIPIRKVRILTGVKNPILLKPHRDVSVKEYKRYYHVVNDGNYCMAIYEGRDRQGRLKRTFEIVNKLEAARYFKRSADRESRPDLVPLSDVNGYSLKYLLKTGTMVLFYENSPDELYECSVGELAKRLYKVVGMAQDGRVQFLFHQEARDRKAVTAECGMGISVFDARHPAPKLRIRVSNFKMFVEGYDFELTVTGEVKFKR

SEQ ID NO: 19432 - protein, 1220 aa, unidentified
  REGION 1..1220: note = Cas Enzyme sequence
MAKVLGLDLGTNSLGWALVDESENEYTLIDKGVDIFQEGVARDKNNEKPAVQDRTSARALRRRYFRRRLRKIELLKILIRYDLCPPLPEELLTAWQKEKRYPQDNEFLRWQRTDDNGDRNPYHDRYVALSERLDLGNRTQRWLLGRALYHLAQRRGFLSNRKEAGNEKEDGTVKECIKNLSAEIAAAGCRYLGEYFYGLYQHKERIRDKYTSRNEHYLAEFNAICNRQQLPDEWRKALHRAIFFQRDLKSQKGSVGRCTFEPTKSRCPVSHPRFEEFRMLSFVNNIRITGPGDNAPRPLTQEEFETIRSLFFRKSKPYFDFEEIARRIAGKGKYACKEERTEAPYRFNFARTATVSGCPVTASLQAIFGDDWITEIRSLYLLGAGKNEDQMLNDVWHALFSFNDEGRLRSWACEKLQLTDEQAKAFAAIKLPQDYAALSLNAIGKILVYLRCGYRYDEAVFLANLRAALPKEVYADESRRHEIEQDIASLLLDYKRNPYNKFDSKEHRIADYFSDHGLDASRLMRLYHPSKIETYPDAQPKANGILQLGSPRTATIRNPMAMRALFRLRNLINTLLREGRIDRDTKIRIEFARGLNDANRRKAIEQYQREREVENRKYAEEIHSQYAAETGREIKPSDDEVLKYRLWEEQQHVCPYTGRQIRISDFVGSAPDFDIEHTLPQARGGDDSQMNKTLCENRFNRETKRAKLPAELSNHVEIMERIESFGWREKMESLQKQIEAQVRRSKSAAIKSEKDDAIQRRHYLQMQLDYWRGKYERFTMAEIPEGFSNRQGVDIGIIGKYARLYLKTVFDRIYTVKGSTTAAFRKMWGLQEEYARKERTNHVHHCIDAITIACIGRREYDRWAQYVADEERYGYGESGKPRFEKPWPTFTEDVKAAADELLVAHHTPDNMTKQTRRKLRVRGRIKLNADGEPIYQQGDTARCRLHQDTFYGAIKQDGEIRYVIRKSLAQLQPTDIDKIIDDAVRDRVREAIDEVGFKTAMNPDEYTIWMNREKGIPIRKVRIFTPSVKHPIALKKQRDLSAKEYKRDYHVVNEGNYCTVIYEGQDKKGKTKRTFELVSNLEAAQYFKASADREARPDLVPQTDTNGFPLKCILKTGTMVLFYENSPAELYDCSHKELTKRLYKVTAMAAEGRVQFLFHQEARDQKTLTSLYGAGTSQFCQSNPSPKLRLSVSNFNMLVEGYDFELTVTGEIKFKDDRPC

SEQ ID NO: 19433 - protein, 1220 aa, unidentified
  REGION 1..1220: note = Cas Enzyme sequence
MAKVLGLDLGTNSLGWALVDESENEYTLIDKGVDIFQEGVARDKNNEKPAVQDRTSARALRRHYFRRRLRKIELLKILIRYDLCPPLPEELLTAWQKEKRYPQDNEFLRWQRTDDNGDRNPYHDRYVALSERLDLGNRTQRWLLGRALYHLAQRRGFLSNRKEAGNEKEDGTVKECIKNLSAEIAAAGCRYLGEYFYGLYQHKERIRDKYTSRNEHYLAEFNAICDRQQLPDEWRKALHRAIFFQRDLKSQKGSVGRCTFEPTKSRGPVSHPRFEEFRMLSFVNNIRITGPGDNAPRPLTQEEFETIRSLFFRKSKPYFDFEEIARRIAGKGKYACKEERTEAPYRFNFARTATVSGCPVTASLQAIFGDDWITEIRSLYLLGAGKNEDQMLNDVWHALFSFNDEGRLRSWACEKLQLTDEQAKAFAAIKLPQDYAALSLNAIGKILVYLRCGYRYDEAVFLANLRAALPKEVYADESRRHEIEQDIASLLLDYKRNPYNKFDSKEHRIADYFSDHGLDASRLMRLYHPSKIETYPDAQPKANGILQLGSPRTAAIRNPMAMRALFRLRNLINTLLREGRIDRDTKIRIEFARGLNDANRRKAIEQYQREREVENRKYAEEIHSQYAAETGREIKPSDDEVLKYRLWEEQQHVCPYTGRQIRISDFVGSAPDFDIEHTLPQARGGDDSQMNKTLCENRFNRETKRAKLPAELSNHVEIMERIESFGWREKMESLQKQIEAQVRRSKSAAIKSEKDDAIQRRHYLQMQLDYWRGKYERFTMAEIPEGFSNRQGVDIGIIGKYARLYLKTVFDRIYTVKGSTTAAFRKMWGLQEEYARKERTNHVHHCIDAITIACIGRREYDRWAQYVADEERYGYGESGKPRFEKPWPTFTEDVKAVADELLVAHHTPDNMAKQTRRKLRVRGRIKLNADGEPIYQQGDTARCRLHQDTFYGAIKQDGEIRYVIRKSLAQLQPTDIDKIIDDAVRDRVREAIDEVGFKTAMNPDEYTIWMNREKGIPIRKVRIFTPSVKHPIALKKQRDLSAKEYKRDYHVVNEGNYCTVIYEGQDKKGKTKRTFELVSNLEAAQYFKASADREARPDLVPQTDTNGFPLKYILKTGTMVLFYENSPAELYDCSHKELTKRLYKVTAMAAEGRVQFLFHQEARDQKTLTSLYGAGTSQFCQSNPSPKLRLSVSNFNMLVEGYDFELTVTGEIKFKDDRPC

SEQ ID NO: 19434 - protein, 1220 aa, unidentified; identical to SEQ ID NO: 19042
  REGION 1..1220: note = Cas Enzyme sequence

SEQ ID NO: 19435 - protein, 1172 aa, unidentified
  REGION 1..1172: note = Cas Enzyme sequence
PPVRHGPTPGPPPRHYFRRRLRKIELLKILIRYDLCPPLPEELLTAWQKEKRYPQDNEFLRWQRTDDNGDRNPYHDRYVALSERLDLGNRTQRWLLGRALYHLAQRRGFLSNRKEAGNEKEDGTVKECIKNLSAEIAAAGCRYLGEYFYGLYQHKERIRDKYTSRNEHYLAEFNAICDRQQLPDEWRKALHRAIFFQRDLKSQKGSVGRCTFEPTKSRCPVSHPRFEEFRMLSFVNNIRITGPGDNAPRPLTQEEFETIRSLFFRKSKPYFDFEEIARRIAGKGKYACKEERTEAPYRFNFARTATVSGCPVTASLQAIFGDDWITEIRSLYLLGAGKNEDQMLNDVWHALFSFNDEGRLRSWACEKLQLTDEQAKAFAAIKLPQDYAALSLNAIGKILVYLRCGYRYDEAVFLANLRAALPKEVYADESRRHEIEQDIASLLLDYKRNPYNKFDSKEHRIADYFSDHGLDASRLIRLYHPSKIETYPDAQPKANGILQLGSPRTATIRNPMAMRALFRLRSLINTLLREGRIDRDTKIRIEFARGLNDANRRKAIEQYQREREVENRKYAEEIHSQYAAETGREIKPSDDEVLKYRLWEEQQHVCPYTGRQIRISDFVGSAPDFDIEHTLPQARGGDDSQMNKTLCENRFNRETKRAKLPAELSNHVEIMERIESFGWREKMESLQKQIEAQVRRSKSAAIKSEKDDAIQRRHYLQMQLDYWRGKYERFTMAEIPEGFSNRQGVDIGIIGKYARLYLKTVFDRIYTVKGSTTAAFRKMWGLQEEYARKERTNHVHHCIDAITIACIGRREYDRWAQYVADEERYGYGESGKPRFEKPWPTFTEDVKAAADELLVAHHTPDNMTKQTRRKLRVRGRIKLNADGEPIYQQGDTARCRLHQDTFYGAIKQDGEIRYVIRKSLAQLQPTDIDKIIDDAVRDRVREAIDEVGFKTAMNPDEYTIWMNREKGIPIRKVRIFTPSVKHPIALKKQRDLSAKEYKRDYHVVNEGNYCTVIYEGQDKKGKTKRTFELVSNLEAAQYFKASADREARPDLVPQTDTNGFPLKYILKTGTMVLFYENTPAELYECTRKELVKRLYKVTAMAAEGRVQFLFHQEARDQKTLTSLYGAGTSQFCQSNPSPKLRLSVSNFNMLVEGYDFELTVTGEIKFKDDRPC

SEQ ID NO: 19436 - protein, 1220 aa, unidentified
  REGION 1..1220: note = Cas Enzyme sequence
MAKVLGLDLGTNSLGWALVDESENEYTLIDKGVDIFQEGVARDKNNEKPAVQDRTSARALRRHYFRRRLRKIELLKILIRYDLCPPLPEELLTAWQKEKRYPQDNEFLRWQRTDDNGDRNPYHDRYVALSERLDLGNRTQRWLLGRALYHLAQRRGFLSNRKEAGNEKEDGTVKECIKNLSAEIAAAGCRYLGEYFYGLYQHKERIRDKYTSRNEHYLAEFNAICDRQQLPDEWRKALHRAIFFQRDLKSQKGSVGRCTFEPTKSRCPVSHPRFEEFRMLSFVNNIRITGPGDNAPRPLTQEEFETIRSLFFRKSKPYFDFEEIARRIAGKGKYACKEERTEAPYRFNFARTATVSGCPVTASLQAIFGDDWITEIRSLYLLGAGKNEDQMLNDVWHALFSFNDEGRLRSWACEKLQLTDEQAKAFAAIKLPQDYAALSLNAIGKILVYLRCGYRYDEAVFLANLRAALPKEVYADESRRHEIEQDIASLLLDYKRNPYNKFDSKEHRIADYFSDHGLDASRLIRLYHPSKIETYPDAQPKANGILQLGSPRTATIRNPMAMRALFRLRSLINTLLREGRIDRDTKIRIEFARGLNDANRRKAIEQYQREREVENRKYAEEIHSQYAAETGREIKPSDDEVLKYRLWEEQQHVCPYTGRQIRISDFVGSAPDFDIEHTLPQARGGDDSQMNKTLCENRFNRETKRAKLPAELSNHVEIMERIESFGWREKMESLQKQIEAQVRRSKSAAIKSEKDDAIQRRHYLQMQLDYWRGKYERFTMAEIPEGFSNRQGVDIGIIGKYARLYLKTVFDRIYTVKGSTTAAFRKMWGLQEEYARKERTNHVHHCIDAITIACIGRREYDRWAQYVADEERYGYGESGKPRFEKPWPTFTEDVKAAADELLVAHHTPDNMTKQTRRKLRVRGRIKLNADGEPIYQQGDTARCRLHQDTFYGAIKQDGEIRYVIRKSLAQLQPTDIDKIIDDAVRDRVREAIDEVGFKTAMNPDEYTIWMNREKGIPIRKVRIFTPSVKHPIALKKQRDLSAKEYKRDYHVVNEGNYCTVIYEGQDKKGKTKRTFELVSNLEAAQYFKASADREARPDLVPQTDTNGFPLKYILKTGTMVLFYENTPAELYECTRKELVKRLYKVTAMAAEGRVQFLFHQEARDQKTLTSLYGAGTSQFCQSNPSPKLRLSVSNFNMLVEGYDFELTVTGEIKFKDDRPC

SEQ ID NO: 19437 - protein, 1175 aa, unidentified
  REGION 1..1175: note = Cas Enzyme sequence
NEKPAVQDRTSARALRRHYFRRRLRKIELLKILIRYDLCPPLPEELLTAWQKEKRYPQDNEFLRWQRTDDNGDRNPYHDRYVALSERLDLGNRTQRWLLGRALYHLAQRRGFLSNRKEAGNEKEDGTVKECIKNLSAEIAAAGCRYLGKYFYGLYQHKERIRDKYTSRNEHYLAEFNAICDRQQLPDEWRKALHRAIFFQRDLKSQKGSVGRCTFEPTKSRCPVSHPRFEEFRMLSFVNNIRITGPGDNAPRPLTQEEFETIRSLFFRKSKPYFDFEEIARRIAGKGKYACKEERTEAPYRFNFARTATVSGCPVTASLQAIFGDDWITEIRSLYLLGAGKNEDQMLNDVWHALFSFNDEGRLRSWACEKLQLTDEQAKAFAAIKLPQDYAALSLNAIGKILVYLRCGYRYDEAVFLANLRAALPKEVYADESRRHEIEQDIASLLLDYKRNPYNKFDSKEHRIADYFSDHGLDASRLIRLYHPSKIETYPDAQPKANGILQLGSPRTATIRNPMAMRALFRLRNLINTLLREGRIDRDTKIRIEFARGLNDANRRKAIEQYQREREVENRKYAEEIHSQYAAETGREIKPSDDEVLKYRLWEEQQHVCPYTGRQIRISDFVGSAPDFDIEHTLPQARGGDDSQMNKTLCENRFNRETKRAKLPAELSNHVEIMERIESFGWREKMESLQKQIEAQVRRSKSAAIKSEKDDAIQRRHYLQMQLDYWRGKYERFTMAEIPEGFSNRQGVDIGIIGKYARLYLKTVFDRIYTVKGSTTAAFRKMWGLQEEYARKERTNHVHHCIDAITIACIGRREYDRWAQYVADEERYGYGESGKPRFEKPWPTFTEDVKAAADELLVAHHTPDNMTKQTRRKLRVRGRIKLNADGEPIYQQGDTARCRLHQDTFYGAIKQDGEIRYVIRKSLAQLQPTDIDKIIDDAVRDRVREAIDEVGFKTAMNPDEYTIWMNREKGIPIRKVRIFTPSVKHPIALKKQRDLSAKEYKRDYHVVNEGNYCTVIYEGQDKKGKTKRTFELVSNLEAAQYFKASADREARPDLVPQTDTNGFPLKYILKTGTMVLFYENTPAELYECTRKELVKRLYKVTAMAAEGRVQFLFHQEARDQKTLTSLYGAGTSQFCQSNPSPKLRLSVSNFNMLVEGYDFELTVTGEIKFKDDRPC

SEQ ID NO: 19438 - protein, 1220 aa, unidentified
  REGION 1..1220: note = Cas Enzyme sequence
MAKVLGLDLGTNSLGWALVDESENEYTLIDKGVDIFQEGVARDKNNEKPAVQDRTSARALRRHYFRRRLRKIELLKILIRYDLCPPLPEELLTAWQKEKRYPQDNEFLRWQRTDDNGDRNPYHDRYVALSERLDLGNRTQRWLLGRALYHLAQRRGFLSNRKEAGNEKEDGTVKECIKNLSAEIAAAGCRYLGEYFYGLYQHKERIRDKYTSRNEHYLAEFNAICDRQQLPDEWRKALHRAIFFQRDLKSQKGSVGRCTFEPTKSRGPVSHPRFEEFRMLSFVNNIRITGPGDNAPRPLTQEEFETIRSLFFRKSKPYFDFEEIARRIAGKGKYACKEERTEAPYRFNFARTATVSGCPVTASLQAIFGDDWITEIRSLYLLGAGKNEDQMLNDVWHALFSFNDEGRLRSWACEKLQLTDEQAKAFAAIKLPQDYAALSLNAIGKILVYLRCGYRYDEAVFLANLRAALPKEVYADESRRHEIEQDIASLLLDYKRNPYNKFDSKEHRIADYFSDHGLDASRLMRLYHPSKIETYPDAQPKANGILQLGSPRTATIRNPMAMRALFRLRNLINTLLREGRIDRDTKIRIEFARGLNDANRRKAIEQYQREREVENRKYAEEIHSQYAAETGREIKPSDDEVLKYRLWEEQQHVCPYTGRQIRISDFVGSAPDFDIEHTLPQARGGDDSQMNKTLCENRFNRETKRAKLPAELSNHVEIMERIESFGWREKMESLQKQIEAQVRRSKSAAIKSEKDDAIQRRHYLQMQLDYWRGKYERFTMAEIPEGFSNRQGVDIGIIGKYARLYLKTVFDRIYTVKGSTTAAFRKMWGLQEEYARKERTNHVHHCIDAITIACIGRREYDRWAQYVADEERYGYGESGKPRFEKPWPTFTEDVKAAADELLVAHHTPDNMTKQTRRKLRVRGRIKLNADGEPIYQQGDTARCRLHQDTFYGAIKQDGEIRYVIRKSLAQLQPTDIDKIIDDAVRDRVREAIDEVGFKTAMNPDEYTIWMNREKGIPIRKVRIFTPSVKHPIALKKQRDLSAKEYKRDYHVVNEGNYCTVIYEGQDKKGKTKRTFELVSNLEAAQYFKASADREARPDLVPQTDTNGFPLKYILKTGTMVLFYENSPAELYDCSHKELTKRLYKVTAMAAEGRVQFLFHQEARDQKTLTSLYGAGTSQFCQSNPSPKLRLSVSNFNMLVEGYDFELTVTGEIKFKDDRPC

SEQ ID NO: 19439 - protein, 1220 aa, unidentified
  REGION 1..1220: note = Cas Enzyme sequence
MAKVLGLDLGTNSLGWALVDESENEYTLIDKGVDIFQEGVARDKNNEKPAVQDRTSARALRRHYFRRRLRKIELLKILIRYDLCPPLPEELLTAWQKEKRYPQDNEFLRWQRTDDNGDRNPYHDRYVALSERLDLGNRTQRWLLGRALYHLAQRRGFLSNRKEAGNEKEDGTVKECIKNLSAEIAAAGCRYLGEYFYGLYQHKERIRDKYTSRNEHYLAEFNAICDRQQLPDEWRKALHRAIFFQRDLKSQKGSVGRCTFEPTKSRCPVSHPRFEEFRMLSFVNNIRITGPGDNAPRPLTQEEFETIRSLFFRKSKPYFDFEEIARRIAGKGKYACKEERTEAPYRFNFARTATVSGCPVTASLQAIFGDDWITEIRSLYLLGAGKNEDQMLNDVWHALFSFNDEGRLRSWACEKLQLTDEQAKAFAAIKLPQDYAALSLNAIGKILVYLRCGYRYDEAVFLANLRAALPKEVYADESRRHEIEQDIASLLLDYKRNPYNKFDSKEHRIADYFSDHGLDASRLIRLYHPSKIETYPDAQPKANGILQLGSPRTATIRNPMAMRALFRLRNLINTLLREGRIDRDTKIRIEFARGLNDANRRKAIEQYQREREVENRKYAEEIHSQYAAETGREIKPSDDEVLKYRLWEEQQHVCPYTGRQIRISDFVGSAPDFDIEHTLPQARGGDDSQMNKTLCENRFNRETKRAKLPAELSNHVEIMERIESFGWREKMESLQKQIEAQVRRSKSAAIKSEKDDAIQRRHYLQMQLDYWRGKYERFTMAEIPEGFSNRQGVDIGIIGKYARLYLKTVFDRIYTVKGSTTAAFRKMWGLQEEYARKERTNHVHHCIDAITIACIGRREYDRWAQYVADEERYGYGESGKPRFEKPWPTFTEDVKAAADELLVAHHTPDNMTKQTRRKLRVRSRIKLNADGEPIYQQGDTARCRLHQDTFYGAIKQDGEIRYVIRKSLAQLQPTDIDKIIDDAVRDRVREAIDEVGFKTAMNPDEYTIWMNREKGIPIRKVRIFTPSVKHPIALKKQRDLSAKEYKRDYHVVNEGNYCTVIYEGQDKKGKTKRTFELVSNLEAAQYFKASADREARPDLVPQTDTNGFPLKYILKTGTMVLFYENTPAELYECTRKELVKRLYKVTAMAAEGRVQFLFHQEARDQKTLTSLYGAGTSQFCQSNPSPKLRLSVSNFNMLVEGYDFELTVTGEIKFKDDRPC

SEQ ID NO: 19440 - protein, 992 aa, unidentified
  REGION 1..992: note = Cas Enzyme sequence
CDRQQLPDEWRKALHRAIFFQRDLKSQKGSVGRCTFEPTKSRCPVSHPRFEEFRMLSFVNNIRITGPGDNAPRPLTQEEFETIRSLFFRKSKPYFDFEEIARRIAGKGKYACKEERTEAPYRFNFARTATVSGCPVTASLQAIFGDDWITEIRSLYLLGAGKNEDQMLNDVWHALFSFNDEGRLRSWACEKLQLTDEQAKAFAAIKLPQDYAALSLNAIGKILVYLRCGYRYDEAVFLANLRAALPKEVYADESRRHEIEQDIASLLLDYKRNPYNKFDSKEHRIADYFSDHGLDASRLIRLYHPSKIETYPDAQPKANGILQLGSPRTATIRNPMAMRALFRLRNLINTLLREGRIDRDTKIRIEFARGLNDANRRKAIEQYQREREVENRKYAEEIHSQYAAETGREIKPSDDEVLKYRLWEEQQHVCPYTGRQIRISDFVGSAPDFDIEHTLPQARGGDDSQMNKTLCENRFNRETKRAKLPAELSNHVEIESFGWREKMESLQKQIEAQVRRSKSAAIKSEKDDAIQRRHYLQMQLDYWRGKYERFTMAEIPEGFSNRQGVDIGIIGKYARLYLKTVFDRIYTVKGSTTAAFRKMWGLQEEYARKERTNHVHHCIDAITIACIGRREYDRWAQYVADEERYGYGESGKPRFEKPWPTFTEDVKAAADELLVAHHTPDNMTKQTRRKLRVRGRIKLNADGEPIYQQGDTARCRLHQDTFYGAIKQDGEIRYVIRKSLAQLQPTDIDKIIDDAVRDRVREAIDEVGFKTAMNPDEYTIWMNREKGIPIRKVRIFTPSVKHPIALKKQRDLSAKEYKRDYHVVNEGNYCTVIYEGQDKKGKTKRTFELVSNLEAAQYFKASADREARPDLVPQTDTNGFPLKYILKTGTMVLFYENTPAELYECTRKELVKRLYKVTAMAAEGRVQFLFHQEARDQKTLTSLYGAGTSQFCQSNPSPKLRLSVSNFNMLVEGYDFELTVTGEIKFKDDRPC

SEQ ID NO: 19441 - protein, 1219 aa, unidentified
  REGION 1..1219: note = Cas Enzyme sequence
MTKVLGLDLGTNSLGWALVDESENGYALLDKGVAIFQEGVARDKNNEKPAVQDRTDARALRRHYFRRRLRKIDLLRVLVRYDLCPPLTDEQLSTWRQKKQYPLDEEFLRWQRTDDNEDRNPYHDRYVALTERLDLENRAQRWLLGRAFYHLAQRRGFLSNRKEAGNEKEDGTVKESIKNLSAEMEAAGCRYLGEYFYGLYQHKERIRGKYTSRNEHYLTEFNAICDRQQLPDKWRQALHRAIFFQRDLKSQKGSVGRCTFEPTKSRCPVSHPRFEEFRMWSFINNIRVTGPDDGTPRPLTPKEIETIRPLFFRKSKSYFDFEEIARKIAGKGKYACREERIEAPYRFNFARTATVSGCPVTASLMDIFGEEWLREIRGLYLLGDGKTEEQVLNDIWHALFSFKDEERLQEWAGKNMQLDEQQAQAFAAIRLPQDYAAMSLNAINKILPYLRCGYRYDEAVFLANLRAALPKEVYADEDRRHNIEQEIASLLLGYKRNPYDKFDSKERRIADYFSDHGLDMSRLDRLYHPSKIETYPDAKPNAEGIMQLGSPRTSAIRNPMAMRALFRLRDLINTLLREGRIDRDTKIRIEFARGLNDANRRKAIEQYQREREAENRKFAEEIRRQYSAETGREIEPSDDEVLKYRLWEEQQHICPYTGRQIRISDFIGANPGFDIEHTLPRALGGDDSQMNKTLCENRFNRETKRAKLPAELSNHAEIMERIESFGWREKVESLQKQIEAQVRRSKGAATKPEKDSAIQRRHYLQMQLDYWRGKCERFTMTEIPEGFSNRQGVDIGIIGKYARLYLKTVFDRIYTVKGSTTAAFRKMWGLQEEYVRKERVNHIHHCIDAITIACIGRREYDRWAQYAADEERFNYGESGKPRFEKPWPTFTEDVKAVADELLVAHHTPDNMAKQTRKKLRVRGRVKLNADGEPIYQQGDTARCRLHQETFYGAIKREDEIRYVVRKSLADLKLTDIDKIVDPEVRLRIEKAVKADGLETVKRTDYTVWMNREKGIPIRKVRIFTPGVTQPIALKKQRDLSDKEYKQDYHVANDGNYCMAVYEGKDKKGKLKRSFELVSNLEAAQYFKASADRETCPDLVPLADANGFPLKCILKAGTLVLFYENSPAELYECSRMELVKRLYKVTAMAAEGRVQFLFHQEARDQKTLTALYGAGASQFRQSNPSPKLRLSVSNFNMLVEGYDFELTVTGEIKFKHGRPC

SEQ ID NO: 19442 - protein, 1224 aa, unidentified
  REGION 1..1224: note = Cas Enzyme sequence
MTKVLGLDLGTNSLGWALVDESENGYALLDKGVAIFQEGVARDKNNEKPAVQDRTDARALRRHYFRRRLRKIDLLRVLVRYDLCPPLTDEQLSTWRQKKQYPLDEEFLRWQRTDDNEDRNPYHDRYVALTERLDLENRAQRWLLGRAFYHLAQRRGFLSNRKEAGNEKEDGTVKESIKNLSAEMEAAGCRYLGEYFYGLYQHKERIRGKYTSRNEHYLTEFNAICDRQQLPDKWRRALHRAIFFQRDLKSQKGSVGRCTFEPTKSRCPVSHPRFEEFRMWSFINNIRVTGPDDGTPRPLTPKEIETIRPLFFRKSKSYFDFEEIARRIAGKGKYACREERIEAPYRFNFARTATVSGCPVTASLMDIFGKEWLREIRSLYLLGDGKTEEQVLNDIWHALFSFKDEERLRDWACEKLQLSEEQAKAFAAIKLPQDYAAMSLNAINKILPYLRCGYRYDEAVFLANLRAALPKEVYADEDRRHNIEQEIASLLLDYKRNPYDKFDSKERRIANYFSDHGLDMSRLDRLYHPSKIETYPDAKPNAEGIMQLGSPRTSAIRNPMAMRALFRLRDLINTLLREGRIDRDTKIRIEFARGLNDANRRKAIEQYQREREAENRKFAEEIRRQYTAETGREIEPSDDEVLKYRLWEEQQHICPYTGRQIRISDFIGANPGFNIEHTLPRALGGDDSQMNKTLCENRFNRETKRAKLPAELSNHAEIMERIESFGWREKVESLQKQIEAQVRRSKGAATKPEKDSAIQRRHYLQMQLDYWRGKCERFTMTEIPEGFSNRQGVDIGIIGKYARLYLKTVFDRIYTVKGSTTAAFRKMWGLQEEYTRKERVNHIHHCIDAITIACIGRREYDRWAQYAADEERFNYGETDKPRFEKPWPTFTEDVKAVADELLVTHHTPDNMAKQTRKKLRVRGRVKLSADGKPIYQQGDTARCRLHQETFYGAIKREDEIRYVVRKSIKLLQPSDIDKIVDDAVRDRVRMAIDEVGFKTAINPDEYTIWMNREKGIPIRKVRIFTPGVTQPIALKKQRDLSDKEYKQDYHVANDGNYCMAVYEGKDKKGKLKRSFELVSNLEAAQYFKASADREACPDLVPLADANGFPLKCILKAGTLVLFYENSPAELCDCTPKELTKRLYKVTGFSTLTVSNNSYGRLALKHHQEARPAGELKAKSGVWKTNEEYRPVISILHTQLNAYVEGYDFELTVTGEIKFKHGRPC

SEQ ID NO: 19443 - protein, 1221 aa, unidentified
  REGION 1..1221: note = Cas Enzyme sequence
MAKVLGLDLGTNSLGWALVDESENEYTLIDKGVDIFQEGVARDKNNEKPAVQDRTSARALRRHYFRRRLRKIELLKILIRYDLCPPLPEELLTAWQKEKRYPQDNEFLRWQRTDDNGDRNPYHDRYVALSERLDLGNRTQRWLLGRALYHLAQRRGFLSNRKEAGNEKEDGTVKECIKNLSAEIAAAGCRYLGEYFYGLYQHKERIRDKYTSRNEHYLAEFNAICDRQQLPDEWRKALHRAIFFQRDLKSQKGSVGRCTFEPTKSRCPVSHPRFEEFRMLSFVNNIRITGPGDNAPRPLTQEEFETIRSLFFRKSKPYFDFEEIARRIAGKGKYACKEERTEAPYRFNFARTATVSGCPVTASLQAIFGDDWITEIRSLYLLGAGKNEDQMLNDVWHALFSFNDEGRLRSWACEKLQLTDEQAKAFAAIKLPQDYAALSLNAIGKILVYLRCGYRYDEAVFLANLRAALPKEVYADESRRHEIEQDIASLLLDYKRNPYNKFDSKEHRIADYFSDHGLDASRLIRLYHPSKIETYPDAQPKANGILQLGSPRTATIRNPMAMRALFRLRNLINTLLREGRIDRDTKIRIEFARGLNDANRRKAIEQYQREREVENRKYAEEIHSQYAAETGREIKPSDDEVLKYRLWEEQQHVCPYTGRQIRISDFVGSAPDFDIEHTLPQARGGDDSQMNKTLCENRFNRETKRAKLPAELSNHVEIMERIESFGWREKMESLQKQIEAQVRRSKSAAIKSEKDDAIQRRHYLQMQLDYWRGKYERFTMAEIPEGFSNRQGVDIGIIGKYARLYLKTVFDRIYTVKGSTTAAFRKMWGLQEEYARKERTNHVHHCIDAITIACIGRREYDRWAQYVADEERYGYGESGKPRFEKPWPTFTEDVKAAADELLVAHHTPDNMAKQTRKKLRVRGRIKLNADGEPIYQQGDTARCRLHQDTFYGAIKQDGEIRYVIRKSLAQLQPTDIDKIIDDAVRDRVREAIDEVGFKTAMNPDEYTIWMNREKGIPIRKVRIFVRKTTLIPLGNKQHRDRSDKEYKRKYLVANEGNYCMAVYEGKDKKGRTDHSFEIISNLQAAEYFKRSTDRNERHDLAPVADTNGYPLKYLLKTGTMVLFYENTPAELYECTRKELVKRLYKVTAMAAEGRVQFLFHQEARDQKTLTSLYGAGTSQFCQSNPSPKLRLSVSNFNMLVEGYDFELTVTGEIKFKDDRPC

SEQ ID NO: 19444 - protein, 1220 aa, unidentified
  REGION 1..1220: note = Cas Enzyme sequence
MAKVLGLDLGTNSLGWALVDESENEYTLIDKGVDIFQEGVARDKNNEKPAVQDRTSARALRRRYFRRRLRKIELLKILIRYDLCPPLPEELLTAWQKEKRYPQDNEFLRWQRTDDNGDRNPYHDRYVALSERLDLGNRTQRWLLGRALYHLAQRRGFLSNRKEAGNEKEDGTVKECIKNLSAEIAAAGCRYLGEYFYGLYQHKERIRDKYTSRNEHYLAEFNAICDRQQLPDEWRKALHRAIFFQRDLKSQKGSVGRCTFEPTKSRCPVSHPRFEEFRMLSFVNNIRITGPGDNAPRPLTQEEFETIRSLFFRKSKPYFDFEEIARRIAGKGKYACKEERTEAPYRFNFARTATVSGCPVTASLQAIFGDDWITEIRSLYLLGAGKNEDQMLNDVWHALFSFNDEGRLRSWACEKLQLTDEQAKAFAAIKLPQDYAALSLNAIGKILVYLRCGYRYDEAVFLANLRAALPKEVYADESRRHEIEQDIASLLLDYKRNPYNKFDSKEHRIADYFSDHGLDASRLMRLYHPSKIETYPDAQPKANGILQLGSPRTATIRNPMAMRALFQLRNLINTLLREGRIDRDTKIRIEFARGLNDANRRKAIEQYQREREVENRKYAEEIHSQYAAETGREIKPSDDEVLKYRLWEEQQHVCPYTGRQIRISDFVGSAPDFDIEHTLPQARGGDDSQMNKTLCENRFNRETKRAKLPAELSNHVEIMERIESFGWREKMESLQKQIEAQVRRSKSAAIKSEKDDAIQRRHYLQMQLDYWRGKYERFTMAEIPEGFSNRQGVDIGIIGKYARLYLKTVFDRIYTVKGSTTAAFRKMWGLQEEYARKERTNHVHHCIDAITIACIGRREYDRWAQYVADEERYGYGESGKPRFEKPWPTFTEDVKAAADELLVAHHTPDNMTKQTRRKLRVRGRIKLNADGEPIYQQGDTARCRLHQDTFYGAIKQDGEIRYVIRKSLAQLQPTDIDKIIDDAVRDRVREAIDEVGFKTAMNPDEYTIWMNREKGIPIRKVRIFTPSVKHPIALKKQRDLSAKEYKRDYHVVNEGNYCTVIYEGQDKKGKTKRTFELVSNLEAAQYFKASADREARPDLVPQTDTNGFPLKCILKTGTMVLFYENSPAELYDCSHKELTKRLYKVTAMAAEGRVQFLFHQEARDQKTLTSLYGAGTSQFCQSNPSPKLRLSVSNFNMLVEGYDFELTVTGEIKFKDDRPC

SEQ ID NO: 19445 - protein, 1126 aa, unidentified
  REGION 1..1126: note = Cas Enzyme sequence
  REGION 1095..1098: note = misc_feature - Xaa can be any naturally occurring amino acid
MAKVLGLDLGTNSLGWALVDESENEYTLIDKGVDIFQEGVARDKNNEKPAVQDRTSARALRRHYFRRRLRKIELLKILIRYDLCPPLPEELLTAWQKEKRYPQDNEFLRWQRTDDNGDRNPYHDRYVALSERLDLGNRTQRWLLGRALYHLAQRRGFLSNRKEAGNEKEDGTVKECIKNLSAEIAAAGCRYLGEYFYGLYQHKERIRDKYTSRNEHYLAEFNAICDRQQLPDEWRKALHRAIFFQRDLKSQKGSVGRCTFEPTKSRCPVSHPRFEEFRMLSFVNNIRITGPGDNAPRPLTQEEFETIRSLFFRKSKPYFDFEEIARRIAGKGKYACKEERTEAPYRFNFARTATVSGCPVTASLQAIFGDDWITEIRSLYLLGAGKNEDQMLNDVWHALFSFNDEGRLRSWACEKLQLTDEQAKAFAAIKLPQDYAALSLNAIGKILVYLRCGYRYDEAVFLANLRAALPKEVYADESRRHEIEQDIVSLLLDYKRNPYNKFDSKEHRIADYFSDHGLDASRLMRLYHPSKIETYPDAQPKANGILQLGSPRTATIRNPMAMRALFRLRNLINTLLREGRIDRDTKIRIEFARGLNDANRRKAIEQYQREREVENQKYAEEIHSQYAAETGREIKPSDDEVLKYRLWEEQQHVCPYTGRQIRISDFVGSAPDFDIEHTLPQARGGDDSQMNKTLCENRFNRETKRAKLPAELSNHVEIMERIESFGWREKMESLQKQIEAQVRRSKSAAIKSEKDDAIQRRHYLQMQLDYWRGKYERFTMAEIPEGFSNRQGVDIGIIGKYARLYLKTVFDRIYTVKGSTTAAFRKMWGLQEEYARKERTNHVHHCIDAITIACIGRREYDRWAQYVADEERYGYGESGKPRFEKPWPTFTEDVKAAADELLVAHHTPDNMTKQTRRKLRVRGRIKLNADGEPIYQQGDTARCRLHQDTFYGAIKQDGEIRYVIRKSLAQLQPTDIDKIIDDAVRDRVREAIDKVGFKTAMNPDEYTIWMNREKGIPIRKVRIFTPSVKHPIALKKQRDLSAKEYKRDYHVVNEGNYCTVIYEGQDKKGKTKRTFELVSNLEAAQYFKASADREXXXXPPRSGTADRHERFPLEIHLKNGDHGPVL

SEQ ID NO: 19446 - protein, 1095 aa, unidentified
  REGION 1..1095: note = Cas Enzyme sequence
YVALSERLDLGNRTQRWLLGRALYHLAQRRGFLSNRKEAGNEKEDGTVKECIKNLSAEIAAAGCRYLGEYFYGLYQHKERIRDKYTSRNEHYLAEFNAICDRQQLPDEWRKALHRAIFFQRDLKSQKGSVGRCTFEPTKSRCPVSHPRFEEFRMLSFVNNIRITGPGDNAPRPLTQEEFETIRSLFFRKSKPYFDFEEIARRIAGKGKYACKEERTEAPYRFNFARTATVSGCPVTASLQAIFGDDWITEIRSLYLLGAGKNEDQMLNDVWHALFSFNDEGRLRSWACEKLQLTDEQAKAFAAIKLPQDYAALSLNAIGKILVYLRCGYRYDEAVFLANLRAALPKEVYADESRRHEIEQDIASLLLDYKRNPYNKFDSKEHRIADYFSDHGLDASRLMRLYHPSKIETYPDAQPKANGILQLGSPRTATIRNPMAMRALFQLRNLINTLLREGRIDRDTKIRIEFARGLNDANRRKAIEQYQREREVENRKYAEEIHSQYAAETGREIKPSDDEVLKYRLWEEQQHVCPYTGRQIRISDFVGSAPDFDIEHTLPQARGGDDSQMNKTLCENRFNRETKRAKLPAELSNHVEIMERIESFGWREKMESLQKQIEAQVRRSKSAAIKSEKDDAIQRRHYLQMQLDYWRGKYERFTMAEIPEGFSNRQGVDIGIIGKYARLYLKTVFDRIYTVKGSTTAAFRKMWGLQEEYARKERTNHVHHCIDAITIACIGRREYDRWAQYVADEERYGYGESGKPRFEKPWPTFTEDVKAAADELLVAHHTPDNMTKQTRRKLRVRGRIKLNADGEPIYQQGDTARCRLHQDTFYGAIKQDGEIRYVIRKSLAQLQPTDIDKIIDDAVRDRVREAIDEVGFKTAMNPDEYTIWMNREKGIPIRKVRIFTPSVKHPIALKKQRDLSAKEYKRDYHVVNEGNYCTVIYEGQDKKGKTKRTFELVSNLEAAQYFKASADREARPDLVPQTDTNGFPLKCILKTGTMVLFYENSPAELYDCSHKELTKRLYKVTAMAAEGRVQFLFHQEARDQKTLTSLYGAGTSQFCQSNPSPKLRLSVSNFNMLVEGYDFELTVTGEIKFKDDRPC

SEQ ID NO: 19447 - protein, 1224 aa, unidentified
  REGION 1..1224: note = Cas Enzyme sequence
MTKVLGLDLGTNSLGWALVDESENGYALLDKGVAIFQEGVARDKNNEKPAVQDRTDARALRRHYFRRRLRKIDLLRVLVRYDLCPPLTDEQLSTWRQKKQYPLDEEFLRWQRTDDNEDRNPYHDRYVALTERLDLENRAQRWLLGRAFYHLAQRRGFLSNRKEAGNEKEDGTVKESIKNLSAEMEAAGCRYLGEYFYGLYQHKERIRGKYTSRNEHYLTEFNAICDRQQLPDKWRRALHRAIFFQRDLKSQKGSVGRCTFEPTKSRCPVSHPRFEEFRMWSFINNIRVTGPDDGTPRPLTPKEIETIRPLFFRKSKSYFDFEEIARRIAGKGKYACREERIEAPYRFNFARTATVSGCPVTASLMDIFGKEWLREIRSLYLLGDGKTEEQVLNDIWHALFSFKDEERLRDWACEKLQLSEEQAKAFAAIKLPQDYAAMSLNAINKILPYLRCGYRYDEAVFLANLRAALPKEVYADEDRRHNIEQEIASLLLDYKRNPYDKFDSKERRIANYFSDHGLDMSRLDRLYHPSKIETYPDAKPNAEGIMQLGSPRTSAIRNPMAMRALFRLRDLINTLLREGRIDRDTKIRIEFARGLNDANRRKAIEQYQREREAENRKFAEEIRRQYTAKTGREIEPSDDEVLKYRLWEEQQHICPYTGRQIRISDFIGANPGFDIEHTLPRALGGDDSQMNKTLCENRFNRETKRAKLPAELSNHAEIMERIESFGWREKVESLQKQIEAQVRRSKGAATKPEKDSAIQRRHYLQMQLDYWRGKCERFTMTEIPEGFSNRQGVDIGIIGKYARLYLKTVFDRIYTVKGSTTAAFRKMWGLQEEYTRKERVNHIHHCIDAITIACIGRREYDRWAQYAADEERFNYGETDKPRFEKPWPTFTEDVKAVADELLVTHHTPDNMAKQTRKKLRVRGRVKLSADGKPIYQQGDTARCRLHQETFYGAIKREDEIRYVVRKSIKLLQPSDIDKIVDDAVRDRVRMAIDEVGFKTAINPDEYTIWMNREKGIPIRKVRIFTPGVTQPIALKKQRDLSDKEYKQDYHVANDGNYCMAVYEGKDKKGKLKRSFELVSNLEAAQYFKASADREACPDLVPLADANGFPLKCILKAGTLVLFYENSPAELCDCTPKELTKRLYKVTGFSTLTVSNNSYGRLALKHHQEARPAGELKAKSGVWKTNEEYRPVISILHTQLNAYVEGYDFELTVTGEIKFKHGRPC

SEQ ID NO: 19448 - protein, 1224 aa, unidentified
  REGION 1..1224: note = Cas Enzyme sequence
MEKILGVDLGTNSIGWAIVEDTDKGYILKDRGVDIFQEGVARDKNSEKPSVQDRTEARALRRHYFRRRLRKIELLRLLVKYGLCPYLTDEQLDLWRMKKQYPLDDGFLQWQRTDDNKDKNPYHDRYVALTQTLNLEKMEHRYMLGRAIYHLAQRRGFISNRKEVGKDKEDGVVKDGIKSLSTEMEKAGCHYIGEYFYKLYQHKGKIRGRYTSRNEHYRAEFDAICERQQLPEEWRKNMYRAIFYQRPLKSQKGLVGKCTFEPKKSRCPVSHPRFEEFRMLSLMNNVRVTSPGEIEPRPLSQGEITTITPLFLRKSKPYFDFEEIARKIAGKGKYACRNDRNEAPYRFNYARTATVSGCPVTAAIVAVFGSDWISEICSLYRLGEGKTEEQVINDVWHALFSFDDETRLKTWAQENLQLTEEQAEDFASIRLPQDYAALSLNAINKILPYLRRGYRYDEAVFLANLKAALPHYIYEDGQRRGEIENDIANLLSSYRRNPYDKYDTKERRITDYFSDQGLDTSRIDRLYHPSMIDTYRRVMPDAEGCMQLGSPRTSSIRNPMAMRSLFRLRALINRLLRDGKIDRDTKINIEFARGLNDANRRKAIEQYQREREVENRRYADEIRKQYLTESGREIVPSEDDILKYRMWEEQQHICPYTGRQIGISDFIGSSPVFDIEHTVPRARGGDDSQMNKTLCDSRFNRERKRAKLPSELSNHVDIMERIESFGWLKRVEDLQKQIEIQVRKSKGAATKTEKDGAIQRRHYLQIQLDYWRGKCERFTMTEVPDGFSNRQGVDIGIIGRYARLYLKTVFDRIYTVKGATTAAFRKMWGLQDEYSKKERTNHVHHCIDAITIACIGRKEYDRWAQYASDEERYSYGESGKPRFEKPWPTFTEDVKAVADELLVSHNTPDNMEKQTRKKMRVRGKVKFNSEGNPIYIQGDTARRKLHQDTFYGAIKREDEVKYVVRKSLGQLQQSDVDKIVDDAVKSRVKEAIREVGFAKAMDPEEYTIWMNEAKRIPIRKVRIFTPSITQPIALRKQRDLSDKEYKQDYHVANDGNYCMAVYEGQDKRGKTKRTFEIISNLEAAKYFKRSADRADRPDLVPMSDSNGYPLKCILKIGTMVLFYEKSPAELYECSRKDLVKRLYKVTGFSTLTVSSNSYGRLTLKFHQEARPAGELKAKSGEWNSAEEYRPVISLLHTQLNAYVEGYDFELTVTGEIKFKHEMPC

SEQ ID NO: 19449 - protein, 1224 aa, unidentified
  REGION 1..1224: note = Cas Enzyme sequence
MTKVLGLDLGTNSLGWALVDESENGYALLDKGVAIFQEGVARDKNNEKPAVQDRTDARALRRHYFRRRLRKIDLLRVLVRYDLCPPLTDEQLSTWRQKKQYPLDKEFLRWQRTDDNEDRNPYHDRYVALTERLDLENRAQRWLLGRAFYHLAQRRGFLSNRKEAGNEKEDGTVKESIKNLSAEMEAAGCRYLGEYFYGLYQHKERIRGKYTSRNEHYLTEFNAICDRQQLPDKWRRALHRAIFFQRDLKSQKGSVGRCTFEPTKSRCPVSHPRFEEFRMWSFINNIRVTGPDDGTPRPLTPKEIETIRPLFFRKSKSYFDFEEIARRIAGKGKYACREERIEAPYRFNFARTATVSGCPVTASLMDIFGKEWLREIRSLYLLGDGKTEEQVLNDIWHALFSFKDEERLRDWACEKLQLSEEQAKAFAAIKLPQDYAAMSLNAINKILPYLRCGYRYDEAVFLANLRAALPKEVYADEDRRHNIEQEIASLLLDYKRNPYDKFDSKERRIANYFSDHGLDMSHLDRLYHPSKIETYPDAKPNAEGIMQLGSPRTSAIRNPMAMRALFRLRDLINTLLREGRIDRDTKIRIEFARGLNDANRRKAIEQYQREREAENRKFAEEIRRQYTAETGREIEPSDDEVLKYRLWEEQQHICPYTGRQIRISDFIGANPGFDIEHTLPRALGGDDSQMNKTLCENRFNRETKRAKLPAELSNHAEIMERIESFGWREKVESLQKQIEAQVRRSKGAATKPEKDSAIQRRHYLQMQLDYWRGKCERFTMTEIPEGFSNRQGVDIGIIGKYARLYLKTVFDRIYTVKGSTTAAFRKMWGLQEEYTRKERVNHIHHCIDAITIACIGRREYDRWAQYAADEERFSYGESGKPRFEKPWPTFTEDVKAVADELLVAHHTPDNMAKQTRKKLRVRGRVKLSADGKPIYQQGDTARCRLHQETFYGAIKREDEIRHVVRKSIKLLQPSDIDKIVDDAVRDRVRMAIDEVGFKTAINPDEYTIWMNREKGIPIRKVRIFTPGVTQPIALKKQRDLSDKEYKQDYHVANDGNYCMAVYEGKDKKGKLKRSFELVSNLEAAQYFKARADREACPDLVPLADANGFPLKCILKAGTLVLFYENSPAELCDCTPKELTKRLYKVTGFSTLTVSNNSYGRLALKHHQEARPAGELKAKSGVWKTNEEYRPVISILHTQLNAYVEGYDFELTVTGEIKFKHGRPC

SEQ ID NO: 19450 - protein, 1220 aa, unidentified
  REGION 1..1220: note = Cas Enzyme sequence
MAKVLGLDLGTNSLGWALVDESENEYTLIDKGVDIFQEGVARDKNNEKPAVQDRTSARALRRRYFRRRLRKIELLKILIRYDLCPPLPEELLTAWQKEKRYPQDNEFLRWQRTDDNGDRNPYHDRYVALSERLDLGNRTQRWLLGRALYHLAQRRGFLSNRKEAGNEKEDGTVKECIKNLSAEIAAAGCRYLGEYFYGLYQHKERIRDKYTSRNEHYLAEFNAICDRQQLPDEWRKALHRAIFFQRDLKSQKGSVGRCTFEPTKSRCPVSHPRFEEFRMLSFVNNIRITGPGDNAPRPLTQEEFETIRSLFFRKSKPYFDFEEIARRIAGKGKYACKEERTEAPYRFNFARTATVSGCPVTASLQAIFGDDWITEIRSLYLLGAGKNEDQMLNDVWHALFSFNDEGRLRSWACEKLQLTDEQAKAFAAIKLPQDYAALSLNAIGKILVYLRCGYRYDEAVFLANLRAALPKEVYADESRRHEIEQDIASLLLDYKRNPYNKFDSKEHRIADYFSDHGLDASRLMRLYHPSKIETYPDAQPKANGILQLGSPRTATIRNPMAMRALFQLRNLINTLLREGRIDRDTKIRIEFARGLNDANRRKAIEQYQREREVENRKYAEEIHSQYAAETGREIKPSDDEVLKYRLWEEQQHVCPYTGRQIRISDFVGSAPDFDIEHTLPQARGGDDSQMNKTLCENRFNRETKRAKLPAELSNHVEIMERIESFGWREKMESLQKQIEAQVRRSKSAAIKSEKDDAIQRRHYLQMQLDYWRGKYERFTMAEIPEGFSNRQGVDIGIIGKYARLYLKTVFDRIYTVKGSTTAAFRKMWGLQEEYARKERTNHVHHCIDAITIACIGRREYDRWAQYVADEERYGYGESGKPRFEKPWPTFTEDVKAAADELLVAHHTPDNMTKQTRRKLRVRGRIKLNADGEPIYQQGDTARCRLHQDTFYGAIKQDGEIRYVIRKSLAQLQPTDIDKIIDDAVRDRVREAIDEVGFKTAMNPDEYTIWMNREKGIPIRKVRIFTPSVKHPIALKKQRDLSAKEYKRDYHVVNEGNYCTVIYEGQDKKGKTKRTFELVSNLEAAQYFKASADREARPDLVPQTDTNGFPLKYILKTGTMVLFYENTPAELYECTRKELVKRLYKVTAMAAEGRVQFLFHQEARDQKTLTSLYGAGTSQFCQSNPSPKLRLSVSNFNMLVEGYDFELTVTGEIKFKDDRPC

SEQ ID NO: 19451 - protein, 1220 aa, unidentified
  REGION 1..1220: note = Cas Enzyme sequence
MTKVLGLDLGTNSLGWALVDESENGYALLDKGVAIFQEGVARDKNNEKPAVQDRTDARALRRHYFRRRLRKIDLLRVLVRYDLCPPLTDEQLSTWRQKKQYPLDKEFLRWQRTDDNEDRNPYHDRYVALTERLDLENRAQRWLLGRAFYHLAQRRGFLSNRKEAGNEKEDGTVKESIKNLSAEMEAAGCRYLGEYFYGLYQYKERIRGKYTSRNEHYLTEFNAICDRQQLPDKWRRALHRAIFFQRDLKSQKGSVGRCTFEPTKSRCPVSHPRFEEFRMWSFINNIRVTGPDDGRPRPLTPKEIETIRPLFFRKSKSYFDFEEIARRIAGKGKYACREERIEAPYRFNFARTATVSGCPVTASLMDIFGEEWLREIRSLYLLGDGKTEEQVLNDIWHALFSFKDEERLRDWACEKLQLSEEQAKAFAAIKLPQDYAAMSLNAINKILPYLRCGYRYDEAVFLANLRAALPKEVYADEDRRHNIEQEIASLLLDYKRNPYDKFDSKERRIANYFSDHGLDMSRLDRLYHPSKIETYPDAKPNAEGIMQLGSPRTSAIRNPMAMRALFRLRDLINTLLREGRIDRDTKIRIEFARGLNDANRRKAIEQYQREREAENRKFAEEIRRQYTAETGCEIEPSDDEVLKYRLWEEQQHICPYTGRQIRISDFIGANPGFDIEHTLPRALGGDDSQMNKTLCENRFNRETKRAKLPAELSNHAEIMERIESFGWREKVESLQKQIEAQVRRSKGAATKPEKDSAIQRRHYLQMQLDYWRGKCKRFTMSEIPEGFSNRQGVDIGIIGKYARLYLKTVFDRIYTVKGSTTAAFRKMWGLQEEYTRKERVNHVHHCIDAITIACIGRREYDRWAQYAADEERFNYGETDKPRFEKPWPTFTEDVKAVADELLVAHHTPDNMAKQTRKKLRVRGRVKLSADGKPIYQQGDTARCRLHQETFYGAIKREDEIRYVVRKSIKLLQPSDIDKIVDDAVRDRVRMAIDEVGFKTAINPDEYTIWMNREKGIPIRKVRIFTPGVTQPIALKKQRDLSDKEYKQDYHVANDGNYCMAVYEGKDKKGKLKRSFELVSNLEAAQYFKASADREACPDLVPLADANGFPLKCILKAGTLVLFYENSPAELCDCTPKELTKRLYKVTAMAAEGRVQFLFHQEARDQKTLTALYGAGASQFRQSNPSPKLRLSVSNFNMLVEGYDFELTVTGEIKFKHGRPC

SEQ ID NO: 19452 - protein, 1224 aa, unidentified
  REGION 1..1224: note = Cas Enzyme sequence
MTKVLGLDLGTNSLGWALVDESENGYALLDKGVAIFQEGVARDKNNEKPTVQDRTDARALRRHYFRRRLRKIDLLRVLVRYDLCPPLTDEQLSTWRQKMQYPLDEEFLRWQRTDDNEDRNPYHDRYVALTERLDLENRAQRWLLGRAFYHLAQRRGFLSNRKEAGNEKEDGTVKESIKNLSAEMEAAGCRYLGEYFYGLYQHKERIRGKYTSRNEHYLTEFNAICDRQQLPDKWRRALHRAIFFQRDLKSQKGSVGRCTFEPTKSRCPVSHPRFEEFRMWSFINNIRVTGPDDGTPRPLTPKEIETIRPLFFRKSKSYFDFEEIARRIAGKGKYACREERIEAPYRFNFARTATVSGCPVTASLMDIFGKEWLREIRSLYLLGDGKTEEQVLNDIWHALFSFKDEERLRDWACEKLQLSEEQAKAFAAIKLPQDYAAMSLNAINKILPYLRCGYRYDEAVFLANLRAALPKEVYADEDRRHNIEQEIASLLLDYKRNPYDKFDSKERRIANYFSDHGLDMSRLDRLYHPSKIETYPDAKPNAEGIMQLGSPRTSAIRNPMAMRALFRLRDLINTLLREGRIDRDTKIRIEFARGLNDANRRKAIEQYQREREAENRKFAEEIRRQYTAKTGREIEPSDDEVLKYRLWEEQQHICPYTGRQIRISDFIGANPGFDIEHTLPRAHGGDDSQMNKTLCENRFNRETKRVKLPAELSNHAEIMERIESFGWREKVESLQKQIEAQVRRSKGAATKPEKDSAIQRRHYLQMQLDYWRGKCERFTMTEIPEGFSNRQGVDIGIIGKYARLYLKTVFDRIYTVKGSSTAAFRKMWGLQEEYTRKERVNHVHHCIDAITIACIGRREYDRWAQYTADEERFNYGETDKPRFEKPWPTFTEDVKAVADELLVAHHTPDNMAKQTRKKLRVRGRVKLSADGKPIYQQGDTARCRLHQETFYGAIKREDEIRYVVRKSIKLLQPSDIDKIVDDAVRDRVRMAIDEVGFKTAINPDEYTIWMNREKGIPIRKVRIFTPGVTQPIALKKQRDLSDKEYKQDYHVANDGNYCMAVYEGKDKKGKLKRSFELVSNLEAAQYFKASADREACPDLVPQADANGFPLKCILKAGTLVLFYENSPAELCDCTPKELTKRLYKVTGFSTLTVSNNSYGRLALKHHQEARPAGELKAKSGVWKTNEEYRPVISILHTQLNAYVEGYDFELTVTGEIKFKHGRPC

SEQ ID NO: 19453 - protein, 1220 aa, unidentified
  REGION 1..1220: note = Cas Enzyme sequence
MEKILGVDLGTNSIGWAIVEDTDKGYILKDRGVDIFQEGVARDKNNEKPSVQDRTEARALRRHYFRRRLRKIELLRLLVKYGLCPYLTDEQLDLWRMKKQYPLDDGFLQWQRTDDNKDKNPYHDRYVALTQTLNLEKMEHRYMLGRAIYHLAQRRGFISNRKEVGKDKEDGVVKDGIKSLSTEMEKAGCHYIGEYFYKLYQHKGKIRGRYTSRNEHYRAEFDAIFERQQLPEEWRKNMYRAIFYQRPLKSQKGLVGKCTFEPKKSRCPVSHPRFEEFRMLSLMNNVRVTSPGEIEPRPLSQGEITTITPLFLRKSKPYFDFEEIARKIAGKGKYACRNDRNEAPYRFNYARTATVSGCPVTAAIVAVFGSDWISEICSLYRLGEGKTEEQVINDVWHALFSFDDETRLKTWAQENLQLTEEQAEDFASIRLPQDYAALSLNAINKILPYLRRGYRYDEAVFLANLKAALPHYIYEDGQRRGEIENDIANLLSSYRRNPYDKYDTKERRITDYFSDQGLDTSRIDRLYHPSMIDTYRRVMPDAEGCMQLGSPRTSSIRNPMAMRSLFRLRALINRLLRDGKIDRDTKINIEFARGLNDANRRKAIEQYQREREVENRRYADEIRKQYLTESGREIVPSEDDILKYRLWEEQQHICPYTGRQIGISDFIGSSPVFDIEHTVPRARGGDDSQMNKTLCDSRFNRERKRAKLPSELSSHVDILERIESLGWLKRVEDLQKQIEAQVRKSKGAATKTEKDGAIQRRHYLQMQLDYWRGKCERFTMTEVPDGFSNRQGVDIGIIGRYARLYLKTVFDRIYTVKGATTAAFRKMWGLQDEYSKKERTNHVHHCIDAITIACIGRKEYDRWAQYAADEERYNYGESCKPRFEKPWPTFTEDVKAVADELLVSHNTPDNMEKQTRKKMRVRGKVKFNSEGNPIYIQGDTARRKLHQDTFYGAIKREDEVKYVVRKSLGQLQQSDVDKIVDDAVKSRVKEAIREVGFAKAMDPEEYTIWMNEAKRIPIRKVRIFTPSITQPISLRKQRDLSDKEYKQDYHVANDGNYCMAVYEGQDKRGKTKRTFEIISNLEAAKYFKRSADRADRPDLVPMSDSNGYPLKCILKIGTMVLFYEKSPAELYECSRKDLVKRLYKVTAMAAEGRVQFLFHQEARDQVTLKDICGQGASQFRLSEPSPKLRLCVSNFNILVEGCDFELTVTGEIKFKHAMPC

SEQ ID NO: 19454 - protein, 992 aa, unidentified
  REGION 1..992: note = Cas Enzyme sequence
QLPDEWRKALHRAIFFQRDLKSQKGSVGRCTFEPTKSRCPVSHPRFEEFRMLSFVNNIRITGPGDNAPRPLTQEEFETIRSLFFRKSKPYFDFEEIARRIAGKGKYACKEERTEAPYRFNFARTATVSGCPVTASLQAIFGDDWITEIRSLYLLGAGKNEDQMLNDVWHALFSFNDEGRLRSWACEKLQLTDEQAKAFAAIKLPQDYAALSLNAIGKILVYLRCGYRYDEAVFLANLRAALPKEVYADESRRHEIEQDIASLLLDYKRNPYNKFDSKEHRIADYFSDHGLDASRLIRLYHPSKIETYPDAQPKANGILQLGSPRTATIRNPMAMRALFRLRNLINTLLREGRRDRATKIRIDGARGLNAANRRKAIEQYQREREVENRKYAEEIHSQYAAETGREIKPSDDEVLKYRLWEEQQHVCPYTGRQIRISDFVGSAPDFDIEHTLPQARGGDDSQMNKTLCENRFNRETKRAKLPAELSNHVEIMERIESFGWREKMESLQKQIEAQVRRSKSAAIKSEKDDAIQRRHYLQMQLDYWRGKYERFTMAEIPEGFSNRQGVDIGIIGKYARLYLKTVFDRIYTVKGSTTAAFRKMWGLQEEYARKERTNHVHHCIDAITIACIGRREYDRWAQYVADEERYGYGESGKPRFEKPWPTFTEDVKAAADELLVAHHTPDNMTKQTRRKLRVRGRIKLNADGEPIYQQGDTARCRLHQDTFYGAIKQDGEIRYVIRKSLAQLQPTDIDKIIDDAVRDRVREAIDEVGFKTAMNPDEYTIWMNREKGIPIRKVRIFTPSVKHPIALKKQRDLSAKEYKRDYHVVNEGNYCTVIYEGQDKKGKTKRTFELVSNLEAAQYFKASADREARPDLVPQTDTNGFPLKYILKTGTMVLFYENTPAELYECTRKELVKRLYKVTAMAAEGRVQFLFHQEARDQKTLTSLYGAGTSQFCQSNPSPKLRLSVSNFNMLVEGYDFELTVTGEIKFKDDRPC

SEQ ID NO: 19455 - protein, 1220 aa, unidentified
  REGION 1..1220: note = Cas Enzyme sequence
MAKVLGLDLGTNSLGWALVDESENEYTLIDKGVDIFQEGVARDKNNEKPAVQDRTSARALRRHYFRRRLRKIELLKILIRYDLCPPLPEELLTAWQKEKRYPQDNEFLRWQRTDDNGDRNPYHDRYVALSERLDLGNRTQRWLLGRALYHLAQRRGFLSNRKEAGNEKEDGTVKECIKNLSAEIAAAGCRYLGEYFYGLYQHKERTRDKYTSRNEHYLAEFNAICDRQQLPDEWRKALHRAIFFQRDLKSQKGSVGRCTFEPTKSRCPVSHPRFEEFRMLSFVNNIRITGPGDNAPRPLTQEEFETIRSLFFRKSKPYFDFEEIARRIAGKGKYACKEERTEAPYRFNFARTATVSGCPVTASLQAIFGDDWITEIRSLYLLGAGKNEDQMLNDVWHALFSFNDEGRLRSWACEKLQLTDEQAKAFAAIKLPQDYAALSLNAIGKILVYLRCGYRYDEAVFLANLRAALPKEVYADESRRHEIEQDIVSLLLDYKRNPYNKFDSKEHRIADYFSDHGLDASRLMRLYHPSKIETYPDAQPKANGILQLGSPRTATIRNPMAMRALFRLRNLINTLLREGRIDRDTKIRIEFARGLNDANRRKAIEQYQREREVENRKYAEEIHSQYAAETGREIKPSDDEVLKYRLWEEQQHVCPYTGRQIRISDFVGSAPDFDIEHTLPQARGGDDSQMNKTLCENRFNRETKRAKLPAELSNHVEIMERIESFGWREKMESLQKQIEAQVRRSKSAAIKSEKDDAIQRRHYLQMQLDYWRGKYERFTMAEIPEGFSNRQGVDIGIIGKYARLYLKTVFDRIYTVKGSTTAAFRKMWGLQEEYARKERTNHVHHCIDAITIACIGRREYDRWAQYVADEERYGYGESGKPRFEKPWPTFTEDVKAAADELLVAHHTPDNMTKQTRRKLRVRGRIKLNADGEPIYQQGDTARCRLHQDTFYGAIKQDGEIRYVIRKSLTQLQPTDIDKIIDDAVRDRVREAIDEVGFKTAMNPDEYTIWMNREKGIPIRKVRIFTPSVKHPIALKKQRDLSAKEYKRDYHVVNEGNYCTVIYEGQDKKGKTKRTFELVSNLEAAQYFKASADREARPDLVPQTDTNGFPLKCILKTGTMVLFYENSPAELYDCSHKELTKRLYKVTAMAAEGRVQFLFHQEARDQKTLTSLYGAGTSQFCQSNPSPKLRLSVSNFNMLVEGYDFELTVTGEIKFKDDRPC

SEQ ID NO: 19456 - protein, 1224 aa, unidentified
  REGION 1..1224: note = Cas Enzyme sequence
MTKVLGLDLGTNSLGWALVDESENGYALLDKGVAIFQEGVARDKNNEKPTVQDRTDARALRRHYFRRRLRKIDLLRVLVRYDLCPPLTDEQLSTWRQKKQYPLDEEFLRWQRTDDNEDRNPYHDRYVALTERLDLENRAQRWLLGRAFYHLAQRRGFLSNRKEAGNEKEDGTVKESIKNLSAEMEAAGCRYLGEYFYGLYQHKERIRGKYTSRNEHYLTEFNAICDRQQLPDKWRRALHRAIFFQRDLKSQKGSVGRCTFEPTKSRCPVSHPRFEEFRMWSFINNIRVTGPDDGTPRPLTPKEIETIRPLFFRKSKSYFDFEEIARRIAGKGKYACREERIEAPYRFNFARTATVSGCPVTASLMDIFGKEWLREIRSLYLLGDGKTEEQVLNDIWHALFSFKDEERLRDWACEKLQLSEEQAKAFAAIKLPQDYAAMSLNAINKILPYLRCGYRYDEAVFLANLRAALPKEVYADEDRRHNIEQEIASLLLDYKRNPYDKFDSKERRIANYFSDHGLDMSRLDRLYHPSKIETYPDTKPNAEGIMQLGSPRTSAIRNPMAMRALFRLRDLINTLLREGRIDRDTKIRIEFARGLNDANRRKAIEQYQREREAENRKFAEEIRRQYTAETGREIEPSDDEVLKYRLWEEQQHICPYTGRQIRISDFIGANPGFDIEHTLPRALGGDDSQMNKTLCENRFNRETKRAKLPAELSNHAEIMERIESFGWREKVESLQKQIEAQVRRSKGAATKPEKDSAIQRRHYLQMQLDYWRGKCERFTMTEIPEGFSNRQGVDIGIIGKYARLYLKTVFDRIYTVKGSTTAAFRKMWGLQEEYTRKERVNHIHHCIDAITIACIGRREYDRWAQYAADEERFNYGETDKPRFEKPWPTFTEDVKAVADELLVAHHTPDNMAKQTRKKLRVRGRVKLSADGKPIYQQGDTARCRLHQETFYGAIKREDEIRYVVRKSIKLLQPSDIDKIVDDAVRDRVRMAIDEVGFKTAINPDEYTIWMNREKGIPIRKVRIFTPGVTQPIALKKQRDLSDKEYKQDYHVANDGNYCMAVYEGKDKKGKLKRSFELVSNLEAAQYFKASADREACPDLVPLADANGFPLKCILKAGTLVLFYENSPAELCDCTPKELTKRLYKVTGFSTLTVSNNSYGRLALKHHQEARPAGELKAKSGVWKTNEEYRPVISILHTQLNAYVEGYDFELTVTGEIKFKHGRPC

SEQ ID NO: 19457 - protein, 1220 aa, unidentified
  REGION 1..1220: note = Cas Enzyme sequence
MAKVLGLDLGTNSLGWALVDESENEYTLIDKGVDIFQEGVARDKNNEKPAVQDRTSARALRRRYFRRRLRKIELLKILIRYDLCPPLPEELLTAWQKEKRYPQDNEFLRWQRTDDNGDRNPYHDRYVALSERLDLGNRTQRWLLGRALYHLAQRRGFLSNRKEAGNEKEDGTVKECIKNLSAEIAAAGCRYLGEYFYGLYQHKERIRDKYTSRNEHYLAEFNAICDRQQLPDEWRKALHRAIFFQRDLKSQKGSVGRCTFEPTKSRCPVSHPRFEEFRMLSFVNNIRITGPGDNAPRPLTQEEFETIRSLFFRKSKPYFDFEEIARRIAGKGKYACKEERTEAPYRFNFARTATVSGCPVTASLQAIFGDDWITEIRSLYLLGAGKNEDQMLNDVWHALFSFNDEGRLRSWACEKLQLTDEQAKAFAAIKLPQDYAALSLNAIGKILVYLRCGYRYDEAVFLANLRAALPKEVYADESRRHEIEQDIASLLLDYKRNPYNKFDSKEHRIADYFSDHGLDASRLIRLYHPSKIETYPDAQPKANGILQLGSPRTAAIRNPMAMRALFRLRNLINTLLREGRIDRDTKIRIEFARGLNDANRRKAIEQYQREREVENRKYAEEIHSQYAAETGREIKPSDDEVLKYRLWEEQQHVCPYTGRQIRISDFVGSAPDFDIEHTLPQARGGDDSQMNKTLCENRFNRETKRAKLPAELSNHVEIMERIESFGWREKMESLQKQIEAQVRRSKSAAIKSEKDDAIQRRHYLQMQLDYWRGKYERFTMAEIPEGFSNRQGVDIGIIGKYARLYLKTVFDRIYTVKGSTTAAFRKMWGLQEEYARKERTNHVHHCIDAITIACIGRREYDRWAQYVADEERYGYGESGKPRFEKPWPTFTEDVKAAADELLVAHHTPDNMTKQTRRKLRVRGRIKLNADGEPIYQQGDTARCRLHQDTFYGAIKQDGEIRYVIRKSLAQLQPTDIDKIIDDAVRDRVREAIDEVGFKTAMNPDEYTIWMNREKGIPIRKVRIFTPSVKHPIALKKQRDLSAKEYKRDYHVVNEGNYCTVIYEGQDKKGKTKRTFELVSNLEAAQYFKASADREARPDLVPQTDTNGFPLKYILKTGTMVLFYENTPAELYECTRKELVKRLYKVTAMAAEGRVQFLFHQEARDQKTLTSLYGAGTSQFCQSNPSPKLRLSVSNFNMLVEGYDFELTVTGEIKFKDDRPC

SEQ ID NO: 19458 - protein, 1220 aa, unidentified
  REGION 1..1220: note = Cas Enzyme sequence
MAKVLGLDLGTNSLGWALVDESENEYTLIDKGVDIFQEGVARDKNNEKPAVQDRTSARALRRHYFRRRLRKIELLKILIRYDLCPPLPEELLTAWQKEKRYPQDNEFLRWQRTDDNGDRNPYHDRYVALSERLDLGNRTQRWLLGRALYHLAQRRGFLSNRKEAGNEKEDGTVKECIKNLSAEIAAAGCRYLGEYFYGLYQHKERIRDKYTSRNEHYLAEFNAICDRQQLPDEWRKALHRAIFFQRDLKSQKGSVGRCTFEPTKSRCPVSHPRFEEFRMLSFVNNIRITGPGDNAPRPLTQEEFETIRSLFFRKSKPYFDFEEIARRIAGKGKYACKEERTEAPYRFNFARTATVSGCPVTASLQAIFGDDWITEIRSLYLLGAGKNEDQMLNDVWHALFSFNDEGRLRSWACEKLQLTDEQAKAFAAIKLPQDYAALSLNAIGKILVYLRCGYRYDEAVFLANLRAALPKEVYADESRRHEIEQDIASLLLDYKRNPYNKFDSKEHRIADYFSDHGLDASRLIRLYHPSKIETYPDAQPKANGILQLGSPRTATIRNPMAMRALFRLRNLINTLLREGRIDRDTKIRIEFARGLNDANRRKAIEQYQREREVENRKYAEEIHSQYAAETGREIKPSDDEVLKYRLWEEQQHVCPYTGRQIRISDFVGSAPDFDIEHTLPQARGGDDSQMNKTLCENRFNRETKRAKLPAELSNHVEIMERIESFGWREKMESLQKQIEAQVRRSKSAAIKSEKDDAIQRRHYLQMQLDYWRGKYERFTMAEIPEGFSNRQGVDIGIIGKYARLYLKTVFDRIYTVKGSTTAAFRKMWGLQEEYARKERTNHVHHCIDAITIACIGRREYDRWAQYVADEERYGYGESGKPRFEKPWPTFTEDVKAAADELLVAHHTPDNMTKQTRRKLRVRGRIKLNADGEPIYQQGDTARCRLHQDTFYGAIKQDGEIRYVIRKSLAQLQPTDIDKIIDDAVRDRVREAIDEVGFKTAMNPDEYTIWMNREKGIPIRKVRIFTPSVKHPIALKKQRDLSAKEYKRDYHVVNEGNYCTVIYEGQDKKGKTKRTFELVSNLEAAQYFKASADREARPDLVPQTDTNGFPLKYILKTGTMVLFYENTPAELYECTRKELVKRLYKVTAMAAEGRVQFLFHQEARDQKTLTSLYGAGTSQFCQSNPSPKLRLSVSNFNMLVEGYDFELTVTGEIKFKDDRPC

SEQ ID NO: 19459 - protein, 1221 aa, unidentified
  REGION 1..1221: note = Cas Enzyme sequence
MAKVLGLDLGTNSLGWALVDESENEYTLIDKGVDIFQEGVARDKNNEKPAVQDRTSARALRRRYFRRRLRKIELLKILIRYDLCPPLPEELLTAWQKEKRYPQDNEFLRWQRTDDNGDRNPYHDRYVALSERLDLGNRTQRWLLGRALYHLAQRRGFLSNRKEAGNEKEDGTVKECIKNLSAEIAAAGCRYLGEYFYGLYQHKERIRDKYTSRNEHYLAEFNAICDRQQLPDEWRKALHRAIFFQRDLKSQKGSVGRCTFEPTKSRCPVSHPRFEEFRMLSFVNNIRITGPGDNAPRPLTQEEFETIRSLFFRKSKPYFDFEEIARRIAGKGKYACKEERTEAPYRFNFARTATVSGCPVTASLQAIFGDDWITEIRSLYLLGAGKNEDQMLNDVWHALFSFNDEGRLRSWACEKLQLTDEQAKAFAAIKLPQDYAALSLNAIGKILVYLRCGYRYDEAVFLANLRAALPKEVYADESRRHEIEQDIASLLLDYKRNPYNKFDSKEHRIADYFSDHGLDASRLIRLYHPSKIETYPDAQPKANGILQLGSPRTATIRNPMAMRALFRLRNLINTLLREGRIDRDTKIRIEFARGLNDANRRKAIEQYQREREVENRKYAEEIHSQYAAETGREIKPSDDEVLKYRLWEEQQHVCPYTGRQIRISDFVGSAPDFDIEHTLPQARGGDDSQMNKTLCENRFNRETKRAKLPAELSNHVEIMERIESFGWREKMESLQKQIEAQVRRSKSAAIKSEKDDAIQRRHYLQMQLDYWRGKYERFTMAEIPEGFSNRQGVDIGIIGKYARLYLKTVFDRIYTVKGSTTAAFRKMWGLQEEYARKERTNHVHHCIDAITIACIGRREYDRWAQYVADEERYGYGESGKPRFEKPWPTFTEDVKAAADELLVAHHTPDNMAKQTRKKLRVRGRIKLNADGEPIYQQGDTARCRLHQDTFYGAIKQDGEIRYVIRKSLAQLQPTDIDKIIDDAVRDRVREAIDEVGFKTAMNPDEYTIWMNREKGISIRKVRIFVRKTTLIPLGNKQHRDRSDKEYKRKYLVANEGNYCMAVYEGKDKKGRTDHSFEIISNLQAAEYFKRSTDRNERHDLAPVADTNGYPLKYLLKTGSMVLFYENTPAELYECTRKELVKRLYKVTAMAAEGRVQFLFHQEARDQKTLTSLYGAGTSQFCQSNPSPKLRLSVSNFNMLVEGYDFELTVTGEIKFKDDRPC

SEQ ID NO: 19460 - protein, 1220 aa, unidentified
  REGION 1..1220: note = Cas Enzyme sequence
MAKVLGLDLGTNSLGWALVDESENEYTLIDKGVDIFQEGVARDKNNEKPAVQDRTSARALRRHYFRRRLRKIELLKILIRYDLCPPLPEELLTAWQKEKRYPQDNEFLRWQRTDDNGDRNPYHDRYVALSERLDLGNRTQRWLLGRALYHLAQRRGFLSNRKEAGNEKEDGTVKECIKNLSAEIAAAGCRYLGEYFYGLYQHKERIRDKYTSRNEHYLAEFNAICDRQQLPDEWRKALHRAIFFQRDLKSQKGSVGRCTFEPTKSRCPVSHPRFEEFRMLSFVNNIRITGPGDNAPRPLTQEEFETIRSLFFRKSKPYFDFEEIARRIAGKGKYACKEERTEAPYRFNFARTATVSGCPVTASLQAIFGDDWITEIRSLYLLGAGKNEDQMLNDVWHALFSFNDEGRLRSWACEKLQLTDEQAKAFAAIKLPQDYAALSLNAIGKILVYLRCGYRYDEAVFLANLRAALPKEVYADESRRHEIEQDIVSLLLDYKRNPYNKFDSKEHRIADYFSDHGLDASRLMRLYHPSKIETYPDAQPKANGILQLGSPRTATIRNPMAMRALFRLRNLINTLLREGRIDRDTKIRIEFARGLNDANRRKAIEQYQREREVENRKYAEEIHSQYAAETGREIKPSDDEVLKYRLWEEQQHVCPYTGRQIRISDFVGSAPDFDIEHTLPQARGGDDSQMNKTLCENRFNRETKRAKLPAELSNHVEIMERIESFGWREKMESLQKQIEAQVRRSKSAAIKSEKDDAIQRRHYLQMQLDYWRGKYERFTMAEIPEGFSNRQGVDIGIIGKYARLYLKTVFDRIYTVKGSTTAAFRKMWGLQEEYARKERTNHVHHCIDAITIACIGRREYDRWAQYVADEERYGYGESGKPRFEKPWPTFTEDVKAAADELLVAHHTPDNMTKQTRRKLRVRGRIKLNADGEPIYQQGDTARCRLHQDTFYGAIKQDGEIRYVIRKSLAQLQPTDIDKIIDDAVRDRVREAIDKVGFKTAMNPDEYTIWMNREKGIPIRKVRIFTPSVKHPIALKKQRDLSAKEYKRDYHVVNEGNYCTVIYEGQDKKGKTKRTFELVSNLEAAQYFKASADREARPDLVPQTDTNGFPLKYILKTGTMVLFYENTPAELYECTRKELVKRLYKVTAMAAEGRVQFLFHQEARDQKTLTSLYGAGTSQFCQSNPSPKLRLSVSNFNMLVEGYDFELTVTGEIKFKDDRPC

SEQ ID NO: 19461 - protein, 1221 aa, unidentified; identical to SEQ ID NO: 19036
  REGION 1..1221: note = Cas Enzyme sequence

SEQ ID NO: 19462 - protein, 1220 aa, unidentified; identical to SEQ ID NO: 19034
  REGION 1..1220: note = Cas Enzyme sequence

SEQ ID NO: 19463 - protein, 1220 aa, unidentified
  REGION 1..1220: note = Cas Enzyme sequence
MAKVLGLDLGTNSLGWALVDESENEYTLIDKGVDIFQEGVARDKNNEKPAVQDRTSARALRRHYFRRRLRKIELLKILIRYDLCPPLPEELLTAWQKEKRYPQDNEFLRWQRTDDNGDRNPYHDRYVALSERLDLGNRTQRWLLGRALYHLAQRRGFLSNRKEAGNEKEDGTVKECIKNLSAEIAAAGCRYLGEYFYGLYQHKERIRDKYTSRNEHYLAEFNAICDRQQLPDEWRKALHRAIFFQRDLKSQKGSVGRCTFEPTKSRCPVSHPRFEEFRMLSFVNNIRITGPGDNAPRPLTQEEFETIRSLFFRKSKPYFDFEEIARRIAGKGKYACKEERTEAPYRFNFARTATVSGCPVTASLQAIFGDDWITEIRSLYLLGAGKNEDQMLNDVWHALFSFNDEGRLRSWACEKLQLTDEQAKAFAAIKLPQDYAALSLNAIGKILVYLRCGYRYDEAVFLANLRAALPKEVYADESRRHEIEQDIASLLLDYKRNPYNKFDSKEHRIADYFSDHGLDASRLIRLYHPSKIETYPDAQPKANGILQLGSPRTATIRNPMAMRALFRLRNLINTLLREGRIDRDTKIRIEFARGLNDANRRKAIEQYQREREVENRKYAEEIHSQYAAETGREIKPSDDEVLKYRLWEEQQHVCPYTGRQIRISDFVGSAPDFDIEHTLPQARGGDDSQMNKTLCENRFNRETKRAKLPAELSNHVEIMERIESFGWREKMESLQKQIEAQVRRSKSAAIKSEKDDAIQRRHYLQMQLDYWRGKYERFTMAEIPEGFSNRQGVDIGIIGKYARLYLKTVFDRIYTVKGSTTAAFRKMWGLQEEYARKERTNHVHHCIDAITIACIGRREYDRWAQYVADEERYGYGESGKPRFEKPWPTFTEDVKAAADELLVAHHTPDNMTKQMRRKLRVRGRIKLNADGEPIYQQGDTARCRLHQDTFYGAIKQDGEIRYVIRKSLAQLQPTDIDKIIDDAVRDRVREAIDKVGFKTAMNPDEYTIWMNREKGIPIRKVRIFTPSVKHPIALKKQRDLSAKEYKRDYHVVNEGNYCTVIYEGQDKKGKTKRTFELVSNLEAAQYFKASADREARPDLVPQTDTNGFPLKYILKTGTMVLFYENTPAELYECTRKELVKRLYKVTAMAAEGRVQFLFHQEARDQKTLTSLYGAGTSQFCQSNPSPKLRLSVSNFNMLVEGYDFELTVTGEIKFKDDRPC

SEQ ID NO: 19464 - protein, 952 aa, unidentified
  REGION 1..952: note = Cas Enzyme sequence
VSHPRFEEFRMLSFVNNIRITGPGDNAPRPLTQEEFETIRSLFFRKSKPYFDFEEIARRIAGKGKYACKEERTEAPYRFNFARTATVSGCPVTASLQAIFGDDWITEIRSLYLLGAGKNEDQMLNDVWHALFSFNDEGRLRSWACEKLQLTDEQAKAFAAIKLPQDYAALSLNAIGKILVYLRCGYRYDEAVFLANLRAALPKEVYADESRRHEIEQDIASLLLDYKRNPYNKFDSKEHRIADYFSDHGLDASRLIRLYHPSKIETYPDAQPKANGILQLGSPRTATIRNPMAMRALFRLRNLINTLLREGRIDRDTKIRIEFARGLNDANRRKAIEQYQREREVENRKYAEEIHSQYAAETGREIKPSDDEVLKYRLWEEQQHVCPYTGRQIRISDFVGSAPDFDIEHTLPQARGGDDSQMNKTLCENRFNRETKRAKLPAELSNHVEIMERIESFGWREKMESLQKQIEAQVRRSKSAAIKSEKDDAIQRRHYLQMQLDYWRGKYERFTMAEIPEGFSNRQGVDIGIIGKYARLYLKTVFDRIYTVKGSTTAAFRKMWGLQEEYARKERTNHVHHCIDAITIACIGRREYDRWAQYVADEERYGYGESGKPRFEKPWPTFTEDVKAAADELLVAHHTPDNMTKQTRRKLRVRGRIKLNADGEPIYQQGDTARCRLHQDTFYGAIKQDGEIRYVIRKSLAQLQPTDIDKIIDDAVRDRVREAIDEVGFKTAMNPDEYTIWMNREKGIPIRKVRIFTPSVKHPIALKKQRDLSAKEYKRDYHVVNEGNYCTVIYEGQDKKGKTKRTFELVSNLEAAQYFKASADREARPDLVPQTDTNGFPLKYILKTGTMVLFYENTPAELYECTRKELVKRLYKVTAMAAEGRVQFLFHQEARDQKTLTSLYGAGTSQFCQSNPSPKLRLSVSNFNMLVEGYDFELTVTGEIKFKDDRPC

SEQ ID NO: 19465 - protein, 1220 aa, unidentified
  REGION 1..1220: note = Cas Enzyme sequence
MAKVLGLDLGTNSLGWALVDESENEYTLIDKGVDIFQEGVARDKNNEKPAVQDRTSARALRRRYFRRRLRKIELLKILIRYDLCPPLPEELLTAWQKEKRYPQDNEFLRWQRTDDNGDRNPYHDRYVALSERLDLGNRTQRWLLGRALYHLAQRRGFLSNRKEAGNEKEDGTVKECIKNLSAEIAAAGCRYLGEYFYGLYQHKERIRDKYTSRNEHYLAEFNAICDRQQLPDEWRKALHRAIFFQRDLKSQKGSVGRCTFEPTKSRCPVSHPRFEEFRMLSFVNNIRITGPGDNAPRPLTQEEFETIRSLFFRKSKPYFDFEEIARRIAGKGKYACKEERTEAPYRFNFARTATVSGCPVTASLQAIFGDDWITEIRSLYLLGAGKNEDQMLNDVWHALFSFNDEGRLRSWACEKLQLTDEQAKAFAAIKLPQDYAALSLNAIGKILVYLRCGYRYDEAVFLANLRAALPKEVYADESRRHEIEQDIASLLLDYKRNPYNKFDSKEHRIADYFSDHGLDASRLIRLYHPSKIETYPDAQPKANGILQLGSPRTAAIRNPMAMRALFRLRNLINTLLREGRIDRDTKIRIEFARGLNDANRRKAIEQYQREREVENRKYAEEIHSQYAAETGREIKPSDDEVLKYRLWEEQQHVCPYTGRQIRISDFVGSAPDFDIEHTLPQARGGDDSQMNKTLCENRFNRETKRAKLPAELSNHVEIMERIESFGWREKMESLQKQIEAQVRRSKSAAIKSEKDDAIQRRHYLQMQLDYWRGKYERFTMAEIPEGFSNRQGVDIGIIGKYARLYLKTVFDRIYTVKGSTTAAFRKMWGLQEEYARKERTNHVHHCIDAITIACIGRREYDRWAQYVADEERYGYGESGKPRFEKPWPTFTEDVKAAADELLVAHHTPDNMAKQTRRKLRVRGRIKLNADGEPIYQQGDTARCRLHQDTFYGAIKQDGEIRYVLRKSLAQLQPTDIDKIIDDAVRDRVREAIDEVGFKTAMNPDEYTIWMNREKGIPIRKVRIFTPSVKHPIALKKQRDLSAKEYKRDYHVVNEGNYCTVIYEGQDKKGKTKRTFELVSNLEAAQYFKASADREARPDLIPQTDTNGFPLKYILKTGTMVLFYENTPAELYECTRKELVKRLYKVTAMAAEGRVQFLFHQEARDQKTLTSLYGAGTSQFCQSNPSPKLRLSVSNFNMLVEGYDFELTVTGEIKFKDDRPC

SEQ ID NO: 19466 - protein, 1220 aa, unidentified
  REGION 1..1220: note = Cas Enzyme sequence
MAKVLGLDLGTNSLGWALVDESENEYTLIDKGVDIFQEGVARDKNNEKPAVQDRTSARALRRHYFRRRLRKIELLKILIRYDLCPPLPEELLTAWQKEKRYPQDNEFLRWQRTDDNGDRNPYHDRYVALSERLDLGNRTQRWLLGRALYHLAQRRGFLSNRKEAGNEKEDGTIKECIKNLSAEIAAAGCRYLGEYFYGLYQHKERIRDKYTSRNEHYLAEFNAICDRQQLPDEWRKALHRAIFFQRDLKSQKGSVGRCTFEPTKSRCPVSHPRFEEFRMLSFVNNIRITGPGDNAPRPLTQEEFETIRSLFFRKSKPYFDFEEIARRIAGKGKYACKEERTEAPYRFNFARTATVSGCPVTASLQAIFGDDWITEIRSLYLLGAGKNEDQMLNDVWHALFSFNDEGRLRSWACEKLQLTDEQAKAFAAIKLPQDYAALSLNAIGKILVYLRCGYRYDEAVFLANLRAALPKEVYADESRRHEIEQDIASLLLDYKRNPYNKFDSKEHRIADYFSDHGLDASRLIRLYHPSKIETYPDAQPKANGILQLGSPRTATIRNPMAMRALFRLRNLINTLLREGRIDRDTKIRIEFARGLNDANRRKAIEQYQREREVENRKYAEEIHSQYAAETGREIKPSDDEVLKYRLWEEQQHVCPYTGRQIRISDFVGSAPDFDIEHTLPQARGGDDSQMNKTLCENRFNRETKRAKLPAELSNHVEIMERIESFGWREKMESLQKQIEAQVRRSKSAAIKSEKDDAIQRRHYLQMQLDYWRGKYERFTMAEIPEGFSNRQGVDIGIIGKYARLYLKTVFDRIYTVKGSTTAAFRKMWGLQEEYARKERTNHVHHCIDAITIACIGRREYDRWAQYVADEERYGYGESGKPRFEKPWPTFTEDVKAVAEELLVAHHTPDNMAKQTRRKLRVRGRIKLNADGEPIYQQGDTARCRLHQDTFYGAIKQDGEIHYVIRKSLAQLQPTDIDKIIDDAVRDRVREAIDEVGFKTAMNPDEYTIWMNREKGIPIRKVRIFTPSVKHPIALKKQRDLSAKEYKRDYHVVNEGNYCTVIYEGQDKKGKTKRTFELVSNLEAAQYFKASADREARPDLVPQTDTNGFPLKYILKTGTMVLFYENTPAELYECTRKELVKRLYKVTAMAAEGRVQFLFHQEARDQKTLTSLYGAGTSQFCQSNPSPKLRLSVSNFNMLVEGYDFELTVTGEIKFKDDRPC

SEQ ID NO: 19467 - protein, 1220 aa, unidentified; identical to SEQ ID NO: 19024
  REGION 1..1220: note = Cas Enzyme sequence

SEQ ID NO: 19468 - protein, 1220 aa, unidentified; identical to SEQ ID NO: 19458
  REGION 1..1220: note = Cas Enzyme sequence

SEQ ID NO: 19469 - protein, 1220 aa, unidentified
  REGION 1..1220: note = Cas Enzyme sequence
MAKVLGLDLGTNSLGWALVDESENEYTLIDKGVDIFQEGVARDKNNEKPAVQDRTSARALRRHYFRRRLRKIELLKILIRYDLCPPLPEELLTAWQKEKRYPQDNEFLRWQRTDDNGDRNPYHDRYVALSERLDLGNRTQRWLLGRALYHLAQRRGFLSNRKEAGNEKEDGTVKECIKNLSAEIAAAGCRYLGEYFYGLYQHKERIRDKYTSRNEHYLAEFNAICDRQQLPDEWRKALHRAIFFQRDLKSQKGSVGRCTFEPTKSRCPVSHPRFEEFRMLSFVNNIRITGPGDNAPRPLTQEEFETIRSLFFRKSKPYFDFEEIARRIAGKGKYACKEERTEAPYRFNFARTATVSGCPVTASLQAIFGDDWITEIRSLYLLGAGKNEDQMLNDVWHALFSFNDEGRLRSWACEKLQLTDEQAKAFAAIKLPQDYAALSLNAIGKILVYLRCGYRYDEAVFLANLRAALPKEVYADENRRHEIEQDIASLLLDYKRNPYNKFDSKEHRIADYFSDHGLDASRLMRLYHPSKIETYPDAQPKANGILQLGSPRTATIRNPMAMRALFRLRNLINTLLREGRIDRDTKIRIEFARGLNDANRRKAIEQYQREREVENRKYAEEIHSQYAAETGREIKPSDDEVLKYRLWEEQQHVCPYTGRQIRISDFVGSAPDFDIEHTLPQARGGDDSQMNKTLCENRFNRETKRAKLPAELSNHVEIMERIESFGWREKMESLQKQIEAQVRRSKSAAIKSEKDDAIQRRHYLQMQLDYWRGKYERFTMAEIPEGFSNRQGVDIGIIGKYARLYLKTVFDRIYTVKGSTTAAFRKMWGLQEEYARKERTNHVHHCIDAITIACIGRREYDRWAQYVADEERYGYGESGKPRFEKPWPTFTEDVKAAADELLVAHHTPDNMAKQTRRKLRVRGRIKLNADGEPIYQQGDTARCRLHQDTFYGAIKQDGEIRYVIRKSLAQLQPTDIDKIIDDAVRDRVREAIDEVGFKTAMNPDEYTIWMNREKGIPIRKVRIFTPSVKHPIALKKQRDLSAKEYKRDYHVVNEGNYCSVIYEGQDKKGKTKRTFELVSNLEAAQYFKASADREARPDLVPQTDTNGFPLKCILKTGTMVLFYENSPAELYECTRKELVKRLYKVTAMAAEGRVQFLFHQEARDQKTLTSLYGAGTSQFCQSNPSPKLRLSVSNFNMLVEGYDFELTVTGEIKFKDDRPC

SEQ ID NO: 19470 - protein, 998 aa, unidentified
  REGION 1..998: note = Cas Enzyme sequence
AICDRQQLPDEWRKALHRAIFFQRDLKSQKGSVGRCTFEPTKSRGPVSHPRFEEFRMLSFVNNIRITGPGDNAPRPLTQEEFETIRSLFFRKSKPYFDFEEIARRIAGKGKYACKEERTEAPYRFNFARTATVSGCPVTASLQAIFGDDWITEIRSLYLLGAGKNEDQMLNDVWHALFSFNDEGRLRSWACEKLQLTDEQAKAFAAIKLPQDYAALSLNAIGKILVYLRCGYRYDEAVFLANLRAALPKEVYADESRRHEIEQDIASLLLDYKRNPYNKFDSKEHRIADYFSDHGLDASRLMRLYHPSKIETYPDAQPKANGILQLGSPRTAAIRNPMAMRALFRLRNLINTLLREGRIDRDTKIRIEFARGLNDANRRKAIEQYQREREVENRKYAEEIHSQYAAETGREIKPSDDEVLKYRLWEEQQHVCPYTGRQIRISDFVGSAPDFDIEHTLPQARGGDDSQMNKTLCENRFNRETKRAKLPAELSNHVEIMERIESFGWREKMESLQKQIEAQVRRSKSAAIKSEKDDAIQRRHYLQMQLDYWRGKYERFTMAEIPEGFSNRQGVDIGIIGKYARLYLKTVFDRIYTVKGSTTAAFRKMWGLQEEYARKERTNHVHHCIDAITIACIGRREYDRWAQYVADEERYGYGESGKPRFEKPWPTFTEDVKAVADELLVAHHTPDNMAKQTRRKLRVRGRIKLNADGEPIYQQGDTARCRLHQDTFYGAIKQDGEIRYVIRKSLAQLQPTDIDKIIDDAVRDRVREAIDEVGFKTAMNPDEYTIWMNREKGIPIRKVRIFTPSVKHPIALKKQRDLSAKEYKRDYHVVNEGNYCTVIYEGQDKKGKTKRTFELVSNLEAAQYFKASADREARPDLVPQTDTNGFPLKYILKTGTMVLFYENSPAELYDCSHKELTKRLYKVTAMAAEGRVQFLFHQEARDQKTLTSLYGAGTSQFCQSNPSPKLRLSVSNFNMLVEGYDFELTVTGEIKFKDDRPC

SEQ ID NO: 19471 - protein, 1220 aa, unidentified
  REGION 1..1220: note = Cas Enzyme sequence
MAKVLGLDLGTNSLGWALVDESENEYTLIDKGVDIFQEGVARDKNNEKPAVQDRTSARALRRHYFRRRLRKIELLKILIRYDLCPPLPEELLTAWQKEKRYPQDNEFLRWQRTDDNGDRNPYHDRYVALSERLDLGNRTQRWLLGRALYHLAQRRGFLSNRKEAGNEKEDGTVKECIKNLSAEIAAAGCRYLGEYFYGLYQHKERIRDKYTSRNEHYLAEFNAICDRQQLPDEWRKALHRAIFFQRDLKSQKGSVGRCTFEPTKSRCPVSHPRFEEFRMLSFVNNIRITGPGDNAPRPLTQEEFETIRSLFFRKSKPYFDFEEIARRIAGKGKYACKEERTEAPYRFNFARTATVSGCPVTASLQAIFGDDWITEIRSLYLLGAGKNEDQMLNDVWHALFSFNDEGRLRSWACEKLQLTDEQAKAFAAIKLPQDYAALSLNAIGKILVYLRCGYRYDEAVFLANLRAALPKEVYADESRRHEIEQDIVSLLLDYKRNPYNKFDSKEHRIADYFSDHGLDASRLMRLYHPSKIETYPDAQPKANGILQLGSPRTATIRNPMAMRALFRLRNLINTLLREGRIDRDTKIRIEFARGLNDANRRKAIEQYQREREVENRKYAEEIHSQYAAETGREIKPSDDEVLKYRLWEEQQHVCPYTGRQIRISDFVGSAPDFDIEHTLPQARGGDDSQMNKTLCENRFNRETKRAKLPAELSNHVEIMERIESFGWREKMESLQKQIEAQVRRSKSAAIKSEKDDAIQRRHYLQMQLDYWRGKYERFTMAEIPEGFSNRQGVDIGIIGKYARLYLKTVFDRIYTVKGSTTAAFRKMWGLQEEYARKERTNHVHHCIDAITIACIGRREYDRWAQYVADEERYGYGESGKPRFEKPWPTFTEDVKAAADELLVAHHTPDNMTKQTRRKLRVRGRIKLNADGEPIYQQGDTARCRLHQDTFYGAIKQDGEIRYVIRKSLAQLQPTDIDKIIDDAVRDRVREAIDEVGFKTAMNPDEYTIWMNREKGIPIRKVRIFTPSVKHPIALKKQRDLSAKEYKRDYHVVNEGNYCTVIYEGQDKKGKTKRTFELVSNLEAAQYFKASADREARPDLVPQTDTNGFPLKYILKTGTMVLFYENTPAELYECTRKELVKRLYKVTAMAAEGRVQFLFHQEARDQKTLTSLYGAGTSQFCQSNPSPKLRLSVSNFNMLVEGYDFELTVTGEIKFKDDRPC

SEQ ID NO: 19472 - protein, 1113 aa, unidentified
  REGION 1..1113: note = Cas Enzyme sequence
  REGION 59..62: note = misc_feature - Xaa can be any naturally occurring amino acid
  REGION 1063..1066: note = misc_feature - Xaa can be any naturally occurring amino acid
MAKVLGLDLGTNSLGWALVDESENEYTLIDKGVDIFQEGVARDKNNEKPAVQDRTSARXXXXRHYFRRRLRKIELLKILIRYDLCPPLPEELLTAWQKEKRYPQDNEFLRWQRTDDNGDRNPYHDRYVALSERLDLGNRTQRWLLGRALYHLAQRRGFLSNRKEAGNEKEDGTVKECIKNLSAEIAAAGCRYLGEYFYGLYQHKERIRDKYTSRNEHYLAEFNAICDRQQLPDEWRKALHRAIFFQRDLKSQKGSVGRCTFEPTKSRCPVSHPRFEEFRMLSFVNNIRITGPGDNAPRPLTQEEFETIRSLFFRKSKPYFDFEEIARRIAGKGKYACKEERTEAPYRFNFARTATVSGCPVTASLQAIFGDDWITEIRSLYLLGAGKNEDQMLNDVWHALFSFNDEGRLRSWACEKLQLTDEQAKAFAAIKLPQDYAALSLNAIGKILVYLRCGYRYDEAVFLANLRAALPKEVYADESRRHEIEQDIVSLLLDYKRNPYNKFDSKEHRIADYFSDHGLDASRLMRLYHPSKIETYPDAQPKANGILQLGSPRTATIRNPMAMRALFRLRNLINTLLREGRIDRDTKIRIEFARGLNDANRRKAIEQYQREREVENRKYAEEIHSQYAAETGREIKPSDDEVLKYRLWEEQQHVCPYTGRQIRISDFVGSAPDFDIEHTLPQARGGDDSQMNKTLCENRFNRETKRAKLPAELSNHVEIMERIESFGWREKMESLQKQIEAQVRRSKSAAIKSEKDDAIQRRHYLQMQLDYWRGKYERFTMAEIPEGFSNRQGVDIGIIGKYARLYLKTVFDRIYTVKGSTTAAFRKMWGLQEEYARKERTNHVHHCIDAITIACIGRREYDRWAQYVADEERYGYGESGKPRFEKPWPTFTEDVKAAADELLVAHHTPDNMAKQTRKKLRVRGRIKLNADGEPIYQQGDTARCRLHQDTFYGAIKQDGEIRYVIRKSLAQLQPTDIDKIIDDAVRDRVREAIDEVGFKTAMNPDEYTIWMNREKGIPIRKVRIFTPSVKHPIALKKQRDLSAKEYKRDYHVVNEGNYCTVIXXXXRARTKRAKRNAPLNSSATSKLPNISKPALTGKPAPIWYRRPTRTVSP

SEQ ID NO: 19473 - protein, 1113 aa, unidentified
  REGION 1..1113: note = Cas Enzyme sequence
  REGION 1095..1098: note = misc_feature - Xaa can be any naturally occurring amino acid
MAKVLGLDLGTNSLGWALVDESENEYTLIDKGVDIFQEGVARDKNNEKPAVQDRTSARALRRHYFRRRLRKIELLKILIRYDLCPPLPEELLTAWQKEKRYPQDNEFLRWQRTDDNGDRNPYHDRYVALSERLDLGNRTQRWLLGRALYHLAQRRGFLSNRKEAGNEKEDGTVKECIKNLSAEIAAAGCRYLGEYFYGLYQHKERIRDKYTSRNEHYLAEFNAICDRQQLPDEWRKALHRVIFFQRDLKSQKGSVGRCTFEPTKSRCPVSHPRFEEFRMLSFVNNIRITGPGDNAPRPLTQEEFETIRSLFFRKSKPYFDFEEIARRIAGKGKYACKEERTEAPYRFNFARTATVSGCPVTASLQAIFGDDWITEIRSLYLLGAGKNEDQMLNDVWHALFSFNDEGRLRSWACEKLQLTDEQAKAFAAIKLPQDYAALSLNAIGKILVYLRCGYRYDEAVFLANLRAALPKEVYADESRRHEIEQDIASLLLDYKRNPYNKFDSKEHRIADYFSDHGLDASRLMRLYHPSKIETYPDAQPKANGILQLGSPRTATIRNPMAMRALFRLRNLINTLLREGRIDRDTKIRIEFARGLNDANRRKAIEQYQREREVENRKYAEEIHSQYAAETGREIKPSDDEVLKYRLWEEQQHVCPYTGRQIRISDFVGSAPDFDIEHTLPQARGGDDSQMNKTLCENRFNRETKRAKLPAELSNHVEIMERIESFGWREKMESLQKQIEAQVRRSKSAAIKSEKDDAIQRRHYLQMQLDYWRGKYERFTMAEIPEGFSNRQGVDIGIIGKYARLYLKTVFDRIYTVKGSTTAAFRKMWGLQEEYARKERTNHVHHCIDAITIACIGRREYDRWAQYVADEERYGYGESGKPRFEKPWPTFTEDVKAAADELLVAHHTPDNMAKQTRRKLRVRGRIKLNADGEPIYQQGDTARCRLHQDTFYGAIKQDGEIRYVIRKSLAQLQPTDIDKIIDDAVRDRVREAIDEVGFKTAMNPDEYTIWMNREKGIPIRKVRIFTPSVKHPIALKKQRDLSAKEYKRDYHVVNEGNYCTVIYEGQDKKGKTKRTFELVSNLEAAQYFKASVDREXXXXPAPIWYRRPTRTVSP

SEQ ID NO: 19474 - protein, 922 aa, unidentified
  REGION 1..922: note = Cas Enzyme sequence
LTQEEFETIRSLFFRKSKPYFDFEEIARRIAGKGKYACKEERTEAPYRFNFARTATVSGCPVTASLQAIFGDDWITEIRSLYLLGAGKNEDQMLNDVWHALFSFNDEGRLRSWACEKLQLTDEQAKAFAAIKLPQDYAALSLNAIGKILVYLRCGYRYDEAVFLANLRAALPKEVYADESRRHEIEQDIASLLLDYKRNPYNKFDSKEHRIADYFSDHGLDASRLIRLYHPSKIETYPDAQPKANGILQLGSPRTATIRNPMAMRALFRLRSLINTLLREGRIDRDTKIRIEFARGLNDANRRKAIEQYQREREVENRKYAEEIHSQYAAETGREIKPSDDEVLKYRLWEEQQHVCPYTGRQIRISDFVGSAPDFDIEHTLPQARGGDDSQMNKTLCENRFNRETKRAKLPAELSNHVEIMERIESFGWREKMESLQKQIEAQVRRSKSAAIKSEKDDAIQRRHYLQMQLDYWRGKYERFTMAEIPEGFSNRQGVDIGIIGKYARLYLKTVFDRIYTVKGSTTAAFRKMWGLQEEYARKERTNHVHHCIDAITIACIGRREYDRWAQYVADEERYGYGESGKPRFEKPWPTFTEDVKAAADELLVAHHTPDNMTKQTRRKLRVRGRIKLNADGEPIYQQGDTARCRLHQDTFYGAIKQDGEIRYVIRKSLAQLQPTDIDKIIDDAVRDRVREAIDEVGFKTAMNPDEYTIWMNREKGIPIRKVRIFTPSVKHPIALKKQRDLSAKEYKRDYHVVNEGNYCTVIYEGQDKKGKTKRTFELVSNLEAAQYFKASADREARPDLVPQTDTNGFPLKYILKTGTMVLFYENTPAELYECTRKELVKRLYKVTAMAAEGRVQFLFHQEARDQKTLTSLYGAGTSQFCQSNPSPKLRLSVSNFNMLVEGYDFELTVTGEIKFKDDRPC

SEQ ID NO: 19475 - protein, 1215 aa, unidentified
  REGION 1..1215: note = Cas Enzyme sequence
GLDLGTNSLGWALVDESENEYTLIDKGVDIFQEGVARDKNNEKPAVQDRTSARALRRHYFRRRLRKIELLKILIRYDLCPPLPEELLTAWQKEKRYPQDNEFLRWQRTDDNGDRNPYHDRYVALSERLDLGNRTQRWLLGRALYHLAQRRGFLSNRKEAGNEKEDGTVKECIKNLSAEIAAAGCRYLGEYFYGLYQHKERIRDKYTSRNEHYLAEFNAICDRQQLPDEWRKALHRAIFFQRDLKSQKGSVGRCTFEPTKSRCPVSHPRFEEFRMLSFVNNIRITGPGDNAPRPLTQEEFETIRSLFFRKSKPYFDFEEIARRIAGKGKYACKEERTEAPYRFNFARTATVSGCPVTASLQAIFGDDWITEIRSLYLLGAGKNEDQMLNDVWHALFSFNDEGRLRSWACEKLQLTDEQAKAFAAIKLPQDYAALSLNAIGKILVYLRCGYRYDEAVFLANLRAALPKEVYADESRRHEIEQDIASLLLDYKRNPYNKFDSKEHRIADYFSDHGLDASRLIRLYHPSKIETYPDAQPKANGILQLGSPRTATIRNPMAMRALFRLRNLINTLLREGRIDRDTKIRIEFARGLNDANRRKAIEQYQREREVENRKYAEEIHSQYAAETGREIKPSDDEVLKYRLWEEQQHVCPYTGRQIRISDFVGSAPDFDIEHTLPQARGGDDSQMNKTLCENRFNRETKRAKLPAELSNHVEIMERIESFGWREKMESLQKQIEAQVRRSKSAAIKSEKDDAIQRRHYLQMQLDYWRGKYERFTMAEIPEGFSNRQGVDIGIIGKYARLYLKTVFDRIYTVKGSTTAAFRKMWGLQEEYARKERTNHVHHCIDAITIACIGRREYDRWAQYVADEERYGYGESGKPRFEKPWPTFTEDVKAAADELLVAHHTPDNMTKQTRRKLRVRGRIKLNADGEPIYQQGDTARCRLHQDTFYGAIKQDGEIRYVIRKSLAQLQPTDIDKIIDDAVRDRVREAIDEVGFKTAMNPDEYTIWMNREKGIPIRKVRIFTPSVKHPIALKKQRDLSAKEYKRDYHVVNEGNYCTVIYEGQDKKGKTKRTFELVSNLEAAQYFKASADREARPDLVPQTDTNGFPLKYILKTGTMVLFYENTPAELYECTRKELVKRLYKVTAMAAEGRVQFLFHQEARDQKTLTSLYGAGTSQFCQSNPSPKLRLSVSNFNMLVEGYDFELTVTGEIKFKDDRPC

SEQ ID NO: 19476 - protein, 1220 aa, unidentified; identical to SEQ ID NO: 19006
  REGION 1..1220: note = Cas Enzyme sequence

SEQ ID NO: 19477 - protein, 1220 aa, unidentified; identical to SEQ ID NO: 19436
  REGION 1..1220: note = Cas Enzyme sequence

SEQ ID NO: 19478 - protein, 1220 aa, unidentified
  REGION 1..1220: note = Cas Enzyme sequence
MAKVLGLDLGTNSLGWALVDESENEYTLIDKGVDIFQEGVARDKNNEKPAVQDRTSARALRRHYFRRRLRKIELLKILIRYDLCPPLPEELLTAWQKEKRYPQDNEFLRWQRTDDNGDRNPYHDRYVALSERLDLGNRTQRWLLGRALYHLAQRRGFLSNRKEAGNEKEDGTVKECIKNLSAEIAAAGCRYLGEYFYGLYQHKERIRDKYTSRNEHYLAEFNAICDRQQLPDEWRKALHRAIFFQRDLKSQKGSVGRCTFEPTKSRCPVSHPRFEEFRMLSFVNNIRITGPGDNAPRPLTQEEFETIRSLFFRKSKPYFDFEEIARRIAGKGKYACKEERTETPYRFNFARTATVSGCPVTASLQAIFGDDWITEIRSLYLLGAGKNEDQMLNDVWHALFSFNDEGRLRSWACEKLQLTDEQAKAFAAIKLPQDYAALSLNAIGKILVYLRCGYRYDEAVFLANLRAALPKEVYADESRRHEIEQDIVSLLLDYKRNPYNKFDSKEHRIADYFSDHGLDASRLMRLYHPSKIETYPDAQPKANGILQLGSPRTATIRNPMAMRALFRLRNLINTLLREGRIDRDTKIRIEFARGLNDANRRKAIEQYQREREVENRKYAEEIHSQYAAETGREIKPSDDEVLKYRLWEEQQHVCPYTGRQIRISDFVGSAPDFDIEHTLPQARGGDDSQMNKTLCENRFNRETKRAKLPAELSNHVEIMERIESFGWREKMESLQKQIEAQVRRSKSAAIKSEKDDAIQRRHYLQMQLDYWRGKYERFTMAEIPEGFSNRQGVDIGIIGKYARLYLKTVFDRIYTVKGSTTAAFRKMWGLQEEYARKERTNHVHHCIDAITIACIGRREYDRWAQYVADEERYGYGESGKPRFEKPWPTFTEDVKAAADELLVAHHTPDNMAKQTRKKLRVRGRIKLNADGEPIYQQGDTARCRLHQDTFYGAIKQDGEIRYVIRKSLAQLQPTDIDKIIDDAVRDRVREAIDEVGFKTAMNPDEYTIWMNREKGISIRKVRIFTPSVKHPIALKKQRDLSAKEYKRDYHVVNEGNYCTVIYEGQDKKGKTKRTFELVSNLEAAQYFKASADREARPDLVPQTDTNGFPLKYILKTGTMVLFYENTPAELYECTRKELVKRLYKVTAMAAEGRVQFLFHQEARDQKTLTSLYGAGTSQFCQSNPSPKLRLSVSNFNMLVEGYDFELTVTGEIKFKDDRPC

SEQ ID NO: 19479 - protein, 1165 aa, unidentified
  REGION 1..1165: note = Cas Enzyme sequence
SARALRRHYFRRRLRKIELLKILIRYDLCPPLPEELLTAWQKEKRYPQDNEFLRWQRTDDNGDRNPYHDRYVALSERLDLGNRTQRWLLGRALYHLAQRRGFLSNRKEAGNEKEDGTVKECIKNLSAEIAAAGCRYLGEYFYGLYQHKERIRDKYTSRNEHYLAEFNAICDRQQLPDEWRKALHRAIFFQRDLKSQKGSVGRCTFEPTKSRCPVSHPRFEEFRMLSFVNNIRITGPGDNAPRPLTQEEFETIRSLFFRKSKPYFDFEEIARRIAGKGKYACKEERTEAPYRFNFARTATVSGCPVTASLQAIFGDDWITEIRSLYLLGAGKNEDQMLNDVWHALFSFNDEGRLRSWACEKLQLTDEQAKAFAAIKLPQDYAALSLNAIGKILVYLRCGYRYDEAVFLANLRAALPKEVYADESRRHEIEQDIASLLLDYKRNPYNKFDSKEHRIADYFSDHGLDASRLMRLYHPSKIETYPDAQPKANGILQLGSPRTATIRNPMAMRALFRLRNLINTLLREGRIDRDTKIRIEFARGLNDANRRKAIEQYQREREVENRKYAEEIHSQYAAETGREIKPSDDEVLKYRLWEEQQHVCPYTGRQIRISDFVGSAPDFDIEHTLPQARGGDDSQMNKTLCENRFNRETKRAKLPAELSNHVEIMERIESFGWREKMESLQKQIEAQVRRSKSAAIKSEKDDAIQRRHYLQMQLDYWRGKYERFTMAEIPEGFSNRQGVDIGIIGKYARLYLKTVFDRIYTVKGSTTAAFRKMWGLQEEYARKERTNHVHHCIDAITIACIGRREYDRWAQYVADEERYGYGESGKPRFEKPWPTFTEDVKAAADELLVAHHTPDNMTKQTRRKLRVRGRIKLNADGEPIYQQGDTARCRLHQDTFYGAIKQDGEIRYVIRKSLAQLQPTDIDKIIDDAVRDRVREAIDEVGFKTAMNPDEYTIWMNREKGIPIRKVRIFTPSVKHPIALKKQRDLSAKEYKRDYHVVNEGNYCTVIYEGQDKKGKTKRTFELVSNLEAAQYFKASADREARPDLVPQTDTNGFPLKYILKTGTMVLFYENTPAELYECTRKELVKRLYKVTAMAAEGRVQFLFHQEARDQKTLTSLYGAGTSQFCQSNPSPKLRLSVSNFNMLVEGYDFELTVTGEIKFKDDRPC

SEQ ID NO: 19480 - protein, 1220 aa, unidentified
  REGION 1..1220: note = Cas Enzyme sequence
MAKVLGLDLGTNSLGWALVDESENEYTLIDKGVDIFQEGVARDKNNEKPAVQDRTSARALRRHYFRRRLRKIELLKILIRYDLCPPLPEELLTAWQKEKRYPQDNEFLRWQRTDDNGDRNPYHDRYVALSERLDLGNRTQRWLLGRALYHLAQRRGFLSNRKEAGNEKEDGTVKECIKNLSAEIAAAGCRYLGEYFYGLYQHKERIRDKYTSRNEHYLAEFNAICDRQQLPDEWRKALHRAIFFQRDLKSQKGSVGRCTFEPTKSRCPVSHPRFEEFRMLSFVNNIRITGPGDNAPRPLTQEEFETIRSLFFRKSKPYFDFEEIARRIAGKGKYACKEERTEAPYRFNFARTATVSGCPVTASLQAIFGDDWITEIRSLYLLGAGKNEDQMLNDVWHALFSFNDEGRLRSWACEKLQLTDEQAKAFAAIKLPQDYAALSLNAIGKILVYLRCGYRYDEAVFLANLRAALPKEVYADESRRHEIEQDIASLLLDYKRNPYNKFDSKEHRIADYFSDHGLDASRLIRLYHPSKIETYPDAQPKANGILQLGSPRTATIRNPMAMRALFRLRNLINTLLREGRIDRDTKIRIEFARGLNDANRRKAIEQYQREREVENRKYAEEIHSQYAAETGREIKPSDDEVLKYRLWEEQQHVCPYTGRQIRISDFVGSAPDFDIEHTLPQARGGDDSQMNKTLCENRFNRETKRAKLPAELSNHVEIMERIESFGWREKMESLQKQIEAQVRRSKSAAIKSEKDDAIQRRHYLQMQLDYWRGKYERFTMAEIPEGFSNRQGVDIGIIGKYARLYLKTVFDRIYTVKGSTTAAFRKMWGLQEEYARKERTNHVHHCIDAITIACIGRREYDRWAQYVADEERYGYGESGKPRFEKPWPTFTEDVKAAADELLVAHHTPDNMTKQMRRKLRVRGRIKLNADGEPIYQQGDTARCRLHQDTFYGAIKQDGEIRYVIRKSLAQLQPTDIDKIIDDAVRDRVREAIDEVGFKTAMNPDEYTIWMNREKGIPIRKVRIFTPSVKHPIALKKQRDLSAKEYKRDYHVVNEGNYCTVIYEGQDKKGKTKRTFELVSNLEAAQYFKASADREARPDLVPQTDTNGFPLKYILKTGTMVLFYENTPAELYECTRKELVKRLYKVTAMAAEGRVQFLFHQEARDQKTLTSLYGAGTSQFCQSNPSPKLRLSVSNFNMLVEGYDFELTVTGEIKFKDDRPC

SEQ ID NO: 19481 - protein, 1220 aa, unidentified
  REGION 1..1220: note = Cas Enzyme sequence
MAKVLGLDLGTNSLGWALVDESENEYTLIDKGVDIFQEGVARDKNNEKPAVQDRTSARALRRRYFRRRLRKIELLKILIRYDLCPPLPEELLTAWQKEKRYPQDNEFLRWQRTDDNGDRNPYHDRYVALSERLDLGNRTQRWLLGRALYHLAQRRGFLSNRKEAGNEKEDGTVKECIKNLSAEIAAAGCRYLGEYFYGLYQHKERIRDKYTSRNEHYLAEFNAICDRQQLPDEWRKALHRAIFFQRDLKSQKGSVGRCTFEPTKSRCPVSHPRFEEFRMLSFVNNIRITGPGDNAPRPLTQEEFETIRSLFFRKSKPYFDFEEIARRIAGKGKYACKEERTEAPYRFNFARTATVSGCPVTASLQAIFGDDWITEIRSLYLLGAGKNEDQMLNDVWHALFSFNDEGRLRSWACEKLQLTDEQAKAFAAIKLPQDYAALSLNAIGKILVYLRCGYRYDEAVFLANLRAALPKEVYADESRRHEIEQDIVSLLLDYKRNPYNKFDSKEHRIADYFSDHGLDASRLMRLYHPSKIETYPDAQPKANGILQLGSPRTATIRNPMAMRALFRLRNLINTLLREGRIDRDTKIRIEFARGLNDANRRKAIEQYQREREVENRKYAEEIHSQYAAETGREIKPSDDEVLKYRLWEEQQHVCPYTGRQIRISDFVGSAPDFDIEHTLPQARGGDDSQMNKTLCENRFNRETKRAKLPAELSNHVEIMERIESFGWREKMESLQKQIEAQVRRSKSAAIKSEKDDAIQRRHYLQMQLDYWRGKYERFTMAEIPEGFSNRQGVDIGIIGKYARLYLKTVFDRIYTVKGSTTAAFRKMWGLQEEYARKERTNHVHHCIDAITIACIGRREYDRWAQYVADEERYGYGESGKPRFEKPWPTFTEDVKAAADELLVAHHTPDNMAKQTRRKLRVRGRIKLNADGEPIYQQGDTARCRLHQDTFYGAIKQDGEIRYVIRKSLAQLQPTDIDKIIDDAVRDRVREAIDEVGFKTAMNPDEYTIWMNREKGIPIRKVRIFTPSVKHPIALKKQRDLSAKEYKRDYHVVNEGNYCTVIYEGQDKKGKTKRTFELVSNLEAAQYFKASADREARPDLVPQTDTNGFPLKCILKTGTMVLFYENSPAELYDCSHKELTKRLYKVTAMAAEGRVQFLFHQEARDQKTLTSLYGAGTSQFCQSNPSPKLRLSVSNFNMLVEGYDFELTVTGEIKFKDDRPC

SEQ ID NO: 19482 - protein, 1220 aa, unidentified; identical to SEQ ID NO: 19460
  REGION 1..1220: note = Cas Enzyme sequence

SEQ ID NO: 19483 - protein, 1220 aa, unidentified
  REGION 1..1220: note = Cas Enzyme sequence
MAKVLGLDLGTNSLGWALVDESENEYTLIDKGVDIFQEGVARDKNNEKPAVQDRTSARALRRRYFRRRLRKIELLKILIRYDLCPPLPEELLTAWQKEKRYPQDNEFLRWQRTDDNGDRNPYHDRYVALSERLDLGNRTQRWLLGRALYHLAQRRGFLSNRKEAGNEKEDGTVKECIKNLSAEIAAAGCRYLGEYFYGLYQHKERIRDKYTSRNEHYLAEFNAICDRQQLPDEWRKALHRAIFFQRDLKSQKGSVGRCTFEPTKSRCPVSHPRFEEFRMLSFVNNIRITGPGDNAPRPLTQEEFETIRSLFFRKSKPYFDFEEIARRIAGKGKYACKEERTEAPYRFNFARTATVSGCPVTASLQAIFGDDWITEIRSLYLLGAGKNEDQMLNDVWHALFSFNDEGRLRSWACEKLQLTDEQAKAFAAIKLPQDYAALSLNAIGKILVYLRCGYRYDEAVFLANLRAALPKEVYADENRRHEIEQDIASLLLDYKRNPYNKFDSKEHRIADYFSDHGLDASRLMRLYHPSKIETYPDAQPKANGILQLGSPRTATIRNPMAMRALFRLRNLINTLLREGRIDRDTKIRIEFARGLNDANRRKAIEQYQREREVENRKYAEEIHSQYAAETGREIKPSDDEVLKYRLWEEQQHVCPYTGRQIRISDFVGSAPDFDIEHTLPQARGGDDSQMNKTLCENRFNRETKRAKLPAELSNHVEIMERIESFGWREKMESLQKQIEAQVRRSKSAAIKSEKDDAIQRRHYLQMQLDYWRGKYERFTMAEIPEGFSNRQGVDIGIIGKYARLYLKTVFDRIYTVKGSTTAAFRKMWGLQEEYARKERTNHVHHCIDAITIACIGRREYDRWAQYVADEERYGYGESGKPRFEKPWPTFTEDVKAAADELLVAHHTPDNMTKQTRRKLRVRGRIKLNADGEPIYQQGDTARCRLHQDTFYGAIKQDGEIRYVIRKSLAQLQPTDIDKIIDDAVRDRVREAIDEVGFKTAMNPDEYTIWMNREKGIPIRKVRIFTPSVKHPIALKKQRDLSAKEYKRDYHVVNEGNYCTVIYEGQDKKGKTKRTFELVSNLEAAQYFKASADREARPDLVPQTDTNGFPLKCILKTGTMVLFYENSPAELYDCSHKELTKRLYKVTAMAAEGRVQFLFHQEARDQKTLTSLYGAGTSQFCQSNPSPKLRLSVSNFNMLVEGYDFELTVTGEIKFKDDRPC

SEQ ID NO: 19484 - protein, 1220 aa, unidentified
  REGION 1..1220: note = Cas Enzyme sequence
MAKVLGLDLGTNSLGWALVDESENEYTLIDKGVDIFQEGVARDKNNEKPAVQDRTSARALRRRYFRRRLRKIELLKILIRYDLCPPLPEELLTAWQKEKRYPQDNEFLRWQRTDDNGDRNPYHDRYVALSERLDLGNRTQRWLLGRALYHLAQRRGFLSNRKEAGNEKEDGTVKECIKNLSAEIAAAGCRYLGEYFYGLYQHKERIRDKYTSRNEHYLAEFNAICDRQQLPDEWRKALHRAIFFQRDLKSQKGSVGRCTFEPTKSRCPVSHPRFEEFRMLSFVNNIRITGPGDNAPRPLTQEEFETIRSLFFRKSKPYFDFEEIARRIAGKGKYACKEERTEAPYRFNFARTATVSGCPVTASLQAIFGDDWITEIRSLYLLGAGKNEDQMLNDVWHALFSFNDEGRLRSWACEKLQLTDEQAKAFAAIKLPQDYAALSLNAIGKILVYLRCGYRYDEAVFLANLRAALPKEVYADESRRHEIEQDIASLLLDYKRNPYNKFDSKEHRIADYFSDHGLDASRLIRLYHPSKIETYPDAQPKANGILQLGSPRTATIRNPMAMRALFRLRNLINTLLREGRIDRDTKIRIEFARGLNDANRRKAIEQYQREREVENRKYAEEIHSQYAAETGREIKPSDDEVLKYRLWEEQQHVCPYTGRQIRISDFVGSAPDFDIEHTLPQARGGDDSQMNKTLCENRFNRETKRAKLPAELSNHVEIMERIESFGWREKMESLQKQIEAQVRRSKSAAIKSEKDDAIQRRHYLQMQLDYWRGKYERFTMAEIPEGFSNRQGVDIGIIGKYARLYLKTVFDRIYTVKGSTTAAFRKMWGLQEEYARKERTNHVHHCIDAITIACIGRREYDRWAQYVADEERYGYGESGKPRFEKPWPTFTEDVKAAADELLVAHHTPDNMTKQTRRKLRVRGRIKLNADGEPIYQQGDTARCRLHQDTFYGAIKQDGEIRYVIRKSLAQLQPTDIDKIIDDAVRDRVREAIDEVGFKTAMNPDEYTIWMNREKGIPIRKVRIFTPSVKHPIALKKQRDLSAKEYKRDYHVVNEGNYCTVIYEGQDKKGKTKRTFELVSNLEAAQYFKASADREARPDLVPQTDTNGFPLKYILKTGTMVLFYENTPAELYECTRKELVKRLYKVTAMAAEGRVQFLFHQEARDQKTLTSLYGAGTSQFCQSNPSPKLRLSVSNFNMLVEGYDFELTVTGEIKFKDDRPC

SEQ ID NO: 19485 - protein, 1220 aa, unidentified; identical to SEQ ID NO: 19466
  REGION 1..1220: note = Cas Enzyme sequence

SEQ ID NO: 19486 - protein, 1221 aa, unidentified
  REGION 1..1221: note = Cas Enzyme sequence
MAKVLGLDLGTNSLGWALVDESENEYTLIDKGVDIFQEGVARDKNNEKPAVQDRTSARALRRHYFRRRLRKIELLKILIRYDLCPPLPEELLTAWQKEKRYPQDNEFLRWQRTDDNGDRNPYHDRYVALSERLDLGNRTQRWLLGRALYHLAQRRGFLSNRKEAGNEKEDGTVKECIKNLSAEIAAAGCRYLGEYFYGLYQHKERIRDKYTSRNEHYLAEFNAICDRQQLPDEWRKALHRAIFFQRDLKSQKGSVGRCTFEPTKSRCPVSHPRFEEFRMLSFVNNIRITGPGDNAPRPLTQEEFETIRSLFFRKSKPYFDFEEIARRIAGKGKYACKEERTEAPYRFNFARTATVSGCPVTASLQAIFGDDWITEIRSLYLLGAGKNEDQMLNDVWHALFSFNDEGRLRSWACEKLQLTDEQAKAFAAIKLPQDYAALSLNAIGKILVYLRCGYRYDEAVFLANLRAALPKEVYADESRRHEIEQDIASLLLDYKRNPYNKFDSKEHRIADYFSDHGLDASRLMRLYHPSKIETYPDAQPKANGILQLGSPRTATIRNPMAMRALFRLRNLINTLLREGRIDRDTKIRIEFARGLNDANRRKAIEQYQREREVENRKYAEEIHSQYAAETGREIKPSDDEVLKYRLWEEQQHVCPYTGRQIRISDFVGSAPDFDIEHTLPQARGGDDSQMNKTLCENRFNRETKRAKLPAELSNYAEILERIESFGWREKMESLQKQIEAQVRRSKSAAIKSEKNDAIQRRHYLQMQLDYWRGKYERFTMAEIPEGFSNRQGVDIGIIGKYARLYLKTVFDRIYTVKGSTTAAFRKMWGLQEEYARKERTNHVHHCIDAITIACIGRREYDRWAQYVADEERYGYGESGKPRFEKPWPTFTEDVKAAADELLVAHHTPDNMAKQTRRKLRVRGRIKLNADGEPIYQQGDTARCRLHQDTFYGAIKQDGEIRYVIRKSLAQLQPTDIDKIIDDAVRDRVREAIDEVGFKTAMNPDEYTIWMNREKGIPIRKVRIFVRKTTLIPLGNKQHRDRSDKEYKRKYLVANEGNYCMAVYEGKDKKGRTDHSFEIISNLQAAEYFKRSTDRNERHDLAPVADTNGYPLKYLLKTGSMVLFYENTPAELYECTRKELVKRLYKVTAMAAEGRVQFLFHQEARDQKTLTALYGAGASQFCQSNPSPKLRLSVSNFNMLVEGYDFELTATGEIKFKDDRPC

SEQ ID NO: 19487 - protein, 1220 aa, unidentified
  REGION 1..1220: note = Cas Enzyme sequence
MAKVLGLDLGTNSLGWALVDESENEYTLIDKGVDIFQEGVARDKNNEKPAVQDRTSARALRRHYFRRRLRKIELLKILIRYDLCPPLPEELLTAWQKEKRYPQDNEFLRWQRTDDNGDRNPYHDRYVALSERLDLGNRTQRWLLGRALYHLAQRRGFLSNRKEAGNEKEDGTVKECIKNLSAEIAAAGCRYLGEYFYGLYQHKERIRDKYTSRNEHYLAEFNAICDRQQLPDEWRKALHRAIFFQRDLKSQKGSVGRCTFEPTKSRCPVSHPRFEEFRMLSFVNNIRITGPGDNAPRPLTQEEFETIRSLFFRKSKPYFDFEEIARRIAGKGKYACKEERTEAPYRFNFARTATVSGCPVTASLQAIFGDDWITEIRSLYLLGAGKNEDQMLNDVWHALFSFNDEGRLRSWACEKLQLTDEQAKAFAAIKLPQDYAALSLNAIGKILVYLRCGYRYDEAVFLANLRAALPKEVYADESRRHEIEQDIASLLLDYKRNPYNKFDSKEHRIADYFSDHGLDASRLMRLYHPSKIETYPDAQPKANGILQLGSPRTAAIRNPMAMRALFRLRNLINTLLREGRIDRDTKIRIEFARGLNDANRRKAIEQYQREREVENRKYAEEIHSQYAAETGREIKPSDDEVLKYRLWEEQQHVCPYTGRQIRISDFVGSAPDFDIEHTLPQARGGDDSQMNKTLCENRFNRETKRAKLPAELSNHVEIMERIESFGWREKMESLQKQIEAQVRRSKSAAIKSEKDDAIQRRHYLQMQLDYWRGKYERFAMAEIPEGFSNRQGVDIGIIGKYARLYLKTVFDRIYTVKGSTTAAFRKMWGLQEEYARKERTNHVHHCIDAITIACIGRREYDRWAQYVADEERYGYGESGKPRFEKPWPTFTEDVKAAADELLVAHHTPDNMTKQTRRKLRVRGRIKLNADGEPIYQQGDTARCRLHQDTFYGAIKQDGEIRYVIRKSLAQLQPTDIDKIIDDAVRDRVREAIDEVGFKTAMNPDEYTIWMNREKGIPIRKVRIFTPSVKHPIALKKQRDLSAKEYKRDYHVVNEGNYCTVIYEGQDKKGKTKRTFELVSNLEAAQYFKASADREARPDLVPQTDTNGFPLKYILKTGTMVLFYENTPAELYECTRKELVKRLYKVTAMAAEGRVQFLFHQEARDQKTLTSLYGAGTSQFCQSNPSPKLRLSVSNFNMLVEGYDFELTVTGEIKFKDDRPC

SEQ ID NO: 19488 - protein, 1132 aa, unidentified
  REGION 1..1132: note = Cas Enzyme sequence
MAKVLGLDLGTNSLGWALVDESENEYTLIDKGVDIFQEGVARDKNNEKPAVQDRTSARALRRHYFRRRLRKIELLNIRIRYDLCPPLPEELLTAWQKEKRYPQDNEFLRWQRTDDNGDRNPYHDRYVALSERLDLGNRTQRWLLGRALYHLAQRRGFLSNRKEAGNEKEDGTVKECIKNLSAEIAAAGCRYLGEYFYGLYQHKERIRDKYTSRNEHYLAEFNAICDRQQLPDEWRKALHRAIFFQRDLKSQKGSVGRCTFEPTKSRCPVSHPRFEEFRMLSFVNNIRITGPGDNAPRPLTQEEFETIRSLFFRKSKPYFDFEEIARRIAGKGKYACKEERTEAPYRFNFARTATVSGCPVTASLQAIFGDDWITEIRSLYLLGAGKNEDQMLNDVWHALFSFNDEGRLRSWACEKLQLTDEQAKAFAAIKLPQDYAALSLNAIGKILVYLRCGYRYDEAVFLANLRAALPKEVYADESRRHEIEQDIASLLLDYKRNPYNKFDSKEHRIADYFSDHGLDASRLIRLYHPSKIETYPDAQPKANGILQLGSPRTATIRNPMAMRALFRLRNLINTLLREGRIDRDTKIRIEFARGLNDANRRKAIEQYQREREVENRKYAEEIHSQYAAETGREIKPSDDEVLKYRLWEEQQHVCPYTGRQIRISDFVGSAPDFDIEHTLPQARGGDDSQMNKTLCENRFNRETKRAKLPAELSNHVEIMERIESFGWREKMESLQKQIEAQVRRSKSAAIKSEKDDAIQRRHYLQMQLDYWRGKYERFTMAEIPEGFSNRQGVDIGIIGKYARLYLKTVFDRIYTVKGSTTAAFRKMWGLQEEYARKERTNHVHHCIDAITIACIGRREYDRWAQYVADEERYGYGESGKPRFEKPWPTFTEDVKAAADELLVAHHTPDNMTKQTRRKLRVRGRIKLNADGEPIYQQGDTARCRLHQDTFYGAIKQDGEIRYVIRKSLAQLQPTDIDKIIDDAVRDRVREAIDEVGFKTAMNPDEYTIWMNREKGIPIRKVRIFTPSVKHPIALKKQRDLSAKEYKRDYHVVNEGNYCTVIYEGQDKKGKTKRTFELVSNLEAAQYFKASADREARPDLVPQTDTNGFPLKYILKTGTMVLFYENTPAELYE

SEQ ID NO: 19489 - protein, 1220 aa, unidentified
  REGION 1..1220: note = Cas Enzyme sequence
MAKVLGLDLGTNSLGWALVDESENEYTLIDKGVDIFQEGVARDKNNEKPAVQDRTSARALRRHYFRRRLRKIELLKILIRYDLCPPLPEELLTAWQKEKRYPQDNEFLRWQRTDDNGDRNPYHDRYVALSERLDLGNRTQRWLLGRALYHLAQRRGFLSNRKEAGNETEDGTVKECIKNLSAEIAAAGCRYLGEYFYGLYQHKERIRDKYTSRNEHYLAEFNAICDRQQLPDEWRKALHRAIFFQRDLKSQKGSVGRCTFEPTKSRCPVSHPRFEEFRMLSFVNNIRITGPGDNAPRPLTQEEFETIRSLFFRKSKPYFDFEEIARRIAGKGKYACKEERTEAPYRFNFARTATVSGCPVTASLQAIFGDDWITEIRSLYLLGAGKNEDQMLNDVWHALFSFNDEGRLRSWACEKLQLTDEQAKAFAAIKLPQDYAALSLNAIGKILVYLRCGYRYDEAVFLANLRAALPKEVYADESRRHEIEQDIASLLLDYKRNPYNKFDSKEHRIADYFSDHGLDASRLIRLYHPSKIETYPDAQPKANGILQLGSPRTATIRNPMAMRALFRLRNLINTLLREGRIDRDTKIRIEFARGLNDANRRKAIEQYQREREVENRKYAEEIHSQYAAETGREIKPSDDEVLKYRLWEEQQHVCPYTGRQIRISDFVGSAPDFDIEHTLPQARGGDDSQMNKTLCENRFNRETKRAKLPAELSNHVEIMERIESFGWREKMESLQKQIEAQVRRSKSAAIKSEKDDAIQRRHYLQMQLDYWRGKYERFTMAEIPEGFSNRQGVDIGIIGKYARLYLKTVFDRIYTVKGSTTAAFRKMWGLQEEYARKERTNHVHHCIDAITIACIGRREYDRWAQYVADEERYGYGESGKPRFEKPWPTFTEDVKAAADELLVAHHTPDNMTKQTRRKLRVRGRIKLNADGEPIYQQGDTARCRLHQDTFYGAIKQDGEIRYVIRKSLAQLQPTDIDKIIDDAVRDRVREAIDEVGFKTAMNPDEYTIWMNREKGIPIRKVRIFTPSVKHPIALKKQRDLSAKEYKRDYHVVNEGNYCTVIYEGQDKKGKTKRTFELVSNLEAAQYFKASADREARPDLVPQTDTNGFPLKYILKTGTMVLFYENTPAELYECTRKELVKRLYKVTAMAAEGRVQFLFHQEARDQKTLTSLYGAGTSQFCQSNPSPKLRLSVSNFNMLVEGYDFELTVTGEIKFKDDRPC

SEQ ID NO: 19490 - protein, 1220 aa, unidentified
  REGION 1..1220: note = Cas Enzyme sequence
MAKVLGLDLGTNSLGWALVDESENEYTLIDKGVDIFQEGVARDKNNEKPAVQDRTSARALRRHYFRRRLRKIELLKILIRYDLCPPLPEELLTAWQKEKRYPQDNEFLRWQRTDDNGDRNPYHDRYVALSERLDLGNRTQRWLLGRALYHLAQRRGFLSNRKEAGNEKEDGTVKECIKNLSAEIAAAGCRYLGEYFYGLYQHKERIRDKYTSRNEHYLAEFNAICDRQQLPDEWRKALHRAIFFQRDLKSQKGSVGRCTFEPTKSRCPVSHPRFEEFRMLSFVNNIRITGPGDNAPRPLTQEEFETIRSLFFRKSKPYFDFEEIARRIAGKGKYACKEERTEAPYRFNFARTATVSGCPVTASLQAIFGDDWITEIRSLYLLGAGKNEDQMLNDVWHALFSFNDEGRLRSWACEKLQLTDEQAKAFAAIKLPQDYAALSLNAIGKILVYLRCGYRYDEAVFLANLRAALPKEVYADESRRHEIEQDIASLLLDYKRNPYNKFDSKEHRIADYFSDHGLDASRLMRLYHPSKIETYPDAQPKANGILQLGSPRTATIRNPMAMRALFQLRNLINTLLREGRIDRDTKIRIEFARGLNDANRRKAIEQYQREREVENRKYAEEIHSQYAAETGREIKPSDDEVLKYRLWEEQQHVCPYTGRQIRISDFVGSAPDFDIEHTLPQARGGDDSQMNKTLCENRFNRETKRAKLPAELSNHVEIMERIESFGWREKMESLQKQIEAQVRRSKSAAIKSEKDDAIQRRHYLQMQLDYWRGKYERFTMAEIPEGFSNRQGVDIGIIGKYARLYLKTVFDRIYTVKGSTTAAFRKMWGLQEEYARKERTNHVHHCIDAITIACIGRREYDRWAQYVADEERYGYGESGKPRFEKPWPTFTEDVKAAADELLVAHHTPDNMTKQTRRKLRVRGRIKLNADGEPIYQQGDTARCRLHQDTFYGAIKQDGEIRYVIRKSLAQLQPTDIDKIIDDAVRDRVREAIDEVGFKTAMNPDEYTIWMNREKGIPIRKVRIFTPSVKHPIALKKQRDLSAKEYKRDYHVVNEGNYCTVIYEGQDKKGKTKRTFELVSNLEAAQYFKASADREARPDLVPQTDTNGFPLKYILKTGTMVLFYENSPAELYDCSHKELTKRLYKVTAMAAEGRVQFLFHQEARDQKTLTSLYGAGTSQFCQSNPSPKLRLSVSNFNMLVEGYDFELTVTGEIKFKDDRPC

SEQ ID NO: 19491 - protein, 1220 aa, unidentified
  REGION 1..1220: note = Cas Enzyme sequence
MAKVLGLDLGTNSLGWALVDESENEYTLIDKGVDIFQEGVARDKNNEKPAVQDRTSARALRRHYFRRRLRKIELLKILIRYDLCPPLPEELLTAWQKEKRYPQDNEFLRWQRTDDNGDRNPYHDRYVALSERLDLGNRTQRWLLGRALYHLAQRRGFLSNRKEAGNEKEDGTVKECIKNLSAEIAAAGCRYLGEYFYGLYQHKERIRDKYTSRNEHYLAEFNAICDRQQLPDEWRKALHRAIFFQRDLKSQKGSVGRCTFEPTKSRCPVSHPRFEEFRMLSFVNNIRITGPGDNAPRPLTQEEFETIRSLFFRKSKPYFDFEEIARRIAGKGKYACKEERTEAPYRFNFARTATVSGCPVTASLQAIFGDDWITEIRSLYLLGAGKNEDQMLNDVWHALFSFNDEGRLRSWACEKLQLTDEQAKAFAAIKLPQDYAALSLNAIGKILVYLRCGYRYDEAVFLANLRAALPKEVYADESRRHEIEQDIASLLLDYKRNPYNKFDSKEHRIADYFSDHGLDASRLIRLYHPSKIETYPDAQPKANGILQLGSPRTAAIRNPMAMRALFRLRNLINTLLREGRIDRDTKIRIEFARGLNDANRRKAIEQYQREREVENRKYAEEIHSQYAAETGREIKPSDDEVLKYRLWEEQQHVCPYTGRQIRISDFVGSAPDFDIEHTLPQARGGDDSQMNKTLCENRFNRETKRAKLPAELSNHVEIMERIESFGWREKMESLQKQIEAQVRRSKSAAIKSEKDDAIQRRHYLQMQLDYWRGKYERFTMAEIPEGFSNRQGVDIGIIGKYARLYLKTVFDRIYTVKGSTTAAFRKMWGLQEEYARKERTNHVHHCIDAITIACIGRREYDRWAQYVADEERYGYGESGKPRFEKPWPTFTEDVKAAADELLVAHHTPDNMAKQTRRKLRVRGRIKLNADGEPIYQQGDTARCRLHQDTFYGAIKQDGEIRYVIRKSLAQLQPTDIDKIIDDAVRDRVREAIDEVGFKTAMNPDEYTIWMNREKGIPIRKVRIFTPSVKHPIALKKQRDLSAKEYKRDYHVVNEGNYCTVIYEGQDKKGKTKRTFELVSNLEAAQYFKASADREARPDLVPQTDTNGFPLKCILKTGTMVLFYENSPAELYECTRKELVKRLYKVTAMAAEGRVQFLFHQEARDQKTLTSLYGAGTSQFCQSNPSPKLRLSVSNFNMLVEGYDFELTVTGEIKFKDDRPC

SEQ ID NO: 19492 - protein, 1220 aa, unidentified
  REGION 1..1220: note = Cas Enzyme sequence
MAKVLGLDLGTNSLGWALVDESENEYTLIDKGVDIFQEGVARDKNNEKPAVQDRTSARALRRRYFRRRLRKIELLKILIRYDLCPPLPEELLTAWQKEKRYPQDNEFLRWQRTDDNGDRNPYHDRYVALSERLDLGNRTQRWLLGRALYHLAQRRGFLSNRKEAGNEKEDGTVKECIKNLSAEIAAAGCRYLGEYFYGLYQHKERIRDKYTSRNEHYLAEFNAICDRQQLPDEWRKALHRAIFFQRDLKSQKGSVGRCTFEPTKSRCPVSHPRFEEFRMLSFVNNIRITGPGDNAPRPLTQEEFETIRSLFFRKSKPYFDFEEIARRIAGKGKYACKEERTEAPYRFNFARTATVSGCPVTASLQAIFGDDWITEIRSLYLLGAGKNEDQMLNDVWHALFSFNDEGRLRSWACEKLQLTDEQAKAFAAIKLPQDYAALSLNAIGKILVYLRCGYRYDEAVFLANLRAALPKEVYADESRRHEIEQDIASLLLDYKRNPYNKFDSKEHRIADYFSDHGLDASRLMRLYHPSKIETYPDAQPKANGILRLGSPRTATIRNPMAMRALFRLRNLINTLLREGRIDRDTKIRIEFARGLNDANRRKAIEQYQREREVENRKYAEEIHSQYAAKTGREIKPSDDEVLKYRLWEEQQHVCPYTGRQIRISDFVGSAPDFDIEHTLPQARGGDDSQMNKTLCENRFNRETKRAKLPAELSNHVEIMERIKSFGWRKKMESLQKQIEAQVRRSKSAAIKSEKDDAIQRRHYLQMQLDYWRGKYERFTMAEIPEGFSNRQGVDIGIIGKYARLYLKTVFDRIYTVKGSTTAAFRKMWGLQEEYARKERTNHVHHCIDAITIACIGRREYDRWAQYVADEERYGYGESGKPRFEKPWPTFTEDVKAAADELLVAHHTPDNMAKQTRRKLRVRGRIKLNADGEPIYQQGDTARCRLHQDTFYGAIKQDGEIRYVIRKSLAQLQPTDIDKIIDDAVRDRVREAIDEVGFKTAMNPDEYTIWMNREKGIPIRKVRIFTPSVKHPIALKKQRDLSAKEYKRDYHVVNEGNYCTVIYEGQDKKGKTKRTFELVSNLEAAQYFKASADREARPDLVPQTDTNGFPLKYILKTGTMVLFYENSPAELYDCSHKELTKRLYKVTAMAAEGRVQFLFHQEARDQKILTSLYGAGTSQFCQSNPSPKLRLSVSNFNMLVEGYDFELTVTGEIKFKDDRPC

SEQ ID NO: 19493 - protein, 1229 aa, unidentified
  REGION 1..1229: note = Cas Enzyme sequence
MITRILGLDTGTNSLAWAVVDRDAKGDYTLVRRGDVIFTEGVNVDGQPVSSKAAVKSKYKSLRVQYARRRLRKIDTLRVLVSLDLCPYLSDQQLSQWKAKKTYPLTDDFMLWQRSGSAEENNPYYCRYRCLTQKLDLTDQSQRFLLGRAFYHLAQRRGFLSNRLDTTADSAESGKVKSGIAQLSVEMEKAGCTFLGEYFYQLYKQHGNTVRLRSRYTDREEHYIKEFLAICEKQELDAQWVEKLQRALYFQRPLKSQRKGVGKCTFEPKKPCCAESHPDYEAFRMLCILNNIKIKTPKDVSLRPLNAEEREKVWPLFFRKSKPNFDFEDIAKALAGKNNYAWYKDADEKPFRFNYRMHQGVSGCPVTAQLIDLFGPDWKAGIAETYMAVEKKNGTKTIDEMADDVWNVLYSFSSKDKLKAFATDKLQLDEARATKFANAKLPHGFAALSLKAIRNILPFLRQGFIYAHAVLLAKIPDIVTAAVWDDADKRQQILSGLLEVIENYNPKDRGVEGTIDFCIKSHLQDVVDLRPGAADALYHPSMIEAYPDAKLNKMGVFQLGSPRTNAIRNPMAMRSLHILRSVVNQLLRDGTIDRDTEVHVEYARELNDANKRKAIADYQKDIERKRADYRKRIIELYKEECHKEIEPTDSDILKFQLWEEQNHKCLYTDSEIGICDFLGDNPKFDIEHTIPRSVGGDSTQMNLTLCDAMFNRQVKGARLPSQLPTHHEILKRIAPWESKCEDLRKKLDKIRTYGSMEKKIKDKLIQKRHRLKMELSYWQGKYSRFTMTEVPEGFSRRQGAGIGLISKYAGLFLKSLFHSAGNPNKSNVYMVKGVITAEFRRMWELQGEYEKKSRLNHCHHCIDAITIACIGKAEYDKMAQYYHDEEVSRWHGSAGKPQFKKPWPIFTKDVLALEQSLLVKHLTKDNMPKQAKRRVRTAKGKHLAQGDAARGSLHKDTYYGAIEQEGEIRYVLRKPISKFEKESELENIVDQAVKEKIKAAVVGKNFKAAIAEPIFMNKEKGIRINKVRCYADSVKNPLHIRQQRDLSDKEYKQQFHVVNDNNYMMAIYEGEVKGKVKRDFVLVNNITAASFFKRDRREGQGKMLVPARSQKGNLPLLTTLKIGTQVLLYENSPEEIQFENPQDLVSRLYKVVGVSSMTITGNDYGVITLRNHQNAQQAKDVKYKNGKYLESEELRQGIRLLHTQFKALVEVVDFEFNILGEIKKKEHHA

SEQ ID NO: 19494 - protein, 1231 aa, unidentified
  REGION 1..1231: note = Cas Enzyme sequence
MNTRILGLDTGTNSLAWAVVDRDANGNYTLVKRGDVIFTEGVKIEKGIESSKAAERTGHKALRVHYSRRRLHKIDTLKVLVELDLCPYLSNEQLNQWKAKKTYPLTDDFMLWQRSGSAEENNPYYCRYRCLTQKLDLTDQSQRFLLGRAFYHLAQRRGFLSNRLDTCADSEESGKVKSGIAQLSVEMEKAGCHYLGEYFYQLYRQHGNTVRLRSRYTDREEHYKKEFLAICEKQELDPKWVEALQRAIYFQRPLKSQRKGVGKCTFEPKKPRCAESHPDYEAFRMLCILNNIKIKTPNDTSLRPLNTQEREKIWPLFFRKSKPNFDFEDIAKALAGKNNYAWIKDTGEKPYRFNYRMHQGVSGCPVTAQLIDIFGSDWKTGIAEIYTAVGKKNGTKTIDEMADDVWNVLYSFSSKDKLKAFATEKLQLDEASATKFANAKLPHGFAALSLKAIRNILPFLRQGFIYAHAVLLAKIPDIVTAAVWDDADKRQQILSGLLEIIENYNPNDRGIEGTIDFCIKSHLQDVVDLRPGAADALYHPSMIEAYPDAKLNKMGVFQLGSPRTNAIRNPMAMRSLHILRSVVNQLLRDGVIDRDTEVHVEYARELNDANKRKAIADYQKDIERKRADYRKRIVEEYKNKCHKEIEPTETDILKYQLWEEQNHRCLYTNGEIGICDFLGDNPKFDIEHTIPRSVGGDSTQMNLTLCDATFNRQVKGARLPSQLTNHADILKRIALWKSKCEDLRKKLDKIRTFSGMAKEKKDSQIQKRHRLKMELSYWQGKYERFTMTEVPEGFSRRQGAGIGLISKYAGLFLKSLFHSAVNPNKSNVYMVKGVITAEFRRMWELQGEYEKKSRLNHCHHCIDAITIACIGEAEYQKMAQYYHDEEMSRWHGSANKPQFKKPWPTFTKDVLALEQSLLVKHLTKDNMPKQAKRRVRTAKGKHLAQGDAARGSLHKDTYYGIVEKDGKLYHVLRKPIDKFKKESELENIVDQAVKEKIKAAVAGKNFKAAITEPIFMNKEKGIRINKVRCYVKDQERLKIRQQRDLSTKEYKQFFCVENENNYLLAIYEGEVKGKKERDFCVVNNLDAAAYLKRSNKGKAAPLVPERSAERNLPLLAVLQRGTQVLFYEDSPEEILFDNPQDLVRRLYKVVGINTKRDVKKGKTYLYGNIELRFHQNAQKKDDVKMESGGYKNNEAPHQGIVLSHNQFKALVEDIDFEFNILGEIKKKEHHA

SEQ ID NO: 19495 - protein, 1225 aa, unidentified
  REGION 1..1225: note = Cas Enzyme sequence
MITRILGLDTGTNSLAWAVVDRNANGNYTLVKRGDVIFSEGVKIEKGVESSKAAERTGHKSLRVQYARRRLRKIDTLKVLVSLDLCPYLSDEQLSQWKAKKTYPLTDDFMLWQRSGSAEENNPYYCRYRCLTQKLDLTDQSQRFLLGRAFYHLAQRRGFLSNRLDTTADSEESGKVKSGIAQLSVEMEKAGCHYLGEYFYQLYRQHGNTVRLRSRYTDREEHYKKEFLAICEKQELDAQWVEKLQSALYFQRPLKSQRKGVGKCTFEPKKPRCAESHPDYEAFRMLCILNNIKIKTPNDTSLRPLNAQERERIWPLFFRKSKPNFDFEDIAKALAGKNNYAWFKEAGEKPYSFNYRMHQGVSGCPVTAQLIDIFGSDWKAGIAETYTAVEKKNGTKTIGEMADDVWNVLYSFSSKDKLKAFATEKLQLDEASATKFANAKLPHGFAALSLKAIRNILPFLRQGFIYAHAVHLAKIPDIVTKAVWNDAHKREQILSGLMEIIENYNPKDRGVEGTIDFCIKSHLQDVVDLRPGAADALYHPSMIEAYPDAKLNKMGVFQLGSPRTNAIRNPMAMRSLHILRSVVNQLLRDGVIDRDTEVHVEYARELNDANKRKAIADYQREQEKKRKQYRDDIITLYKSECHKEIEPTDTDILKFQLWEEQNHLCLYTGTQIGICDFLGDNPKFDIEHTIPRSVGGDSTQMNLTLCDATFNRQVKGAKLPTELSNHADILVRIDHWKSKCEDLRKQLDKIRTYGGMEKAMKDRLIQKRHSLKMELDYWQGKYSRFTMTEVPEGFSRRQGAGIGLVSKYAGLFLKSLFHNEQNPNKSNVYVVKGVTTAEFRRMWGLQGEYEKKSRLNHCHHCIDAITIACIGKAEYEKMAQYYHDEELFQWRGTISKPHFNKPWRTFTEDVLALEQSLLVKHLTKDNMPKQAKKHVRTAKGKYLAQGDAARGSLHKDTYYGAIQQEGEIRYVLRKSLSDFNSESELENIVDQAVKEKIKAAVAGKNFKTAIAEPIFMNKEKGIRINKVRCYADSVKNPLHIRQQRDLSDKEYKQQFHVVNDSNYMLAIYEGEVKGKVKRDFALVNNITAASFFKRSNRRKNAEPLVPRTSPKGNLALLVMLKIGMQVLLYEKSPEEIKFDKPHDLVKRLYKVVGLSIDGSCIMIDLRYNQEARQAKDVKPKKGAYMENEQFRPCIRLRHTQFKALVEGVDFEFNILGEVKKKDNHA

SEQ ID NO: 19496 - protein, 1225 aa, unidentified
  REGION 1..1225: note = Cas Enzyme sequence
MNTRILGLDTGTNSLAWAVVDRNANGNYTLVKRGDVIFSEGVKIEKGVESSKAAERTGHKSLRVQYARRRLRKIDTLKVLVSLDLCPYLSDEQLSQWKAKKTYPLTDDFMLWQRSGSAEENNPYYCRYRCLTQKLDLTDQSQRFLLGRAFYHLAQRRGFLSNRLDTSADSEESGKVKSGIAQLSVEMEKAGCTFLGEYFYQLYKQHGNTVRLRSRYTDREEHYKKEFLAICEKQELDAQWVEKLQKALYFQRPLKSQRKGVGKCTFEPKKPRCAESHPDYEAFRMLCILNNIKIKTPNDTSLRPLNAQEREKIWPLFFRKSKPNFDFEDIAKALAGKNNYAWYKDAGEKPYRFNYRMHQGVSGCPVTAQLIDIFGSDWKAGIAETYMAVEKKNGTKTIDEMADDVWNVLYSFSSKDKLKAFATEKLQLDEARATKFANAKLPHGFAALSLKAIRNILPFLRQGFIYAHAVLLAKIPDIVTNAVWDDAHKREQILSGLLETIENYNPKDRGVEGTIDFCIKSHLQDVVDLRPGAADALYHPSMIEAYPDAKLNKMGVFQLGSPRTNAIRNPMAMRSLHILRSVVNQLLRDGTIDRDTEVHVEYARELNDANKRKAIADYQREQEKKRKQYRDDIITLYKSECHKEIEPTDTDILKFQLWEEQNHLCLYTGTQIGICDFLGDNPKFDIEHTIPRSVGGDSTQMNLTLCDATFNRQVKGAKLPTELSNHADILVRIDHWKSKCEDLRKQQDKIRTYGGMEKAMKDRLIQKRHSLKMELDYWQGKYSRFTMTEVPEGVSRRQGAGIGLVSKYAGLFLKSLFHNEQNPNKSNVYVVKGVTTAEFRRMWGLQGEYEKKSRLNHCHHCIDAITIACIGKAEYEKMAQYYHDEELFQWRGTTSKPHFNKPWRTFTEDVLALEQSLLVKHLTKDNMPKQAKKHVRTAKGKYLAQGDAARGSLHKDTYYGAIQQEGEIRYVLRKSLSDFNSESELENIVDQAVKEKIKAAVAGKNFKTAIAEPIFMNKEKGIRINKVRCYADSVKNPLHIRQQRDLSDKEYKQQFHVVNDSNYMLAIYEGEVKGKVKRDFALVNNITAASFFKRSNRRKNAEPLVPRTSPKGNLALLVTLKIGMQVLLYEKSPEEIKFDKPHDLVKRLYKVVGLSIDGSCIMIDLRYNQEARQAKDVKPKKGAYMENEQFRPCIRLRHTQFKALVEGVDFEFNILGEIKKKDNHA

SEQ ID NO: 19497 - protein, 1225 aa, unidentified
  REGION 1..1225: note = Cas Enzyme sequence
MITRILGLDTGTNSLAWAVVDRDANGNYTLVKRGDVIFSEGVKIEKGKESSKAAERTGHKSLRVQYARRRLRKIDTLKVLVSLDLCPYLSDEQLSQWKAKKTYPLTDDFMLWQRSGSAEENNPYYCRYRCLTQKLDLTDQSQRFLLGRAFYHLAQRRGFLSNRLDTCADSEESGKVKSGIAQLSVEMEKAGCTFLGEYFYQLYKQHGNTVRLRSRYTDREEHYIKEFLAICEKQELDAQWVEKLQSALYFQRPLKSQRKGVGKCTFEPKKPRCAESHPDYEAFRMLCILNNIKIKTPKDVSLRPLNAEEREKVRPLFFRKSKPNFDFEDIAKALAGKNNYAWYKDAGEKPYRFNYRMHQGVPGCPVTAQLIDLFGPDWKAGIAETYMAVEKKNGTKTIDEMADDVWNVLYSFSSKDKLKTFATEKLQLDEARATKFANAKLPHGFAALSLKAIRNILPFLRQGFIYAHAVLLAKIPDIVTAAVWDDADKREQILSGLLEIIENYNPNDRGIEGTIDFCIKSHLQDVVDLRPGAADALYHPSMIEAYPDAKLNKKGVFQLGSPRTNAIRNPMAMRSLHILRSVVNQLLRDGTIDRDTEVHVEYARELNDANKRKAIADYQKDIERKRADYRKRIVEEYKNKCHKEIEPTDTDILKYQLWEEQNHRCPYTDSEIGICDFLGDNPKFDIEHTIPRSVGGDSTQMNLTLCDAMFNRQVKGARLPSQLPNHHEILKKIAPWESKCEDLRKQLDKIRTYGGMEKGMKDRLIQKRHRLKMELDYWQGKYERFTMTEVPEGFSRRQGAGIGLISKYAGLFLKSLFHSADNPNKSNVYMVKGVITAEFRRMWELQGEYEKKSRLNHCHHCIDAITIACIGESEYDKMAQYYHDDEVSRWHGSANKPQFKKPWSTFTKDVLALEQSLLVKHLTKDNMPKQAKRRVRTAKGKHLAQGDAARGSLHKDTYYGAIEQEGEIRYVLRKSLSDFNSESELENIVDQAVKEKIKAAVAGKNFKAAIAEPIFMNKEKGIRINKVRCYADSVKNPLHIRQQRDLSDKEYKQQFHVVNDNNYMLAIYEGEVKGKVKRDFVLVNNITAASFFKRSNRRKNAETLVPKTSPKGNLPLLVMLKIGMQVLLYEKSSEEIKFGSPHDLVKRLYKVVGLSIDGSCIMIDLRHNQEARQAKDVKPKKGAYMENEQFRPCIRLRHTQFKALVEGIDFELNILGEIKKKEHHA

SEQ ID NO: 19498 - protein, 1225 aa, unidentified
  REGION 1..1225: note = Cas Enzyme sequence
MITRILGLDTGTNSLAWAVVDRDAAGNYKLVRRGDVIFSEGVKIEKGVESSKAAERTGHKSLRVQYARRRLRKIDTLRVLVSLDLCPYLSDEQLSQWKTKKTYPLTDDFMLWQRSGSAEENNPYYCRYRCLTQKLDLTDQSQRFLLGRAFYHLAQRRGFLSNRLDTTADSVESGKVKSGIAQLSVEMEKAGCHYLGEYFYQLYRQHGNTVRLRSRYTDREEHYKKEFLAICEKQGLDAQWVEKLQRALYFQRPLKSQRKGVGKCTFEPKKPRCAESHPDYEVFRMLCILNNIKIKTPKDVSLRPLNAEEREKVWPLFFRKSKPNFDFEDIAKALAGKNNYAWYKDAGEKPYRFNYRMHQGVSGCPVTAQLIDLFGPDWKAGIAETYMAVEKKNGTKTIDEMADDVWNVLYSFSSKDKLKAFATEKLQLDEARATKFANAKLPHGFASLSLKAIRNILPFLRQGFIYAHAVLLAKIPDIVTAAVWDDADKREQILSGLLEIIENYNPNDRGIEGTIDFCIKSHLQDVVDLRPGAADALYHPSMIEAYPDAKLNKKGVFQLGSPRTNAIRNPMAMRSLHILRSVVNQLLRDGTIDRDTEVHVEYARELNDANKRKAIADYQKDIERKRADYRKRIIELYKEECHKEIEPTDTDILKFQLWEEQNHKCLYTDSEIGICDFLGDNPKFDIEHTIPQSVGGDSTQMNLTLCDAMFNRQVKGARLPTQLPNHADILVRIAPWKSKCEDLRKQLDKIRTFSGMAKEKKDSQIQKRHRLKMELDYWQGKYERFTMTEVPEGFSRRQGAGIGLVSKYAGLFLKSLFHSADNPNKSNVYVVKGVTTAEFRRMWGLQGEYEKKSRLNHCHHCIDAITIACIGKAEYDKMAQYYHDEEVSRWHGSVGKPHFKKPWPTFTEDVLALEQSLLIKHLTKDNMPKQAKRRVRTAKGKHLAQGDAARGSLHKDTYYGAIEQEGEMRYVLRKSLSDFNSESELENIVDQAVKEKIKAAVAGKNFKAAIAEPIFMNKEKGIRINKVRCYVDSVRNPLHIRQQRDLSDKEYKQQFHVVNDNNYMLAIYEGEVKGKVKRDFVLVNNITAASFFKRSNRRKNAETLVPKTSPKGNLPLLVMLKIGMQVLLYEKSSEEIKFDSPYDLVKRLYKVVGLSIDGSYIMIDLRHNQEARQAKDVKPKKGAYMENEQFRPCIRLRHTQFKALVEGIDFEFNILGEIKKKEHYA

SEQ ID NO: 19499 - protein, 1212 aa, unidentified
  REGION 1..1212: note = Cas Enzyme sequence
SLAWALVDRDAAGNYKLVRRGDVIFSEGVKIEKGVESSKAAERTGHKSLRVQYARRRLRKIDTLRVLVSLDLCPYLSDEQLSQWKTKKTYPLTDDFMLWQRSGSAEENNPYYCRYRCLTQKLDLTDQSQRFLLGRAFYHLAQRRGFLSNRLDTTADSVESGKVKSGIAQLSVEMEKAGCHYLGEYFYQLYRQHGNTVRLRSRYTDREEHYKKEFLAICEKQGLDAQWVEKLQRALYFQRPLKSQRKGVGKCTFEPKKPRCAESHPDYEVFRMLCILNNIKIKTPKDVSLRPLNAEEREKVWPLFFRKSKPNFDFEDIAKALAGKNNYAWYKDAGEKPYRFNYRMHQGVSGCPVTAQLIDLFGPDWKAGIAETYMAVEKKNGTKTIDEMADDVWNVLYSFSSKDKLKAFATEKLQLDEARATKFANAKLPHGFASLSLKAIRNILPFLRQGFIYAHAVLLAKIPDIVTAAVWDDADKREQILSGLLEIIENYNPNDRGIEGTIDFCIKSHLQDVVDLRPGAADALYHPSMIEAYPDAKLNKKGVFQLGSPRTNAIRNPMAMRSLHILRSVVNQLLRDGTIDRDTEVHVEYARELNDANKRKAIADYQKDIERKRADYRKRIIELYKEECHKEIEPTDTDILKFQLWEEQNHKCLYTDSEIGICDFLGDNPKFDIEHTIPQSVGGDSTQMNLTLCDAMFNRQVKGARLPTQLPNHADILVRIAPWKSKCEDLRKQLDKIRTFSGMAKEKKDSQIQKRHRLKMELDYWQGKYERFTMTEVPEGFSRRQGAGIGLVSKYAGLFLKSLFHSADNPNKSNVYVVKGVTTAEFRRMWGLQGEYEKKSRLNHCHHCIDAITIACIGKAEYDKMAQYYHDEEVSRWHGSVGKPHFKKPWPTFTEDVLALEQSLLIKHLTKDNMPKQAKRRVRTAKGKHLAQGDAARGSLHKDTYYGAIEQEGEMRYVLRKSLSDFNSESELENIVDQAVKEKIKAAVAGKNFKAAIAEPIFMNKEKGIRINKVRCYVDSVRNPLHIRQQRDLSDKEYKQQFHVVNDNNYMLAIYEGEVKGKVKRDFVLVNNITAASFFKRSNRRKNAETLVPKTSPKGNLPLLVMLKIGMQVLLYEKSSEEIKFDSPYDLVKRLYKVVGLSIDGSYIMIDLRHNQEARQAKDVKPKKGAYMENEQFRPCIRLRHTQFKALVEGIDFEFNILGEIKKKEHYA

SEQ ID NO: 19500 - protein, 1168 aa, unidentified
  REGION 1..1168: note = Cas Enzyme sequence
VQYARRRLRKIDTLKVLVSLDLCPYLSDEQLSLWKAQKTYPLTDDFMLWQRSGSAEENNPYYCRYRCLTQKLDLTDQSQRFLLGRAFYHLAQRRGFLSNRLDTTADSEESGKVKSGIAQLSVEMEKAGCHYLGEYFYQLYRQHGNTVRLRSRYTDREEHYIKEFLAICEKQELDAQWVEKLQSALYFQRPLKSQRKGVGKCTFEPKKPRCAESHPDYEAFRMLCILNNIKIKTPNDTSLRPLNAEEREKVWPLFFRKSKPNFDFEDIAKALAGKNNYAWIKDAGEKPYKFNYRMHQGVSGCPVTAQLIDIFGSDWKAGIAETYTAVGKKNGTKTIDEMADDVWNVLYSFSSKDKLKAFVTEKLQLDEACATKFANAKLPHGFAALSLKAIRNILPFLRQGFIYAHAVLLAKIPDIVTNAVWDDAHKREQILSGLLEIIENYNPKDRGVEGTIDFCIKSHLQDVVDLRPGAADALYHPSMIEPYPDAKLNKMGVFQLGSPRTNAIRNPMAMRSLHILRSVVNQLLRDGTIDRDTEVHVEYARELNDANKRKAIADNQKDIERKRADYRKRIIELYKDECHKEIEPTDTDILKYQLWEEQNHKCLYTKGEIGICDFLGDNPKFDIEHTIPRSVGGDSTQMNLTLCDAMFNRQVKGARLPSQLPNHHDILKRIAPWKSKCEDLRKQLDKIRTYGGMEKAMKDRLIQKRHRLKMELSYWQGKYERFTMTEVPEGFSRRQGAGIGLISKYAGLFLKSLFHSAVNPNKSNVYMVKGVITAEFRRMWELQGEYEKKSRLNHCHHCIDAITIACIGEAEYEKMAQYYHDEEVSRWYGSANKPHFKKPWATFTEDVLAIEQSLLVKHLTKDNMPKQAKKHVRTAKGKYLAQGDTARGSLHKDTYYGVIEKDGILYHVLRKPIDKFEKESELEKIVDQAVKEKIKAAVAGKNFKTAITEPIFMNKEKGIRINKVRCYVKAQERLKIRQQRDLSTKEYKQFFCVENENNYLLTIYEGELNGKKERDFCVVNNLDAAAYLKRSNKGKAAPLVPERSAERNLPLLAVLQRGTQVLFYEDSPEEILFDTPQNLVRRLYNVVGIGTKRVKTGGKLYCYGEVKLRFHQNAQKDDDVIYESGEYKNNEEQYQGIILRHTQFKALVEGIDFEFNILGEIKKKEHHA

SEQ ID NO: 19501 - protein, 1231 aa, unidentified
  REGION 1..1231: note = Cas Enzyme sequence
MITRILGLDTGTNSLAWAVVDRDANGNYTLVKRGDVIFSEGVKIEKGVESSKAAERTGHKSLRVQYARRRLRKIDTLKVLVSLDLCPYLSDEQLSLWKAKKTYPLTDDFMLWQRSGSAEENNPYYCRYRCLTQKLDLTDQSQRFLLGRAFYHLAQRRGFLSNRLDTTADSVESGKVKSGIAQLSVEMEKAGCHYLGEYFYQLYRQHGNTVRLRSRYTDREEHYKKEFLAICEKQELDAQWVEKLQSALYFQRPLKSQRKGVGKCTFEPKKPRCAESHPDYEAFRMLCILNNIKIKTPNDTSLRPLNTQEREKIWPLFFRKSKPNFDFEDIAKALAGKNNYAWIKDTGEKPYRFNYRMHQGVSGCPVTAQLIDIFGSDWKTGIAEIYTAVGKKNGTKTIDEMADDVWNVLYSFSSKDKLKAFATEKLQLDEASATKFANAKLPHGFAALSLKAIRNILPFLRQGFIYAHAVLLAKIPDIVTAAVWDDADKRQQILSGLLEIIENYNPNDRGIEGTIDFCIKSHLQDVVDLRPGAADALYHPSMIEAYPDAKLNKMGVFQLGSPRTNAIRNPMAMRSLHILRSVVNQLLRDGVIDRDTEVHVEYARELNDANKRKAIADYQKDIERKRADYRKRIVEEYKNKCHKEIEPTETDILKYQLWEEQNHRCLYTNGEIGICDFLGDNPKFDIEHTIPRSVGGDSTQMNLTLCDATFNRQVKGARLPSQLTNHADILKRIALWKSKCEDLRKKLDKIRTFSGMAKEKKDSQIQKRHRLKMELSYWQGKYERFTMTEVPEGFSRRQGAGIGLISKYAGLFLKSLFHSAVNPNKSNVYMVKGVITAEFRRMWELQGEYEKKSRLNHCHHCIDAITIACIGEAEYQKMAQYYHDEEMSRWHGSANKPQFKKPWPTFTKDVLALEQSLLVKHLTKDNMPKQAKRRVRTAKGKHLAQGDAARGSLHKDTYYGIVEKDGKLYHVLRKPIDKFKKESELENIVDQAVKEKIKAAVAGKNFKAAISEPIFMNKEKGIRINKVRCYVKAQERLKIRQQRDLSTKEYKQFFCVENENNYLLAIYEGEVKGKKERDFCVVNNLDAAAYLKRSNKGKAAPLVPERSAERNLPLLAVLQRGTQVLFYEDSPEEILFDNPQDLVRRLYKVVGINTKRDVKKGKTYLYGNIELRFHQNAQKKDDVKLESGGYKNNEAPHQGIVLSHNQFKALVEGIDFEFNILGEIKKKEHHA

SEQ ID NO: 19502 - protein, 1232 aa, unidentified
  REGION 1..1232: note = Cas Enzyme sequence
MEKILGLDLGTSSVGWAIAEYNGTEYKLLNKGVSIFQEGVARDKGNEKPAVQDRTDARASRRHYFRRRLHKIQLLQVLIREGFCPPLTSEQLDLWRKKKIYPLTEDFIQWQRTDDNKDKNPYHDRFIALTETLDLNKQYDRYLLGRALYHLCQRRGFLSNRKNLDSGEDGKVKTGIHKLTEEMSEAGCKYLGEYFYRIYRQQNIDGGTDIEKIRSRYTARKEHYETEFYAICERQHLSDLLQKELYRAIFYQRPLKSQKGLVGKCTLEKGKSRCPLSHPRFEEFRMHSFINNIRIQTPQDSDPRQLTSNEIKVIAPLFFRKSKPHFEFKEIAKKIAGDGRYSCKGDKDCGKPYRFNFAEEMTVSGCPVIAALQSVFGENWLSEICSVYKLAERKSEEQILNDVWHALFSFDDEDKLAVWAKDKLQLPEEDAKKFSKIILPQGYASLSLNAINKILPYLRQGYRYDEAVFLANLKAVLPPDLYNDEEERKATEYDIRSIIDDFQRNPLNKKTTKEYCVVDYLRNRNIGEARLERLYHPSKIETYPHAMPNKYGVLQLGSPRTSSVRNPMAMRALFRLRILINELLRTGEIDKDTKINIEFARGLNDANKRKAIEQYQREREKDHQRFRKEIKEHFQKEMGREIEPTEEDVLKYRLWEEQKHICLYTGDTIGIADFIGDDPKYDIEHTVPKERGGDDSQMNKTLCLNKFNRNIKKAKLPSELSNHDEVLSRIESCNWKKRIDELHKQIEIQKQKSRSATTKDGKDSAICRRHELQMQLRYWQGKYERFTITEVPSGFSNRQGVDIGIIGKYARLYLQTVFDKIYTVKGETTAAFRKMWGLQEEYTKKERTNHIHHCIDAITIACIGRKEYDLWAQYAVDEERYARGEAGKPCFVKPWKSFTEDVKAVSEEVLIAHYTPDNMPKQSKKKVRVRGKIKRDKANAPIFAQGDTARGVLHQQTFYGAIIRNEEVKYVVRKSLDQLKPEDLSKIVDDVVRERVQEAVKKYGFKDAMDSTKHTIWMNEEKGVAIRKVRIYATLTQPIILKKQRDLSAKEYKQNYYVANDGNYCMAIYEGTDKKGKTKRTFKIVSNIEAAQYFKKSTDKTEHPGLVPASDENDYPLKCILKTGTMVLFYEKSPSEFDHCTQEDLVKRLYKVTGMSTLTLQKKYYYGVLTYKHHQEARPANELKAKNGVWCSGEEYRPIITMYHTQLNAYIEGVDFELSVTGEIILKHERRC

SEQ ID NO: 19503 - protein, 1232 aa, unidentified; identical to SEQ ID NO: 19502
  REGION 1..1232: note = Cas Enzyme sequence

SEQ ID NO: 19504 - protein, 1210 aa, unidentified
  REGION 1..1210: note = Cas Enzyme sequence
MEKVLGLDLGTNSIGWAVIGRNEDDSCMLIDRGVHIFQDGVAHDKSGEKPAVQERTAARASRRHYFRRRMRKVELLKVLVREGFCPHLSDEDLKKWQNEKVYPLNEDFMRWQRSYAEPDRNPYHDRYRALTEKLDLTETRDRYVLGRALYHINQRRGFLSNRKDAADDAESGKVKEGISKLSKEMAKAGCRYLGEYFYRLFQKGDKIRCKYTAREEHYKAEFEAICEKQNLSARLKTDLERTIFFQRSLRSQKGSVGKCSFEKGKPRCPVSHPRYEEFRMLQLINSVRVQRPFETEASPLNDEEVQSIKSLFFRKSKADFPFEEIAKKIAGKGNYAYKENGRDDQYRFNYRMSVSVSACPVSAAIISALGLQGPDGWEEELCSVYTKADGKTPDGILNDVWHALFFYDDGKKLSEWLSAALQLDEEKADGLAKFRLSQGYAALSLKAINKILPWLRRGHIYSDAVFYANLPAVLPSSVTQDTAKMADVFENVRTLLEDFSRDPLSRESSKVKNISDYLLGVSDGVHTEKLYHPSMIETYRAVMPDGRGQVHLGSPRTEAFKNPMAMRALFRLRALLNRLLDEGIIDPTTKINIEFARELNDTNMRKAIADWQKDMEEQRKKDAEAIRSIMGDGYVPSEDELLKYRLYEEQNHICLYTGRQISPRMFLGGVSEFDIEHTIPRSRGGDDSQANKTLCENKFNREIKKTQIPSELVDHDVILERIAGWKETIEELSNQISFQRRKARGAQTKEAKDAAIRRMHYLKMKLNYWKGKYERFTMTKVPEGFSNRQGVDIGIIGRYARLYLKTLFRKIYVVKGATTAAFRKEWGLQNEYSKKERVNHAHHCIDAVTIACIGKNEYDRWAQYLRKEEDYQFGKGPKPRFEKPWPTFTEDVLAIPSSLIVSHYTPDNLPKLDKKKVRVRGVIQRNSDGEPMYAQGHTARALLHKDTFYGAIQKDDDVRYVVRKPLDSLDEKKDVPKIVDDAVREKVLAAIAEHGSLKKAVAETIWMNKEKGVPIRKVRVYTPTITSPIALKPHRDESDKEYKRNYYVANDSNYCMAIYGDDKPSFKLFNALSAVNHFNGKDGTWIDEVNEKGQPLRCILRTGTMVLLYEKSPEELYACSQEELSLRLYKVTILSSMTVQGKYRYGTITLKHHLEARPSTEIKEKKGLWRIDEDFRPVIGLNHNQTKFLVEGVDFHLTVTGKIFFKKKGK

SEQ ID NO: 19505 - protein, 1210 aa, unidentified
  REGION 1..1210: note = Cas Enzyme sequence
MEKVLGLDLGTNSIGWAVIGRNEDDSCMLIDRGVHIFQDGVAHDKSGEKPAVQERTAARASRRHYFRRRMRKVELLKVLVREGFCPHLSDEDLKKWQNEKVYPLNEDFMRWQRSYAEPDRNPYHDRYRALTEKLDLTETRDRYVLGRALYHINQRRGFLSNRKDAADDAESGKVKEGISKLSKEMAKAGCRYLGEYFYRLFQKGDKIRCKYTAREEHYKAEFEAICEKQNLSARLKTDLERTIFFQRSLRSQKGSVGKCSFEKGKPRCPVSHPRYEEFRMLQLINSVRVQRPFETEASPLNDEEVQSIKSLFFRKSKADFPFEEIAKKIAGKGNYAYKENGRDDQYRFNYRMSVSVSACPVSAAIISALGLQGPDGWEEELCSVYTKADGKTPDGILNDVWHALFFYDDGKKLSEWLSAALQLDEEKADGLAKFRLSQGYAALSLKAINKILPWLRRGHIYSDAVFYANLPAVLPSSVTQDTAKMADVFENVRTLLEDFSRDPLSRESSKVKNISDYLLGVSDGVHTEKLYHPSMIETYRAVMPDGRGQVHLGSPRTEAFKNPMAMRALFRLRALLNRLLDEGIIDPTTKINIEFARELNDTNMRKAIADWQKDMEEQRKKDAEAIRSIMGDGYVPSEDELLKYRLYEEQNHICLYTGRQISPRMFLGGVSEFDIEHTIPRSRGGDDSQANKTLCENKFNREIKKTQIPSELVDHDVILERIAGWKETIEELSNQISFQRRKARGAQTKEAKDAAIRRMHYLKMKLNYWKGKYERFTMPKVPEGFSNRQGVDIGIIGRYARLYLKTLFRKIYVVKGATTAAFRKEWGLQNEYSKKERVNHAHHCIDAVTIACIGKNEYDRWAQYLRKEEDYQFGKGPKPRFEKPWPTFTEDVLAIPSSLIVSHYTPDNLPKLDKKKVRVRGVIQRNSDGEPMYAQGHTARALLHKDTFYGAIQKDDDVRYVVRKPLDSLDEKKDVPKIVDDAVREKVLAAIAEHGSLKKAVAETIWMNKEKGVPIRKVRVYTPTITSPIALKPHRDESDKEYKRNYYVANDSNYCMAIYGDDKPSFKLFNALSAVNHFNGKDGTWIDEVNEKGQPLRCILRTGTMVLLYEKSPEELYACSQEELSLRLYKVTILSSMTVQGKYRYGTITLKHHLEARPSTEIKEKKGLWRIDEDFRPVIGLNHNQTKFLVEGVDFHLTVTGKIFFKKKGK

SEQ ID NO: 19506 - protein, 1204 aa, unidentified
  REGION 1..1204: note = Cas Enzyme sequence
MERILGIDTGTNSLGWAIVDKDENQYHLVANGTNIFSEGVKIEKGIESSKAAERTEHRSVRKHYWRRKIRKIRLLSILSDNDFCPRLNQEQLRLWRLKKVYPTDDAFMDWQRTEDKAQVNPYKFRYICLTQKLDLTDITQRFILGRALYHLNQRRGFLSNRKESTKESDGAVSEGISSLSKEIKDADCEYLGEYFYKLYQNGAKIRNHYTARKEHYLKEFKAICAKQELDEVLVEKLEKAIFDQRPLKSQKGQVGTCTFEKGKSRCPSSHPLYEDFRMYSFINSIKVQVNTLYEKGERSLTDEEKLLIIPLFKRKSKRTFPFEDIAKKIAGKKNYCYIKSEEEKPYKFNYQMDTQVSGSPVNAQLEEIFGEDWLSGVCEVYTLSNNKTRFQIMNDVWHALFFYDDEDKLKEFAKNRLQLDDEIAEKFSKISIPTDYAALSLKAIRKIIPYLRNYGLIYSEAVFLANLVDVLPQHVWGVKEMREAAIENIIDVMHLYDKNNIDGITLEVCIKTFLKERYQVNDDDLKKLYHPSMLDPYPRQRPNDEGVFQLGSPRISSVKNPMAMHSLFRLRKVVNLMLKRGYITPDTKIHIEFSRDLNDANKRWAIQAQQREYEKERERCRKEIEKYISAPSDTDILKYQLWEEQNHKCLYTGEEIRITDFLGDNPRYDIEHTIPRSAGGDSTKMNLTLCSSRFNRDEKQTKLPSELANHDEILERIKDWKQRYEELDKQIRKISTKGVSSKEEKDGKIRRRHYLILQRDYWRGKYQRFTMTEVPEGFSRRQGTDISVISRYARMYLKSVFKQVYIVKGIATSDFRKMWGIQEEYAKKERVNHVHHCIDAITIACIGKAEYDKLAEYRHQYDDYLFKGKTKPTFDKPWPSFVIDIKHIQDELLIAHYAKDNLEKFTKKNIRGKDGRIIRDKFGNKLQMKGDTSRNSLHNDKFYGAINHEGAIKYVYRTNIDALDAKSIGNIVDPTVRSIIESSIAVHGSLKEAINKGIWMNEEKHIPIKKVRVFRNDVKKPIELKDQRDLSDKDYKQHYYVTNDGNYMMLIFSKLNNKGREIRQHVVINSLEAAEVIKSHKRTQEGKVVWDSYYTKEGFDLIYKLKSGTMVLLYENDRNEIWDLDKRNLQKRLYIITKMKYDGRIYMMHHQEAREKKDLEEKSGSFRINEEYRPIIVNSYNQFNALVQGVDFEINDLGEIRRLI

SEQ ID NO: 19507 - protein, 988 aa, unidentified
  REGION 1..988: note = Cas Enzyme sequence
LKEFKAICAKQELDEVLVEKLEKAIFDQRPLKSQKGQVGTCTFEKGKSRCPSSHPLYEDFRMYSFINSIKVQVNTLYEKGERSLTDEEKLLIIPLFKRTSKRTFPFEDIAKKIAGKKNYCYIKSEEEKPYKFNYQMDTQVSGSPVNAQLEEIFGEDWLSGVCEVYTLSNNKTRFQIMNDVWHALFFYDDEDKLKEFAKNRLQLDDEIAEKFSKISIPTDYAALSLKAIRKIIPYLRNYGLIYSEAVFLANLVDVLPQHVWGVKEMREAAIENIIDVMHLYDKNNIDGITLEVCIKTFLKERYQVNDDDLKKLYHPSMLDPYPRQRPNDEGVFQLGSPRISSVKNPMAMHSLFRLRKVVNLMLKRGYITPDTKIHIEFSRDLNDANKRWAIQAQQREYEKERERCRKEIKKYISAPSDTDILKYQLWEEQNHKCLYTGEEIRITDFLGDNPRYDIEHTIPRSAGGDSTKMNLTLCSSRFNRDEKQTKLPSELANHDEILERIKDWKQRYEELDKQIRKISTKGVSSKEEKDGKIRRRHYLILQRDYWRGKYQRFTMTEVPEGFSRRQGTDISVISRYARMYLKSVFKQVYIVKGIATSDFRKMWGIQEEYAKKERVNHVHHCIDAITIACIGKAEYDKLAEYRHQYDDYLFKGKTKPTFDKPWPSFVIDIKHIQDELLIAHYAKDNLEKFTKKNIRGKDGRIIRDKFGNKLQMKGDTSRNSLHNDKFYGAINHEGAIKYVYRTNIDALDAKSIGNIVDPTVRSIIESSIAVHGSLKEAINKGIWMNEEKHIPIKKVRVFRNDVKKPIELKDQRDLSDKDYKQHYYVTNDGNYMMLIFSKLNNKGREIRQHVVINSLEAAEVIKSHKRTQEGKVVWDSYYTKEGFDLIYKLKSGTMVLLYENDRNEIWDLDKRNLQKRLYIITKMKYDGRIYMMHHQEAREKKDLEEKSGSFRINEEYRPIIVNSYNQFNALVQGVDFEINDLGEIRRLI

SEQ ID NO: 19508 - protein, 1204 aa, unidentified
  REGION 1..1204: note = Cas Enzyme sequence
MERILGIDTGTNSLGWAIVDKDDNEYHLVAKGTNIFSEGVKIEKGIESSKASERTGYRSVRKHYWRRKIRKIRLLTILSENNLCPPLKKEQLRLWRLKKVYPVDDDFMGWQRTEDKANVNPYKFRYICLTEKLDLTNVTQRYILGRALYHLNQRRGFLSNRKDSTKESEGAVKEGISSLSDDMKASGCEYLGEYFYQLYQKGEKIRNHYTARKEHYLKEFHAICEKQELDAFFVEKLEKAIFDQRPLKSQKGQVGTCTFEKGKPRCPSSHPLYEDFRMYSFLNNIKVQVNTLYEKGERYLTAEEKRQIIPLFKRKSKRTFPFEDIAKKLAGKNNYCYYKDEEEKPYRFNYQMDTQVSGSPVNAQLEELFGEDWLSGVCEVYTLAKDKTRFQIMNDVWHALFFYDDEDKLREFAQNRLQLDEAQAVKFSKISVPNDYAALSLKAIRKILPYMRHYGLIYSEAVFLANLVDVLPGYVWGVKEMREAAIENVIDVMHSYDKKNIDGITLEACVKGFLKERYQVDDDTLKKLYHPSMLDLYPRQRANQDGIYQLGSPRISSVKNPMAMHSLFRLRKVVNLMLKKGYITPETKIHIEFSRDLNDANMRWAIQTWQRENEKDRERCRKEIEKYVATPTEKDILKYQLWEEQNHKCLYTGEEISLTDFLGKDPRYDIEHTIPRSAGGDSTKMNLTLCSNSYNRDIKKTKLPSQLAAHEEILERIKAWKEKYEELDHIFRKLKGSSASTKEEKDRIIRKKNLLKLQRDYWRGKYERFTMTEVPEGFSRRQGTDISVISRYARMYLKSVFKQVYIVKGIATSDFRKLWGIQEDYARKERVNHVHHCIDAITIACIGKAEYDKLAQYYHETDEYKLGKGKKPDFEKPWPSFVLDIRHIQDELLIAHYSKDNLPKQAKRYVRDSKGGKILTQGDTARASLHNETYYGAIEVDGDVKYVVRKSLDSLDEKDIKNIVDAEVRSKVEKAVQSSGSLKRAVEKTIWMNEKKQIPINKVRVFAGSVTRPIHIRQQRDQSKHEYKRQYHVQNDRNYMMAIYVGQDKKGKEKREFELVNNITAVNFYRRSNDKVPTDNQLVPQFSKSGYELRYKLKIGTMVLLYENSPEEIWDLDRANLQKRLYKVTGLSSMVIQGKYEFGTIEMIHHQNAKPSTEIKKVNGEFKHDEEFRPGIKMLHSQIKALVQGVDFEINDLGEIRRLI

SEQ ID NO: 19509 - protein, 1204 aa, unidentified
  REGION 1..1204: note = Cas Enzyme sequence
MDRILGIDTGTNSLGWAIVDKDDNTYHLVAKGTNIFSEGVKIEKGIESSKAAERTDHRSVRKHYWRRKIRKIRLLTILSDNDLCPRLDKDKLRQWRLKKVYPTDDTFMEWQRTEDKAQVNPYKFRFICLTQKLDLSDITQRFILGRALYHLNQRRGFLSNRKESTKESEGAVKEGISSLSENMKVAGCEYLGEYFYHLYQNGKKIRNHYTARKEHYLKEFKAICNKQELDADLVSKLEHAIFDQRPLKSQKGQVGTCTFEKGKSRCPSSHPLYEDFRMYSFINTIKVQVNTVFERGERYLSDEEKQKIIPLFKRKSKRTFPFEDIAKKLAGKNNYCYCKSGEDRPYKFNYQMDTQVSGSPVNAQLEEIFGEDWLTSVCEVYTLAKDKTRFQIMNDVWHALFFFDDEDKLREFAMNRLQLGAEDAEKFSKISIPNDYAALSLKAIRKIIPYMRNYGLIYSEAVFLANLVEVLPQHIWGIKEMREAAIENVIDVMHSYDKNNVDGITLEACVKGFLKDRYQVSDEALKKLYHPSMMELFPRQRPNEDGIYQLGSPRISSVKNPMAMHSLFRLRKVVNLMLKKGYINPDTKIHIEFSRDLNDANKRWAIQAWQRENEKDRERCRKEIEKYITTPSDTDILKYQLWEEQNHKCLYTGEEIRITDFLGDNPKYDIEHTIPRSAGGDSTKMNLTLCSSRYNRDEKKTKLPTQLAVHDDILERIKDWKEKYEELEKQIRKISTKGAASKEEKDAKIRRRHLLSLQRDYWRGKYQRFTMTEVPEGFSRRQGTDISVISRYARMYLRSVFKQVYIVKGIATSDFRKMWGIQEEFTKKERVNHVHHCIDAITIACIGKTEYDKLAQFYHESDEYKQGRGEKPVFEKPWPSFVSDVKQIQDELLIAHYSKDIVPKQAKRYVRDSKGKKVLTQGDTARASLHNDTYYGAIKMDGDLKYVVRKNLDGLDEKDVKNIVDDEVRSKVENSILLHGSLKKALEETIWMNEEKQIPIKKVRVYTGSVTRPINIRHQRDQSKHEYKRQYHVQNDRNYMMAIYVGYDKKGKEKREFELVNNITATNFYRRSNDRVPTDNQLVPRYSQSGYELRYKLKIGTMVLLYENNPEEVWDLDKGNLQKRLYKVTGMSSMIIQRKFEYGTIELVHHQNAKPSSEIKKENGEYKSGAEFRPGIKMLHSQIRALVQGVDFEIDDLGEIRRLI

SEQ ID NO: 19510 - protein, 1214 aa, unidentified
  REGION 1..1214: note = Cas Enzyme sequence
MARILGIDTGTNSLGWAIVDKDEKGYHLIDRGVNIFQEGVKIDKGIESSKASERTLHKSTRVRYYRIKLRKINLLHILSDNHLCPPLSHEELRDWRLKKIYPKTELFMQWQSTDDAAGKNPYACRHRCLHEALDMDKLTDRYELGRAFYHIIQRRGFLSNRKEQDSDDSGKVKEGISDLTKEMEKAGCEYLGDYFYTLYNNKEKIRNHYTARIEHYHAEFKAICEKQRLPEDLAQQIEKAIFYQRPLKSQKKQVGKCVFEKNKAKCPASHPKYEEFRMLAFINNIKIKTPEDATLRPLNAEEREKIMPLFYRKSKANFDFEDIAKKLAPKKIYGCIKKSKDAEMPYLFNYDMDTSVSGCPVTASLKDIFDDDWEKGIREVYTLGEGKSGSQIINDVWHALFFFSDTDKLKEFAQKRLQLDEEDAKKFSAIKIPSAYASLSLKAILKILPFLRRGLLYSHAVFLANMGKVVPQYIWELPETREGAIENVINEINRYDARKDSRTLEVCIKDYLKQQYGATDDALKELYHPSMTETYARVMPNELGEYRLGSPRLDSVRNPMAMRSMFRLRKLINRLLAEGKIDADTTIHIEFARELNDANKRAALHDYQRENQNEKDKARKAIIDLYKEETGLEIVPNDKDILKYMLWEEQKHICLYTGDNISVASFIGANPKYDIEHTIPRSVGGDSTRMNLTLCDCRFNRETKKTKLPSELPNHEEILSRISGWKREYEELETKIRKNKRTTKGSSTKELRDRMIRKRRLLEMQRDYWKGKYMRFTMQEVPEGFSRRQGADISIISKYARLYLLSLFHHVYTVKGIATSDFRKIWGIQEIYDKKERVNHVHHCIDAIVIACIGRDEYNKLGAYYHDEENSEWFGASKAHFDMPWPTFVTDMKTIQDELLVYHYTPDNMHKQGRRRILINGKKVMSKGDAARGSLHNDTYYGAIEHDGEIKYVKRVELASLNVAQLNVDSFIKSIVDETVREIIRKAIAEKGIKEAIAGPIWMNEEKRIPIKKVRCYMPSVTSPLHIRQHRDQSVKEYKRTFHVANDRNYMMAIYKGKDQKGKEKSEFELVNMLEAARYFKTSNDKEAADYNIVPVKSTSGYPLAYTLKIGTMVLLYENNPSEIWEGTKAEISRRLYKVTGLSILNVGSNSYGRITLTFHEEARASKEIKTRNGAYKQGEELRPSILMYHTQIKAIVQGYDFEINEAGEIKRLR

SEQ ID NO: 19511 - protein, 962 aa, unidentified
  REGION 1..962: note = Cas Enzyme sequence
LFKQFFYCNFTEKFKTASKMTKILGIDTGTNSLGWAIVEKKAEQYCLLDKGVNIFQEGVNIDKDNESSKAAERTGYRAIRVRYYRIKLRKIRLLHILTQHHLCPPLTSWELRQWRLKSIYPTDELFMQWQRTDEEKGQNPYAYRHLCLHEKLDLTQVANRYILGRVFYHFAQRRGFLSNRKDQSGEDVGVVKDGISSLSEEMREAGCEYLGDYFYQLYEKGKKIRKHYTARNEHYLKEFHAICEKQQLDATLVSELEKAIFTQRPLKSQKRQVGKCVFEKNKAKCPASHPLYEEFRMLSFINHIKIKTPKEDELRPLNHEEREKILPLFFRKTKKTFNFEDIAKKLAPKKLYGFYKKAADTEMPYLFNYPMDTSVSGCPVTAALQDIFGDDWLDSICEVYTLADGKSRLEILNDIWHALFFYSDQDKLAEFAKVRLQLDDEQAQAFSNINLPSAYASLSLKAICKILPYLRRGLVYSHAVFLGNLCEVMPAYEWGIEEMRQAAIDCVIKEINSYDPKTDGRTLETCIKEYLKERYHVSDENLKKLYHPSMLETYPRVRPGQDGIYQLGSPRTDSVRNPMAMRSLFCLRKLVNRLLKEGKIDQETEIHIEFSRELNDANKRSALKRYGRDNQKAHDTARKHIVEDYKAETGKAIEPTPTDILKYELWEEQQHICLYTGQQIRISDFIGPNPKFDIEHTLPRSRGGDSTKMNLTLCDSRFNRDVKKTHLPTELANHDEIMARIAIWQEKYEELSQQIRKQKRKSQAATTKEQKDKAISYRHYLELQRDYLRGKHERFTMESVPEGFNRRQGVDIGIISKYARLYLKSVFKRVYPVKGLATSDFRKIWGLQDIYSAKERVNHVHHCINAIVVACIGLDEYGKLAEYYHDEEKHEWYGASKATFAKPWPTFVEDVRRMQNELLVYHHTPDNMAKQGLAESSSMGKRSWQRETPCVAHSTRRLTMAQ

SEQ ID NO: 19512 - protein, 1211 aa, unidentified
  REGION 1..1211: note = Cas Enzyme sequence
MTKILGIDTGTNSLGWAIVEKKAEQYCLLDKGVNIFQEGVNIDKDNESSKAAERTGYRAIRVRYYRIKLRKIRLLHILTQHHLCPPLTSWELRQWRLKSIYPTDELFMQWQRTDEEKGQNPYAYRHLCLHEKLDLTQVANRYILGRVFYHFAQRRGFLSNRKDQSGEDVGVVKDGISSLSEEMREAGCEYLGDYFYQLYEKGKKIRKHYTARNEHYLKEFHAICEKQQLDATLVSELEKAIFTQRPLKSQKRQMGKCVFEKNKAKCPASHPLYEEFRMLSFINHIKIKTPKEDELRPLNHEEREKILPLFFRKTKKTFNFEDIAKKLAPKKLYGFYKKAADTEMPYLFNYPMDTSVSGCPVTAALQDIFGDDWLDSICEVYTLADGKSRLEILNDIWHALFFYSDQDKLAEFAKVRLQLDDEQAQAFSNINLPSAYASLSLKAICKILPYLRRGLVYSHAFFLGNLCEVMPAYEWGIEEMRQAAIDCVIKEINSYDPKTDGRTLETCIKEYLKERYHVSDENLKKLYHPSMLETYPRVRPGQDGIYQLGSPRTDSVRNPMAMRSLFCLRKLVNRLLKEGKIDQETEIHIEFSRELNDANKRSALKRYGRDNQKAHDTARKHIVEDYKAETGKAIEPTPTDILKYELWEEQQHICLYTGQQIRISDFIGPNPKFDIEHTLPRSRGGDSTKMNLTLCDSRFNRDVKKTHLPTELANHDEIMARIAIWQEKYEELSQQIRKQKRKSQAATTKEQKDKAISYRHYLELQRDYLRGKHERFTMESVPEGFNRRQGVDIGIISKYARLYLKSVFKRVYPVKGLATSDFRKIWGLQDIYSAKERVNHVHHCIDAIVVACIGLDEYGKLAEYYHDEEKHEWYGASKATFAKPWPTFVEDVRRMQNELLVYHHTPDNMAKQGRRRIIINGKKVLAKGDAVRGSLHKETYYGAIEREGEVKYVKRVELSQLEEKNIKYIVDDTVRQIVQEAVDRLGFTEAMASTIWMNEEKQIPIKKVRCYTPQVTQPLHIRYQRDVSDKEYKRKYHVVNDKNYLLAIYIGADKKGKEKRDFELVNNLQAAKYYRTSNDRTGSGDPIVPVKSSHDYPLAYTLKIGTMLLLYENSPAELYEASQTELNRRLYKVTGLSSMTVGTRSYGVIVMKYHTEARQSKDLKGKNGAYQTGEELRPVIRMLHTQIKAAVQGVHFRINELGEIKWLARYD

SEQ ID NO: 19513 - protein, 1214 aa, unidentified
  REGION 1..1214: note = Cas Enzyme sequence
MERILGIDTGTNSLGWAIVDNEDGVKKLIAKGSNIFSEGVKIEKGIESSKAAERTDHRSVRKHYWRRKIRKIRLLTILSANHLCPPLEQSSLRQWRLKKLYPDNELFMEWQRTEDKRSINPYKFRYICLTQKLDLTDITQRYILGRALYHLNQRRGFLSNRKETTKESEGSVKDGINALTKQMEDAGCKYLGEYFYLLYQKGLKIRNHYTARKDHYLKEFLAICEKQELNATLVEKLEKAIFDQRPLKSQKGQVGTCTFEKGKSRCSSSHPLYEDFRMYAFLNNIKVQIHTLYEDADRYLTKEEKEQIIPLFKRKSKRTFPFEDIAKKLAGKNNYCYYKSNEEKPYRFNYQMDTSISGSVVNAQLEEVFGENWLDSACEVYTLAKDKTRFQIMNDIWHALFFYDDEEKLKEFAINRLQLDDEQADKFSKISLPNDYASLSLKAIRKILPYMRDYGLIYSEATFLANLVEVLPQHVWGIKEMREAAIENVIDVMHSYDKNNIDGVTLESCVKSFLKERYNVIDEDLNKLYHPSMMEQYPRQRPNDEGIYQLGSPRISSVKNPMAMHSLFRLRKVVNLLLKEGQITPETKIHIEFSRDLNDANKRKALQTLQRQNEKDREECRKKIAEHIVNPSDDDILKYQLWEEQNHKCIYTGEEIRITDFLGDNPKYDIEHTVPRSAGGDSSKMNLTLCSNRYNRDVKKTKLPSQLPNHEEILDRIQSWKEKYEEKDRLIRKNIGRSRHTTSKDEKDRLIQDRHQLEVERDYWKGKYERFLMTEVPEGFSRRQDVGIGLISRYARMYLKSVFKQVYIVKGRATSEFRQKWGLQEEYTKKERVNHVHHCIDAITIACIDKVAYDKLAEYHHKYDEYRYNEGEKPSFELPWPSFVSDVKSVQDELLIAHYSKDIVGKETKKNIRGNDGRIVRDSNGRKMKMKGDTARASLHNETYYGAIEVDGEIKYVVRKSLDSLDEKDVKNIVDGEVRAKVEHAILLYGSLKKALEEKIWMNEEKQIPINKVRIFTGSVTRPISIRQQRDQSKHEYKRQYHVQNDRNYMMAIYVGQDKKGKEKREFELVNNITAANFYRRSNDKVPTDNQLVPLYSKSGYALRYKLKIGTMVILYENGPEEVWELDKKNLQKRLYKVTGMSSMLLRQKDNYGTIELVHHQDARPSTEIKKKNGSFCDGEDFRPGIKMLHTQFRALVQGVDFEINDLGEIRRLI

SEQ ID NO: 19514 - protein, 918 aa, unidentified
  REGION 1..918: note = Cas Enzyme sequence
MKIHTLYENTERGLTEEEKLKVIPLFKRKSKKTFPFEDIAKKLAGKNNYCYYKSDVDKPYKFNYQMDTQVSGSVVSAQLEELFGEDWLSGVCEVYTLAKDKTRFQIMNDIWHALFFFDDDEKLKEFAVNRLQLNDEDAEKFSNISMPNDYSSLSLKAIRKMLPYMRDYGMMYSQAVFVANLCEVLPHYIWGIKETREVAIENVINEINSYDSNRIDGKTMEACIKDFLREKYQIDENNLKKLYHPSMLELYPRQCPNDEGIYQLGSPRISSVKNPMAMHSLFRLRKVVNLLLKEQIITPETKIHIEFSRDLNDANRRWAIQTWQRDNEKERMNCRKEIEKYISNPTDSDIMKYQLWEEQNHKCLYTGEEIRITDFLGSNPRYDIEHTIPRSAGGDSTKMNLTLCSNRFNRDVKRTNLPSQLTNHEDILERIAAWKEKYEELAKQIRKTNTRGAASKEEKDKIIKRRHYLSLQYDYWRGKYQRFVMTEVPEGFSRRQGTDISVISRYARMYLKSVFKQVYIVKGIATSDFRKMWGIQDEYTKKERINHVHHCIDAITIACIDKNEYDKLAQFYHQSDEYKLGRGEKPVFGKPWPTFVSDIKQIQDELLIAHYFKDNMPKQAKRYVRDSKGRKVLTQGDTARASLHNDTYYGAIEVDGAIKYVVRKKLSGLEEKDVKNIVDAEVRSKVENAILLHGSLKKALEETIWMNEEKQIPINKVRVFTGSVTRPINIRQQRDKSRHEYKRQFHVQNDRNYMMAIYIGHDKNGKEKREFELINNITAANFYRRSNDRIPTDNQLVPLYSKSGYELCYRLKIGTMVLLYENSPEEVWELDKKNLQMRLYKITGLSSMVIQQKYEFGTIEMVHHQNARPSSDVKKVNGEYKSNEEFRPGIKLLHTQFKALVQGVDYEINDLGEIKRLL

SEQ ID NO: 19515 - protein, 1204 aa, unidentified
  REGION 1..1204: note = Cas Enzyme sequence
MERILGIDTGTNSLGWAIVDKDENGYKLVSKGTNIFSEGVKIEKGIESSKAAERTEHRSVRKHYWRRKVRKIRLLTILSENNLCPPLKTADLRQWRLKKIYPKDEDFMEWQRTEDKANVNPYKFRYICLTQKLDLSDITQRFILGRALYHLNQRRGFLSNRKESTKESEGAVKEGISALSDEIKAAGCEYLGEYFYQLYQKGERIRNHYTARKEHYLKEFKAICTKQELDEELVIKLEHAIFDQRPLKSQKGQVGTCTFEKGKSRCPSSHPLYEDFRMYSLINNIKVQVNTMFEKGERFLTDEEKQKIIPLFKRKSKRTFPFEDIAKKLAGKNNYCYYKSGEDKPYQFNYQMDTQVSGSPVNAQLEEIFGEDWLTSVCEVYTLAKDKTRFQIMNDVWHTLFFFDDEDKLKEFAKNRLQLGEEDAEKFSKISIPNDYAALSLKAIRKIIPYMRNYGLIYSEAVFLANLVDVLPQHIWGIKEMRDATIENVIDVMHSYDKNNVDGITLETCVKGFLKDRYQVSDEALKKLYHPSMMELYPRQRPNDDGIYQLGSPRISSVKNPMAMHSLFRLRKVVNLMLKEGYVTPDTKIHIEFSRDLNDANKRWAIQAWQRENEKDRERCRKEVEKYITNPSDTDILKYQLWEEQNHKCLYTGEEISITDFLGDHPKYDIEHTVPRSAGGDSTKMNLTLCSSRFNRDEKKTKLPTQLAVHDDILERIKDWKERYEELDKQIRRISTKGAASKEEKDAKIRRRHLLSLQRDYWRGKYQRFTMTEVPEGFSRRQGTDISVISRYARMYLRSVFKQVYIVKGIATSDFRKMWGIQEEYTKKERVNHVHHCIDAITIACIGKTEYDKLAQFYHESDEYQQGRGEKPVFEKPWPSFVSDIKKIQDELLIAHYSKDNLEKYTKKNLRGKDGRIIRDQQGNKLQMKGDTSRNSLHNDKFYGAINHDGTIRYVYRTNIEDLDAKSIDNIVDPAVRGIIEAAIATHGSLKAAVNNGIWMNEEKRIPIKKVRIFRNDVKKPIELKDQRDLSDKEYKHHYYVTNDGNYMMLIFSKINNKGREIREHVVINSLEATEVIKSHKRTQNGKVAWESYYSKEGYDLIYKLKSGTMVLLYENNGDEIWDLDKRNLQRRLYIITKMKFDGRIYMMHHQEAREKKDLEEKSGLFKENEEYRPIIVNSYNQFKALVQGVDFEINDLGEIKRLI

SEQ ID NO: 19516 - protein, 1211 aa, unidentified
  REGION 1..1211: note = Cas Enzyme sequence
MTKILGIDTGTNSLGWAIVEKNADDYHLLEKGVNIFQEGVKIEKGIESSKAAERTAHKAARVRNYRIKLRKIRLLRILSDAHLCPPLSKAELSAWRLKKEYPKNELFMQWQATDDDSEKTPYAYRHICLHENLDFCSMTDRYILGRAFYHMIQRRGFLSNRKDQNGDETGKVNESISSLTQQMHDAGYEYLGDYFFFLYNKGEKIRNHYTARNEHYLAEFKAICEKQDLDKNLGPEVVRQIEKAIFDQRPLKSQKGQVGKCVFEKNKTKCPSSHPMYEEFRMLSFINNIKIQTPNDDALRPLTTEERELIMPLFYRKSKKQFDFEDIAKKLAPKKQYGFYKKSTDVAMPYLFNYPMDTSVSGSPVTASLKDIFGEDWINGLCETYTLAEGKTRLDVVNDIWHALSFYTDNAKLAEFAKNRLQLNDDEAKKFCDISLPGDYAALSLKAICKILPYLRRGLIYSHAVFLGNLCEVMPQYEWNIEEMRNAAIDNIIHEMNQIDSKDARTFEVCIKEYLKEQYHVSDEKLKKLYHPSMMEMYPKVQHTNNHGVYQLGSPRIDSVRNPMAMRSMFRLRKLVNRLLEEGKIDQDTEIHIEFARELNDANKRNAIAAYTKENQNKNDEARKKIKSLFKDETGKDIEPSDIDVLKYVLWEEQKHICLYTGKQICISDFIGSNPKFDIEHTIPRSVGGDSTKMNLTLCDSHFNRDIKKTQLPTELSNHDEIMARINDWKEKYESLDGQIRRQKKLSKGASSKEQKDGIIRKRHLLELQRDYWRGKYLRFTMESVPEGFSRRQGTDISVISKYARLYLKSLFKHVYTVKGIATSDFRKIWGIQKTYSKKERVNHVHHCIDAIVIACIGLDEYNKLGAYYHDEENHEWYGKSKAYFKKPWSTFVEDIERVQDEILVYHYTPDNMPKQGRRRILLDVEINGRKKKKKVLCKGDAARGSLHKDTYYGAIMRSGEDAPYYVVRKNVDNHLSDQDIKNIVDDVVRGIIQNAVAKGGKDALNGTIWMNEEKQIPIKKVRCITSVKNPLSFEHRKPRDISNKSYKNNYYVAPDDNYLMAVYKGVTSKGKVKYMYEFINMLDAARFYKQSNDKVLVDGNIVQLNKDGFNLDFTLKKGTMVLLYIDNPDEVWENNGDWSRRLYKVTELWKDGRIVVTKHTEARPSSEVPKVTKGFCIGDSKGLYSYSKFSALVQGYDFEINELGEIKRLR

SEQ ID NO: 19517 - protein, 1212 aa, unidentified
  REGION 1..1212: note = Cas Enzyme sequence
MIKILGIDNGTNSHGWAVVGKTADNYILLDKGVNIFQEGVKLDKGIESSKAAERTEHRATRVRYYRRKLRKIRLLRILSDNHLCPPLTQGELSTWRLKKVYPKNELFMQWQRTDDEAEKTPYAYRHKCLHEKLDLSDITDRYILGRAFYHIIQRRGFLSNRKDQGGEDSGKVKEGISTLTQEMNEAGYEYLGDYFYVLYNRGEKIRKHYTARNEHFLSEFKAICEKQELEKELGLEVVRNIEKAIFDQRPLKSQKGQVGKCVFEKNKTKCPSSHPMYEEFRMLTFINNIKIKTPNDAALRPLNTGEREIIMPLFFRKSKKQFDFKDIAKRLAPKNMYGFYKKGEDAEMPFLFNYPMDTSVSGCPVTAALKDVFGNDWINAICETYTLGEGKSRFDIVNDICHALYFYSDKDKLAEFAINRLQLSEDEAKRFSEISLPADYASLSLKAICKILPYLRRGLIYSHAVFLGNLCEVMPKYEWSIKEMREAIIDNIIMEMNRYDTKDKRTFEVCIKDYLKEQYNVSDDCLKKLYHPSMIEKYPRVQYANEHGVYQLGSPRIDSIRNPMAMRSMFRLRKLVNRLLEEGKIDQDTEVHIEFARELNDANKRNAIALFVKENQRANEEARNKIKTLFKNETGKDIEPTDKDILKYVLWEEQNHICLYTGKQIRISDFIEDDQKFDIEHTIPRSVGGDSTKMNLTLCDSRFNRDIKKTKLPIELSNHDEILERINEWKKKYELLDMQIRKLRKLSKGATTKEQKDTIIRKRHLLELRRDYWRGKYERFTMESVPEGFSRRQGTDISVISKYARLYLKSLFNRVYTVKGIATSDFRKIWGIQDIYSKKERVNHVHHCIDAIVIACIGLDEYNKLGAYYHDEENHKWYGMSKATFKKPWPTFVEDIKKIQDEILVYHYTPDNMPKQGRRRIMIDGKKILCKGDAARGSLHKDTYYGAIENAGAVKYVKRIDLASLEKNDVKNIVDDTVRGIIEATIKEKGFKDAMASTIWMNEEKQIPIKKVRCFTPSVTKPLNIRKQRDVSTKEYKQQYHVANDDNYLLAMYIGTNNKGKEKREFEIVNMLQAAQYYRTSNDKEVVDRHMVPIKSEHDYPFAYTLKTGTMVLLYEKSSNEVWEASVKERNRRLYKVTGMSTSTIGNCIYARITMVYNEEARPSKDIKAKNGAYKQGEKLRPAIIMLHTQLNALVQGYDFEINELGKIKRLR

SEQ ID NO: 19518 - protein, 1208 aa, unidentified
  REGION 1..1208: note = Cas Enzyme sequence
MTKILGIDTGTNSLGWAIVEKKADEYHLLDKGVNIFQEGVKIEKGIESSKAADRTAHKAARVRNYRIKLRKIRLLRILSDAHLCPPLSKVELSAWRLKKEYPKNDLFMQWQGTDDESEKTPYAYRHKCLHECLNFNSMTDRYILGRAFYHMIQRRGFLSNRKDQSGDDTGKVKESISNLTQEMHDDGYEYLGDYFYSLYNKGEKIRNHYTARNEHYLAEFKAICEKQKLDKNLGPEIVRQIEKAIFDQRPLKSQKGQVGKCVFEKNKTKCPSSHPMYEEFRMLSFINNIKIQTPNDSALRPLSAEERELIMPLFFRKSKKQFDFEDIAKKLAPKKHYGFYKKSSDAEMPYLFNYPMDTSVSGCPVTTALKDIFGDNWIDSLCETYTLAEGKSRLNVVNDIWHALFFYTDETKLAEFGKNRLQLDDEEAKKFCEISLPSDYASLSLKAICKILPYLRRGLIYSHAVFLGNLCEVMPQYEWDIEEMRNAAIEHIIHEMNQINSKDARTFEVCIKEYLKEQYHVSEEKLKKLYHPSMMEVYPRVQRTNNHGVYQLGSPRIDSVRNPMAMRSMFRLRKLVNRLLEEGKIDSDTEIHIEFARELNDANKRNAIALFTKDNQKKNDEARKKIIDIMGKDYDVKDDDILKYILWEEQGHICLYTGRQIAISDFVGTSQKFDIEHTIPRSVGGDSTRMNLTLCDSRFNRDVKKTKLPAELPNHDEIMARINDWREKYESLDGQIRKLKGKSKGATTKKQKDDIISKRHLLELQRDYWRGKYLRFMMESVPDGFSRRQGTDISVISKYARLYLKSLFKHVYTVKGIATSDFRKIWGIQDAYSQKERVNHVHHCIDAIVIACIGLDEYNKLGAYYHDEENHEWYGMSKAYFKKPWSTFVEDLKKVQDEILVYHYTPDNMPKQGRRRILIDGKKVLSKGDAARGSLHNDTYYGAIENDGVVRYVKRINLASMKENDVKNIVDDTVRGIIEAAINEKGFKKAMSSTIWMNEEKQIPIKKVRCYTPSVTKPLNIRQQRDVSPKEYKQQYHVTNDSNYLLALYIGKDKRGKEKREFEIINMLQTAQYFRTSNDKVAVGHNIVPIKSEHDYPLAYSLKIGTMVLLYEKSPNEVWEASVKERGRRMYKITGLSSMTINGCSYATINMRNHEEARLSKEVKAKNGTYKQGEEFRPAIIMLHTQLNALVQGYDFEINELGEIKRLR

SEQ ID NO: 19519 - protein, 979 aa, unidentified
  REGION 1..979: note = Cas Enzyme sequence
VVHQIEKAIFYQRPLKSQKGQVGKCVFEKNKTRCPSSHPMYEEFRMLSFINNIKIQTPNDDVLRPLSSEERALIMPLFFRKLIIKKKQFDFEDIAKKLAPKKQYGFYKKSSDAEMPYLFNYPMDTSVSGCPVTTALKDIFGDNWIDSLCETYTLAEGKSRLNVVNDIWHALFFYTDETKLAEFGKNRLQLDDEEAKKFCEISLPSDYASLSLKAICKILPYLRRGLIYSHAVFLGNLCEVMPQYEWNMEEMRNAAIDNIIYEMNQIDSKDACTFEVCIKEYLKEQYHVSDEKLQKLYHPSMMEMYPRVQHTNNHGVYQLGSPRIDSVRNPMAMRSMFRLRKLVNRLLEEGKIDQDTEIHIEFARELNDANKRNAIAAYTKENQNKNDEARKKIRNLFKAETGNDIEPTDADVLKYVLWEEQGHICLYTGKQIRISDFVGANPKFDIEHTIPRSVGGDSTKMNLTLCDSRFNRDVKKTKLPTELSNHDEIMTRINEWKEKYESLEGQIRKQKKLSKGASSKEQKDDIIRKRHLLELQRDYWRGKYLRFTMESVPEGFSRRQGTDISVISKYARLYLKSLFKHVYTVKGIATSDFRKIWGIQKVYSKKERVNHVHHCIDAIVIACIGLDEYNKLGAYYHDEENHEWYGMSKAYFKKPWSTFVEDIKRVQDEILVYHYTPDNMPKQGRRRILLDVEINGRKKKKKVLCKGDAARGSLHKDTYYGAIMRSGEDTPYYVVRKNVDNHLSDQDIKNIVDDVVRGIIQNAVAKGGKDALNGTIWMNEEKQIPIKKVRCITSVKNPLSFEHRKPRDISNKCYKNDYYVAPGDNNYLMAVYKGVTSKGKVKYMYEFINMLDAAKFYKQSNDKVLVDGNIVQLNKDGLNLYYTLKKGTMVLLYVDNPDEIWENNGDWSRRLYKVTELWKAGRIVVTKHTEARPSSEVPKVTKGFCIGDSKGLYSYSKFSALVQGYDFEINELGEIKRLR

SEQ ID NO: 19520 - protein, 1215 aa, unidentified
  REGION 1..1215: note = Cas Enzyme sequence
MTKILGIDTGTNSLGWAIVEKKADEYHLLDKGVNIFQEGVKIEKGIESSKAADRTAHKAARVRNYRIKLRKIRLLRILSDAHLCPPLSKAELSAWRLKKEYPKNELFMQWQSTDDESEKTPYAYRHKCLHDCLDFSSITDRYILGRAFYHMIQRRGFLSNRKDQSGDDTGMVKESISNLTQEMHDAGYEYLGDYFYSLYNKGEKIRNHYTARNEHYLAEFKAICEKQELDKNLGHEVVHQIEKAIFYQRPLKSQKGQVGKCVFEKNKTRCPSSHPMYEEFRMLSFINNIKIQTPNDDVLRPLSSEERALIMPLFFRKLIIKKKQFDFEDIAKKLAPKKQYGFYKKSSDAEMPYLFNYPMDTSVSGCPVTTALKDIFGDNWIDSLCETYTLAEGKSRLNVVNDIWHALFCYTDETKLAEFGKNRLQLDDEEAKKFCEISLPSDYASLSLKAICKILPYLRRGLIYSHAVFLGNLCEVMPQYEWNMEEMRNAAIDNIIYEMNQIDSKDARTFEVCIKEYLKEQYHVSDEKLQKLYHPSMMEMYPRVQHTNNHGVYQLGSPRIDSVRNPMAMRSMFRLRKLVNRLLEEGKIDQDTEIHIEFARELNDANKRNAIAAYTKENQNKNDEARKKIRNLFKAETGNDIEPTDADVLKYVLWEEQGHICLYTGKQIRISDFVGANPKFDIEHTIPRSVGGDSTKMNLTLCDSRFNRDVKKTKLPTELSNHDEIMTRINEWKEKYESLEGQIRKQKKLSKGASSKEQKDGIIRKRHLLELQRDYWRGKYLRFTMESVPEGFSRRQGTDISVISKYARLYLKSLFKHVYTVKGIATSDFRKIWGIQKVYSKKERVNHVHHCIDAIVIACIGLDEYNKLGAYYHDEENHEWYGMSKAYFKKPWSTFVEDIKRVQDEILVYHYTPDNMPKQGRRRILLDVEINGRKKKKKVLCKGDAARGSLHKDTYYGAIMRSGEDTPYYVVRKNVDNHLSDQDIKNIVDDVVRGIIQNAVAKGGKDALNGTIWMNEEKQIPIKKVRCITSVKNPLSFEHRKPRDISNKCYKNDYYVAPGDNNYLMAVYKGVTSKGKVKYMYEFINMLDAAKFYKQSNDKVLVDGNIVQLNKDGLNLYYTLKKGTMVLLYVDNPDEIWENNGDWSRRLYKVTELWKAGRIVVTKHTEARPSSEVPKVTKGFCIGDSKGLYSYSKFSALVQGYDFEINELGEIKRLR

SEQ ID NO: 19521 - protein, 1214 aa, unidentified; identical to SEQ ID NO: 18983
  REGION 1..1214: note = Cas Enzyme sequence

SEQ ID NO: 19522 - protein, 1033 aa, unidentified
  REGION 1..1033: note = Cas Enzyme sequence
MHDAGYEYLGDYFYSLYNKGEKIRNHYTARNEHYLAEFKAICEKQELDKNLGHEVVHQIEKAIFYQRPLKSQKGQVGKCVFEKNKTRCPSSHPMYEEFRMLSFINNIKIQTPNDDVLRPLSSEERALIMPLFFRKLIIKKKQFDFEDIAKKLAPKKQYGFYKKSSDAEMPYLFNYPMDTSVSGCPVTTALKDIFGDNWIDSLCETYTLAEGKSRLNVVNDIWHALFFYTDETKLAEFGKNRLQLDDEEAKKFCEISLPSDYASLSLKAICKILPYLRRGLIYSHAVFLGNLCEVMPQYEWNMEEMRNAAIDNIIYEMNQIDSKDARTFEVCIKEYLKEQYHVSDEKLQKLYHPSMMEMYPRVQHTNNHGVYQLGSPRIDSVRNPMAMRSMFRLRKLVNRLLEEGKIDQDTEIHIEFARELNDANKRNAIAAYTKENQNKNDEARKKIRNLFKAETGNDIEPTDADVLKYVLWEEQGHICLYTGKQIRISDFVGANPKFDIEHTIPRSVGGDSTKMNLTLCDSRFNRDVKKTKLPTELSNHDEIMTRINEWKEKYESLEGQIRKQKKLSKGASSKEQKDGIIRKRHLLELQRDYWRGKYLRFTMESVPEGFSRRQGTDISVISKYARLYLKSLFKHVYTVKGIATSDFRKIWGIQKVYSKKERVNHVHHCIDAIVIACIGLDEYNKLGAYYHDEENHEWYGMSKAYFKKPWSTFVEDIKRVQDEILVYHYTPDNMPKQGRRRILLDVEINGRKKKKKVLCKGDAARGSLHKDTYYGAIMRSGEDTPYYVVRKNVDNHLSDQDIKNIVDDVVRGIIQNAVAKGGKDALNGTIWMNEEKQIPIKKVRCITSVKNPLSFEHRKPRDISNKCYKNDYYVAPGDNNYLMAVYKGVTSKGKVKYMYEFINMLDAAKFYKQSNDKVLVDGNIVQLNKDGLNLYYTLKKGTMVLLYVDNPDEIWENNGDWSRRLYKVTELWKAGRIVVTKHTEARPSSEVPKVTKGFCIGDSKGLYSYSKFSALVQGYDFEINELGEIKRLR

SEQ ID NO: 19523 - protein, 1215 aa, unidentified
  REGION 1..1215: note = Cas Enzyme sequence
MTKILGIDTGTNSLGWAIVEKKADEYHLLDKGVNIFQEGVKIEKGIESSKAADRTAHKAARVRNYRIKLRKIRLLRILSDAHLCPPLSKAELSAWRLKKEYPKNELFMQWQSTDDESEKTPYAYRHKCLHDCLDFSSITDRYILGRAFYHMIQRRGFLSNRKDQSGDDTGMVKESISNLTQEMHDAGYEYLGDYFYSLYNKGEKIRNHYTARNEHYLAEFKAICEKQELDKNLGHEVVHQIEKAIFYQRPLKSQKGQVGKCVFEKNKTRCPSSHPMYEEFRMLSFINNIKIQTPNDDVLRPLSSEERALIMPLFFRKLIIKKKQFDFEDIAKKLAPKKQYGFYKKSSDAEMPYLFNYPMDTSVSGCPVTTALKDIFGDNWIDSLCETYTLAEGKSRLNVVNDIWHALFFYTDETKLAEFGKNRLQLDDEEAKKFCEISLPSDYASLSLKAICKILPYLRRGLIYSHAVFLGNLCEVMPQYEWNMEEMRNAAIDNIIYEMNQIDSKDARTFEVCIKEYLKEQYHVSDEKLQKLYHPSMMEMYPRVQHTNNHGVYQLGSPRIDSVRNPMAMRSMFRLRKLVNRLLEEGKIDQDTEIHIEFARELNDANKRNAIAAYTKENQNKNDEARKKIRNLFKAETGNDIEPTDADVLKYVLWEEQGHICLYTGKQIRISDFVGANPKFDIEHTIPRSVGGDSTKMNLTLCDSRFNRDVKKTKLPTELSNHDEIMTRINEWKEKYESLEGQIRKQKKLSKGASSKEQKDGIIRKRHLLELQRDYWRGKYLRFTMESVPEGFSRRQGTDISVISKYARLYLKSLFKHVYTVKGIATSDFRKIWGIQKVYSKKERVNHVHHCIDAIVIACIGLDEYNKLGAYYHDEENHEWYGMSKAYFKKPWSTFVEDIKRVQDEILVYHYTPDNMPKQGRRRILLDVEINGRKKKKKVLCKGDAARGSLHKDTYYGAIMRSGEDTPYYVVRKNVDNHLSDQDIKNIVDDVVRGIIQNAVAKGGKDALNGTIWMNEEKQIPIKKVRCITSVKNPLSFEHRKPRDISNKCYKNDYYVAPGDNNYLMAVYKGVTSKGKVKYMYEFINMLDAAKFYKQSNDKVLVDGNIVQLNKDGLNLYYTLKKGTMVLLYVDNPDEIWENNGDWSRRLYKVTELWKAGRIVVTKHTEARPSSEVPKVTKGFCIGDSKGLYSYSKFSALVQGYDFEINELGEIKRLR

SEQ ID NO: 19524 - protein, 1212 aa, unidentified
  REGION 1..1212: note = Cas Enzyme sequence
MTKILGIDTGTNSLGWAIVEKKADEYHLQDKGVNIFQEGVKIEKGIESSKAADRTAHKAARVRNYRIKLRKIRLLRILSDAHLCPPLSKVELSAWRLKKEYPKNDLFMQWQGTDDESEKTPYAYRHKCLHECLDFNSMTDRYILGRAFYHMIQRRGFLSNRKDQSGDDTGKVKESISNLTQEMHDDGYEYLGDYFYSLYNKGEKIRNHYTARNEHYLAEFKAICEKQKLDKNLGPEIVRQIEKAIFDQRPLKSQKGQVGKCVFEKNKTKCPSSHPMYEEFRMLSFINNIKIQTPNDSALRPLSAEERELIMPLFFRKSKKQFDFEDIAKKLAPKKHYGFYKKSSDAEMPYLFNYPMDTSVSGCPVTAALKDIFGENWIDALCETYTLAEGKSRLDVVNDIWHALFFYTDETKLAEFAKNRLQLNDEEAKKFCEISLPSDYASLSLKAICKILPYLKKGLIYSHAVFLGNLCEVMPQYEWDIEEMRNAAIEHIIHEMNQINSKDARTFEVCIKEYLKEQYHVSEEKLKKLYHPSMMEVYPRVQRTNNHGVYQLGSPRIDSVRNPMAMRSMFRLRKLVNRLLEEGKIDQDTEIHIEFARELNDANKRNAIAAYTKENQNKNDEARKKIRNLFKAETGNDIEPTDADVLKYVLWEEQGHICLYTGKQIRISDFVGANPKFDIEHTIPRSVGGDSTKMNLTLCDSRFNRDVKKTKLPTELSNHDEIMTRINEWKEKYESLEGQIRKQKKLSKGASSKEQKDGIIRKRHLLELQRDYWRGKYLRFTMESVPEGFSRRQGTDISVISKYARLYLKSLFKHVYTVKGIATSDFRKIWGIQKVYSKKERVNHVHHCIDAIVIACIGLDEYNKLGAYYHDEENHEWYGMSKAYFKKPWSTFVEDIKRVQDEILVYHYTPDNMPKQGRRRILLDVEINGRKKKKKVLCKGDAARGSLHKDTYYGAIMRSGEDTPYYVVRKNVDNHLSDQDIKNIVDDVVRGIIQNAVAKGGKDALNGTIWMNEEKQIPIKKVRCITSVKNPLSFEHRKPRDISNKCYKNDYYVAPGDNNYLMAVYKGVTSKGKVKYMYEFINMLDAAKFYKQSNDKVLVDGNIVQLNKDGLNLYYTLKKGTMVLLYVDNPDEIWENNGDWSRRLYKVTELWKAGRIVVTKHTEARPSSEVPKVTKGFCIGDSKGLYSYSKFSALVQGYDFEINELGEIKRLR

SEQ ID NO: 19525 - protein, 1217 aa, unidentified
  REGION 1..1217: note = Cas Enzyme sequence
MTKILGIDTGTNSLGWAIVEKKADEYHLLDKGVNIFQEGVKIEKGIESSKAADRTAHKASRVRNYRIKLRKIRLLRILSDAHLCPPLSKVELSAWRLKKEYPKNDLFMQWQGTDDESEKTPYAYRHKCLHECLDFNSMTDRYILGRAFYHMIQRRGFLSNRKDQSGDDTGKVKESISNLTQEMHDDGYEYLGDYFYSLYNKGEKIRNHYTARNEHYLAEFKAICEKQKLDKNLGPEIVRQIEKAIFDQRPLKSQKGQVGKCVFEKNKTKCPSSHPMYEEFRMLSFINNIKIQTPNDSALRPLSAEERELIIPLFFRKSIIKKKQFDFEDIAKKLAPKKHYGFYKKSSDAEMPYLFNYPMDTSVSGCPVTAALKDIFGDNWIDSLCETYTLAEGKSRLNVVNDIWHALFFYTDDTKLAEFAKNRLQLNDEEARKFCEISLPGDYASLSLKAICKILPYLRRGLIYSHAVFLGNLCEVMPQYEWNMEEMRNAAIDNIIYEMNQIDSKDARTFEVCIKEYLKEQYHVSDEKLQKLYHPSMMEMYPRVQRTNNHGVYQLGSPRIDSVRNPMAMRSMFRLRKLVNRLLEEGKIDQDTEIHIEFARELNDANKRNAIAAYTKENQNKNDEARKKIRNLFKAETGNDIEPTDADVLKYVLWEEQGHICLYTGKQIRISDFVGANPKFDIEHTIPRSVGGDSTRMNLTLCDSRFNREVKKTKLPTELPNHDEIMARINDWREKYESLDGQIRRQKKMLKGATTKDQKDAIIRKRHLLELQRDYWRGKYLRFTMESVPDGFSRRQGTDISVISKYARLYLKSLFKHVYTVKGIATSDFRKIWGIQKVYSQKERVNHVHHCIDAIVIACIGLDEYNKLGAYYHDEENHEWYGMSKAYFKKPWSTFVEDVEKVQDEIMVYHYTPDNMPKQGRRRILIDGKKVLAKGDAARGSLHNDTYYGAIESDGVVKYVKRINFASMKENDVKNIVDDTVRGIIEAAINEKGFKEAMSGTIWMNEEKQIPIKKVRCYTPSVTKPLNIRQQRDVSSKEYKQQYHVTNDSNYLLALYIGKDKKGKEKREFEIINMLQTAQYFKTSNDKVAVGKNIVPLKSEHGYPFAYSLKIGTMVLLYEKSPNEIWDASLMDNNKRLYKVVGLSAMRMKGRNVDYATIKLKHHEEARLSTELKVKNGAFKQGEELRPSIIMLHTQLNALVQGYDFEINELGEIKRLR

SEQ ID NO: 19526 - protein, 1212 aa, unidentified
  REGION 1..1212: note = Cas Enzyme sequence
MIKILGIDNGTNSHGWAVVGKTADNYILLDKGVNIFQEGVKLDKGIESSKAAERTEHRATRVRYYRRKLRKIRLLRILSDNHLCPPLTQGELSTWRLKKVYPKNELFMQWQRTDDEAEKTPYAYRHKCLHEKLDLSDITDRYILGRAFYHIIQRRGFLSNRKDQGGEDSGKVKEGISTLTQEMNEAGYEYLGDYFYVLYNRGEKIRKHYTARNEHFLSEFKAICEKQELEKELGLEVVRNIEKAIFDQRPLKSQKGQVGKCVFEKNKTKCPSSHPMYEEFRMLTFINNIKIKTPNDAALRPLNTGEREIIMPLFFRKSKKQFDFKDIAKRLAPKNMYGFYKKGEDAEMPFLFNYPMDTSVSGCPVTAALKDVFGNDWINAICETYTLGEGKSRFDIVNDIWHALYFYSDKDKLAEFAINRLQLSEDEAKRFSEISLPADYASLSLKAICKILPYLRRGLIYSHAVFLGNLCEVMPKYEWSIKEMREAIIDNIIMEMNRYDTKDKRTFEVCIKDYLKEQYNVSDDCLKKLYHPSMIEKYPRVQYANEHGVYQLGSPRIDSIRNPMAMRSMFRLRKLVNRLLEEGKIDQDTEVHIEFARELNDANKRNAIALFVKENQRANEEARNKIKTLFKNETGKDIEPTDKDILKYVLWEEQNHICLYTGKQIRISDFIEDDQKFDIEHTIPRSVGGDSTKMNLTLCDSRFNRDIKKTKLPIELSNHDEILERINEWKKKYELLDMQIRKLRKLSKGATTKEQKDSIIRKRHLLELRRDYWRGKYERFTMESVPEGFSRRQGTDISVISKYARLYLKSLFNRVYTVKGIATSDFRKIWGIQDIYSKKERVNHVHHCIDAIVIACIGLDEYNKLGAYYHDEENHKWYGMSKATFKKPWPTFVEDIKKIQDEILVYHYTPDNMPKQGRRRIMIDGKKILCKGDAARGSLHKDTYYGAIENAGAVKYVKRIDLASLEKNDVKNIVDDTVRGIIKATIKEKGFKDAMASTIWMNEEKQIPIKKVRCFTPSVTKPLNIRKQRDVSTKEYKQQYHVANDDNYLLAMYIGTNNKGKEKREFEIVNMLQAAQYYRTSNDKEVVDRHMVPIKSEHDYPFAYTLKTGTMVLLYEKSSNEVWEASVKERNRRLYKVTGMSTSTIGNCIYARITMVYNEEARPSKDIKAKNGAYKQGEELRPAIIMLHTQLNALVQGYDFEINELGEIKRLR

SEQ ID NO: 19527 - protein, 1218 aa, unidentified
  REGION 1..1218: note = Cas Enzyme sequence
VNTDMTKILGIDTGTNSLGWAIVEKKADEYHLLDKGVNIFQEGVKIEKGIESSKAADRTAHKASRVRNYRIKLRKIRLLRILSDAHLCPPLSKVELSAWRLKKEYPKNDLFMQWQGTDDESEKTPYAYRHKCLHECLDFSSMTDRYILGRAFYHMIQRRGFLSNRKDQSGDDTGKVKESISNLTQEMHDDGYEYLGDYFYSLYNKGEKIRNHYTARNEHYLAEFKAICEKQKLDKNLGPEIVRQIEKAIFDQRPLKSQKGQVGKCVFEKNKTKCPSSHPMYEEFRMLSFINNIKIQTPNDSALRPLSAEERELIMPLFFRKSKKQFDFEDIAKKLAPKKHYGFYKKSSDAEMPYLFNYPMDTSVSGCPVTAALKDIFGDNWIDSLCETYTLAEGKSRLNVVNDIWHALFFYTDETKLAEFGKNRLQLDDEEAKKFCEISLPSDYASLSLKAICKILPYLRKGLIYSHAVFLGNLCEVMPQYEWNMEEMRNAAIDNIIYEMNQIDSKDARTFEVCIKEYLKEQYHVSDEKLQKLYHPSMMEMYPRVQRTNNHGVYQLGSPRIDSVRNPMAMRSMFRLRKLVNRLLEEGKIDQDTEIHIEFARELNDANKRNAIAAYTKENQNKNDEARKKIRNLFKAETGNDIEPTDADVLKYVLWEEQGHICLYTGKQIRISDFVGANPKFDIEHTIPRSVGGDSTRMNLTLCDSRFNREVKKTKLPTELPNHDEIMARINDWREKYESLDGQIRRQKKMSKGATTKDQKDAIIRKRHLLELQRDYWRGKYLRFTMESVPDGFSRRQGTDISVISKYARLYLKSLFKHVYTVKGIATSDFRKIWGIQKVYSQKERVNHVHHCIDAIVIACIGLDEYNKLGAYYHDEENHEWYGMSKAYFKKPWSTFVEDVEKVQDEIMVYHYTPDNMPKQGRRRILIDGKKVLAKGDAARGSLHNDTYYGAIESDGVVKYVKRINFASMKENDVKNIVDDTVRGIIEAAINEKGFKEAMSGTIWMNEEKQIPIKKVRCYTPSVTKPLNIRQQRDVSSKEYKQQYHVTNDSNYLLALYIGKDKKGKEKREFEIINMLQTAQYFKTSNDKVAVGKNIVPLKSEHDYPFAYSLKIGTMVLLYEKSPNEIWDASLMDNNKRLYKVVGLSAMRMKGRNVDYATIKLKHHEEARLSTELKVKNGAFKQGEELRPSIIMLHTQLNALVQGYDFEINELGEIKRLR

SEQ ID NO: 19528 - protein, 1205 aa, unidentified
  REGION 1..1205: note = Cas Enzyme sequence
LGLDLGTNSIGWALIGRKEDHSCVLLDKGVHIFQDGVAHDKSGEKPAVQERTVARASRRHYFRRRLRKIELLKVLIDNGLCPHLTQEQLKQWKEKKVYPLTEDFMRWQRSDDTEEGNPYHDRYVALTRKLDMSDIRDRYILGRALYHINQRRGFLSNRKDSGGDAEDGKVKTGITQLSGLMDEAGCRYLGEYFFKLFRDGEKIRCRYTAREEHYRAEFNAVCEKQGLDGALKRSLERAIFYQRPLKSQKGSVGTCSFEKGKPRCPVSHPRYEAFRMEQLISSVKVRRPFEETFTSLNEGEKETIRPLFFRKSKPDFEFEDIAKKIAGKGNYAFRDEGREDQYCFNYRMSASVSACPVTAAILQALELDPSEDWETVLSSVYTKAEGKTPDQILNDIWHALYSFEDESLLSKWLQSSLQLTEERAGILSKIRIPQGYASLSLKAINKILPWLKKGFVYSDAVFYANLPAALPSGISGDAGKFDNVVENIGILLEDFSKDPTSRESSKIKSISDYLLGVAEGVHPERLYHPSMIEAYQAALPDGKGRIRLGSPRIDAVRNPMAMRSLFRLRALLNSLLDEGVIDADTKVNIEFARELNDTNMRKAIADWQKEQENLRKKYYEQIRGIFGADYEPTEDDLLKYRLYEEQKHICLYTGRQITPRMFLGNAIEFDIEHTVPRSRGGDDSLANKTLCDSRFNREVKKAQLPSALEGHEQILQRIGDWKETIESLEIQISKQRRNSKTAASKEQKDAAIRRLHYLRMKRDYWKGKYDRFTMTEVPEGFSNRQGVDIGIIGRYARMYLKTVFRRIYVVKGATTADFRKAWGLQKEYEKKERVSHSHHCIDAVTIACIGKNEYDRWALYMRMEEDYRFGKGPKPHFDKPWPTFTEDVLAIPSSLIAAHYTPDNLPKLSRKKLRVRGAIQRNNGGEPKYAQGHTARALLHKDTFYGAINKDGEIRYVVRKALDALDEKDIPKIVDDAVREKVQEAVALHGNLKKAVAETIWMNREKNVPIRKVRVYTPTITSPIALKAHRDSSDKEYKRSYYVSNDGNYCMAIYGEKKPSFKLFNALSAVNHFNGKPVDWIEPVDAKGLPLRCVVRTGMMVLFYEKTPDELYSCSQEELSRRLYEVTGLSSMTIQGKYHYGILTLKHHLEARSSTDLKEKKGLWKRDEALRPVIGINHNQALFLVENQDFVLSVSGRIRFLRGRT

SEQ ID NO: 19529 - protein, 1215 aa, unidentified
  REGION 1..1215: note = Cas Enzyme sequence
MTKILGIDTGTNSHGWAIVEKKADEYRLLDKGVNIFKEGVKIEKGIESSKAADRTTHKAARVRNYRIKLRKIRLLRILSDAHLCPPLSKAELSAWRLKKEYPKNELFMQWQSTDDESEKTPYAYRHKCLHDCLDFSSITDRYILGRAFYHMIQRRGFLSNRKDQSGDDTGMVKESISNLTQEMHDAGYEYLGDYFYSLYNKGEKIRNHYTARNEHYLAEFKAICEKQELDKNLGHEVVHQIEKAIFDQRPLKSQKGQVGKCVFEKNKTRCPSSHPMFEEFRMLSFINNIKIQTPNDGALRSLSAEERELIMPLFFRKSIIKKKQFVFEDIAKKLARREQYGFYKKSTDVEMPYLFNFPMDTSVSGCPVTAALIDIFGENWVDTLCETYTLAEGKSRLDIVNDIWHVLFFYTDEAKLAEFGKNRLQLNDEDAKKFSKITLQNGYGRLCLKVICKILPYLRRGLVKDHAIFLGNLCEVMPQYEWDIKEMRIAAIDNIIREINKTDTKDESTLEKRIKLEKRIKEYLKNQYHVSDDKLKKLYHPSKMDKYPRVLRTNDHGVYQLGSPRIDSVRNPMAMRSIFRLRKLINRLLEEGKIDPETEIHIEFARELNDANKRHAIAEFAKINQKKNDEARKKIIDIMGEDYDVKDDDIKKYILWEEQGHICLYTGRHIAISDFVGNSQKFDIEHTIPRSVGGDSTRMNLTLCDSRFNRDVKKTKLPAELPNHDEIMARINDWREKYESLDEQIRKLRGKSKGATTKKLKDDIIYNRHLLELQRNYWRGKYLRFTMEIVPEGFSRRQGTDIGVISKYARLYLKSLFKHVYTVNGIATSDFRKIWGIQKVYSKKERVNHVHHCIDAIVIACIGLDEYNKLRAYYHDEENHKWYGMSKAYFKKPWPTFVEDLKNVQDEILVYHYTPDNMPKQGRRKILLDVEVEGIKKKKKVLCKGDAARGSLHSDTYYGAIENDGVVRYVKRINLTSMKVTDVKNIVDDAVRGIVEAAIREKGFKEAMAGTIWMNEEKQIPIKKVRCYTSIKNPISFDKKKQRDLSDKEYKRNYYVTTKGNYIVALYVGSTKTGKRKTFYEFVNMMEAADYYKTSNDKSVVGHNIVPLEKDDCQLAFILKKGTMIIFYKETKEEVWDYSQKETVRNLYYVSEIESDGRVTFKYHQEARLDKELPRNASDTSDIKPKIRVGLASAKILVQGYDFDINELGEIKRLR

SEQ ID NO: 19530 - protein, 934 aa, unidentified
  REGION 1..934: note = Cas Enzyme sequence
  REGION 915..931: note = misc_feature - Xaa can be any naturally occurring amino acid
TGKVKESISNLTQEMHDAGYEYLGDYFYSLYNKGEKIRNHYTARNEHYLAEFKAICEKQDLDKNLGPEVVRQIEKAIFDQRPLKSQKGQVGKCVFEKNKTKCPSSHPMYEEFRMLSFINNIKIQTPNDDVLRPLSPEERALIMPLFFRKSKKLFDFEDIAKKLAPKKQYGFYKKSSDVEMPYLFNCPMDTSVSGCPVTTALKDIFGDNWIDSLCETYTLAEGKSRLDVVNDIWHVLFFYTDDTKLAEFAKNRLQLNDEEARKFCEISLPGDYASLSLKAICKILPYLRRGLIYSHAVFLGNLCEVMPQYEWDIEEMRNAAIDHIIHEMNQIDSKDARTFEVCIKEYLKEQYHISEEKLKKLYHPSMMEVYPRVQLTNSHGVYQLGSPRIDSVRNPMAMRSMFRLRKLVNRLLEEGKIDSDTEIHIEFARELNDANKRNAIAAFTKENQNKNDEARKKIKNFFKAETGKDIEPTDVDVLKYVLWEEQGHICLYTGKQICISDFIGGNPKFDIEHTIPRSVGGDSTKMNLTLCDSRFNRDVKKTKLPTELPNHEEIMARINDWREKYESLDGQIRRQKKMSKGATTKDQKDAIIRKRHLLELQRDYWRGKYLRFTMESVPEGFSRRQGTDISVISKYARLYLKSLFKHVYTVKGIATSDFRKIWGIQKAYSKKERVNHVHHCIDAIVIACIGLDEYNKLGAYYHDEENHEWYGMSKAYFKKPWSTFVEDIEKLQDEILVYHYTPDNMPKQGRRRIMVEVKANGRRKKTKLLCKGDAARGSLHKDTYYGAIMQSGEDTPYYVVRKNVDNHLSDQDIKNIVDDVVRGIIQNAVAKGGKEALNGTIWMNEEKQIPIKKVRCITSVKKPLSFEHRKPRDISNKCYKNDYYVAPDDNYLMAVYKGVTSKGKVKYMYEFINMXXXXXXXXXXXXXXXXXTAK

SEQ ID NO: 19531 - protein, 1202 aa, unidentified
  REGION 1..1202: note = Cas Enzyme sequence
MTKILGIDTGTNSLGWAIVEKQADEYHLLDKGVNIFQEGVKMEKGIESSKAAERTAHKAARVRNYRIKLRKIRLLRILSDAHLCPPLSKAELSEWRLKKKYPKNELFMQWQSTDDESEKTPYAYRHKCLHESLDFTSMTDRYILGRSFYHMIQRRGFLSNRKDQSGDDTGKVKESISNLTQEMHDAGYEYLGDYFYSLYNKGEKIRNHYTARNEHYLAEFKAICEKQDLDKNLGPEVVRQIEKAIFDQRPLKSQKGQVGKCVFEKNKTKCPSSHPMYEEFRMLSFINNIKIQTPNDDVLRPLSPEERALIMPLFFRKSKKLFDFEDIAKKLAPKKQYGFYKKSSDAEMPYLFNYPMDTSVSSCPVTTALKDIFGDDWIDSLCETYTLAEGKSRLNVVNDIWHVLCFYTDDTKLAEFAKNRLQLNDEEAKKFCEISLPGDYASLSLKAICKILPYLRRGLIYSHAVFLGNLCEVMPQYEWEIEEMRNAAIEHIIHEMNLIDSKDARTFEVCIKEYLKEQYHVSEEKLKKLYHPSMMEVYPRVQRTNNHGVYQLGSPRIDSVRNPMAMRSMFRLRKLVNRLLEEGKIDQDTEIHIEFARELNDANKRNAIAVYTKENQNKNDEARKKIINLFKAETGKDIDPTDVDVLKYVLWEEQGHICLYTGKQIRISDFVGSNPKFDIEHTIPRSVGGDSTKMNLTLCDSRFNRDIKKTKLPTELSNHEEIMTRINEWKEKYESLEGQIRKQKKLSKGASSKEQKDRIIRKRHLLELQRDYWRGKYLRFTMESVPEGFSRRQGTDISVISKYARLYLKSLFKHVYTVKGIATSDFRKIWGIQKAYSKKERVNHVHHCIDAIVIACIGLDEYNKLGAYYHDEENHEWYGMSKAYFKKPWPTFVEDIEKVQDEILVYHYTPDNMSKQGRRRILIDGKKVLSKGDAARGSLHNDTYYGAIENDGVVRYVKRINLASMKESDVKNIVDDVVRGIVEATIREKGFKEAMAGTIWMNEEMQIPIKKVRCYTSIKNPLSFDKKKQRDLSDKEYKRNYYVTTDGNYMVALYVGSAKTGKKKTFYEFVNMMEAADYYKTSYDKSVIGHNIVPLEKDNCQLAFILKKGTMVIFYKETKEEVWDYSQKEKDRNLYYVSVIESDGRVTFKYHQEARQDKELPRNASDTSDIRPKIRVGLASAKILVQGYDFEINELGEIKRLK

SEQ ID NO: 19532 - protein, 1202 aa, unidentified
  REGION 1..1202: note = Cas Enzyme sequence
MTKILGIDTGTNSLGWAIVEKQADEYHLLDKGVNIFQEGVKIEKGIESSKAAERTAHKAARVRNYRIKLRKIRLLRILSDAHLCPPLSKVELSAWRLKKEYPKNELFMQWQSTDDESEKTPYAYRHKCLHDCLDFSSVTDRYILGRAFYHMIQRRGFLSNRKDQSADDTGKVKESISNLTQEMHDAGYEYLGDYFYSLYNKGEKIRNHYTARNEHYLAEFKAICEKQDLDKNLGPEVVRQIEKAIFDQRPLKSQKGQVGKCVFEKNKTKCPSSHPMYEEFRMLSFINNIKIQTPNDDVLRPLSPEERALIMPLFFRKSKKLFDFEDIAKKLAPKKQYGFYKKSSDAEMPYLFNYPMDTSVSSCPVTTALKDIFGDDWIDSLCETYTLAEGKSRLNVVNDIWHVLCFYTDDTKLAEFAKNRLQLNDEEAKKFCEISLPGDYASLSLKAICKILPYLRRGLIYSHAVFLGNLCEVMPQYEWDIEEMRNAAIDHIIHEMNLIDSKDARTFEVCIKEYLKEQYHVSEEKLKKLYHPSMMEVYPRVQRTNSHGVYQLGSPRIDSVRNPMAMRSMFRLRKLVNRLLEEGKIDSDTEIHIEFARELNDANKRNAIAAFTKENQNKNDEARKKIKNLFKAETGKDIEPTDVDVLKYVLWEEQGHICLYTGKQICISDFIGGNPKFDIEHTIPRSVGGDSTKMNLTLCDSRFNRDVKKTKLPTELPNHEEIMARINDWREKYESLDGQIRRQKKMSKGATTKDQKDAIIRKRHLLELQRDYWRGKYLRFTMESVPEGFSRRQGTDISVISKYARLYLKSLFKHVYTVKGIATSDFRKIWCIQKAYSKKERVNHIHHCIDAIVIACIGLDEYNKLGAYYHDEENHEWYGMSKAYFKKPWSTFVEDIEKVQDEILVYHYTPDNMPKQGRRRILIDGKRVLSKGDAARGSLHNDTYYGAIKNDGVVRYVKRINLASMKESDVKNIVDDVVRGIVEATIREKGFKEAMAGTIWMNEEKQIPIKKVRCYTSIKNPLSFDKKKQRDLSDKEYKRNYYVTTDGNYMVALYVGSAKTGKKKTFYEFINMMEAADYYKTSYDKSVIGHNIVPLEKDNCQLAFILKKGTMVIFYKETKEEVWDYSQKEKDRNLYYVSVIESDGRVTFKYHQEARQDKELPRNASDTSDIRPKIRVGLASAKILVQGYDFEINELGEIKRLK

SEQ ID NO: 19533 - protein, 1225 aa, unidentified
  REGION 1..1225: note = Cas Enzyme sequence
MSKILGLDLGTNSLGWAIVEKTGCGYSLLDKGVDIFQEGVAREKNNEKPAVQDRTDARAMRRHYFRRRLRKIEVLKILIENDLCPRLSEELLTEWRKNKKYPLDEAFIRWQRTDDNIDKNPYHDRYRALTETLDLNKEDDRHALGRALYHLAQRRGFISNRKDAGKESEDGQVKQGIKNLTADMENAGCRYLGEYFHMLYLQKEKIRKKYTSRNEHYLAEFRAICAKQHLPEPLEQALYRAIFFQRPLKSQKGAVGKCTFEKRKSRCPVSHPHFEEFRMHSFINNIRIAAPEDNDFRPLTQAEAETIVPLFLRKSKPHFDFEEIARKIAGKGRYACKGDRNEAAYRFNYARIATVSGCPVTASLISVFGDDWLTEICRRYTLASGKSEQQILNDVWHALISFDDEERLRAWAREKLRLEEEQAANFASIRMPQEYAALSLNAIEKMLPYLRAGYRYDEAVFIANLKAALPQTIYEDETHRHEIEQDIVRLLLDYKRNPYDKYDSKERRIEAYFSDNGLDVSRLHRLYHPSMIESYHVQRPDSNGLLQLGSPRTPSVRNPMAMRALFRLRILINRLLRDGKIDPATKINIEFSRGLNDANKRKAIEQYQREREAEHRRFADEIRKQYAAETGTEIEPTETDILKYRLWEEQKHVCPYTGNQIRISDFIGSATDYDIEHTVPRSRGGDNSQMNNTLCENRFNREVKRAKLPSELSCHAEIMAHIEGFGWQEKIESLQKMVEAQVRKSKSAATKTEKDNAIQRRHYLQMQLAYWRGKIERFTMTEVPDGFSNRQGVDIGIIGRYARLYLKTVFERIYTVKGATTAEFRKMWGLQTEYAKKERVNHVHHCIDAITIACIGRSEYDHWARYVGDEERYLRNEGTRPQFEKPWPTFTEDVKAIADELLVSHHTPDNLPKQSRKRLRIRGKVQVDGQGKPIYMQGDTARGALHQQTFYGAIMRNDEIKHVVRKSLDQLQPADVEKIVDDAVKQKVKDAIECVGFKTAMNPAEHTIWMNREKAVPIRKVRIFTPSVTKPIHLKPQRDASAKAYKQDYLVTNDGNYCMAVYEGTDKRGKTRRSFEIVSNLEAAKYFKASADRTARPDLVPITDANGDPLKCLLKTGSMVLFYENSPEELHECTQKELAKRLYKVTGMSTLVLQQKYFYGTLTLKHHQEARPAGELKAKSGAWQSGEEYRPVISILHTQLNAYVEGYDFDMTVTGEIEFKHHPSC

SEQ ID NO: 19534 - protein, 1225 aa, unidentified
  REGION 1..1225: note = Cas Enzyme sequence
MSKILGLDLGTNSLGWAIVEETECGYSLLDKGVDIFQEGVAREKNNEKPAVQDRTDARALRRHYFRRRLRKIEVLKILIENDLCPRLSEELLTEWRKNKKYPLDEAFIRWQRTDDNIDKNPYHDRYRALTETLDLNKEDDRHALGRALYHLAQRRGFISNRKDAGKESEDGQVKQGIKNLTADMENAGCRYLGEYFHMLYLQKEKIRKKYTSRNEHYLAEFRAICAKQHLPEPLEQALYRAIFFQRPLKSQKGAVGKCTFEKRKSRCPVSHPHFEEFRMHSFINNIRIAAPEDNDFRPLTQAEAETIVPLFLRKSKPHFDFEEIARKIAGKGRYACKGDRNEAAYRFNYARIATVSGCPVTASLISVFGDDWLTEICRRYTLASGKSEQQILNDVWHALISFDDEERLRAWAREKLRLEEEQAANFASIRMPQEYAALSLNAIEKMLPYLRAGYRYDEAVFIANLKAALPQTIYEDETHRHEIEQDIVRLLLDYKRNPYDKYDSKERRIEAYFSDNGLDVSRLHRLYHPSMIESYHVQRPDSNGLLQLGSPRTPSVRNPMAMRALFRLRILINRLLRDGKIDPATKINIEFSRGLNDANKRKAIEQYQREREAEHRRFADEIRKQYAAETGTEIEPTETDILKYRLWEEQKHVCPYTGNQIRISDFIGSATDYDIEHTIPRSRGGDNSQMNNTLCENRFNREVKRAKLPSELSGHAEIMAHIEGFGWQEKIESLQKMVEAQVRKSKSAATKTEKDNAIQRRHYLQMQLAYWRGKIERFTMTEVPDGFSNRQGVDIGIIGRYARLYLKTVFERIYTVKGATTAEFRKMWGLQTEYAKKERVNHVHHCIDAITIACIGRSEYDHWARYVGDEERYLRNEGTRPQFEKPWPTFTEDVKAIADELLVSHHTPDNLPKQSRKRLRIRGKVQVDGQGKPIYMQGDTARGALHQQTFYGAIMRNDEIKHVVRKSLDQLQPADVEKIVDDAVKQKVKDAIECVGFKTAMNPAEHTIWMNREKAVPIRKVRIFTPSVTKPIHLKPQRDASAKAYKQDYLVTNDGNYCMAVYEGTDKRGKTRRSFEIVSNLEAAKYFKASADRTARPDLVPITDANGDPLKCLLKTGSMVLFYDNSPEELHECTQKELAKRLYKVTGMSTLVLQQKYFYGTLTLKHHQEARPAGELKAKNGVWKIGEEYRPIIAIYHTQLNAYVEGYDFDMTVTGEIEFKHHPSC

SEQ ID NO: 19535 - protein, 1220 aa, unidentified
  REGION 1..1220: note = Cas Enzyme sequence
MAKVLGLDLGTNSLGWALVDESENEYTLIDKGVDIFQEGVARDKNNEKPAVQDRTSARALRRRYFRRRLRKIELLKILIRYDLCPPLPEELLTAWQKEKRYPQDNEFLRWQRTDDNGDRNPYHDRYVALSERLDLGNRTQRWLLGRALYHLAQRRGFLSNRKEAGNEKEDGTVKECIKNLSAEIAAAGCRYLGEYFYGLYQHKERIRDKYTSRNEHYLAEFNAICDRQQLPDEWRKALHRAIFFQRDLKSQKGSVGRCTFEPTKSRCPVSHPRFEEFRMLSFVNNIRITGPGDNAPRPLTQEEFETIRSLFFRKSKPYFDFEEIARRIAGKGKYACKEERTEAPYRFNFARTATVSGCPVTASLQAIFGDDWITEIRSLYLLGAGKNEDQMLNDVWHALFSFNDEGRLRSWACEKLQLTDEQAKAFAAIKLPQDYAALSLNAIGKILVYLRCGYRYDEAVFLANLRAALPKEVYADESRRHEIEQDIASLLLDYKRNPYNKFDSKEHRIADYFSDHGLDASRLMRLYHPSKIETYPDAQPKANGILQLGSPRTATIRNPMAMRALFRLRNLINTLLREGRIDRDTKIRIEFARGLNDANRRKAIEQYQREREVENRKYAEEIHSQYAAETGREIKPSDDEVLKYRLWEEQQHVCPYTGRQIRISDFVGSAPDFDIEHTLPQARGGDDSQMNKTLCENRFNRETKRAKLPAELSNHVEIMERIESFGWREKMESLQKQIEAQVRRSKSAAIKSEKDDAIQRRHYLQMQLDYWRGKYERFTMAEIPEGFSNRQGVDIGIIGKYARLYLKTVFDRIYTVKGSTTAAFRKMWGLQEEYARKERTNHVHHCIDAITIACIGRREYDRWAQYVADEERYGYGESGKPRFEKPWPTFTEDVKAAADELLVAHHTPDNMAKQTRRKLRVRGRIKLNADGEPIYQQGDTARCRLHQDTFYGAIKQDGEIRYVIRKSLAQLQPTDIDKIIDDAVRDRVREAIDEVGFKTAMNPDEYTIWMNREKGIPIRKVRIFTPSVKHPIALKKQRDLSAKEYKRDYHVVNEGNYCTVIYEGQDKKGKTKRTFELVSNLEAAQYFKASADREARPDLVPQTDTNGFPLKCILKTGTMVLFYENTPAELYECTRKELVKRLYKVTAMAAEGRVQFLFHQEARDQKTLTSLYGAGTSQFCQSNPSPKLRLSVSNFNMLVEGYDFELTVTGEIKFKDDRPC

SEQ ID NO: 19536 - protein, 1220 aa, unidentified
  REGION 1..1220: note = Cas Enzyme sequence
MAKVLGLDLGTNSLGWALVDESENEYTLIDKGVDIFQEGVARDKNNEKPAVQDRTSARALRRRYFRRRLRKIELLKILIRYDLCPPLPEELLTAWQKEKRYPQDNEFLRWQRTDDNGDRNPYHDRYVALSERLDLGNRTQRWLLGRALYHLAQRRGFLSNRKEAGNEKEDGTVKECIKNLSAEIAAAGCRYLGEYFYGLYQHKERIRDKYTSRNEHYLAEFNAICDRQQLPDEWRKALHRAIFFQRDLKSQKGSVGRCTFEPTKSRCPVSHPRFEEFRMLSFVNNIRITGPGDNAPRPLTQEEFETIRSLFFRKSKPYFDFEEIARRIAGKGKYACKEERTEAPYRFNFARTATVSGCPVTASLQAIFGDDWITEIRSLYLLGAGKNEDQMLNDVWHALFSFNDEGRLRSWACEKLQLTDEQAKAFAAIKLPQDYAALSLNAIGKILVYLRCGYRYDEAVFLANLRAALPKEVYADESRRHEIEQDIASLLLDYKRNPYNKFDSKEHRIADYFSDHGLDASRLMRLYHPSKIETYPDAQPKANGILRLGSPRTATIRNPMAMRALFRLRNLINTLLREGRIDRDTKIRIEFARGLNDANRRKAIEQYQREREVENRKYAEEIHSQYAAETGREIKPSDDEVLKYRLWEEQQHVCPYTGRQIRISDFVGSAPDFDIEHTLPQARGGDDSQMNKTLCENRFNRETKRAKLPAELSNHVEIMERIESFGWREKMESLQKQIEAQVRRSKSAAIKSEKDDAIQRRHYLQMQLDYWRGKYERFTMAEIPEGFSNRQGVDIGIIGKYARLYLKTVFDRIYTVKGSTTAAFRKMWGLQEEYARKERTNHVHHCIDAITIACIGRREYDRWAQYVADEERYGYGESGKPRFEKPWPTFTEDVKAAADELLVAHHTPDNMAKQTRRKLRVRGRIKLNADGEPIYQQGDTARCRLHQDTFYGAIKQDGEIRYVIRKSLAQLQPTDIDKIIDDAVRDRVREAIDEVGFKTAMNPDEYTIWMNREKGIPIRKVRIFTPSVKHPIALKKQRDLSAKEYKRDYHVVNEGNYCTVIYEGQDKKGKTKRTFELVSNLEAAQYFKASADREARPDLVPQTDTNGLPLKYILKTGTMVLFYENSPAELYDCSHKELTKRLYKVTAMAAEGRVQFLFHQEARDQKILTSLYGAGTSQFCQSNPSPKLRLSVSNFNMLVEGYDFELTVTGEIKFKDDRPC

SEQ ID NO: 19537 - protein, 1550 aa, unidentified
  REGION 1..1550: note = Cas Enzyme sequence
MSKILGLDLGTNSIGWAVVDYELKKVLGTGSRIFPMGVNDLGTTKEQSKNATRRDNRQTRRQYFRKKLRKVKLLELLINYQMCPLQADELMQWKHYDKTKGKAGMQFPSTTEFNTWLKLNPYQLRKEGLERDLTKVEFGRVLYHLIQRRGFFSNRKVKDDGKINKGKDDKGITGILDAKNNVGKNKDYPTLGAYLYALSYKEGKPYVLKKNDEGKEMRVRARYTLRQMYKDEFELLWEHQAEHLGLKNITETITKRYLVKNPYKKGDEEQGLKKRIAHRIEYLENKGIKAELSNESDLKNTKLIVEKKVSLKELLGGGELIKQEDSILFYQRPLRIQSHLLDECAFEKTIWKHNDTLFYQRKPPVDNAKFLYAGKKPCTISHPKAELKRAWEFINNIRYGEGHKLDDGQRQDVLNLINSKDGNFDFNLIVEKLGINEKFNYEDKYKVPGNYTHKHLKALFTNEAWQEHYQEIWHCFYTYSDNQQLVEKLHKDFGLKEKDFDKVRGKKQEDGTRKGGIILKEGYSNLSLRAIENILPFLEEGYGFSFATLLGGVKNVFDRTKDIKWNSIDILKQQNEIVDKIKEISKKDNKEGEAIEKIKSYLKKEFRFSEKQLLGLYHHSQDTEKQELQDELPDPENLRNPLVQQALYELKGLVKAISKEYLSPNERFAQIKVEMARDLKQSKQRRLDQWYNNRQRQKENDEARERLDEYGLAHSRNNLHKYLLWKELMNETGNAICPYTGKTINLSDLFNDNKFQIEHIIPYSKSLDDSFANKTLCDAVENGKKGERTPYEFYGNDKKKWETIAERAYTLLPYHKAKRFTNKKAHETDFISRQLNDTRYISKEAAKYLKKICKDVLVFPGQLTAELRKKWGMNSILNPPAILNEESLSGPVYAQLNERNQPIVFYPVFNKAPKYEKGEFVITGVMQKEKFESKYLTFKFDTGLKEDGKYWAKIKVGDKPIKLVNYLKPKPDLGNDEILLYGKTNDKGIFVSRYLKTKQKVNGLANDTGYWAQLKIIPDKTRFINLKQKKINTKVDKNHVLLFGKVADGLFISKPFICKTDLEDGKYKALLEVDLESITYHKVKNEKPEVNDKNIRVFGWVKEGAFQPAIARKSFYDTINADKGQYWALFEIKSNPYDFTIMQNPQPEENVQGKKLLKEKIIEGNIIEEWVDVETGEIIPKVFLASKQRSDHRHHAVDALVVAMTKRSHLNELSHQHAAKRAKREQKHFDLSAINFEIPWNGDFRTQADKQVKQILVSHKKTNRVLTVKKTKDPKTGMVNEGIGARGQLHKEFVFGKRKSPHHTEAFHIRKPLESITTKTHVEKIVDGKIKALIENRIEQLGGYKGGKSVPKETFFIADSKGQKQPQIFLPNKSGNPVPVKRVRIRENIGGAEKLKDTNQWVNPRSNHHVLIYKDEEGNLREDVITFWIAVERKKQGEPVFQLPPPKTGKPAPKEIIATLQINDLFLLNINKNEIDWDNPDNNMLSKNLFRVQKLSSKFYEFRHHLESTIENTFAPYYYRIQSFGKGKTGWLTHKPIKVRITRTGKIEKI

SEQ ID NO: 19538 - protein, 1341 aa, unidentified
  REGION 1..1341: note = Cas Enzyme sequence
NPYQFRAKASLQQVDKLELGRAFYHLAQRRGFLSNRLDQTAEGVLEEHCPQLLTLIEDATNVIEMKSEIQHHFEIAGIFDSNVKDGYKKDTDEGEKKLIKLHKSLITILNKNEDFEKCVKDLNDQLNKKENLGVVKQKINELTTQMKEGNFTTLGQLFNSQYNKAKIRNQYTAREEHYLDEFEIICKTQGLTGISETEQVKERRYSGLIKDLYRAIFFQRPLKSQKGLVGKCPFEKTKSRCAVSHPDFEEFRMWTYLNTIKLGTKVDKTMRFLSLEEKLALVPKFLRKKEHFDFADLAKELVGKNSSFGFYLGSKKDEVDFLFNYRPNDTVTGCPVSAAFSAVFGKNWKEIEFTYSTLNKDQKSVERKVDYSDLWHLLSVSTSDVYLMEYAKEKLNLDDKNSKAFSKIRLKKDYGNLSLSAINKILPYLKEGLLYSHAVFMANIEKIVEPTIWNKPEQRLSIRENISEIIENHSYENARLEIINGLIKNCKNEQTYYSKEAEPIYKTDLKNAMVRFFKLYHHEDANIQASLVDELFPMFMKQLKLNEFKKIKRLDEKVLEFLSGQNQDGEIYCKNQQSLKKLYHPSDIEVFKKVIYKDKSGNEQIILGSPLTQSIKNPMAMRALHQLRKVLNELIKQDQIDEKTIIHIEMARELNDANKRKGIQQFQNELKKRNEEALKDIKKLYYEECKKEIEPTGDDLLRYQLWIEQNRQEIYEPSINDGMSRKIAISQIIGENPDYDIEHTIPRSISQDNSQMNKTLCSKSFNRDIKKKSMPSELKNHEIILQHVKHWRNESEKMTIEIEKISRQIKAAATKEAKDKKITQRHYLTLKRDYLKGKYERFTWVEPKVGFKNSQIPDTGIITRYAQAYLKSYFKQVESVKGGMVAEFRKIWGIQESYQKDGKKYYTEKDRSKHTHHTIDAITIACMTKDKYDALAHAWTLEEKSDLQGVRTLLSNSKPWKTFKEDLKKIEDEILVSHYTPDNLKKQAKKIIRIRGKKQYVAEMVNDVDGKLVPKNDANNRIAYKVDEKGEKIPRLQQGDTIRGSLHQDSIYGAIKNPNDQNETQYVIRKDLESLKGTDIENIVDKTVREKVLEAIQNKVIVLSSNPQQKNKINEPVWMNFEKQIPIKKVRIIANSVKNPLEVKKHAALSLSKQRHKQMVYGQNDENYAMAIYELEGKKDFTLINNFEVANLTKEGKSIYSPFKTKLNKGVPIQMPIAKRNGKDLVLKRGQQVIFYDSEIEQPESISDLADLSGRIYIIEGLSIQRIVRPSGKIDEYGVVMFRYFREARKSDDLKKDNYKPDGSFKIGDSKPTRKMNHNQFTGFVEGIDFLVSTTGKIKPI

SEQ ID NO: 19539 - protein, 1135 aa, unidentified
  REGION 1..1135: note = Cas Enzyme sequence
MSKILGLDLGTNSIGWALIENTTILGMGSRVFPEGVINLGEGEGREISKNASRTDSRGKRRQFFRKRLRKRYLLKELAKHSLCPIPASLIRDWNGIEIFKNELLQEWLRRNPYELRAKAVSEKITLLELGRIFYHMIQRRGFLSNSRSAGSEVKESSTLFKGDTKIGKIGINETLQSIEKKKTLGSYLHSIFPKENEPFSGELERIRNRYTTRQMYIDEFEAIWEFQKNHHSELTNNLKTIIGGRKKDGYKEDGVLFHQRPLRSQKHLVGHCSFETKKTKCQLSAIPFEMFRVYQWVNTVSYDLNGERQKITPQEKEKIVALLLSKEKIKFKEIRQKINRLEAYYQFNYKDNEQIIGTHTISKLSNKMFFGKQWFNFSDTEQENIWHILSFFDDRDKLKEYAIKNWNFDEERAIKISRFNLKEGYANLSRKAINNILPFLKSGFMYDIAVGLAGVKNVLGNSYKEHEQFVFDNVPEIVRSNLKGGYIEPLKQMMKNEFNCTEIQLKKLYHHSSSITTNDVLDRLPLGPEADKEIQKIKNPVVITALFEIRKLVNEIIDAYGKPNEIKVELARDLKASKKNRNDTRRKQQVLEKENDRVKGEIEKLGMRLNHTNILKYKLWEECNHTCPYTGQTITISQLFTGEIEIEHIFPWSRSLNDSFNNKTLCFTNENKAKENKTPYEFYSSQGDEKWEAIKLQALNCFKTKAKYLNCYTKFKHFVKKKHDEDFISRQLNDTRYISKEAKNYLSKICTKVLVAPGQMTATLRRYWGLNSILNKEDNTKTRNDHRHHAIDALVMACSTRSHLHELTKRNRYRKNHELKDFPDPWFNFRRDVEKAVEQILVSHKKTKNILTIRTRTTIKKGVKHRNIGVAARGQLHKESVYGKRRDVFTKELNYHIRKPLILLSAAEIPKIVDLEIKKIIYKAIEEIGLNIDDNRKPIVKTREDKKLFEQLLSKPFFLPNKNGNPVPIKKIRIQKKFSNAKPLKESKNQWVDLGKNHHVLIYKDFNGNLKEDVVTFWAAVNRKRKGKEVFQLPKDGKEMVTTLQKNELFLLGLKDDDIDWENLNYNLLKKHLFKVQGLSSFFYEFRLSTDSTQNKDTKSKVFRRIQSFSDGKTGWKTHNPIKVKVNSIGKIEKR

SEQ ID NO: 19540 - protein, 1135 aa, unidentified
  REGION 1..1135: note = Cas Enzyme sequence
  SITE 298: note = misc_feature - Xaa can be any naturally occurring amino acid
  SITE 311: note = misc_feature - Xaa can be any naturally occurring amino acid
  SITE 729: note = misc_feature - Xaa can be any naturally occurring amino acid
MSKILGLDLGTNSIGWALIENTTILGMGSRVFPEGVINLGEGEGREISKNASRTDSRGKRRQFFRKRLRKRYLLKELAKHSLCPIPASLIRDWNGIEIFKNELLQEWLRRNPYELRAKAVSEKITLLELGRIFYHMIQRRGFLSNSRSAGSEVKESSTIFKGDTKIGKIGINETLQSIEKKKTLGSYLHSIFPKENEPFSGELERIRNRYTTRQMYIDEFEAIWEFQKNHHSELTNNLKTIIGGRKKDGYKEDGVLFHQRPLRSQKHLVGHCSFETKKTKCQLSAIPFEMFRVYQWVXTVSYDLNGERQKXTPQEKEKIVALLLSKEKIKFKEIRQKINRLEAYYQFNYKDNEQIIGTHTISKLSNKMFFGKEWFNFSDTEQENIWHILSFFDDRDKLKEYAIKNWNFDEEKAIKISRFNLKEGYANLSRKAINNILPFLKLGFMYDIAVGLAGVKNVLGNSYKEHEQFVFDNVPEIVRSNLKGGYIEPLKQMMKNEFSCTEIQLKKLYHHSRSITTNEVLDRLPLGPEADKEIQKIKNPVVITALFEIRKLVNEIIDAYGKPNEIKVELARDLKASKKNRNDTRRKQQVLEKENDRVKGEIEKLGMRLNHTNILKYKLWEECNHTCPYTGQTITISQLFTSEIEIEHIFPWSRSLNDSFNNKTLCFTNENRAKENKTPYEFYSSQGDKKWEIIKLQALNCFKTKAKYPNCYTKFKHFVKKKHDEDFIXRQLNDTRYISKEAKNYLSKICTKVLVAPGQMTATLRHHWGLNSILNKEDNTKTRDDHRHHAIDALVMACSTRSHLHELTKRNRYRKNHELKDFPDPWFNFRRDAEKAVEQILVSHKKTKNILTIRTRTTIKKGVKHRNIGVAARGQLHKESVYGKRKDVFTKELNYHIRKPLILLSAAEIPKIVDLEIKKIIYKAIEEIGLNIDDNRKPIVKTREDKKLFEQLLSKPFFLPNKNGNPVPIKKIRIQKKFSNAKPLKESKNQWVDLGKNHHVLIYKDFNGNLKEDVVTFWTAVNRKRKGKEVFQLPKDGKEMVTTLQKNELFLLGLKDDDIDWKNLNYNLLKKHLFKVQTLSSFYYEFRLSTDSTQNKDTKSKVFRRITSFSDGKAGWKTHNPIKVKVNSIGKIEKM

SEQ ID NO: 19541 - protein, 910 aa, unidentified
  REGION 1..910: note = Cas Enzyme sequence
  SITE 264: note = misc_feature - Xaa can be any naturally occurring amino acid
  SITE 434: note = misc_feature - Xaa can be any naturally occurring amino acid
  SITE 444: note = misc_feature - Xaa can be any naturally occurring amino acid
FQKNHHSELTNNLKTIIGGRKKDGYKEDGVLFHQRPLRSQKHLVGHCSFETKKTKCQLSAIPFEMFRVYQWVNTVSYDLNGERQKITPQEKEKIVALLLSKEKIKFKEIRQKINRLEAYYQFNYKDNEQIIGTHTISKLSNKMFFGKEWFNFSDTEQENIWHILSFFDDRDKLKEYAIKNWNFDEEKAIKISRFNLKEGYANLSRKAINNILPFLKLGFMYDIAVGLAGVKNVLGNSYKEHEQFVFDNVPEIVRSNLKGGYIEXLKQMMKNEFSCTEIQLKKLYHHSSSITTNEVLDSLPLGPEADKEIQKIKNPVVITALFEIRKLVNEIIDAYGKPNEIKVELARDLKASKKNRNDTRRKQQVLEKENDRVKGEIEKLGMRLNHTNILKYKLWEECNHTCPYTGQTITISQLFTSEIEIEHIFPWSRSLNDXFNNKTLCFTXENRAKENKTPYEFYSSQGDEKWEEIKLQALNCFKTKAKYPNCYTKFKHFVKKKHDEDFISRQLNDTRYISKEAKNYLSKICTKVLVAPGQMTATLRHHWGLNSILNKEDNTKTRDDHRHHAIDALVMACSTRSHLHELTKRNRYRKNHELKDFPEPWFNFRRDAEKAVEQILVSHKKTKNILTIRPHTTIKKGVKHRNIGVAARGQLHKESVYGKRKDVFTKELNYHIRKPLILLSAAEIPKIVDLEIKKIIYKAIKEIGLNIDDNRKPIVKTREDKKLFEQLLSKPFFLPNKNGNPVPIKKIRIQKKFSNAKPLKESKNQWVDLGKNHHVLIYKDFNGNLKEDVVTFWTAVNRKRKGKEVFQLPKDGKEMVTTLQKNELFLLGLKDDDIDWKNLNYNLLKKHLFKVQVLSSFFYEFRLSTDSTQNKDTKSKVFRRIQSFSDGKTGWKTHNPIKVKVNSIGKIEKI

SEQ ID NO: 19542 - protein, 914 aa, unidentified
  REGION 1..914: note = Cas Enzyme sequence
MYVDEFELIWNKQAQFHAELTNELKTLFGGRKLDGYKEDGILFHQRPLRSQKHLVGNCSFEPRKTKCPISAIPFEQFRVWQWVNTVEYNGKKISQEEKEKIVEFLFANEKPEFKKIRKVIGKESAEFKFNYKDDDKIVGTHTISNLSNKKYFGKKWFEFTEKEQEDIWHVLYFFDSKSNLKEYAIKNWNFTEEQAESISKFNVKDGYASLSRKAISNILPFLKLGFTYDVAVVLGGIKNVFGSDWEKLSDEKRNFFYDNVYEIVRSKNKGGFIEIIKDILRNDYNISDNQLRKLYHHSATIDATELLEKLPVGKDADKDIQAIRNPIVITALFELRKLVNELIDEHGKIDEIKVEMARDLKISKSQRNKIRKEQKRLERENDRVKARLLEERQRVTHDNILLYKLWEECKHTCPYTGKPISVTQLFSGEVQIEHIHPWSRSLNDSFSNKTLCYADENRKKGNKTPFEFYGSDEANWSAIKERALKLFSDTKEYPNAYQKFKRFVQQKFDDDFSTRQLNDTRYISKEAKNYLSKICNKVTVSPGQATSNLRHKWGLNQILNDDNEKTREDHRHHAIDALVMACTKVSYVQELSKWNRYNRGYDVKDFPMPWLSFWKDAEKAVNQILVSHKKVSNDITVRTHTTEKNGKKHTNLGVAARGQLHKETVYGKRTFNGEEAFHVRKPIESLETAKQIAKVVDESIRLLILKRVNELGGFVKDKVPANTFFIVDENGVKQPQIFLPNQNGAPVPILKVRVKENIGGAVKLKTNVNQWVNPRNNHHVLIYKDEKGNLKEEVVTFWTVVERKRTGQSVYQLPIDGKEMVTTLHINDMFLLGLSEDEINWENPDYKVLKEHLYRVQKLSSKFYEFRLVSEASIQNNFQPFYVRIQSFGDGKTGWDTFNPIKVKISVSGKITKI

SEQ ID NO: 19543 - protein, 1225 aa, unidentified
  REGION 1..1225: note = Cas Enzyme sequence
GEISQALKLGNFATLGQYFFSLYNKGKIRNQYTAREEHYLSEFEVICLAQGIEGIIATEKLPEKRYFGLAKELYKAIFFQRPLKSQKGLIGKCTFEKSKSRCAVSHPDFEEYRMWCFINTIKIKTPEDESLRFLTSEEIVNIIPKFLRKKDNFNFEDLAKELVPSGSKCAFYKSSTASTANYLFNYNLNSSVSGCVVSTSFKNALGEDWKTKNYSYETLNKNGESVTRNVDYNDLWHLISVSTSDLYLQEFAKNNLKLDDKKAGLFSKIKLKKDFSNLSLTAINKIIPFLREGLLYSHAVFMANIENIVDAAIWKNLDDRKYIQTKIAALIATNTFDNNLLEVVNGLIKECKLKAYYYSKEAEATYKADLEKKVSSFVKLNKIEDQKESIMGLLYPIFIEQLKKYEFISIKRLDEKVFDFLDGQNDDGQVFCNSKNKLKKLYHPSDIDVFRKQIVKDGNGNEKLVLGSPLISSIKNPMAMRALHQLRKVLNALIIEGQVDEKTRIHIEMARELNDANKRKGIQDYQREIENNRKVYIEEIKSLYKAATTIDIEPTEDDILRYQLWIEQDKKTIYEEQYTNISISQIIGSDPDYDIEHTIPRSRSQDNSQMNKTLCSKRYNREIKKNKMPIELNNHRDILDRVASWQKKYLALEYDIIGISKSIKAATTKEQKDKKIRLRHKLNLQKEYFKGKYERFTYTEPKVGFKNSQIPDTGIITKYAAAYLKSYFGRVEAVKGGMVAEFRKAWGIQESYIKDGKKYYQIKDRSKHTHHCIDAITIACMTKDKYDVMAHAWDLEDDLDKNQYKLMKSVLEQSKPWKTFTEDLKKIEDEILISHHTPDNVKKQSKKIVRIRGKKQFVAEMEMDTNGKSIPRTHSNNKIIFKKNNKGEKIARFHQGDTIRGSLHQDSIYGAIKRPQIDDNTHKPKHTSKGAFVIKKDEKGIDEINFVIRKALSKLSENDIKNIIDPIVCQKIQKAVIDGLITFKTVQGKKVAVVKEGSTIWMREPNKEKDLVGVPINKVRIFTGLKNPLEIKEHSPLSKSRFEHKQKIYAQNDENFAMAIYEGIDKKGNVKRSFELVNYMDAGAYFKLSNRNNSVNSLVPLIHLKTQLPLKYEVKKGDLVLFYKENKEELNEIGNKDLTKRLYKVIAFEGDGRIQFRYHKTAMQQSSSNKEELTIVKFMADNNLKNSQVEFENPMPWLRLTMGNFNFVLKGKEFEITPTGKIYIL

SEQ ID NO: 19544 - protein, 1135 aa, unidentified
  REGION 1..1135: note = Cas Enzyme sequence
MSKILGLDLGTNSIGWALIENTTILGMGSRVFPEGVINLGEGEGREISKNASRTDIRGKRRQFFRKRLRKRYLLKELAKHSLCPIPASLIRDWNGIEIFKNELLQEWLRRNPYELRAKAVSEKITLLELGRIFYHMIQRRGFLSNSRSAGSEVKESSTIFKGDTKIGKIGINETLQSIEKKKTLGSYLHSIFPKENEPFSGELERIRNRYTTRQMYIDEFEAIWEFQKNHHSELTNNLKTIIGGRKKDGYKEDGVLFHQRPLRSQKHLVGHCSFETKKTKCQLSAIPFEMFRVYQWVNTVSYDLNGERQKITPQEKEKIVALLLSKEKIKFKEIRQKINRLEAYYQFNYKDNEQIIGTHTINKLSNKMFFGKEWFNFSDTEQENIWHILSFFDDRDKLKEYAIKNWNFDEEKAIKISRFNLKEGYANLSRKAINNILPFLKLGFMYDIAVGLAGVKNVLGNSYKEHEQFVFDNVPEIVRSNLKGGYIEPLKQMMKKEFSCTEIQLKKLYHHSRSITTNDVLDRLPLGPEADKEIQKIKNPVVITALFEIRKLVNEIIDAYGKPNEIKVELARDLKASKKNRNDTRRKQQVLEKENDRVKGEIEKLGMRLNHTNILKYKLWEECNHTCPYTGQTITISQLFTSEIEIEHIFPWSRSLNDSFNNKTLCFTNENRAKENKTPYEFYSSQGDKKWEIIKLQALNCFKTKAKYPNCYTKFKHFVKKKHDEDFISRQLNDTRYISKEAKNYLSKICTKVLVAPGQMTATLRHHWGLNSILNKEDNTKTRDDHRHHAIDALVMACSTRSHLHELTKRNRYRKNHELKDFPDPWFNFRRDAEKAVEQILVSHKKTKNILTIRTRSTIKKGVKHRNIGVAARGQLHKESVYGKRKDVFTKELNYHIRKPLILLSAAEIPKIVDLEIKKIIYKAIEEIGLNIDDNRKPIVKTREDKKLFEQLLSKPFFLPNKNGNPVPIKKIRIQKKFSNAKPLKESKNQWVDLGKNHHVLIYKDFNGNFNQVVVTFWTAVNRKRKGKEVFQLPKDGKEMVTTLQKNELFLLGLKDDDIDWKNLNYNLLKKHLFKVQTLSSFYYEFRLSTDSTQNKDTKSKVFRRITSFSDGKAGWKTHNPIKVKVNSIGKIEKM

SEQ ID NO: 19545 - protein, 1436 aa, unidentified
  REGION 1..1436: note = Cas Enzyme sequence
MKKIKLGLDLGTNSIGWAVLIKKDGKYEFLEFEDKSGNTIPTKGSYIFPKGVNADENSKAAERRGFRSARKRLSRIILRKIKTLRVLNEYELCPPFEEGELSKWKNKKIYPCENEAFIEWQRTGKKGGNSELERLKQPYYLRHLAATQEGLMNSKKGKLQLGRAFYHLAQRRGYLSNSEEEQTEDKLEQFKIDIRKLLEEYNDCGAFKEPFEVIFDSAKKDAKIKKLGNKIGRELKKEIVFENLKSFINTEFDKEENLGTVMKEIGDLSKAIEKSGQPTMGSYFCSIYAKTDNKTGLMTKIRGRYTHREEHYLKEFEIICKKQNLGSIDERFSVKEWKKRYSGITQELYHAIFYQRPLKSQRGLVANCPLEPKRKRIAISHPLFEQFRMWESINRIKISRNENSKLEFLSVEEKELIKSVFLKVQDFEFHKIAEQLCEDKMYRYIKKPNEVFHKGGLVEGGVAEVFFNFPLDKKFSACPTTARLSTLLGKEEFKKLPFLNSSYKDEKNKQQVSVEDIWHCLFLDGFGNKTKQEGRSDFAKKHLALDEKGVEAFQKMKLVKGYGNLSKAALKKIVPFLEKGEIYSHAVFLANVSDVLGRKLSNNEQKTVSEEVSKALKLHKENKQINGIVNNYIGKLKDNKDEPEILGSNSFSQDAHKSSLVDEIIKGAEKSIYDKLNENEKTNLIKSCWTKFNRVALDKTLKEIPFISTKLIPDFILETLQKAFPNEKIDISKLYHPSAMDKYPKANKKLGNPEIASIKNPVFNRAMHQIKRLCNKLILEGIIDKNTEVNVEVAGEINSASYRKALSQWQKEQETIREWVKDEIINTYPKDCREEISPSEADVIKYIFWKEQNHQCLYTNKQISICDFLGGKTTYDIEHTIPRSKFNDNSLVNKTLANAEFNRKIKKDILPGLLNVSFKAEEINKASITNNRDNNLNSYTIKNKVPTWNESLSSLKSKYDKFKNAAKFMSDLTQHNEMMVKVHYTKMKLDYLNAKYKTFEIEEITNQFSNANLVDTRIITKYARAYLNSYFNRVNVVNGKITDTLRKMWGIEGENEQKDRSNHIHHCIDAIVVACVERGTVNWISAAFHKYENNYFKGNNHPRYKLRPPMEDFAKKMHSLHKEVFIYHRQIDRIKPLIANLKKENAKKLNLRGKLNKPNPYGHIKKNNKLVFVKREPISKFSLKSIDNIVDEGIKKRILSLGDKEVLKNIIKEANKKGYIELPEYKNDKGKNISKMIVKKIRLKDSLTNLKNYKEYRSIDKSKFDYKQDYYFNKEKNTNYELRIFGGLIPNQPNKRQKFSRRKAIIINHFNIVNNIYEKEDDLLTFKLHKNDMVIVFNENPNEEVDWNNNLNLQFKLFKIVKFDENKIKGGIKQVIMARHNYALGNVDKAEATSESQLNNPKGVVLRKSLSTLRIIPTKVNVLGQLDIEYSKSYLK

SEQ ID NO: 19546 - protein, 1124 aa, unidentified
  REGION 1..1124: note = Cas Enzyme sequence
MKKILGLDLGTNSIGWAIVDEKANKIIGMGSRIFPIGVDNLGDGEGELSKNSRRTGARGIRRQFFRKRLRKKILLKELTSLNMCPLSDDDFDNWKTTKKFPTQELASWFTSNPYELRHKALTEKLSIEEIGRIFYHLIQRRGFLSNSRSAGKDDGAIFKGNAKEGKIGIDETRIQIENKTLGSYLYEIAPKDNFPFVDGLERIRNRYTTRQMYVDEFEQIWEHQKKYHSELSDATKEKLGGRKLDGHSEDGILFHQRPLRSQKHLVGNCSFEMKKTKAQLSSIPFELFRINQWINTVEYNGHKLNVTERNLAYNFLIEKEKPSFKDIRKAIGKVDTSFKFNYKDEDKIVGTFTISNLCNKKFFGEKWFEFSEKQQEDIWHVLYFFDNKDKVENYAKENWGFDAVQAKAISIFNLKDGYSSISRKAINNILPFLEIGFQYDIAVVLGGIKNVYGQDWETLNSDVKGFIIDNVPDVVRSNFKGGFIEPLKHFLRTELKLTDKQLTKLYHHSVSIEDFKLLDKLPLGAIADKEIQAIRNPVVINALFEIRKLVNELVTQYGKPDEIKVELARNLKASKSGRNEERNRNQKLERENDRVKDELNHLGKHFSHDNLLLYKLWEECKRTCPYTGRSISVTQLFSGEVQIEHIHPWSKSLNDSFMNKTLCFADENRAKGDKIPYEFYSLQGENKWNEVKERALKLFSDTAQYPNSYQKFKRFVQTKFDDDFASKNLNDTRYISKSAKDYMSKICDKVSVSPGQMTANLRQKWGLNAILNPEDKTKTREDHRHHAIDALVMACGTVSHLQKLSEWNRYDRKPENKNFPLPWIGFVKDAEVAVDKILVSHKKLNNTITVRTHKTEKNGVVYRNTGVAARGQLHKETVFGKRNFNGEEAFHVRKPIESLSTEKQIEKVVDNAIRLLILKRIQVLGGFVKGTVPANTFFVIDANGIKQAQIFLPNKNGAAVPIMKVRMKESIGRAERLKVDINQYVNPRNNHHVLIYKDDKGNLKEDVVTFWTVVERKRQKQEVYQIPADGIEIVTTLQINDMFLLGLKEENINWENPDYEVLKECLFKVQTLSSIFYEFRLNNDATQNKDTKSNVFRRISSFNGWENTNPIKVKISVSGKIEKV

SEQ ID NO: 19547 - protein, 1125 aa, unidentified
  REGION 1..1125: note = Cas Enzyme sequence
MAKILGLDLGTNSIGWALIEDNQNKILGLGTRIFPMGVENLGDGEGEISKNASRTGARGVRRQFFRRRLRKQILLKALSENKMCPLEAFDFQEWKRNKRFPIEKLATWFALNPYELRQKALIEKLSLEEIGRIFYHLIQRRGFLSNSRKSGGDDDEKGTIFKGNPKEGKIGITETQKNIEDKTLGTYLFEIYPKENQPFQDGLERIRNRYTTRKMYVDEFELIWNKQSQFHTELTNELKTLFGGRKLDGYKEDGILFHQRPLRSQKHLVGNCSFEPRKTKCPISAIPFEQFRVWQWVNTVEYNGKKISQEEKEKIVEFLFANEKSEFKKIRKVIGKESSEFKFNYKDDDKVVGTHTISNLSNKKYFGAKWFEFTEKEQEDIWHVLYFFDSKSNLKEYAIKNWNFTEEQAESISKFNVKDGYASLSRKVISNILPFLKLGFTYDVAVVLGGIKNVFGSDWEKLSDEKRNFFYDNVYEIVRSKNKGGFIEVIKDILKNDYNISDNQLRKLYHHSATIDATELLEKLPVGRDADKDIQAIRNPIVITALFELRKLVNELIDEHGKIDEIKVEMARDLKISKSQRNKIRKEQKRLERENDRIKARLLEERQRITHDNILLYKLWEECKHTCPYTGKPISVAQLFSGEVQIEHIHPWSRSLNDSFSNKTLCYADENRKKGNKTPFEFYGSDEANWSAIKERALKLFSDTKEYPNAYQKFKRFVQQKFDDDFSTRQLNDTRYISKEAKNYLSKICNKVTVSPGQATSNLRHKWGLNQILNDDNEKTREDHRHHAIDALVMACTKISYVQELSKWNRYNRGYDVKDFPMPWLTFWKDAEKAVNQILVSHKKVSNDITVRTHTTEKNGKKHTNLGFAARGQLHKETVYGKRTFNGEEAFHVRKPIESLETAKQIAKVVDESIRLLILKKVNELGGFVKDKVPANTFFIVDENGVKQPQIFLPNQNGAPVPILKVRVKENIGGAEKLKTNVNQWVNPRNNHHVLIYKDEKGNLKEEVVTFWTVVERKRTGQSVYQLPIDGKEMVTTLHINDMFLLGLSEDEINWENPDYEVLKEHLYRVQKLTSGDYFFRKHKSSTITDDDYKQIRGLREGKTGWLTFNPIKVKISVSGKIIPF

SEQ ID NO: 19548 - protein, 1525 aa, unidentified
  REGION 1..1525: note = Cas Enzyme sequence
MKKIKLGLDLGTNSIGWSVLEKQSKKYDFLIKYDKNNDLIPTKGSYIFPKGVSSDENSKAAERRGFRNARVRLQRIILRKIATLKTLDKHSLCPPFAEGELNRWKNKKIYPCGNDAFIEWQRTGKKQGRSKVEYLKQPYYLRHLAATKEGLMAFPQGRLELGRVFYHLSQRRGYLSNSDEEQTEDKLELFKNEITKLLNEVNDSVAFKEPFEVILDSRKSDKKVKTLGFKITKELKKQIEFEKIKQFIIDEFDKPYNLGKVKKAIGELSKEIENAYHSGKCAPTMGSYFYSIYAKTDKKTGLITKIRGRYTHREEHYLKEFNYICDKQNIIGELKAELHNAIFYQRPLKSQKGSVAKCPLESKRKRIAVSHPLFEEFRMWESINRIKIARSKNASLEFLTKDEKEKIKPLFLRVGDFEFRNIASILSGNKTYSYVKNPKEVFYEKSAKPVEGAIAELFFNFPLDKKFSASPTSAKLNEIIGKDEYFGRPFLNTGYKNEKDKSFLSIEDIWHCLFLDSFGQKDKKQGRKDFAEKHFVLDEKKTEAFQKIKLVKGYGSLSKAAIKKIVPFLQAGEIYTHAVFLANISDVLGRKLSKIEQETVTNSVIQALEQHKVEKQSKGVVNNFISLLKNKKENINVVLGDGAYSVEVFKKDFSKELVDWLGELQYDKLSKKHKEEIFNNCWSLFYEEALNKVPKDISFLTTKTIPSFILEELQRIFPNDSIDVEKLYHPSAMEAYPKAYKKLGNPEISAIKNPVFNRAMHQIKRLCNKLIKEDIVNEETIVNVEVAGEINSASYRKAIALWQKDQEIIRDWAKSEIIKTYPKECENEINPSDTDIVKYILWKEQNHQCLYTSFKPISICDFLGEQTIYDIEHTVPRSKFHDNSLTNKTLANSDFNRKIKREILPGLLNVNFKGEQINKTSILNNRNNYLKSYSIKNNVPTWGVSLSSLKTEYKKFKNAAKAISDPISHSEVMTKAHYTKMKLDYLSAKYKTFEIEEINQKFSNANLVDTRIISKYARAYLKSYFNNVNVVNGKITDTLRKMWGLENDYAQKDRSNHMHHCIDAITVACVERGTANWISEAFHKYERDYFKGNSNPKYKLKEPMNNFAERMHNLHKEVFVYHRQIDRIKPLLENLKKENHKKLNLRGKLNSQNPYAHIKKNDELIFAQRKPISSITGKDIENIIDEGVKLRLVSLADSKGWNKLMELNVKEGEDALEIEKQNKRILAFRIFEKIKKTDKKKEIVVEGITKETISSEYSNMSEFINMLAKTAIKKEIENKKKENYKVKISNEVINLTRSKGLELLINENKDSEYPAIILPEYFNKEKKKIIGKMVIKRIRLKSSKTNLKDYKQIREIDKSKFSHKHDYYFDKDSYTNYEARIFGDLMPNEEGKFKNRNYKVINHYNLVKNIFENEDVSATLKLHQDDIFLVFYKNPLEEILWNNKEDLQKRLFVLVKFDENGLIILKRHNYASGNVDRAKSVKSENELSDLTEVVLRRRASTLKVIPAKIDALGNLDIKYSKNIVD

SEQ ID NO: 19549 - protein, 1128 aa, unidentified
  REGION 1..1128: note = Cas Enzyme sequence
MAKILGLDLGTNSIGWALIDDKLNKIIGMGSRIFPVGVDNLGDGEGELSKNAGRTGARGTRRQFFRRRLRKKVLLKKLASLNMCPLSNEDFDNWKITKKFPTQELASWFALNPYELRHRALNEKLSFEEIGRVFYHLIQRRGFLSNSRSAGKDEGTIFKGNAKEGKIGIDETREQIENKTLGSYFYEIAPKENQPFVDGLERIRNRYTTRQMYVDEFEQIWEHQKKYHSNLTHEIKEKIGGRKSDEGFKEDGILFHQRPLRSQKHLVGNCTFESGKTKCQLSAIPFELYRLHQWINTVEYNGHKLHADERKLVFNFLIEKEKPSFKDIRKAINKLDTIYKFNYKDEDKIVGTHTISNLCSKKFFEKKWFDFTEKEQEDVWHVLYFFDSKDKVKEYAIKNWGFDEIQAEAISKFNLRDKYASLSRKAINNILPFLEMGFQYDIAVVLGGIKNAYGQNWETLNSGDKGLILDNVYEIVRSNLKGGFIEPLKYFLKTDLYLTDKQLTKLYHHSATIDETVLLEKLPVNANADKEIQAIRNPVVITALFEIRKLVNEIVDEYGKPNEIKVELARNLKASKSGRREERNRQQKLERENDRVKVELNNLSKHISHDNLLLYKLWEECKHTCPYTGRSISVTQLFSGEVQIEHIHPWSKSLNDSFMNKTLCFADENRAKGDKTPFEFYSFQGENKWHEVKERALKLFSDTAQYPNSYQKFKRFVQQKFDDDFASKNLNDTRYISKEAKNYMSKICENVSVSPGQMTANLRKKWGLNAVLNPEDKTKTREDHRHHSIDALVMACGTVKHLQKLSEWNRYDRKPENKNFPLPWDGFVKDAEVAVDKILVSHKKLNNIITVRTHKTEKNGQVYRNVGVAARGQLHKETVFGKRNFNGEEAYHVRKPIESLTTEKQIDKVVDESIRLLIMKRVQELGGFVKDKVPANTFFVIDENGVNQQQIFLPNKNGAPVPIKKVRMKENIGGAERLKEDINQYVNPRNNHHVIIYRDDNGNLKEEVVTFWTVVERKRQKQLVFQLPVDGTSIVSTLQINDMFLLGLIEEEINWEKPNYEVLKEHLYRVQKLSSKFYEFRLSKEASIQNNFQPYYVRIQSFGEGKTGWDTFNPIKVKISVSGKIEKL

SEQ ID NO: 19550 - protein, 1121 aa, unidentified
  REGION 1..1121: note = Cas Enzyme sequence
MAKILGLDLGTNSIGWALIDDIQNKIIGIGSRIFPMGVENLGDGDGEISKNAGRTGARGIRRQFFRRRLRKKILLKALSENNMCPMDAVDFEDWKKTKKFPSDKLAFWFALNPYELRKKALHEKLSLEEIGRIFYHLIQRRGFLSNSRKGGNDDGAIFKGNAKEGKIGIDDTLESIEGKTLGSYLYEIYPKENQPFQDGLERIRNRYTTRKMYVDEFELIWNKQAQFYSNFNEELKTLLGGRKADGYKEDGILFHQRPLRSQKHLVGNCSFEPSKTKCPISAIPFEMFRIYQWVNTVEYNGKKISQEEKDKIIEQLLASDKIEFKKLRKAIGKESAEFKFNYKDDDKIVGTYTISNLSNKKFFGKKWFEFTEKEQEDIWHILYFFESKSNLKEYAIKNWGFTEDQAIAISKFNVKDGYANLSRKAIGNILPFLQQGYTYDVAVVMGGIKNCFGSKWLNDGAENDKRQLDLIDNIEGIIRSKISGGFIDTIKDLLRKEFGFDEKQLKKLYHHSATIDVVALLEKLPVGKEADKEIQAIKNPIVITALFELRKLVNELIDEHGQLDEIKVEMARDLKISKTQRNKIRRDQKRLERENDRVKTEVEKYARVSHDNILKFKLWEECKQTCPYTGSAIPITKLFTGEVQIEHIHPWSRSLNDSFNNKTLCYADENRRKGNKTPFEFYGSDELDWGARKERALKLFSDTKEYPNAYQKFKRFVQLKFDDDFSSRQLNDTRFISKEAKNYLAKVCNKVAVSPGQMTANLRQKWGLNTVLNDENAKTREDHRHHAIDALVMACGKTSYLQELSKWNRYNRNYDLKDFPMPWETFRFDAEKAIEKILISHKRLSNVVTVRTHKVEKNGVVHKNIGVAARGQLHKETVFGKRNFNGEEAFHVRKTIDSLTTEKQLEKVVDQTIKKLIHKRVQELGGFVKGTIPLNTFFIVDEIGVKQPQIFLPNKNGSPVPILKVRMKENIGGAEQLKDDLNQWVNPRNNHHVLIYKDEKGNLKEEVVTFWTVVERKRQGFPVYQLPSDGKEIVTTLHINDMFLLGLNEEELNWDDLDYEILKEHLYRVQKLSSGDYTFRFHKASNIDNKFEEVRVRNPKGLIILNLIKVKISVSGKIQKL

SEQ ID NO: 19551 - protein, 1283 aa, unidentified
  REGION 1..1283: note = Cas Enzyme sequence
MTKILGLDLGTNSIGWAIRDTNKEGNQIVDSNVIVFPQGVGEEKGVEFSLASERAKHRASRKLYKRRKKRKTDLLKLLIENGFCPLTNDELLMWSVYKKGQEMKYPTTNFEFSEWLKINPYEVRAKAINQIVTKQDLGRALYHMCQRRGFKSGRKDADAGKDLEQYRKEQAILEQNSFKTLGEYYFDLLQNDKKVRKTKFSADDQEVNSSRISYVEEYNILMKSQNVRKELSDAFFDAIFFQRPLKSQKGAVGKCTLEKSKARCPISHPLFEEFRMFQYLNSIKVKEQNNDKFVFLSEHPEYYKIAKDKFYRVSAKNFKFVDISKSINTVAKRESLFFEFNYNDKYPIVGSPTISKLIEVFDAEDWTDCKKQLVSKYKKQDNKNVDDLVDELWHSLFFSGDFVNDITSEKVKNFIRTRFDISEDKINYYEGINLKQGYSSLSKKAIGKILPFLESTIIYPYAVFFANIDAIIGKDKWNQNKEFIQDTIIDIISNYKTQTLKIDVVNGLVGDFIKEYDNSNFDYILDETDKKNVAEKTKLFYGKYEWEKMSDETKTELLAEIENEFQQQLRKRRFGGYYLPKPRVDEIIKNFLIQEYKVSKEQADKLYHPSAMDAYPQSQDGFLGLPFTNSIKNPMAMRTLFYLRKLVNSLLKEGKIAPDTEIIIELARELNDKNKRLAIERWQRERENENKKYREKLEEFARDTNSVVTESDVIKYRLCQEQNGICFYTNKTINCEKLLGSNPQFDIEHTFPRSKSFDNSIANKTLAEKAFNQIKGNRIPQDINDGNYKDNFTNNIIVWQKTIEELEEKIEQQKYFSKVASTVEQKNRAIQQRHYLKLDLDYWKQKVYRFTATEIKPNFKNSQLVDTGIITKYSELFLKSLFQRVFPAKGTMVADVRKSWGLGEKDRNYHYHHAIDAVVLTCMDKSIRDGLAEAFKESEENRYQDKFKIAKPWQTFTEDVNQLKENIIVIHNHKDKIEKQTKKKLRKRNKIQYDKQGNVIYEKGQGIRASLHKASFFGAIERENENSEKVIWFVKRDWASNINEANLENIVDEGIKQRIKKHGLKNVRTEQGFILLPEEDNLKSMLIKKIRLKTKNKNLPKIKSQSHVSQGKRKEYKEHYYATLENIFAMAIYETVDGKGKPPYKTISAFELAKFNQGDSKLEMPVEKNVEIVHKKTKMLMPLSKILKVNQMAIFYENNPEELKTISKQEINKRLFKITEFEGDGRINLRHHAQGGADKDLKEESSLNFDKPSQKLRISLSNVKAIYEGTDFILHPSGKIDFL

SEQ ID NO: 19552 - protein, 1205 aa, unidentified
  REGION 1..1205: note = Cas Enzyme sequence
IENGFCPLTNDELLMWSVYKKGQEMKYPTTNFEFSEWLKINPYEVRAKAINQIVTKQDLGRALYHMCQRRGFKSGRKDADAGKDLEQYRKEQAILEQNSFKTLGEYYFDLLQNDKKVRKTKFSADDQEVNSSRISYVEEYNILMKSQNVRKELSDAFFDAIFFQRPLKSQKGAVGKCTLEKSKARCPISHPLFEEFRMFQYLNSIKVKEQNNDKFVFLSEHPEYYKIAKDKFYRVSAKNFKFVDISKSINTVAKRESLFFEFNYNDKYPIVGSPTISKLIEVFDAEDWTDCKKQLVSKYKKQDNKNVDDLVDELWHSLFFSGDFVNDITSEKVKNFIRTRFDISEDKINYYEGINLKQGYSSLSKKAIGKILPFLESTIIYPYAVFFANIDAIIGKDKWNQNKEFIQDTIIDIISNYKTQTLKIDVVNGLVGDFIKEYDNSNFDYISDETDKKNVAEKTKLFYGKYEWEKMSDETKTELLAEIENEFQQQLRKRRFGGYYLPKPRVDEIIKNFLIQEYKVSKEQADKLYHPSAMDAYPQSQDGFLGLPFTNSIKNPMAMRTLFYLRKLVNSLLKEGKIAPDTEIIIELARELNDKNKRLAIERWQRERENENKKYREKLEEFARDTNSVVTESDVIKYRLCQEQNGICFYTNKTINCEKLLGSNPQFDIEHTFPRSKSFDNSIANKTLAEKAFNQIKGNRIPQDINDGNYKDNFTNNIIVWQKTIEELEEKIEQQKYFSKVASTVEQKNRAIQQRHYLKLDLDYWKQKVYRFTATEIKPNFKNSQLVDTGIITKYSELFLKSLFQRVFPAKGTMVADVRKSWGLGEKDRNYHYHHAIDAVVLTCMDKSIRDGLAEAFKESEENRYQDKFKIAKPWQTFTEDVNQLKENIIVIHNHKDKIEKQTKKKLRKRNKIQYDKQGNVIYEKGQGIRASLHKASFFGAIERENENSEKVIWFVKRDWASNINEANLENIVDEGIKQRIKKHGLKNVRTEQGFILLPEEDNLKSMLIKKIRLKTKNKNLPKIKSQSHVSQGKRKEYKEHYYATLENIFAMAIYETVDGKGKPPYKTISAFELAKFNQGDSKLEMPVEKNVEIVHKKTKMLMPLSKILKVNQMAIFYENNPEELKTISKQEINKRLFKITEFEGDGRINLRHHAQGGADKDLKEESSLNFDKPSQKLRISLSNVKAIYEGTDFILHPSGKIDFL

SEQ ID NO: 19553 - protein, 1441 aa, unidentified
  REGION 1..1441: note = Cas Enzyme sequence
MAKVLGLDLGTNSIGWAIVEKNQEINKLKDKGVLIFSQGVKSEKGQEKSKAAERTSFRSARRIKFRRKIRKYQTLLVLAKYDMCPLTVEEVAAWRKSNFKKYPAKPEFLVWLRTDEEQNINPYYFRDKASREKVSKYELGRAFYHIAQRRGFLSNRLDQSDDNLIKSKKDEIQSIIDNNSLNKIDLIDLIESVFETYEFKEKKKKDCTNATEEKLWSIRYFIIKKLNDKKLSTQEAVKDIDLYINKPENLGAVQGNISELNTAIAEANCKTLGQYFWKLYQQNRNDVKNKIRNNYTSREEHYLDEFEIICNIQGLDGINVAKKDPSERYSAIVKELYRAIFYQRPLKSQRGLIGKCSLEPNRVRCSVSRPEYELFRMYSFINTIKLKEPTADNFRFLRGDEIEKIKSKFFRKSKPTFIFVDIKKTLGDENSYNYKDNSTVSGCPTISALISVFGNDWVNTIYENYTDKTIRNIKNDKSEEVKTEEDVIADVWHVLSTFTSDEKLIDFAKNKLQLDEKKAEKFSKIHLKKDYASLSLYAIKKILPYLENGLLYSHAVFMANMEKVIKPERWKNKEDRELIEKEIGNIINKHQEENKMLFAVNSALKICFNNHQTYSKEAEKLYKGDIEKQLKKEFGIKTWENKTDKIVMFEEAFNVFKEHLKERSHPAIKRIDEKIKDFLSDNDLLKTNALDKLYHPSDIEKFKPTIIKDKKENEYIGLGSPDVGSIKNPMAMKALHQLKKLINALILEEQIDENTKVNIELSRQLNDANKRKAIKRWQDERKELYATYEKKIKELYRIETGEELKEVTNTDIEKFSFVLEQRKDGKLVSKEDVLKYTLWKEQNHICIYTGKTISLSSFLGANPQFDIEHTLPRSRSWDNSRMNKTLCDKAFNQKNKGNKMPFELQMNDEILPRIQHWKDKYEALANDIEKKKRSTRGATDKDQKDKLIQERHYLKMEHDYWKGKYDRFVMEEIKAGFKNSQAVDIGIISKYSRAYLKSVFKKVYSVKGEMVSEYRKAWGINITKLDENGRLVKNRDNHIHHCIDAVTIACMNKSKYDKLAHSWGLEDKEDYTRAKKALENEKPWDTFTQDILNLENEVFIVHQSKDVLPIQTKKKFRKRGKIQRNKNEKIIYQQGDTVRGSLHLDTFYGAIAKDKNGVEQKDEAGNIKPNYVVRKELSKLKKSDVAKIVDDNIRSIVEQAAKDGLIKFNNNGAKVNETIWQNKDKHIPLKKVRIFTPTVKSPLKDFKKHPVHFRSKKLYKQQYNVVNDENYCMAIYEGINKRGKFKRDFELVNNIDAGEYYKLSNETYRANHDLVPNPHLKSQLPLKYILKKGMTVLMYDKHPDEIWELTDHEKTKRLYKIIGFEGDGRIQFRLHQTAMQQSSMNVDEMTIVKYMKENELKNSEINFKTPVPWLRLTKGNLNFIVNNVDFKIKLTGKIESV

SEQ ID NO: 19554 - protein, 913 aa, unidentified
  REGION 1..913: note = Cas Enzyme sequence
MYIDEFELIWNKQAQFHSNLNDELKTLFGGRKLDGYKEDGILFHQRPLRSQKHLVGNCSFEPTKTKCPISAIPFEMFRIYQWVNTVEYNGKKISQEEKDKIIEQLLVSDKIEFKKLRKTIGKESAEFKFNYKDDDKIVGTYTISNLSNKKFFGKKWFEFTEKEQEDIWHILYFFESKSNLKEYAIKKWNFTEDQAITISKFNVKDGYANLSRKAIGNILPFLQQGYTYDIAVVMGGIRNSFGDKWQNDTAENNQKELDLIYNIEGIVRSKISGGFIDTIKDLLRKEFGFSDKQLKKLYHHSTTIDVVSLLEKLPVGKEADKEIQAVRNPIVITALFELRKLVNELIDEHGQLDEIKVEMARDLKISKTQRNKIRRDQKRLERENDRVKAEVERYARVSHDNILKFKLWEECRQTCPYTGFAIPIAKLFTGEVQIEHIHPWSRSLNDSFSNKTLCYADENRRKGDKTPFEFYGNDELDWSARKERALKLFSDTKEYPNAYQKFKRFVQLKFDDDFSSRQLNDTRFISKEAKNYLAKICNKVTVSPGQMTANLRQKWGLNTVLNDANAKTREDHRHHAIDALVMACGKTSYLQELSKWNRYDRSYDLKDFPMPWETFRFDAEKAIEKILISHKRLNNVITLRTHKVEKNGIVHKNIGIAARGQLHKETVFGKRNFNGEEAFHVRKAIDSLATEKQLEKVVDQTIKELIHKRIQELGGFIKGTIPINTFFIVDEKGVKQPQIFLPNKNGEPVPILKVRTKENIGGAEQLKHELNQWVNPRNNHHVLIYKDEKGNLKEEVVTFWTVVERKRQGFPIYLLPSDGKEIVATLHINDMFLLGLNEEEINWDDLDYEILKEHLYRVQKLTSGDYFFRKHKSSTVTDNDYRQIRGFGEGKTGWFTFNPIKVKVSISGKIQKI

SEQ ID NO: 19555 - protein, 1128 aa, unidentified; identical to SEQ ID NO: 15196
  REGION 1..1128: note = Cas Enzyme sequence

SEQ ID NO: 19556 - protein, 1128 aa, unidentified; identical to SEQ ID NO: 15177
  REGION 1..1128: note = Cas Enzyme sequence

SEQ ID NO: 19557 - protein, 1283 aa, unidentified
  REGION 1..1283: note = Cas Enzyme sequence
MTKILGLDLGTNSIGWAIRDTNKEGNQIVDSNVIVFPQGVGEEKGVEFSLASERAKHRASRKLYKRRKKRKTDLLKLLIENGFCPLTNDELLMWSVYKKGQEMKYPTTNFEFSEWLKINPYEVRAKAINQIVTKQDLGRALYHMCQRRGFKSGRKDADAGKDLEQYRKEQAILEQNSFKTLGEYYFDLLQNDKKVRKTKFSADDQEVNSSRISYVEEYNILMKSQNVRKELSDAFFDAIFFQRPLKSQKGAVGKCTLEKSKARCPISHPLFEEFRMFQYLNSIKVKEQNNDKFVFLSEHPEYYKIAKDKFYRVSAKNFKFVDISKSINTVAKRESLFFEFNYNDKYPIVGSPTISKLIEVFDAEDWTDCKKQLVSKYKKQDNKNVDDLVDELWHSLFFSGDFVNDITSEKVKNFIRTRFDISEDKINYYEGINLKQGYSSLSKKAIGKILPFLESTIIYPYAVFFANIDAIIGKDKWNQNKEFIQDTIIDIISNYKTQTLKIDVVNGLVGDFIKEYDNSNFDYILDETDKKNVAEKTKLFYGKYEWEKMSDETKTELLAEIENEFQQQLRKRRFGGYYLPKPRVDEIIKNFLIQEYKVSKEQADKLYHPSAMDAYPQSQDGFLGLPFTNSIKNPMAMRTLFYLRKLVNSLLKEGKIAPDTEIIIELARELNDKNKRLAIERWQRERENENKKYREKLEEFARDTNSVVTESDVIKYRLCQEQNGICFYTNKTINCEKLLGSNPQFDIEHTFPRSKSFDNSIANKTLAEKAFNQIKGNRIPQDINDGNYKDNFTNNIIVWQKTIEELEEKIEQQKYFSKVASTVEQKNRAIQQRHYLKLDLDYWKQKVYRFTATEIKPNFKNSQLVDTGIITKYSELFLKSLFQRVFPAKGTMVADVRKSWGLGEKDRNYHYHHAIDAVVLTCMDKSIRDGLAEAFKESEENRYQDKFKIEKPWQTFTEDVNQLKENIIVIHNHKDKIEKQTKKKLRKRNKIQYDKQGNVIYEKGQGIRASLHKASFFGAIERENENSEKVIWFVKRDWASNINEANLENIVDEGIKQRIKKHGLKNVRTEQGFILLPEEDNLKSMLIKKIRLKTKNKNLPKIKSQSHVSQGKRKEYKEHYYATLENIFAMAIYETVDGKGKPPYKTISAFELAKFNKGDSKLEMPVEKNVEIVHKKTKMLMPLSKILKVNQMAIFYENNPEELKTISKQEINKRLFKITEFEGDGRINLRHHAQGGADKDLKEESSLNFDKPSQKLRISLSNVKAIYEGTDFILHPSGKIDFL

SEQ ID NO: 19558 - protein, 1424 aa, unidentified
  REGION 1..1424: note = Cas Enzyme sequence
MAKILGLDLGTNSIGWAVVEKEKSEKNYTLIDKGVRIFSEGVSIEPKTNSESSKAAQRTDYRSGRKLKYRRKLRKLELLKVLSNNGFCPALSNDELKLWRYKKIYPKNDEFRLWLSTDNQNDKLERKKQIKNPYVFRFKASTQKLDLNNIIDKHELGRAFYHMAQRRGFLSNRLDTSDNSIIEEKNLEIEDIIGQSNSAAELQVTYDEFLESYDKADTNTKALFTLGRAFKSILKDNKNEDFESVKEKLSERLNRKEFLGKVKSAISDLSSKIEEANCNTLGEYFYELHKEGQRIRNNYTHREEHYLHEFNTICDKQNLPVKLKKTIENAIFYQRPLKSQKGLVAKCPLENDKACVPISHPDFEAFRMYSFINSIKIKPVDEDKLRFLNEVERENIEPLFYRKSKPNFDFVEIAKKLTPKGLTFGYFKDKKSKEFDVLFNFGNYTNVSGCPTIANLRYVFGDDWRASVIINFNKKNKDNSNKTEHQIIDAIWHVLFRFDKIEKLKQFVKDYLSCDEKTAIKFSKIKLKQDYGSLSLKATRNILPYLEKGLLYSHAVFLANMQTVLPNDVWKNKEDRAIINKEVFSIIDNYNDYKNTINIVNSFIKKVKANQETWSSTNNFVEEVYQKDLNVIIEDYYGLKRWNSFSEEKKENILNDSFQLFSKQMVLNSGRGAFIKKETLEERVKTFLRDNFNVSEANLKKLYHPSAIEVYDKAKRSEKDGKLYLGSPLISSIKNPMAMRSLHQLRKVVNQLIKDDVIDENTTIRIEMARELKSANERVAIRQWQNDLQNNRKNYIEAIKKLYKEDCGLDIEPSENEILKYKLWNEQNRVCIYTGKNISICDFIGSNPKFDIEHTIPRSKSLDNSQTNKTLCCSVYNRDVKKNKIPTECPNHEEILPRISHWYAKYKSLESQMRDLTKKVRASTTKENRDSNIQKRAKLRFEYNYYRHKYKTFTMTEIPKGFKNSQSVDIGIISKYGNLYLKSLFSQVYPVKGKTTANLRDIWGLDKKERINHAHHAKDAVVVACCSRDVNDALAEYYHNYEDYKFYGKPKPSFKHRIPWKGFNNDVNNFDENTLISHHTSDVLPIQSKKAIRKRGIIQRNKDGEIMYKQGDTVRGALHKESFYGAIKREGKNKKGEPQEVVKYVLRKPLENFKDTDLKHIVDDTIKDIVTRGRQEEKKLKKEIETLKKQINRVDDAEEVVLKEQIQNLTDKIDNELYVLPNKNGNPVPIKKIRYFATDVKVPLTIKKHRDVSRHEHKQHYFAKNDSNYCMAIYEGMNSKGKLKRDFEIVNNIDAGEFYRLRNKKHRDNHGLVPNPHNSSKLPLKYILKKGNMVLMYEKEVNEIQELSTEDLLKRLYKLAKFDAQGRLTFRPHTEAKQASELKEVYSVDFNKKEEQIRLQVSKLNILVEGYDFIISSTGKLNFM

SEQ ID NO: 19559 - protein, 1131 aa, unidentified
  REGION 1..1131: note = Cas Enzyme sequence
MSKILGLDLGTNSIGWALIENKTILGMGSRIFPEGVVNLGEGEGRETSKNASRTDNRGKRRQFFRKRLRKRYLLKELAKCDLCPISASLVKDWNGVEIFKNEQLQDWFRLNPYELRAKAVSEKISLLELGRIFYHMIQRRGFLSNSRSAGAEVNEKSAIYKGDVKIGKTGISETLDCINENRTLGIYLNSIKPQQNKPFSNNTERIRNRYTTRQMYIDEFEMIWEFQKKHHSKLTKNLKIIIGGRRKDGYEEDGVLFHQRPLRSQKHLVGYCSFETKKTKCQLSAIPFEMFRIHQWTNTISYDLNGKKQNITIQEKENIINLLLSKEEIKFKEVREVINKLEGYYQFNYKDDDSIIGTHTISNLSNKKFFGTQWFNFSDAEQENIWHILSFFDDRDKLKDYAINNWNFDEEKAIKISKFNLKDKYANLSRKAINNILPFLKLGFIYDIAVGLAGVKNALGSEWKTNKQFVLDNVPEIIRSNFKGGFIESLKQMMREEFNCNEVQLKKLYHHSSSITSNDVLNRLPLGIEADKEIQRIKNPVVITALFEIRKLVNQIIDEYGNLSEIKVELARDLKSSKKNRDDTRRKQQVLERENDRIKEELEKIGQRINHSNILKYKLWEECNNTCPFTGKTINISQLFTGEIQIEHIFPWSRSLNDSFNNKTLCYADENRAKGKSTPYEFYNSQGEEKWEAIKLQALGCFKTKSNYPNCYNKFKHFVKKKHDEDFISRQLNDTRYISKEAKNYLSKICSNVLVAPGQMTATLRHHWGLNSILNKVDDTKTRDDHRHHAIDALVMACSTRSHLQELSKRNRYHKNYELKDFPEPWLNFRVDAEKAAEQILVSHKKPKNIITVRTHTTKKNGVTRKNIGLAARGKLHKESVYGLRKSPNSNKGYHIRKPIESLTTEKHLDKIVDESIRQLILKKVKQIGGFNKGKIPKEAFFIVDKNGFKQPQIFLPNRNGLPVPIKKIRIKENIGGAEQLKENLNQHVNPRNNHHVLIYKDFGNNLKEEVVTFWTVVERKRQGEEVFKLPEDGKEVVTTLQINDMFILGLSNDEIDWKNPNYKLINMNLYRVQKFTSGDYYFRKHEESTLDGKLGIAYNYIKGFGNGKTGWQTHNPLKVKLNSIGLIEKI

SEQ ID NO: 19560 - protein, 1583 aa, unidentified
  REGION 1..1583: note = Cas Enzyme sequence
MSKILGLDLGTNSIGWAVVDDEKEGNKLQDKGVLIFTEGVKKEKGQEKSRAAERTGFRSARRLNFRRKIRKYQTLLVLAKYNMCPLDVEKVKEWRKSNFKRYPIEPEFLNWLKTDESLNKNPYYFRDIASREKINNLDLGRALYHIAQRRGFLSNRLDQSDDNLIKSKKDDIQELINKDCISTIELTNGIEVLFESYEFKDKKKKDCANATETKLWSIRKYIINVIQNKIKEKDYSKIEDIKEEIKRYINKPENLGAVEGNISELNKAIEYAKCKTLGQYFWKLYKEDRNDSNNKIRNNYTSREEHYLAEFEIICKAQGLENINDSKKNANERYSGIVKELYKAIFYQRPLKSQKGLIGKCSLEPNRTRCSVSRPEFEEFRMYSFMNNIKIKAPNNEKFRFLTKEEKIKIEPKFYRKTKPTFTFEDIKNILGKEYFYNYKDKSTVSGCPTIANFINVFGNNWSKRIFENYTDRTIKNRKTNEVIRIKTKEEMIADIWHILSTYISDEKLKDFAINKLKLTDKFAEKFSKIHLKKDYANLSLYAINKILPYLKTGLLYSHAVFMANMDMLVISEKWNDEKDRAFIETGIGNIIDKHQEENKVLYAINSLLKKCFNNNFNYSKEAEDSYRTDLEKILKKEFGTKSWSYKPNRNKILSDAFENFIKYLKERKHVKIKRIDEKTIDFLKGKNETGEIFCEDENLFKKLYHPSDIEKFKPIKIKDKNDNEYIGLGSPEVGSIKNPMAMRALYQLKKIINTLIIEGQIGENTKINIELSRQLNDANKRKAIEKWQNDRKELYQEYKKKIKELYRKETGNELKEVTNSDIEKFAYALEQREDGKIVSKEDILKYSLWKEQNHICIYTGNTINLSSFLGANPTFDIEHTLPRSRSWDNSQMNKTLCENKFNRDIKKDFIPSELPDNKYNEILPRIKHWKEKYEALNTEIEKLKRQTRNATEKEQKDRLIQKRHYLKMEHDYWKGKYQRFTMEEIKEGFKNSQAVDIGIISKYARAYLKSVFKKVYSIKGEMTAEYRKAWGLHDTFKDKWGRTQYEPKDRSNHIHHCIDAVTIASMNKYKYDKLAHAWGLEDKGDYNTAKKELENEKPWKTFTEDVRNFKNEVFIVHQNRDILPIQTKKFERKRGKIQYVLEYEKDNNGNYIRDEKGKKIPQKDKKEKLIYKLDENGKRIPKIQQGDTVRGPLHKENYIGIVERSNELNTKSRAFIEKIIEDETKRFFYVKRSPITKDFSESDVNKIVDEGIKMRIKKNGLKNVKTEDGFILLPAEKKGENGNEKDLKKTLIKKIRLFEKDTPIEIKNQNEINLQSLKAKRKIHKHYFYAQNKENYCMAIYEGKDDKGKLKRDYELVNNIDAGEYFKMSNKRDRVNNISALVPEKHLESNYSLLKVNNKPFILRKGTSVLLLKDRDESASWGYRSWLKSRLYIISGIDKDGIKLNHHQEARMGTDIIKFMNDIINRQKFEIFLEDLSKIENINLNQLKSEIENPEINKKDFFNKVEGLLNDYYKGKNILNEKGEVKKIKLKNSSLTTPKGGDVIDNYKSFPYVKFKPNGFLAKLEGIDFKITQLGKIIKIKK

SEQ ID NO: 19561 - protein, 1515 aa, unidentified
  REGION 1..1515: note = Cas Enzyme sequence
MNKIKLGLDIGTNSIGWAVLEKIDGKYDFFEFKDNNGNIIPTKGSYIFPKGVGADENSKATERRGFRGARRRLQRIILRKIRTLRVLDKYGLCPPFGGGELSKWKNKKIYPCGNEKFIEWQRTGKKNGNSESEKLKQPYYLRHLAATEEGLMQSERGRLQLGRAFYHLAQRRGYLSNSEEEQTDDKLDLFKIEVTNLLSESNNIGDFIETYNVIFDSRKSDDKVKKLGNKISRELKKEIEFEKIKTFIREQFDNPENLGKVMKAIGELSKEIETAVKNGECAPTMGSYFYSIYAKSDKKTGLMTKIRGRYTHREEHYLKEFEYICGKQKIEGDLKNELYHAIFYQRPLKSQKGLVAKCPLEYKRKRIAISHPLFEKFRMWESVNRIKIARENNTKLDFLSKDEKEKIKPLFLQKTDFEFSKIANKLCGDDMYCYIKKPQEVYFKGEKIEGGVAEVFFNFPIDKKFSACPTTAAITKLIGKDNYDTLTLLNTGYKDEKGKATISIEDIWHCLFLDSFGEKDKSQGRKEFAKKHLNLDKKGVETFRKIKLTKGYGNLSKAALKKIVPFLEKGELYSHAVFLANISNVLGRQLSNSEQKLVAKKINEALKIHNKEKQINGIVNNYISKAKKKPQESLGDNSASINVYKTEIKAEIIEWIGEKEYKKLPSNKQDELNNKCWNKFSDMAMNKSVKELIFLKTKTIPEFILEKLTKAFPNDTIDVTKLYHPSAMEAYPKADKKLGNPEISSIKNPVFNRSMHQIKRLCNKLILEGIVDKNTIVNIEVASEINSASYRKALSRWQKDQETIRDWAKKEIINTYPKDCRNEIIPSDTDIVKYILWKEQNHQCLYTDKQISVCDFLGGKTTYDIEHTVPRSKFHDNSLTNKTLADSEFNRKIKKDILPGLLKVNYKDKQINIDSILANRNKNLRSYSIKNNVPTWSVNLQSLKNEYKKYKNAAKHIADPKSHEEVMTKAHYIKMKLDYLSAKYKNFEKEEVVNKFTNANLVDTRIIAKYARAYLNTYFKKVNVINGKITDTLRKMWGLEGEYAHKDRSNHIHHCIDATTIACIERGTANWISEAFHKYENDFFKGNSNPKYQLSAPMNDFANRMHNLHKEVFVYHRQIDRIKPLLENLKKKNAKKLNLRGKLNSQNPYAHIKKNDELIFAQRKPITSIKGKDIENIIDDGIKKRLLALADEKGWKKLMEFLVKENEDAQEKETKHKKEIAYKIYEKIKKVDKKKEIVEDGFTKESITSDFSTKDDLIEKLFSTIIKPNTEDKKRINYRSKLIKEVTNHTRTKGLEILLKESKDVIILPKYYDEEKEREIGKMVIKKIRLKSSKSNLRHYKEIRKIDKSRFDYKRDFYFDKDSYTNYEARIYGDLLPDEYGKLKKRYFHLINHYNIVKNIFEKEVELPIIKLHQDDMFLVFDINPYEEIEWDNKQDLQNRLFKLVKFNENGVFVFERHNYALGNVDKAKSVTESTLSEQKGVVLRKSPSTLRVIPAKVDTLGNLDIEFSKSFVYF

SEQ ID NO: 19562 - protein, 1294 aa, unidentified
  REGION 1..1294: note = Cas Enzyme sequence
MSNLILGLDLGTNSIGWAIRDKNKEGNQIIAANVLVFPQGVGEEKGVEFSLASERTKHRASRKLYKRRKKRKADLLKSLIDNGFCPLTNDELLIWSLYKKGQEMKYPTANYEFSEWLKINPYEVRANAANGLVSKLELGRALYHMCQRRGFKSGRKDADAGKDLERFIIEQDLLKQNGFKTLGEYYFDLLNKGQKVRKTKFSADEQEVNSSRISYVEEFNILMKTQNISKELADKFFDAIFFQRPLKSQKGSVGKCTLEKSKPRCAVSHPLFEEFRMFQYLNSIKIKERTSDVFVFLSEYPDYYKIAEDKFYRVSAKNFKFLDISKSINTAAKKNNLLFEFNYNDKYPIVGSPTISKFIEVFDANDWEDCKTIIQSTYKKQDNKTVDELVDELWHTLFFSANFVNDITSDKVKKFISDRFDIPDEKVDYYEKINLKQGYSSLSKKAIGKILPFLKEKIIYPYAVFFANIDGIIGKEKWNENKQFIQDTIIDIISGYKDEILKIDIVNGLVGDFIAEYDNSNYDYILDETDKKNVKEKIRLFYGKYFLDQMSHNDKEALQKEIEITFQEQLQKRRTGGYFLSKPRIDEIIKDFLIREYKVSAEQADKLYHPSAMDAYPQSQDGQLGLPFTNAIKNPMAMRTLFYLRKLVNTLLKENKIEPDTEIIIELARELNDKNKRQAIERWQRERENENNKYKALLEEFAKGTNSVVTETDIIKYRFWIEQERKCLYTDLSISIEELLGSNPKFDIEHTFPRSKSFDNSLVNKTLAEKNFNQIKGNSIPQELPEKYKLIFVNNTKHWKTKIDELEEKIEQQKYFSKVASTVEQKNRAIQQRHYLKLELDYWKQKLYRFMATEIKPNFKNSQLVDTGIITKYSELFLKSLFQRVFPAKGSMVSDVRKSWGLGEKDRNFHYHHAIDAVVLTCLDKSIRDGLAEAFKESEENRYSDKFKIKKPWKTFTEDVNQLKDSIIVVHEHKNKIEKQTKRKLRQRNKIQYDLSGNVIYERGQGIRGSLHKDTFYGAIERENENSEKEIWFVLRKPVTSAFSDSDVNAIVDEGIKSRILKYGLKNINRTEQGWILLPQEKDAKGNEIKEMLIKRVRVKTSNKNLPKIKSQSHISQKSKKPYKEYYYATLENVFAMAVYEDVNDKGKKEQSFKTISAFDLAQHNQGNSKLEMPIEANIVKNKGKNTEILIPLSKILKVNQMAIFYENSPDELKKISNEELSKRLFKITQFESDGRIQFRHHAQGGADKDLRKESSLDFDKSAQKLRISLNNIKAIFEGKDFVLHPSGKIDFMI

SEQ ID NO: 19563 - protein, 1123 aa, unidentified
  REGION 1..1123: note = Cas Enzyme sequence
MAKILGLDLGTNSIGWAIVDDKLDKILGVGSRIFPMGVENLGEGEGREMSKNAGRTGARGVRRQFFRRRLRKKILLRALSDNKMCPMVASDFENWRNTKQFPSDKLSGWFALNPYELRHKSLTEKLSLEEIGRIFYHLIQRRGFLSNSRKGGTDDGAIFKGNPKESKIGITETQESIKDKTLGSYLFEIYPKENQPFKDGLERIRNRYTTRKMYVDEFELIWSKQSQFHSNLNEDLKTLFGGRKLDGYKEDGILFHQRPLRSQKHLVGNCSFEPTKTKCPISAIPFEQFRIWQWLNTVEYNGKKISPEEKEKIVDFLYVNEKPDFKKIRKVIGKESAEFKFNYKDEDKIVGTYTISHLSSKKYFGKKWFDFSEKEQEDIWHVLYFFDSKSNLKEYAIKNWNFTDEQATAISKFNVKDGYSSLSRKAISNILPFLQIGFTYDVAVVLGGIKNVFGSDWEKSSEEKRNYLIDNIEGIVRSKTKGGFIDIVKDILRNDYNISDNQLRKLYHHSATIDVTELLEKLPIDKDADKEIQAIRNPIVITALFELRKLVSELIDEHGKIEEIKVEMARDLKISKSQRQQIRRDQQRLERENDRVKAEVLKYTNLSHDNILKFKLWEECKRTCPYTGLSIPINELFTNKWQIEHIHPWSKSLNDSFSNKTLCLGTENIKKGNKTPFEYYGNDELDWSARKERALKLFSDTKEYPNAYQKFKRFVQLKFDDDFSSRQLNDTRYISKEAKNYLSKVCKNVIVSPGQATSNLRQKWGLNHILNEENAKTREDHRHHAIDALVMACTKLSYVQELSKWNRYNRTYDLKQFPLPWETFNYDAEKAVEKILISHKKVSNDITVRTHITEKNGLKYKNAGVAARGQLHKETVFGKRNFNGEEAYHVRKSIESLETAKQIDKVVDETTRLLILKRVNELGGFVKDKVPANTYFIIDENGIKQPQIFLPNKNGAPVPILKVRMKENIGRAEQLKDNLNQWVNPMKNHHVLIYKDEKGNLKEEVVTFWTVVERKRTGQSAYQLPIDGKEIVTTLHINDMFLLGLNEDEVNWDNLDYEILKEHLYRVQKFTSGDYYFRIAKTSTINNDNERIYIKNFLNGKTGWFTFNPIKVKISVSGKIQKA

SEQ ID NO: 19564 - protein, 1512 aa, unidentified
  REGION 1..1512: note = Cas Enzyme sequence
MANILGLDLGTNSVGWAIVDKDGNDFYLVDKGVRIFSEGVKSEKGIESSRAAERTGYRSARKIKYRRKLRKYETLKVLSLNGMCPLSIEEVEDWKKSGFKKYPLNPEFLKWLRTDEDENINPYVFRDRASKEKVTLYELGRALYHIAQRRGFLSNRLDQSAEGILEEHCPVIQSMIEDLNTTKEMISELKDYFFNTGIIDESVKGGFVKDLDEGDKKLVSLYKALIAIIKKNENDILKAKEEVIARLNRKEDLGAVKKEIGEISQAMKDGNFSTLGQYFFSLYSKERIRNKYTAREEHYLKEFEMLCQVQGIEGINEKEQLPEKRYIRLAKDLYKAIFFQRPLKSQKGLIGKCSFEKSKSRCAISHPDFEEYRMWTYLNTIKYGTQSEKTLRFLSLDEKLSLISKFLRKKDNFNFEDLAKELIPKGATFGFYKSSRKDEFHYWFNYKPTDTASGCPVSASLKNVIGEDWKTKTFNYKTLNSKGKEVSRTVDYRDLWHLLSVSTSDVYLYEYAKDKLGLSDKNAKAFSRIRLKKDFASLSLNAINKILPYVKEGLLYSHAVFMANVEHIVDEKIWNDESQRRFIQEKMALIIENHTYENDLLEAVNSLIKDCKIDNCYYSKEAEATYKNDLNKKLIPFFKYNSIEDKQVILDELFPIFIAQLKAYEFLRIKRLDEKVLEFLNGENEDGQIFCSNEKRLNKLYHPSDVEVFKKKIIKDEFGNEKIVLGSPLTSSIKNPMAMRALHQLRKVLNTLIFEGQIDENTKIHIEMARELNDANKRKGIQDYQNELKKKREDAVKEIKKLYLEECGKEIEPTEDDLLRYQLWLEQNRAELYEEGRNISVCDIIGSNPKYDIEHTVPRSISQDNSQMNKTLCSQKFNRDIKGNKMPFELTNHLEILPRIAHWKEETDNLSREIEIITRSIKAVATKEAKDRKIRRRHYLTLKRDYLKGKYERFIWEEPKVGFKNSQIPDTGIITKYAQAYLKSYFKRVESVKGGMVAEFRKIWGIQESYQENDKKYYFEKDRSKHTHHTIDAITIACMTKEKYDILAAAWTLEDEERVNESRKLLADSKPWKTFKEDLKKIEEEILVSHYTPDNVKKQSKKIIRIRGKKQFRDENLLDKIGNIIPIFGKRLNEVEILSKVEGKDYFKIQKNSETLYYEYLFDKSANIIYKKIPIYKQGDTIRGSLHQDGMYGAIKMPRLDDNNKLIKSSKGAFILKKDKKEKDEISFVIRKALTKLSDNDIKNIVDPAISQKIQKAVENRIITFKTIQGKKVAVINEGTTIWMREPNEEKNLVGIPINKVRVFATAVKNPLEIKIHSDLSKSRHEHKQKVYGQNDENYCMAIYELNGKRDFELINNFNLAKLIKQGQGNYPLYKEKEAQGKKIQIPIVKSNNRDVVLKRGQQVVFYDKEIEKPKDITDIINLKGRVYIIEGLSIQRIVRPSGKIDEYGSIMFRYFKESRKADDIKKDNFKPDGAFKLEENKPTRKMNHNQFSAFVEGIDFRVLPSGKFEKI

SEQ ID NO: 19565 - protein, 1283 aa, unidentified; identical to SEQ ID NO: 19551
  REGION 1..1283: note = Cas Enzyme sequence

SEQ ID NO: 19566 - protein, 1126 aa, unidentified
  REGION 1..1126: note = Cas Enzyme sequence
MTKILGLDLGTNSIGWALIDDKHNQIVGLGSRIFPMGVENLGEGEGREMSKNAGRTGARGVRRQFFRRRLRKKILLKALSEHEMCPMVSDDFQDWKRTKQFPSEKLASWFALNPYELRHKALNEKLSLEEIGRIFYHLIQRRGFLSNSRKGGTDDGAIFKGNPKEGKIGITETQDKILEKTLGSYLFEIYPNQNEPYQDGLERIRNRYTTRKMYVEEFELIWNKQSQYHSILNEDLKTLFGGRKLDGYKEDGILFHQRPLRSQKHLVGNCSFEPAKTKCPISAIPFEQFRVWQWVNTVEYNGRKISQEEKEKIVEFLYANEKPEFKKIRKVIGKESAEFKFNYKDDDKIVGTHTISNLSNKKFFGKKWFEFSDKEQEDIWHVLYFFDSKSNLKEYAIKNWNFNEEQAEAISKFNLKDGYANLSRKAISNILPFLQLGYTYDIAVVLGGIKNVFGTDWEKLSEEKRNYLIDNVEGIVRSKTKGGFIDIIKSILRNDFNVSDNQLRKLYHHSATINVAELLEKLPLGKEADKEIQAIRNPIVITALFELRKLVNELIEDHGKIDEIKVEMARDLKISKSQRNKIRKEQNRLERENDRIKARLLEEGQRIKHDNILLYKLWEECKHVCPYTGRTISLSQLFSGEVQIEHIHPWSRSLNDSFSNKTLCYADENRKKGNQTPFEFYGNDEANWSAIKERALKLFSDTKEYPNAYQKFKRFVQQKFDDDFSSRQLNDTRYISKEAKNYLSKICKNVIVSPGQATSNLRQKWGMNNILSEENEKTREDHRHHAVDALVMACTKVSYVQELSKWNRYNRNSELKNFPLPWETFRKDAEVSVGKILISHKKVSNDITVRTHVTEINGIKHKNIGVAARGQLHKETVFGKRTFNGEEAFHVRKSIESLETAKQIDKVVDEAIRLLILKKINELGGFVKDKVPANTFFNVDENGIKQPQIFLPNKKGEPVPVLKVRVKENIGGAEKLKENVNQWVNPRNNHHVLIYKDEKGNLKEVVVTFWTVVERKRTGESVYKLPIDGKEIVTTLHINDMFLLGLREEEIIWENPDYEILKEHLYRIQKLSSKFYEFRLNTEASIQNNFHPFYVRIQSFGEGKTGWDTFNPIKVKISVSGKIKRA

SEQ ID NO: 19567 - protein, 1454 aa, unidentified
  REGION 1..1454: note = Cas Enzyme sequence
MSRILGLDLGTNSIGWAVVDKDGTNCSLVDKGVRIFSEGVKSEKGVESSRAAERRGFRSARKVKFRRKLRKYETLKVLANFNMCPLSVEEVIAWRKSGFIEYPTNDEFLKWLKTDDDKNINPYYFRDKASKGKANLFELGRALYHIAQRRGFLSNRLDQSAEGILEEHCPKIEDVFEEVLTVQDLKTEITNYFEGLDIFDITEKSGYKKDLDEGEKKLKSLFVALEKIIKTNESNFEKAKEEIVARLNRKEDLGAVKQNISEISQAIKNGGFTTLGQYFYSLYNREVAKENATTKEKEIFNRAKIRNQYTAREEHYLAEFEIICRAQHIEGIDENEVLPEKKYSGLVKDLYKAIFFQRPLKSQKGLIGKCSFEKNKSRCAISHPDYEEYRMWSYVNTIKIKTPEDETLRFLTEDEREKLIPKFYRKKDGFNFEDLAKELIPKGASFEFHKSFNAKSAHYLFNYKSKDSVSGCVVSTSLKNIFGEDWDTKSIIYQTKNGKDEIVNRAVDYKDLWHLLAVATSDIYLQEYAKEKLGLDEKRAKSFSKIKLKKDFASLSLNAINKIKPYLKEGLLYSHAVFMANIENIVDEKIWKDEIQRKLVQNKIAEIIEKNTFENGLLEAINSLIKDCKKEGSYYSKEAEVSFKKDLQKKLHSFFKYHKVEEGLEEILDELFPVFIEQLKEYKFIKVKRLDEKVLEFLSGENEDGEIFCSDKKQLKKLYHPSDIEVFKKKIVKDENGNEKVVLGSPLTPSIKNPMAMRALHQLRKVLNALILEGQIDSRTRIHIEMARELNDANKRKGIQDFQNENKKAREAYREEIKKLYLAETKKEIEPTEDDLLRYQLWIEQDKKEIYEDGKSIGIAQIIGSNPEFDIEHTIPRSFSQDNSLMNKALCSKRFNREVKKTKMPIELSNHEVILMRIDHWRQQAERLSWEIDQIVKSTKAITTKEAKDRKIRRRHYLTLKRNYIKGKYDRFIWEEPKIGFKNSQIPDIGIITKYSQAYLKSYFNRVESVKGGMVAEFRKIWGIQPSFQENGKKYYEAKDRSKHTHHTIDAITIACMTKDKYDALAHAWTLEDKEQIKAAREILMKSKPWETFTEDINKIEEEILVSHYTPDNVKKQSKKIVRIRGKKQYIAQIERDINGKAIPKKDSNEKIIYKIGEDGKRLPRMQQGDTIRGSLHQDSIYGAVKDPLNNEQIRYVIRKDLESIKATDIENIVDETVKEIVRDAKENKIIVFSSNAQQKNKLNGTVWMNEEKGIPINKVRIYANSVKNPLEIKDHAALSKSRHEHKQKVYAQNDENYALAIYEGLDKKGKIKRSYEAINLLIAGQYFKLSNNDFKEKYDIVTNPHDKTNLPLKYILKKGLMVLFYKESPQELKDLSIKDLNARLYKLSKFDAQGRLTFRTHFEARQASELKEIYNVDFKKPFEQIRLQVSKLDVLVQGYDFSLSTSGKIVFLI

SEQ ID NO: 19568 - protein, 1436 aa, unidentified
  REGION 1..1436: note = Cas Enzyme sequence
MAKILGLDLGTNSIGWAIVEKDNNDFFLVDKGVRIFSEGVNIEAKTNSESSKAAQRTDYRSARKLKYRRKVRKIDLLKILSDNNLCPKLSDKQLSDWRYKKIYPQNDEFRRWLSTDNQDNEDERKEQKDNPYYFRFISVKNSLNLSSKLDRYYLGRAFYHIAQRRGFLSNRLDSSDNSIIEEKKFEINSIINESHSIAEFSELFIDFLSSFDKDEALDKPLFTLSRAFNAIIKDNSTLVYDDLKEKLIERLNKKEFLGPVKRAISDLSEKIENAKCLTLGEYFYTLYEKGEKIRGEYTHREDHYLKELETICSRQNISSELKNKIKEAIFFQRPLKSQKGLVAKCPFENKKACVPISHPDYEEFRMYSYLNNIKIKTPNDDKLRVLNADEREQIDFLFYRKSKANFDFAEIAKKLTPKNLKPGYYKDKNSKDYDVLFNYNLGSNVAGCPTIANLREVFGKDWKGYLSSNFLKNTKTENNKVVRKTEEDIIEDVWHVLFRFDKEELLKQFAIDNLSCDEKTANKFSKIKLKQDYGSLSLKAIRNILPYLKENLIYSHSVFLANMKNILPAEIWNNEENKRVINTEINSILENYKVYSNNIEIVNGLINNIKKENGTWSSNNKFVAAIYKKDLEKQVKDFFSTKKWNETPIEYQASILKECFELFSTQMQLKSGRGEFAKKKTIDEILKQFLNDNFNVDEGGLKKLYHPSAIEVYKKAKRSEDDGKLYLGSPLISSIKNPMAMRSLHQLRKVVNQLIKDDLIDEETVIHIEMPRELNSANERVSIRQWQEELKNRRNKYAEEIKSIFRGDIKMDDFNDVNRIEYEPTENDILKYQLWIEQNKVCLYTGKTICLSDFIGSNPKFDIEHTIPRSRSLDNSQTNKTLCCSIYNREVKKDKIPFECGNSDEILLRISHWYAKYKGLEDQIKDVSKKIKVASTKENRDKNIIKRTKLKFERTYYYKKYKSFTIEEIPEGFKNSQSVDIGIISKYGNLFLKTAFSKVYAVKGKTTGNLRQMWGLEEKTRDNHAHHAKDAVVVACCTRDINDALANYYHDLEQFEFYGKPKPSFSHRIPWKGFNDDVKEFDNNILISHHTPDVFSTQSKKAIRKRGIIQRNENGEIKYKQGDTVRGALHKESFYGAILREELDKKTGKAEEVVKYVKRQSISLFKDTDLKNIVDDKVKEIVEKSREQEKQIKIEIEELKKQMKNVKEEEEQQFKDAIELLEIKIKNELYVLPNQNGSPVPIKKIRYFTNDVSNPLLIKKHRDVSRHEHKQHYFAKNDGNYCFAIYEGKDKKDKFITEYKVVNNYEAGKYYNSKANTHKFPLEFNVEDKNKNVLELKFLLKTGTLVLFYKNFKDEIWELDNLDLAKRLYKTVAIEADGRIQFRLHSTSKPDGQLEKSSEINFEIAKEKLRLSKSALNVIVEGFDFKISSTGKISKM

SEQ ID NO: 19569 - protein, 1045 aa, unidentified
  REGION 1..1045: note = Cas Enzyme sequence
EKDVDKVTKINLKEGYSNVSLKAIKNILPYLRRGINMSDATILGGVRNAFGKHWQYFTDSHELIENEILSINHQKNNKEGEAISKIKSFLSENNFGFSKDDLNFTKLYHHSQEIEEKKLKEKLDPVENLRNPIVQQGVNETRRLVNQLIKEYGKFDKIQVELGREIKNSKKGRQEQSKRIDENTVKNDEARKLLTEYGLKHNRNNVQKVLLYKEMQAKGVVTVCPYTNKSININDILGRENKIQIEHIIPKSISLDDGFANKTLCEAKFNGLKGNLTPYQFYLSNNDSKLWGGAKSWEEIEQRVFRILPYYKAKRFTTKIKIEDVDVKSSFIERQLNDTRYISKKTKEIMSQICKDVRVLPGGLTAELRHLWGLNNILQPVMLVDLPEYKLEVGKTVPHYVILDETNNPISAIPIYKEKPILKINETTITGIVDKGVFKTIEKFVKLNVDTPELANGDYWLKLKLSEPKKIIRIFKEKPLISENEIVLRGKIEKEKFKHDSIGGVNAKGFDNGFYWAKFDITNKKFEIPEKGKQPKKTGKQILLFGEVKEGHFKSYIFECDTTETDGKYWVILDIDTENVVFERAINERPLISENKIIIEGSVNEEGDFVSEIDAGHQFKTVEKQGKYWVVFNIMNDFKEFDAIENPKPILIDKQTLVEGAVWVDKYTGEIKFDPKKNRDDHRHHAIDALVIALSKQSYFQQLSVYNSQRIAKKKGLTFNKEQFDFPEPWNHFHLDVKKIVEKLLVSHKQNRKVLTQVRKKITKNGKTYNSVGGAVRGMLHKENFYGQRQAPTKTTKGYHIRKKVESLKNNQLDKIVDIEIRKIIVNARQEEVRIKKQIDALEKEKRKARTDEEENILNIQINSLTKDINILYSLKNKNGERVPIKKVRIREEMSNAQRLKEDNQFVNPRNNHHVLIYKAENGELKESVVSFWEVVERQKQKQETYQLPEKDCNGNIVTTLQENDMFILGLTDDEFEDNKNNFQFLTKYLFRNQKISNGDYSFRHHLASTLNENNQEMRIRSLKKWTEINPIKVNLTETGVLEII

SEQ ID NO: 19570 - protein, 1129 aa, unidentified
  REGION 1..1129: note = Cas Enzyme sequence
MTKILGLDLGTNSIGWAIVDDENSKILGIGSRIFPEGVVNLGEGEGREASKNASRTDARGTRRQFFRRRLRKRYLLRELAKNNMCPLDYKLVKAWNQKDIFCNKGLKEWLRLNPYELRAKALKEKITLEELGRIFYHMIQRRGFQSNSRSAGAENNEKSVIFKGDAKSGKIGISETTESIKDNQTLGSYLNKIYPKESEPFSGRLERIRNRYTTRQMYIDEFEAIWEQQQQYHKELTDELKTIFGGRKKDGYSEDGVLFHQRPLRSQKHLVGNCSFEPKKAKCHISAIPNEQRRVYEWLNTLKCDLVGEKVKITLEDRENILKLLFSKEKVKFKEIRKAINKLDGHYQFNYKDDDAVYGSHTISNLSNKKFFGKQWFEFSEKEQEDIWHVLYSFDDREKLKQYAIEKWNFNEEKAEKISKFNLKDGYANLSRKAINNILPFLKMGFTYDVAVGLGGVKNALEDKWEEYEDFILDNVPEIVRSNLKGGYIEPLKNMLKKECELSEKELSKLYHHSSNIEINKLLDKLPVSPEADKEIQSIKNPVVITALFEIRKLVNEIIEDYGKPHEIKVELARDLKISKSKRNDIRREQKRLERENDRVKAELDYIGQRPTHVNILKYKLWEECNKTCPYTGRNIEVNQLFSGEIQIEHIYPWSRSLNDSYMNKTLCFADENRAKGDLTPYEFYSKQGEQKWNDIKLQALSCFKNKTNYPNAYNKFKQFVKEKQDSDFISRQLNDTRYISKEAKNYLSKICNNVMVAPGQMTSNLRHHWGLNTVLNKEGDAKTREDHRHHAIDALVMACATRSHLQELSKWNRYDRTYDLENFPKPWETFREDVENAVEQILVSHKKQKSILTVRTHTTKKNGTTYKNVGVAARGQLHKETVFGKPKNGEEVFHVRKPIDSLTTEKQLEKVVDETIKQLIFKRIHFLEGFVKGKIPPETFFVVDENGVKQPQIFLPNKNGNPVPVLKVRMKENIGGAEPLKDNLNQWVNPRNNHHVLIYKDDNGNLKEDVVTFWTVVERKRKSFPVYQLPTDGKEIVTTLHINDMFLLGLNEDEIDWENPNYGLLKEHLYRVQKFTSGDYYFRICNTASIQNKEEKQQINSFGMGKNGWTTHNPIKVKVSVSGKIEKL

SEQ ID NO: 19571 - protein, 1160 aa, unidentified
  REGION 1..1160: note = Cas Enzyme sequence
MAKILGLDLGTNSIGWAIIDDENSKILGIGSRIFPEGVVNLGDGEGREASKNASRTDARGTRRQIFRRRLRKRYLLRELAKNNMSPFDYKLVKAWNQKDIFSNESLKEWLRLNPYELRAKALKEKITLEELGRIFYHMIQRRGFQSNSRSAGAENNEKSVIFKGDAKSGKIGISETTESIKDNQTLGSYLNKIYPKESEPFSGRLERIRNRYTTRQMYIDEFEAIWEHQKQYHKELTHELKTIFGGRKKDGYSEDGVLFHQRPLRSQKHLVGNCSFEPKKTKCHISAIPNEQRRVYEWLNTLKCDLVGEKVKITLEDRENILKLLFSKEKVKFKEIRKAINKLDGHYQFNYKDDDAVYGSHTISNLSNKKFFGKQWFEFSKKEQEDIWHTLYSFDDRDKLKQCAIEKWNFNEEKAEKISKFNLKDGYANLSRKAINNILPFLKMGFTYDVAVGLGGVKNALGNKWEEYEDFILDNVPEIVRSNLKGGYIEPLKNMLKKECELSEKELSKLYHHSSNIEINKLLHKLPVSPEADKEIQSIKNPVVITALFEIRKLVNEIIEDYGKPDEIKVELARDLKISKSKRNDIRREQKRLERENDRVKAELDYIGQRPTHVNILKYKLWEECNKTCPYTGKNIEVNQLFSGEIQIEHIYPWSRSLNDSYMNKTMCFADENRAKGDLTPFEFYSKQGEQKWNDIKLQALSCFKNKANYPNAYYKFKQFVKEKHDSDFINRQLNDTRYISKEAKNYLSKICNNVMVAPGQMTSNLRHHWGLNTVLNKEDDTKIREDHRHHAIDALVMACATRSHLQELSKWNRYDRTYDLENFPKPWKTFREDAETAVEQILVSHKKQKSILTVRTHTTKKNGTTYKNVGVAARGQLHHQTVYGNNKNCKTDEYVYRVAINSLSFSQLNNIIDPNLKNVIIDDILKSFEYDEKDFFNKMINKEKNLDKKIQKVIKEKVDKCLKEQSFFMPNEGKRYKRLNKKEPNNIERKPIPIYKVRVKKVLGKAERLKDNVKQYVDPQKNHHVLIYIDDESNLNEDVVTFWTVVERKRKGFPIYQLPIDGQEIVATLQINDMFLLGLNEEEIDWENPDYSLLKEHLYRVQKLSSKFYEFRLNTEASIQQNYLPFYRRITSYGEGIGGWQTHNPIKVKVSVSGKIERI

SEQ ID NO: 19572 - protein, 1453 aa, unidentified
  REGION 1..1453: note = Cas Enzyme sequence
MARILGLDLGTNSIGWAIVEKDGDGFSLIDKGARIFSEGVKSEKGIESSRAAERTGYRSARKIKFRRKLRKYETLKVLTKNKMCPLTLEDVEKWRQSGFKDYPLNESFLKWLRTDDDKNINPYFFRDKASKGKASLYEIGRALYHIAQRRGFLSNRLDQSAEGIFEEHSPKIEDILDNTTTIAELRTEITDYFDGLDVFDKNEKTGFKKDLDEGEKKLKSLFIALEKIIKINEKDYEKAILELKERLNRKEDLGAVKQKISEISQAMTDGGFKTLGQYFYSLYNAEVELENKTTKELEKFNRAKIRNQYTSREEHYLTEFEIICKAQNIEGINDAELLPEKKYNGLAKDLYKAIFFQRPLKSQKGLIGKCSFEKSKSRCAVSHPDYEEYRMWAYINTIKIKTPEDETLQFLTDEQRQKLVPKFLRKKDNFNFEDLAKELIPKGATFDFYKSFNAKSAHYLFNYKPKDSVSGCVVSTSLKNVFGEDWKTKTFTFQTKNGKGESVNRNVDYKDLWHLISVSNNDIYLQEYAKENLGLDEKRAKSFSKIKLKKDFASLSLNAINKILPYVQEGLLYSHAVFMANIENIVDKKIWSNKTHRKSIQNQIAKIIETNTYDNGLLEIVNGLIKEYKNDSVYYSKEAEATFKKDLQKKLISFYKYHKIDDDQEQILTELFPVFMEQLKKYEFKSVKRLDEKVLEFLSGKNEDGEMFCTDEKQLKKLYHPSDIEVFKKKIHKDENGNEQLVLGSPLTSSIKNPMAMRALHQLRKVLIALILEGQIDPKTRIHIEMARELNDSNKRKGIQDFQNENKKARETYREEIRKLYFEETKKEIVPTEDDVLRYQLWIEQDKKEIYEEGKSIGISQIIGNNPDYDIEHTIPRSISQDNSLMNKTLCSQHFNREIKKTKMPVELANHEQILLRVDHWRIEAGKLTWEIEQIVRSTKAMATKEAKDRKIRKRHFLTLKRNYLQGKYDRFILKEPKVGFKNSQIPDIGIITKYSQAYLKSYFNRVESVKGGMVAEFRKIWGIQESYQKNGKKYYEIKDRSKHTHHTIDAITIACMTKDKYDALASAWTLEDKEQISAARKILADSKPWKTFTEDLKQTEEEILVSHYTPDNVKKQSKKIVRIRGKKQYVAEMEKDQNGKNISKKYPNGKIIYQMDNNGERIPQLQQGDTIRGSLHQDSIYGKIRNPLNFEDIRCVIRKDLESIKATDIENIVDETVKEKVRAAKENKILVFSSNAQQKNKLNGSVWMNEEKGIPIKKVRLYANSVKNPLEIKEHAALSKSRHDHKQKVYAQNDENYAIAIYEGIDKKGKIKRSFQSINNKEAGAYYKLSNKDFSQVYDIVTNPDDKTNLSLKYVLKKGLMVLFYKESAQEILDLEEKDLYSRLYKLAKFDAQGRLTFRTHFEARQASELKEVYNIDFEKPFEQIRLQVSKLNILVEGYEFIISPSGKIVFM

SEQ ID NO: 19573 - protein, 1128 aa, unidentified
  REGION 1..1128: note = Cas Enzyme sequence
MAKILGLDLGTNSIGWALIDDDQNKILGIGSRIFPMGVENLGEGEGREISKNAGRTGARGVRRQFFRRRLRKKVLLKALSENKMCPMDANDFEDWKKTKEFPSKKLANWFALNPYKLRQKALNEKLSLEEIGRIFYHLIQRRGFLSNSRKGGADDGAIFKGNPKEGKIGITETQESIQDKTLGSYLYEIYPKENQPFKDGLERIRNRYTTRKMYVDEFEMIWEKQKQFYSELTYELKTKFGGRKLDKYPEDGILFHQRPLRSQKHLVGNCSFEPTKTKCPISAIPFEQFRVWQWVNTVECNGKKISQEEKEKIAFELMSLPLNKEKIDFSKLKKVINKESAEFKFNYKDNDPIVGAFTISNLSNKKYFGKKWFEFTEKEQEDIWHVLYFFDSKSNLKKYALEKWNFTEEQAEAISKFNVKDGYASLSRKAIANILPFLKSYTYDVAVVLGGIKNVFGSEWEKLSNEKRNFFYDNVYEVVRSKTKGGFIQTIKDILRNDYSISDNQLRKLYHHSATIDVSEFVEKLPLGSEADKEIQQIKNPIVITALFELRKLVNELIDEHGKIDEIKVEMARDLKVSKSERYKARRNQQRLEKENDRVKVEVLKYTNLSHDNILKFKLWEECKRTCPYTGLSIPINELFTNKWQIEHIHPWSKSLNDSFSNKTLCLGTENIKKGNKTPFEYYGNDEANWSAIKERALKLFSFTKEYPDSYSKFKRFIKQSFDDDFTSRQLNDTRYISKEAKNYLSKICKNVMVSPGQATSNLRQKWGLNHILNDENAKTREDHRHHAIDALVMACTKLSYVQELSKWNRYNRTYEMKNFPLPWETFNFDAEKAVEKILISHKKVSNDITVRFKTVEKNGIKHLNKGVAARGQLHKETVFGKRNFNGEEAYHVRKPIESLETAKQIDKIVDETTRLLILKRVNELGGFVKDKVPANTFFIVDGNGVKQPQIFLPNKNGAPVPILKVRVKENIGGAEKLKENVNQWVNPRNNHHVLIYKDKKDNLKEDVVTFWTVVERKRTSQSAYQLPIDGKEIITTFHINDMFLLGLNEDEINWENPDYEVLKEHLYRVQKLSSKFYEFRLSSQASIQNNFQPFYRRITGYGEGIGGWLTHNPIKVKISVSGKLQKL

SEQ ID NO: 19574 - protein, 1128 aa, unidentified
  REGION 1..1128: note = Cas Enzyme sequence
MAKILGLDLGTNSIGWALIDDKQNKILGIGSRIFPMGVENLGEGEGREMLKNAGRTGARGVRRQFFRRRLRKKILLKALTENKMCPMVVSDFEDWKKTKEFPSEKLANWFAINPYELRQKALNEKLSLEEIGRIFYHLIQRRGFLSNSRKGGNDDGTIFKGNLKEGKIGIDDTLESIEGKTLGSYLYEIFPKQNQPFQDGLERIRNRYTTRKMYVDEFELIWNKQSQYHANLNEDLKTLFGGRKLDGYKEDGILFHQRPLRSQKHLVGYCSFEPTKTKCPVSAIPFEQFRVWQWVNTIEYNGKKIPHQDKDKIVEFLYANEKPDFKRIRKVIGKESAEFKFNYKDEDKIVGTHTISNLLNKKYFGKKWFEFSDKEQEDIWHVLYFFDSKSNLKEYAFKNWNFTDEQADVISRFNVKDGYSSLSRKAITNILPFLKIGFTYDVAVVLGGIRNVFGSDWEKLSDEKRNYLIDNVEGIVRSKTKGGFIDVVKDILRNDYSITDNQLRKLYHHSAAIDVSELLEKLPVDSVADKEIQKIKNPIVITALFELRKLVNELIDEHGKIDEIKVEMARDLKISKSERYKIRRNQHRLEKENDRVKAEVLKYTNLSHDTILKFKLWEECKRTCPYTGLSIPINELFTNKWQIEHIHPWSKSLNDSFANKTLCLGTENIKKGNQTPFEFYGNDEVSWSAIKERALKLFSDTKEYPNAYQKFKRFVQQKFDDDFSSRQLNDTRFISKEAKNYLSKVCKNVMVSPGQATSNLRQKWGLNNILHDENAKTREDHRHHAVDALVMACTKLSYVQELSKWNRYNRTYDLKQFPLPWETFSYDAEKALEKILISHKKVSNDITVRFKSVEKNGKKHTNKGVAARGQLHKEFIYGKRIAPFIGEAYHIRKPIGSLETEKHIEKVVDVTIRNLIYKKVNELGGFINGKIPNNTFFTVDENGNKQPQILLPNKNGQPVPILKIRIQETINKAKQLKKDSNQFVNPRNNDHVLIYETIDGNLEKDVVSFWEVVERKKEGLNKIKLPSDGKKIINTFKENDMFILFKNEDEINWDSSIDLSDNLYKVQKIAGADYFMEICFRKHNDSRDDKNAKGDYVYIKGFGEGKTGWFTFNPIKVKISVSGKISKV

SEQ ID NO: 19575 - protein, 1128 aa, unidentified
  REGION 1..1128: note = Cas Enzyme sequence
MAKILGLDLGTNSIGWALIDDKQNKILGIGSRIFPMGVENLGEGEGREMLKNAGRTGARGVRRQFFRRRLRKKILLKALTENKMCPMVVSDFEDWKKTKEFPSEKLANWFAINPYELRQKALNEKLSLEEIGRIFYHLIQRRGFLSNSRKGGNDDGTIFKGNLKEGKIGIDDTLESIEGKTLGSYLYEIFPKQNQPFQDGLERIRNRYTTRKMYVDEFELIWNKQSQYHANLNEDLKTLFGGRKLDGYKEDGILFHQRPLRSQKHLVGYCSFEPTKTKCPVSAIPFEQFRVWQWVNTIEYNGKKIPHQDKDKIVEFLYANEKPDFKRIRKVIGKESAEFKFNYKDEDKIVGTHTISNLLNKKYFGKKWFEFSDKEQEDIWHVLYFFDSKSNLKEYAFKNWNFTDEQADVISRFNVKDGYSSLSRKAITNILPFLKIGFTYDVAVVLGGIRNVFGSDWEKLSDEKRNYLIDNVEGIVRSKTKGGFIDVVKDILRNDYSITDNQLRKLYHHSAAIDVSELLEKLPVDSVADKEIQKIKNPIVITALFELRKLVNELIDEHGKIDEIKVEMARDLKISKSERYKIRRNQHRLEKENDRVKAEVLKYTNLSHDTILKFKLWEECKRTCPYTGLSIPINELFTNKWQIEHIHPWSKSLNDSFANKTLCLGTENIKKGNQTPFEFYGNDEVSWSAIKERALKLFSDTKEYPNAYQKFKRFVQQKFDDDFSSRQLNDTRFISKEAKNYLSKVCKNVMVSPGQATSNLRQKWGLNNILHDENAKTREDHRHHAVDALVMACTKLSYVQELSKWNRYNRTYDLKQFPLPWETFSYDAEKAVEKILISHKKVSNDITVRFKSVEKNGKKHTNKGVAARGQLHKEFIYGKRIAPFIGEAYHIRKPIGSLETEKHIEKVVDVTIRNLIYKKVNELGGFINGKIPNNTFFTVDENGNKQPQILLPNKNGQPVPILKIRIQETINKAKQLKKDSNQFVNPRNNDHVLIYETIDGNLEKDVVSFWEVVERKKEGLNKIKLPSDGKKIINTFKENDMFILFKNEDEINWDSSIDLSDNLYKVQKIAGADYFMEICFRKHNDSRDDKNAKGDYVYIKGFGEGKTGWFTFNPIKVKISVSGKISKV

SEQ ID NO: 19576 - protein, 1415 aa, unidentified
  REGION 1..1415: note = Cas Enzyme sequence
MNPYHLRNKALQEDLELFEMGRVLYHLIQRRGFLSNRKAKDDGKIYKGKEGIAGISETQKQIENKTLGSFLNSIYPTQDEPFKLITDENGNELRVRARYTLRDMYVEEFEQIWNRQANILGLVEKKSLKKNIRFLKGNLSSNRNKKDIDKLQIKYGIENVKIEEIVDISSKGTLYKITTSTNVPLKILLGGEIEKDEDGKIKHKSQNSVLFWQRPLRSQKGLLAKCRFEPDVKNKIGKYLQKGKTPSHLSHPFYEEFRAWQYINTIEYGKKQKLEDSQRLLILELINNKDTNFNFSEIPKKLKMEYEKWNYENDQKVPGNYTTKHLNSLFPKDIWETNKNEIWHCFHFFEDNDNLTDKLKKDFNLTEKDADKVDKINLKEGYSSVSLKAIKNILPYLRRGINMSDATILGGVRNAFGKHWQYFTDSHELIENEILSINHQKNNKEGEAIIKIKSFLSENNFGFSKDDLNFTKLYHHSQQIEEKKLKAKLDPVENLRNPIVQQGVNETRRLVNQLINEYGKFDRIQVELGRDIKNSKKGRQEQSKRIDENTGKNNEARKLLTEYGLKHNRNNVQKVLLYKEMQAKGVVTVCPYTNKSININDILGKENKIQIEHIIPKSISLDDGFANKTLCEAKFNGLKGNLTPYQFYLRNNDSKIWGGAKFWEEIEQRVFRILPYYKAKRFTTKIKVEDADVKSSFIERQLNDMRYISKKTKEIMSQICEDVRVLPGGLTAELRHLWGLNNILQPVMLVDLPDYKLEVGKTIPHYVVLDQTNNPITAVPIYKEKPKLKINETTITGIVDKGVFKTIENFVKLNVDTPDLANGEYWLKLKLSEPKRVTRIFKEKPSISKNEIVLRGKIEKEKFKHESIGGVNAKGFDNGSYWAKFNITNKKYEIPEKGKQPKKTGKQILLFGEVKDGHFKSYIFECDTIETDGKYWIVLDIDTENVVFDRAINERPLISEDKIIIEGSVNGEGNFVSEIDAGHQFKTVEKQGKYWVVFDIMNDFKEFAVIENPKPILLDKQTLVEGAVWVDKYTGEIKFDPKKNRDDHRHHAIDALVIALSKQSYFQQLSVYNAQRIAKKKGLTFDKEQFDFPEPWNHFHSDVKNVAEKLLISHKQNRKVLTQVRKKITKNGKTHISVGGAVRGMLHKENFYGQRQAPTKTTKGYHIRKKVESLKNNQLDKIVDVEIRKIIINAREEEVIIKKQINALEKEKRKARTDEEETTLNTKINCLKKDISILYTLKNKNGDRVPIKKVRIREEMSNAQRLKEDNQFVNPRNNHHVLIYKDENGELKESVVSFWEVVERQKQKQEIYQLPEKDTNGKIVTTLQENDMFILGLNDNEFEDNKNNKAYLTKNLFRVQKLSKKKKSFEFFFRHHLASTLKNDIEGVSVQSFKKWIELNPIKIEISETGKIEKV

SEQ ID NO: 19577 - protein, 1469 aa, unidentified
  REGION 1..1469: note = Cas Enzyme sequence
MRKILKSINNFSVALKLLSNTLIMAKILGLDLGTNSIGWAIVDKGGDDFTLLDKGVRIFSEGVKTEKGIESSKAAERTSYRSARKIKFRRKLRKYETLKVLSMNGMCPLSTEEVEEWRKSGFKKYPLNPEFLKWLRTDDDQNINPYFFRDKASKQKVSLFEIGRAFYHIAQRRGFLSNRLDQSADGIIEQHAPNIESRIEEAHTINEVMLEVKDYFDRLDILDKNSKDLDEGEKKLKSLFNALEKIIKANDFDKTKIDLIDRLNRKEDQGVVKQEIGAISQAMEEGGFATLGQYFSSLYNKGKIRNHYTAREEHYLKEFEIICNRQGITGINENEKLPEKKYSGLAKELYRAIFYQRPLKSQKGLIGKCSLEKSKTRCAVSHPDYEAYRMWSYLNTIKVKSPQDETLRFLTAEEKQTLLPKFLRKKDNFNFEDLAKELVPKGNTFEFYKSTNAKSSQYLFNYKPKNSVSGCVVSASLKNVFGEDWNTKQWEYQTKNAKGETVSRKVNYIDIWHLLSVSTSDIYLEEYAKEKLGLDDKRANSFSKIRLKKDFASLSLNAITKITPYLKQGLLYSHAVFMANIENIVDEHIWKNPEQRLYIQNKIAELIDNNTFENSKLEIINGLIKDCKVDNCYYSKEAEATYKTDLEKKVATVFKSREDQAAIANELYPIFIEQLKKYEFITIKRLDEKVIEFLKGENEDGEIYCSNQNRLNKLYHPSDIEVFKKKIIKDDFGNEKVVLGSPIISSIKNPMAMRALHQLRKVLNALIVEGLVDERTKVHIELARELNDANKRKGIQDFQNENKKKREDFRKEIIDLYLAECKKEIEPTEDDLLRYQLWIEQDRKEIYEEGRNISICDIIGENPKYDIEHTIPRSISQDNSLMNKTLCSQRFNREVKKNKMPVELVNHDEILLRVDHWRKEADKLSWEIEQILKSTKVAATKEAKDKKIRRRHYLTLKRDYLEGKYDRFIWTEPKVGFKNSQIPDTGIITKYARAYLNSYFGRVESVKGGMVAEFRKIWGIQPSYEKDGKKYYEIKDRSKHTHHTIDAITIACMTKDKYDVMARAWDLEDDTEKENYKQVKSILEQSKPWKTFTEDLKKLEEEILVSHHTPDNVKKQSKKIIRIRGKKQYVAEVENDANGKTIAQKDANGKVIYKLTDKGERIPRLQQGDTVRGSLHQDSIYGAIKNPLNTEEIRYVIRKDIESIKATDVESIVDEVVKGKVKEAIANKVLLISSNAQQKNKLDGTVWMNEEKGIPINKVRLYANSVKNPLHIKEHSTLSKSRHEHKQHVYGQNDENYCMAIYELDGKRDFELINNFNLAKLLKQGQGHYPLYKEKEVKGKKVQIPIAKSNNRDVVLKKGQQVILYDKNIETPKDLTEIIDFKGRIYIIEGLSINRVKSGKLFFEYGVITLRYYKEARTGEEIKKDNFKPDGDFKLGEYKPTRKMSPGQFNAFVEGIDFKVLSSGKFEKI

SEQ ID NO: 19578 - protein, 1130 aa, unidentified
  REGION 1..1130: note = Cas Enzyme sequence
MAKILGLDLGTNSIGWALIDDTANKIVGIGSRIFPMGVENLGDGDNEISKNASRTGARGVRRQFFRRRLRKKILLKALSENDMCPMLAIDFENWKETKQFPSDKLASWFALNPYHLRNKALNEKLNLEEIGRIFYHLIQRRGFLSNSRKGGSDDGTIFKGNAKEGKIGITETQESIEDKTLGSYLFEIYPKENQPFQDGLERIRNRYTTRKMYVDEFEMIWEKQKQFHASLNDDLKQLFGGRKLDGYKEDGILFHQRPLRSQKHLVGNCSFEPTKTKCPLSAIPFEQFRVWQWVNTVEYNGKKISQEEKEKLAFELMNLPIGKEKIEFIKLRRVIKKESAEFKFNYKDDDKIVGAYTISNLSNKKYFGSKWFEFSEKEQEDIWHVLYFFDSKSNLKEYAIKNWGFNEDQAIAISKFNVKDGYSSLSRKAILNILPFLQMGFTYDVAVVLGGIKNTFGTDWEKLSEEKRNYLTDNIEGIVRSKTKGGFIEIVKGILRDDYGVSDNQMRKLYHHSATIDKSELKEKLPIGKEADKDIQKIRNPIVITALFELRKLVNEIIDEHGSLDEIKVEMARDLKISKIQRNQIRRDQKRLERENDRVKERLLENSVRITHDNLLLYKLWEECKKTCPYTGKAISVTQLFSGEVQIEHIHPWSRSLNDSFANKTLCYADENRKKGDKTPFEFYGNDEANWSGIKERALKLFSDTKEYPKGYQKFKRFVKINFDDDFSSRQLNDTRYISKEAKDYLAMVCKKVNVSPGQMTANLRQKWGLNHILNTEDDSKSREDHRHHAVDALVMACGKTSYLQELSRWNRYNRKPELKNFPLPWEGFNFDAEKAVDEILVSHKRIANDITVRSHKCEKNGKSHINVGVAARGQLHKETVFGKRDFNGEEAFHVRKAIDSLTTLKQIEKVVDESTRNLILKRIQELGGFVKDKVPANTFFIVDERGIKEPQIFLPNKNGAPVPILKVRMKENFSGAEKLKEKVNQWVNPRNNHHVLIYKDDKGNLKEEVVTFWTVVERKRTGQSAYQLPIDGREIVTTLHINDMFLLGLNEEEINWEKPDCEVLIEHLYRVQKLSSKFYEFRLSSEASIQNNYQPFYVRIQSFGDGKTGWETFNPIKVKISVSGKIQKV

SEQ ID NO: 19579 - protein, 954 aa, unidentified
  REGION 1..954: note = Cas Enzyme sequence
TQEHIQDKTLGSYLFKIYPKENQPFQDGLERIRNRYTTRKMYVDEFEMIWDKQKQFHAVLNDKLKQGIGGRKVDGYKEDGILFHQRPLRSQKHLVGNCSFEPTKTKCPLSAIPFEQFRVWQWVNTVEYNGKKISQEEKEKIVLFLYANEKLDFKKIRKVIGRDSAEFKFNYKDDDKIVGTYTISNLSNKKYFGNKWFEFSEKEQEDIWHVLYFFDSKSNLKEYAIKNWGFNEDQAIAISKFNVKDGYSSLSRKAILNMLPFLQMGFTYDVSVVLGGVKNTFGKDWEKLSEEKRNFFYDNVYEIVRSKTKGGFIDVIKGILRDDYGVSDNQMRKLYHHSATIDVAELLEKLPMGKEADKQIQAIRNPIVITALFELRKLVNELIDEHGVLDEIKVEMARDLKISKSQRNTIRRDQKRLERENDRIKEEVLKYTHLSHDNILKFKLWEECKKTCAYTGKAISVTQLFSGEVQIEHIHPWSRSLNDSFANKTLCYADENRKKGDKTPYEFYGSYELNWSGIKERALKLFSDTAAYPKAYQKFKRFVQVKFDDDFSSRQLNDTRYISKEAKDYLSLVCKKVNVAPGQMTANLRQKWGLNHILNAENDSKSREDHRHHAIDALVMACGKTSYLQELSRWNRYDRRPELKNFPLPWEGFNFEAEKAVEKILISHKRIANDITVRTHKCEKNGKTHTNVGVAARGQLHKETVFGKRDFNGEEAFHVRKAIDSLTTLKQIEKVVDESIRTLILKRIQELGGFVKEKVPANTFFIVDENGLKKPQIFLPNKNGAPVPISKVRMKENFSGAEKLKENVNQWVNPRNNHHVLIYIDEKDNLKEEVVSFWTVVERKRTGEPVYKLPFGGKEIVTTLHINDMFLLGLNEDEINWEDLDYDLLKVHLFRVQSLSSKYYEFRQSINANSQNKVSPFYEQIRGFGSGKTGWDSFNPIKVNVSVSGKIQKV

SEQ ID NO: 19580 - protein, 1123 aa, unidentified
  REGION 1..1123: note = Cas Enzyme sequence
MAKILGLDLGTNSIGWALIDDTANKIVGIGSRIFPMGVDNLGDGDNEISKNAGRTGARGVRRQFFRRRLRKKVLLKALLENEMCPMTAIDFDNWKQTKQFPSDKLASWFALNPYELRNKALTDKVSLEEIGRIFYHLIQRRGFLSNSRKGGSDDGAIFKGNPKEGKIGIIETQEHIQDKTLGSYLFKIYPKENQPFQDGLERIRNRYTTRKMYVDEFEMIWDKQKQFHAVLNDELKQGIGGRKVDGYKEDGILFHQRPLRSQKHLVGNCSFEPTKTKCPLSAIPFEQFRVWQWVNTVEYNGKKISQEEKEKIVLFLYANEKLDFKKIRKVIGRDSAEFKFNYKDDDKIVGTYTISNLSNKKYFGNKWFEFSEKEQEDIWHVLYFFDSKSNLKEYAIKNWGFNEDQAIAISKFNVKDGYSSLSRKAILNMLPFLQMGFTYDVSVVLGGVKNTFGKDWEKLSEEKRNFFYDNVYEIVRSKTKGGFIDVIKGILRDDYGVSDNQMRKLYHHSATIDVAELLEKLPMSKEADKQIQAIRNPIVITALFELRKLVNELIDEHGVLDEIKVEMARDLKISKSQRNTIRRDQKRLERENDRIKEEVLKYTHLSHDNILKFKLWEECKKTCPYTAKAISVTQLFSGEVQIEHIHPWSRSLNDSFANKTLCYADENRKKGDKTPYEFYGSDELNWSGIKERALKLFSDTAAYPKAYQKFKRFVQVKFDDDFSSRQLNDTRYISKEAKDYLSLVCKKVNVAPGQMTANLRQKWGLNHILNAENDSKSREDHRHHAIDALVMACGKTSYLQELSRWNRYNRKPELKNFPLPWEGFNFEAEKAVEKILISHKRIANDITVRTHKCEKNGKTHTNVGVAARGQLHKETVFGRRDFNGEEAFHVRKAIDSLTTLKQIEKVVDESIRTLILKRIQELGGFVKEKVPANTFFIVDENGLKKPQIFLPNKNGAAVPISKVRMKENFSGAEKLKENVNQWVNPRNNHHVLIYIDEKDNLKEEVVTFWTVVERKRTGEPVYKLPFGGKEIVTTLHINDTFLLGLNEDEINWEDLDYEELKEHLYRVQKFTSGDYYFRIAKTASIQNLEEKQQINSFGLGKNGWLTHTPIKVKISVSGKIQKV

SEQ ID NO: 19581 - protein, 1451 aa, unidentified
  REGION 1..1451: note = Cas Enzyme sequence
MAKILGLDLGTNSIGWAIVDKDGNNFSLVDKGVRIFSEGVKSEKGIESSRAAERTGYRSARKIKFRRKLRKYETLKVLSLNGMCPLSIEEVEEWKKSGFKEYPLNPEFLKWLRTSDDENVNPYFFRDKASKQKVSLFALGRALYHITQRRGFLSNRLDQSAEGIFEEHCPEIQSRIEDLTSTEDVLAELKDYFLNTGILNDDNIFKKDLDEGEKKLKTLYNALVAITKKNESDVDKCKDELIARLNKKEDLGAVKKEIGEISQAMKDGGSATLGQYFNSLYNKGKIRNHYTAREEHYLKEFEIICKTQAFEGVNVKEQLPEKRYIGLAKELYKAIFFQRPLKSQKGLIGKCSFEKSKSRCAISHPDFEEYRMWTYLNTIKIGTQSEKILRFLTQEEKLSLIPKFLRKKDNFNFEDLAKELIEKEASFGFYKSSKRDGFHYWFNYKPTDTVSGCPVSASLKNAIGEDWKTKIVTYQTTNFKGIAVSRTVDYKDLWHLISVSTSDIYLYEYAKDKLGLQEKNAKAYSKIRLKKDFGSLSLNAINKILPYVKEGLLYSHAVFMANIESIVDESIWNNAEQRKYIQDKIAGIIVNNTNENGLLEVVNGLIKECKVDGAYYSKEAELTYKKDLDKKLVSFFKFHKIDDTEKQEIISNELFPLFIEQLKAYEFIKVKRLDEKVLEFLKGENEDGEVFCSNQKQLKKLYHPSDIEVFKKQKARDENGNETGELILGSPLTSSIKNPMAMRALHQLRKVLNTLIVEGQVDSATRIHIEMARELNDANKRKGIQDYQNENKKEREKYSEEIKKLYLAECGKEIEPTVDDLLRYQFWIEQDRKEIYENGNSISICDIIGANPKYDIEHTVPRSISQDNSQMNKTLCTQKFNRDIKKQQMPFELGNHLEILPRIAHWKKEAENYSREIEMITRSIKTAATKEAKDKKIRRRHYLTLKRDYLQGKYDRFIWTEPKVGFKNSQIPDTGIITRYAQAYLKSYFNRVESVKGGMVAEFRKIWGIQESYQKDDKKYFVEKDRSKHTHHTIDAITIACMTKDKYDALAHAWTLEDKEQIVEARKILSDSKPWKTFKEDLKKIEEEILVSHYTPDNVKKQSKKIVRIRGKKQYVAEIERDLNGKAVPKKDAQGTTIYKLDKDGKKLPRLQQGDTIRGSLHQDSIYGAIKNPLNTAEIKYVIRKELESIKSSDIESIVDESVKQKVKEAVANKVLMLSSNPQQKNKIAEGKKVWMNEEKQIPINKVRLYANSVKNPLEIKKHSSLSKSRHEHKQKVYGQNDGNYCMTIYEGVDKKGKIKRTHLLVNMMEAGNYFKLSNYDKKLYPISPEKDENDYALKYVLTKGKMVLIYDKKPDELYEMSSNVLLERLFQITQLDVEKSAEIKLLHHAEAREKKEITLVMGLKTGMKGGKNIGEHKKYPWIKIGVNSFDCLVEGYDFKISTSGKIDFLI

SEQ ID NO: 19582 - protein, 1440 aa, unidentified
  REGION 1..1440: note = Cas Enzyme sequence
MAKILGLDLGTNSIGWAIVDKEGNDFSLVDKGVRIFSEGVKSEKGIESSRAAERTSYRSARKIKYRRKLRKYETLKVLSLNGMCPLSIEEVEEWKKSGFKEYPLNPEFLKWLRTSDDENVNPYIFRDKASKQKVSLYELGRALYHITQRRGFLSNRLDQSAEGIFEEHCPKIQSDIEDLNTTEEILNELKNYFLDTGILDVTEKSGFKKDLDEGEKKLKTLHNSLVAITKKNESDIDKCKEELIARLNKKEDLGAVKKEIGEISQAMKDGGFATLGQYFNSLYNKGKIRNHYTAREEHYLKEFEIICKAQSIVGINDEEKLAEKKYSGLAKELYRAIFFQRPLKSQKGLIGKCSFEKSKSRCAISHPDFEEYRMWTYLNTIKFGTQSKKTLRFLTHEEKVSLIPKFLRKKDNFNFEDLAKELIEKGASFGFYKSSKRDSFHYWFNYKPTDTVSGCPVSASLKNIIGEDWKTNTFTYQTLNSKGIEVSRTVDYKDLWHLLSVSTSEIYLYEYAKYKLRLEDKNAKAFSKIRLKKDFGSLSLNAINKILPYVKEGLLYSHAVFMANIESIVDESIWNNAEQRKEIQDKIAEIIANNTFENGLLEVVNGLIKECKVDGAYYSKEAEATYKKDVDKKLVSFFKFHQINEITKQEAISNELFTVFIEQLKAYEFIKVKRLDEKVLEFLKGENQDGEVFCSNAKQLKKLYHPSDIEVFKKQKARDENGEETGQLILGSPLTSAIKNPMAMRALHQLRKVLNTLITEGQVDTNTRIHIEMARELNDANKRKGIQDYQNENKKEREKYGEEIKKLYLTECGKEIEPTVDDLLRYQLWIEQDRKEIYENGNSISICDIIGANPKYDIEHTVPRSVSQDNSQMNKTLCTQKFNREVKKQKMPFELGNHLEILPRIAHWKKEAENYSREIEMITRSIKSVATKEAKDKKIRRRHYLTLKRDYLQGKYDRFIWVEPKVGFKNSQIPDTGIITRYAQAYLKSYFKRVESVKGGMVAEFRKIWGIQESYQKDDKKYFFEKDRSKHTHHTIDAITIACMTKDKYDILAHAWTLEDKEQLSDARKLLADSKPWKTFKEDLIKIEEEILVSHYTPDNVKKQSKKIVRIRGKKQYIAEIERDSNGKAIPKKDLQGKIIYKLDQDGKKLPRLQQGDTVRGSLHQDSIYGAIKNPLNTDEIRYVIRKDLESIKSADIESIVDESVKEKVKEAVTNKVLIISSNPQQKNKIDGQVWMNEEKHIPINKVRLYANSVKNPLEIKEHSSLSKSRHEHKQKIYGQNDENFALAIYEGIDKKGKIKRSYEAINLMNAGQYFKLSNKDFREKYDIVTNPHDKTNLPLKHILKKGLMVLFYKESAQELKELPIRDLNGRLYKLSKFDAQGRLTFRTHFEARQASELKEIYNVDFEKPFEQIRLQVSKLDMLVQGYDFELSTSGRILFK

SEQ ID NO: 19583 - protein, 1527 aa, unidentified
  REGION 1..1527: note = Cas Enzyme sequence
MAKILGLDLGTNSIGWAIVDKEGTDFSLVDKGVRIFSEGVKSEKGNESSRAAERTGYRSARKLKYRRKLRKYETLKVLSINGMCPLSIEEVELWKKSGFIDYPLNPEFLKWLRTDDELNINPYYFRDKASKQKATLYELGRALYHIAQRRGFLSNRLDQSAEGILEEHCPKIEAIIEDLNSYDEIFIDIKDYFFETGILDYNEKSGFVKDLDEGDKKLVSLYKSILAIVNKNHGDFEKGKAEIIERLNKKDVLGKVKGKIKDISQAMLDGNYKTLGQYFFSFYNKEKIRNQYTSREEHYREEFIIICKVQGIGSVNESEKLPEKKFSGLAKDLYRAIFFQRPLKSQKGLIGKCSFETSKSRCAISHPDFEEYRMWNYINTIKMGTQSEKTLRFLTQEEKLKLVSKFYRKNDFNFEILAKELIEKGASFGFYKSSKKNDFFYWFNYKPTDTVSACQVSASLKNVIGEDWKTKRFTYKTLNAKKEEVTKSVDYKDLWHLLSVATSDIYLNEYAKDKLGFDDKKAKAFSKIKLKKDFASLSLSAITKTLPYIREGLLYSHAVFMANIENIVDADIWKDDNEKSMIKSGISNIIKKDIFEREVLNTANGLIKNSKTENYSQESKNIFKADFYNAIENLLGKWEGFEIDQSFINEVYSNFIEEIKKYDKERKFLPIPRLDEKVIQFLLGSNKDGMVYCSDERKINKLYHPSDIDVFKKKIIKDEFGNEILVLGSPLTSSIKNPMAMRALHQLRKVLNTLILEGQVDERTIIHIEMARELNDANKRKGIQEYQNENKKFRENAIKEIKKLYFDECKKEVEPTEDDILRYQLWIEQGKGEIYEQGKNISICDIIGSNPAYDIEHTIPRSISQDNSQMNKTLCSQRFNREVKKQKMPIELNNHLEILPRIAHWKDEADNYTRESEILSRSIKVAATKEAKDKKITRRHYVTLKRDYLQGKYDRFIWKEPKVGFKNSQIPDTGIITKYAQAFLKSYFKRVESVKGGMVAEFRKQWGIQESFIDENGFKQYKIKDRSKHTHHTIDAITIACMTKDKYDVLAKAWTSEDQQDKPAARALMAASKPWKTFKEDLIKIEDEILVSHYTPDNVRKESKKIVRVRGKKQYIAEIERDEKGKAIPKKDANGKVIYKLDKDGKKRPRLQQGDTIRGSLHQDSIYGAIKNPLKTEEIRYVIRKDLESLKASDIENIVDETVKQKVKEAVANKILLLSSNAQQKNKIAENEKVWMNEEKQVPINKVRIYANSVKNPLEIKEHSILSKSRHEHKQKVYGQNDENYAMAIYEGIDEKGKTERAFELINYMDAGSYYKLKNKNERTKDLISLVPEKHLETGYNLLRSNNKPIILKKGLNVILYKEEKEEIEINNSIGIIKRLYKISGLDKDGIKLTYCVSAKGSTENITYMNEVINKQKLLQVKTDIEEIGQWDEIYSDFNNSNVKKSTLFKKLNDLLNKYYFENNICDSKGFTKNVKIKESGLTTPKGGDVIDNFKDFPYIKFKVSNFNALIEGIDFKVSPTGKFEKI

SEQ ID NO: 19584 - protein, 1132 aa, unidentified
  REGION 1..1132: note = Cas Enzyme sequence
MGIVLGLDLGTNSIGWALVDDVDNKILGIGSRIFPEGVVNLGEGEGREASKNASRTDDRGTRRQFFRRRLRKRYLLRELAKHNMCPLDYKAIKIWNQKDIFSDEGVQAWLRLNPYELRAKAIKEELSLEELGRVFYHMIQRRGFQSNSRSAGADNNEKSVIYKGDSKIGKIGIAATSESIKHTETLGAYLNEIYPKENEPFVGGLERIRNRYTTRQMYIDEFETIWEHQKQYHKALTDELKTIFGGRKKDGYAEDGVLFHQRPLRSQKHLVGNCTFEPKKTKCPISAIPNEKRRVYEWVNTLKCDLAGEPVKLTEDDRATIVQLLFSKEKINKFKEIRKAIGKLDGNYQFNYKDDDAILGTHTISNLSNKKFFGSQWFAFTEKEQEDIWHVLYSFDDRDKLKQYAINYWGFDEERADKISKFNLKDGYANLSRKAINNILPFLQLGFTYDVAVALGGVNNALGNDWEAHKAFVLDNVPEIVRSNLKGGYIEPLKTVLKKECNASDKALKKLYHHSSAIDTKVLLDKLPLGADADKEIQNIKNPVVITALFEIRKLVNEIIDDYGKPDEIKVELARNLKASKKSRNETRKKQQFLEKENDRVKKRLEEEGQKINHTNILKYKLWEECNRTCPYTGRTIQLSQLFTGEVQIEHIHPWSKSLNDSFMNKTLCFADENRAKGDRTPYEFYSKQGEQKWNAIKLQALNCFKDKYPSYPNAYKKFQHFVKQKHDDDFISRQLNDTRYISKEAKNYLSKISNKVMVAPGQMTSNLRHHWGLNTILNQEDDTKTRADHRHHAIDALVMACATRSHLQELSKWNRYDRSYDLEHFPKPWDSFREDAEDAIAQILVSHKKQKSILTVRTHTTKKGDKTYKNLGVAARGQLHKETVFGKRQAPNSEQAYHIRKPIDSLTTEKQLEKVVDETIKQLIFKRIHTLGGFEKGKIPAETFFVVDENGLKQPQIFLPNKNGNPVPVLKIRMRENIGGAEQLKDNTNQWVNPRNNHHVLIYKDEAGKLQEDVVTFWTVVERKRKGFPVYQLPAEGKEIVTTLQINDMFLLGLNDEDVDRETPDYSLLKSHLYRVQKLTSGDYFFRKHTSSTVTDKEYKQIRGFGEGKTGWLTFNPIKVKVSVTGKIERV

SEQ ID NO: 19585 - protein, 1133 aa, unidentified
  REGION 1..1133: note = Cas Enzyme sequence
MGKILGLDLGTNSIGWALVDDSYNKILGIGSRIFPEGVVNLGEGEGREASKNASRTDDRGTRRQFFRRRLRKRYLLRELAKYNMCPLDYKSIKIWNQKEIFGNESMQAWLRLNPYELRAKAIKEELSLEELGRVFYHMIQRRGFQSNSRSAGADNNEKSVIYKGDSKIGKIGIAETSESIKHTETLGAYLNKIYPKENEPFVGGLERIRNRYTTRQMYIDEFETIWEHQKRYHKALTSELKTIFGGRKKDGYAEDGVLFHQRPLRSQKHLVGYCTFEPKKTKCPISAIPNEKRRVYEWVNTLKCDLAGEPVKLTEDDRAKIVKLLYAKEKIKFKEVRKAIGKIDGHYQFNYKDDDAIVGTHTISNLSNKKFFGKQWFAFTEKEQEDIWHVLYSFDDRDKLKQYAIEHWGFDEEGADKISKFNLKDGYANLSRKAINNILPFLQLGFTYDVAVALGGVKNALGNDWEAHKAFVLDNVPEIVRSNLKGGYIEPLKTVLKKECNASDKALKKLYHHSSAIDTKVLLEKLPLGADADKEIQGIKNPVVITALFEIRKLVNEIIENYGKPDEIKVEMARDLKISKSKRNDIRREQKRLERENDRVKAELDYIGQRHTHDNILKYKLWEECNKTCPYTGRNIEVNQLFSGEVQIEHIHPWSKSLNDSFMNKTLCFADENRAKGDKTPYEFYSKQGEQKWSDIKLQALSCFKNKPNYPNAYNKFKQFVKQKHDDDFISRQLNDTRYISKEAKNYLSKISNKVMVAPGQMTSNLRHHWGLNTILNQDEDAKTRADHRHHAIDALVMACAKRSHLQELSKWNRYDRSYDLEHFPKPWNTFREDAEQAIEQILVSHKKQKSILTVRTHAVKKGDKMYKNLGVAARGQLHKETVFGKRQAPNSEQAYHIRKPIDSLTTEKQLEKVVDETIKQLIFKRIHTLGGFEKGKIPAETFFVVDENGLKQPQIFLPNKNGNPVPVLKVRMRENIGGAEQLKDDANQWVNPRNNHHVLIYKDESDNLQEDVVTFWTVVERKRKGFPIYQLPADGKEIVTALQINDMFLLGLSEDEIDWEKPDYNLLKAHLYRVQSTSSKYYEFRQVSNSQSQLKVSPAYEQIRNFGEGKTGWFTFNPIKVKVSVTGKIERV

SEQ ID NO: 19586 - protein, 1466 aa, unidentified
  REGION 1..1466: note = Cas Enzyme sequence
MAKILGLDLGTNSIGWAIVDKDGSEFSLIDKGVRIFSEGVKSEKGVESSRAAERTGYRSARKIKYRRKLRKYETLKVLSLNGMCPLSIEEVEEWKKSGFKEYPLNPEFLKWLRTDEAENINPYFFRDKASKQKVTLFELGRAFYHIAQRRGFLSNRLDQSAEGVFELHRPNIENKIEDVTNTADLQIEIKDYFDGLDILEKNSKDLDEGEKKLKSLFNALDKIVKSNLDNLEKAKLEIIERLNRKEDQGVVKQRIGEISQAMKDGNFATLGQYFNSLYDKGKIRNQYTAREEHYLKEFEIICKTQAIEGIVAKEQLPEKRYISLAKELYKAIFFQRPLKSQKGLIGKCSFEKSKSRCAISHPDFEEYRMWTYLNTIKIGTQSEKVLRFLTQEEKLSLVSKFLRKKDNFNFEDLAKELIEKGASFGFYKSSKRDDFHYWFNYKPTDTVSGCPVSASLKNVIGEDWKTKTFTYQTTNSKGIEVSRTVDYPDLWHLLSVSTSDIYLYEYAKDKLGLEDKNAKSFSKIRLKKDFGSLSLNAINKILPYVKEGLLYSHAVFMANIESIVDEAIWKDVEQRKYIQDKIAEIISNNTFENGLQEIVNGLIKECKVDGAYYSKEAEDTYRKDLSKKLVSFFKFHHIDDITKQETILNELFPVFIQHLKAYEFIKVKRLDEKVLEFLKGENEDGEVFCSNPKQLKKLYHPSDIEVFKKQKVRDENGNETGQLILGSPLTSSIKNPMAMRALHQLRKVLNTLIVEGQVDSSTRIHIEMARELNDANKRKGIQDYQNENKKEREKYRDEIKKLYVAECGKDIEPTVDDLLRYQLWIEQDRKEIYENGNSISICDIIGDNPSYDIEHTVPRSISQDNSQMNKTLCTPKFNREVKKQKMPFELANHLEILPRIVHWKEEADNLSREIEMIIRSTKTAATKEAKDRKIRRRHYLTLKRDYLQGKYDRFVWKEPKVGFKNSQIPDTGIITRYAQAYLKSYFNRVESVKGGMVAEFRKIWGIQESYQENGKKYFEEKDRSKHTHHTIDAITIACMTKDKYDVLAHAWALEDEQNKKEAKAIIEHAKPWKTFKEDLLKIEEEILVSHYTPDNVKKQSKKIVRIRGKKQFRDELLLDSSGNKIPAFGKRINNNEIKDKVIGQDYFEIVSNNKKRFYEFLKDKNGNIVYKKIPLYQQGDTIRGSLHQDSIYGAIKNPLNTEEIRYVIRKDLESIKASDIENIVDEKVKVKVKEAIANRVLMLSSNPQQKNKIDGGKSVWMNEEKEISINKVRLYANSVKNPLEIKEHSLLSKSRHEHKQKVYGQNDENFALAIYEGIDKKGKIKRSFEAINLMDAGEYFKLSNKDFKDKYDIVTNPHDKTSLPLKYILKKGLMVLFYKESPQELKELPIKDLNGRLYKLSKFDAQGRLTFRTHFEARQASELKEIYNVDFEKPFEQIRLQVSKLDMLVQGFDFKISTSGKIDFLI

SEQ ID NO: 19587 - protein, 1437 aa, unidentified
  REGION 1..1437: note = Cas Enzyme sequence
MAKILGLDLGTNSIGWAIVEKENNDFSLIDKGVRIFSEGVNIEAKTNSESSKAAKRTEFRSARKLKYRRKIRKIELLKVLSDNNLCPKLSDDELNDWRYKKIYPQNDEFKIWLRTDNQDNEEHRKKQIKNPYYYRFKVATENLNLNNKEDRYILGRAFYHIAQRRGFLSNRLDSSDNSIIEDKNSEITAIINDANSIVEFSEAFSEFLSSFDKEDTSNKPLFSLSRSFNTIIKDSFNLVYSDLKEKLIERLNKKEFLGPVKRAISDLTDKIQETKCTTLGEYFFTLYQKGEKIRGEYTHRIDHYLTEFNFICNKQNIPSEIKEAIERAIFFQRPLKSQKGLVAKCPLENRKACVPISHPDFEEFRMLSYLNNVKIKLPTDEKLRLLSEEEREQIQSLFFRKKPNFDFLDIAKKLTPKGLNPKYYKDKEISNENVLFNYTLGSNVAGCPTIANLVDVFGVNWKEYLFSNFVKSTKVENNSKVPKTIEDIVDDVWHVLFRFDNEELLKQFVIENLNCDEKTAIKFSKIKLKQDYGSLSLKAIRNILPYLRQNLIYSHAVFLANMKNILPIEIWNNEDNRKVINNEINSIIESYKLYSNNIDIVNGLIKNVKKENGTWSSTNKFVAEVYRNGLEKQIKDFFGTKKWNETPEIYQNKILTECFELFSNQMKLNSERGEFAKKQTIDEILKTFLSDNFNVTEESLKKLYHPSAIEVYKKTKKNEVDGKKYLGSPLISSIKNPMAMRSLHQLKKVINQLIKDDMIDEETIIHIEMPRELNSSNERVAIRQWNEDLKNQRNKYSEQIKSIFKGDLKVEGCNDANSNYSNYEPTENDILKYQLWEEQNRVCLYTGKTICLSDFIGKNPKFDIEHTIPRSRSLDNSQINKTLCCATYNRQTKKDKIPFECPNHNEILPRIKHWYAKYKSLEQQLKDLTKKVKAASTKEKRDKYIIERTKLRFEYSYYFKKYKSFTMEEVSEGFKNSQSVDIGIISKYGNLFLKTVFNKVYPIKGKTTANLRQMWGLNEKSRDNHAHHTKDAVVIACCTRDINDALANYYHDLEQFEFFGKPKPTFSHRIPWEGFHKDVDDFDNNTLVSHHTPDNLPVQSKKAIRKRGIIQRNEKGEIKYKQGDTVRGTLHKESFYGAIKREELNKKTGETEEVVKYVKRQAIELFKETDLKNIVDDKIKEIVTNGREQEKQLKKEIEELKKQLKNLKEEEEQPIKDAIQIIENKIKNDIYVLPNKSGKPVPINKIRYYTSDVTNPLFIKKHRDVSRHKHKQFYHAKNDGNYCYAIYEGIDKKNKKIVEYKVVNNFESGKFFNSGLNNLKYPLETNILDNKQNVLELKYLLKTGTLVLFFKESKKEIWEIDNIDLAKRLYKTVAIESDGRVQFRLHSTSKPDGQLEKASTINFEKPNEKLRVSKSSLNILVEGFDFKISSTGKISKL

SEQ ID NO: 19588 - protein, 1145 aa, unidentified
  REGION 1..1145: note = Cas Enzyme sequence
MAKILGLDLGTNSIGWALIDDLQHKILGAGSRIFPMGVENLGDGDKEMSKNASRTGARGIRRQFFRKRLRKKILLNALSQNKMCPLTSEDFENWKITKEFPTVKLADWFALNPYELRQKAVTEKMSLEEIGRILYHLIQRRGFLSNSRKGGTDDGTLFKGNPKEGKIGITETQEKIEDKTLGSYLFEIYPKQNKPFQDGLERIRNRYTTRKMYVDEFELIWNKQAQFHNTLNDDLKTLFGGRKLDNYKEDGILFHQRPLRSQKHLVGNCSFEPSKTKCPISAIPFEQFRVWQWVNTVEYNGNKISQEEKEKIAAFLYSNEKPDFKKIRKVIGKESTDFKFNYKDDDQIVGTHTISSLSNKKYFGTSWFDFTEKEQEDIWHVLYFFDSKSNLKKYAVTNWHFSEEQAEAISKFNVKEGYSSLSRKAILNILPFLQMSYTYDVAVVLGGIKNTFGADWEILADEKRNYLIDNVEGIVRSKTKGGFIDVIKDILRNDYNLSDNQMRKLYHHSATIDAEELLVKLPIDKEADKEIQAIRNPIVITALFELRKLVNELTDEHGTINEIKVEMARDLKISKSQRNNIRRDQKRLERENDRVKAEVLRYTNLSHDNILKFKLWEECRKTCPYTGKTISINQLFSGEVQIEHIHPWSRSLNDSFGNKTLCFADENRNKGNKTPFEFYGTDDGNWSSIKERALKLFSDTKEYPTAYQKFKRFVQQKFDDDFTTRQLNDTRYISKEAKNYLSKICKKVLVSPGQATSNLRQKWGLNNILNDENEKTREDHRHHAVDALVMACTKTAHVQELSKWNRYNRNYDLKEFPLPWESFRKDAENAVEKILISHKKVSNDITVRTHTTEKNGEKHKNIGVAARGQLHKETVFGKRNFNGEEAFHVRKPIDSLTTLKQLEKVVDETTRKIILKRIQIRLLELNDEVFNSTDIRKDKEIQKEIENYHKGIIPSKVFFSVDENGVKHPQIFLPNKSGQPVPILKVRMKENFSGAEKLKDNVNQWVNPRNNHHVLIYKNEKGNLKEEVVTFWTVVERKRTNQSVYQLPSDGTEIVTSLHINDMFLLGLKEEAINWENPDYEVLKEHLFRVQTLSQMFYEFRLSSDATQNKDTKSDVFRRISSFNGWNVFTPIKRKISVSGKITKI

SEQ ID NO: 19589 - protein, 1148 aa, unidentified
  REGION 1..1148: note = Cas Enzyme sequence
MGKILGLDLGTNSIGWAIVDDLQNKILGIGSRIFPMGVENLGDGDKEMSKNASRTGARGIRRQFFRKRLRKKILLNALSKNKMCPLTSEDFENWKIMKEFPTVKLADWFALNPYELRQKALTEKMSLEEIGRVLYHLIQRRGFLSNSRKGGTDDGTLFKGNPKEGKIGITETQEKIEDKTLGSYLFEIYPKQNKPFQDGLERIRNRYTTRKMYVDEFELIWNKQAEFNSALNEDLKTLFGGRKLDNYKEDGILFHQRPLRSQKHLVGNCSFEPSKTKCPISAIPFEQFRVWQWVNTVEYNGNKISQEEKEKIAAFLYSNEKPDFKKIRKVIGKESAEFKFNYKDDDKIVGTHTISNLSNKKYFGTSWFDFTEKEQEDIWHVLYFFDSKSNLKKYAIKNWNFSEGQAEAISKFNVKEGYSSLSRKAILNILPFLQMSYTYDVAVVLGGIKNTFGANWQTLQDEKRNYFIDNVEGIVRSKTKGGFIDVIKDILRNDYNLSDNQMRKLYHHSATIDAEELLMKLPIDKEADKEIQAIRNPIVITALFELRKLVNELTDEHGTINEIKVEMARDLKISKSQRNNIRRDQKRLERENDRVKAEVLRYTNLSHDNILKFKLWEECRKTCPYTGKAISINQLFSGEVQIEHIHPWSRSLNDSFGNKTLCFADENRNKGNKTPFEFYGTDDGNWSSIKERALKLFSDTKEYPTAYQKFKRFVQQKFDDDFTTRQLNDTRYISKEAKNYLSKICKKVLVSPGQATSNLRQKWGLNNILNDQNEKTREDHRHHAVDALVMACTKTAYVQELSKWNRYNRNYDLKEFPLPWESFRKDAENAVEKILISHKKVSNDITVRTHTTEKNGEKHKNIGVAARGQLHKETVFGKRNFNGEEAFHVRKPIDSLITLKQVEKVVDETTRKIILKRVQIRLLELNDEVFNSTDTRKDKEIQKEIENYHKGTIPSKVFFNVDENGIKHPQIFLPNKSGQPVPILKVRIKENFSGAEKLKDNINQWVNPRKNHHVLIFKDEKGNLKEEVVTFWTVVERKRTSQSVYQLPSDGTEIVTSLHINDMFLLGLKEETINWENPDYEVLKEHLYRVQKLSSKFYEFRLGSESSIQNNIQPFYVRIQGFGEGKTGWATFRPAKVKISVSGKITKI

SEQ ID NO: 19590 - protein, 1452 aa, unidentified
  REGION 1..1452: note = Cas Enzyme sequence
LDLGTNSIGWAIVDKEGADFSLVDKGVRIFSEGVKSEKGIESSRAAERTGHRSARKLKYRRKLRKYETLKVLSINGMCPLSIEEVELWKKSGFIDYPLNPEFLKWLRTDDDLNINPYYFRDKASKQKVTLYELGRALYHIAQRRGFLSNRLDQSAEGILEEHCPKIEAIIEDLTSYYEIFTDIKDYFFETGILDYNEKSGFVKDLDEGDKKLVSLYKSIQAIVKKNDGDFEIGKSEIIERLNKKDVLGKVKGKIKDISQAMLDGNYKTLGQYFYSLYNKEKIRNQYTSREEHYLEEFIIICKVQGIGTVTESEKLPEKKFSDLAKDLYRAIFFQRPLKSQKGLIGKCSFETSKSRCAISHPDFEEYRMWNYLNTIKIGTQSEKTLRFLTQEEKLKLVSKFYRKNDFNFEVLAKELIEKGASFGFYKSSKKNDFFYWFNYKPTDTVSACQISASLKNVIGEEWKTKSFTYKTLNAKKKKVTKSLNYKDLWHLLSVATSDIYLNEYAKDKLGFDDKNAKSFSKIKLKKDFASLSLSAITKILPYIREGLLYTHAVFMANIENIVDEDIWNDDNEKAMIKSGISNIIKKDIFEREVLNTANGLIKNSKTENYSQESKNIFKADFYNAIENLLGKREGSEIDQSFIDEVYSNFIDEIKKYDKERKFLPIPRLDEKVIQFLLGSNKDGMVYCSDKRKINKLYHPSDIDVFKKKIIKDEFGNETLVLGSPLTSSIKNPMAMRALHQLRKVLNTLILEGQVDERTIIHIEMARELNDANKRKGIQDYQNENKKFREGAIKEIKKLYFDECKKEVEPTEDDILRYQLWIEQGKSEIYEQGKNISICDIIGSNPAFDIEHTIPRSISQDNSQMNKTLCSQRFNREVKKQKMPIELNNHLEILPRIAHWKDESDNYTREIEILSRSIKVAATKEAKDRKIRRRHYVTLKRDYLQGKYDRFIWKEPKVGFKNSQIPDTGIITKYAQAFLKSYFKRVESVKGGMVTEFRKQWGIQESFIDENGFKQYKIKDRSKHTHHTIDAITIACMTKDKYDVLAKVWTSEDEQDKPAARALMAASKPWKTFKEDLLKIEDEILVSHYTPDNVKKQSKKIVRVRGKKQYIAEIERDEKGKAIPKKDVNGKVIYKLDKDGKKRPRLHQGDTIRGSLHQDSIYGAIKNPLNTEEIRYVIRKDLESLKASDIENIVDETVKQKVKEAVANKILLLSSNAQQKNKIAENEKVWMNEEKQVPIYKVRIYANSVKNPLEIKEHSVLSKSRHEHKQKVYGQNDENYAMAIYELDGKREFELINNFNLAKLIKQDQGFYPLYKEKEVKGKTTFIPIAKSNDIDVVLKRGQQVVFYDKEVEKPKDITEIIDFNGRMYIIEGLSIQRIVRPSGNVDEYGAIMLRCNKEARKADAIKKDNFKPDGVFKINENKPTRKMNHNQFSAFVEGIDFKVLPTGKYEKI

SEQ ID NO: 19591 - protein, 1000 aa, unidentified
  REGION 1..1000: note = Cas Enzyme sequence
VKVGYKKQDDKSADDLVEELWHTLFFAGNFVNDVTSEKVQKFIKDRYEVSDQKAEYYEKINLKQGYSSLSKKAIGKILPFLKDRIIYPYAVFFANIDVILGVEKWNENKEFIQNTIKGIILGYQEKILKIEIINSLVGDFIKEYDNSNYDYLLDETDKKAVIEKIKIFYGKNPWEELSQNTKEALQREVAITFQEQLQKRRTGGYYLSKPRIDEIIKDFLIQDYKVSKEQADKLYHPSAMDAYPQSQDGFLGLPFTKSIKNPMAMRTLFYLRKLINTLIKEKKIAADTEIIIELARELNDKNKRLAIERYQRERENENKKFREKLEEFARDTNSKVTETDVIKYRLCQEQDNKCLYTNETINCEKLLGSNPQFEIEHTFPRSKSFDNSLVNKTLADKIFNQKIKGNLIPQQLEEKYKLNFIHNTKHWRDTIESLEEKIEQQRYFSKVASTVEDNNKAIQQRHYLKLQLDYWKQKMYRFTATEIKPNFKNSQLVDTGIITKYAELFLKSLFQRVFPAKGTMVADVRKSWGLDPKDRNYHYHHAIDAVVLSCMDKSIRDDLAEAFKESEENRYGDKFKIRKPWSTFTEDVNKLKKNIIVVHNHKNSIDKQTVRKLRNRKLLQPKVDYKKNGDGIYSLDEKGKKIIEKYYYQKDKNGELVPQEGKKISELEIKNKKEGVDYFVVEKANNICFYNYVRDNKNEIVFKKEYNFEKGQGIRASLHKDTFYGAIERENEKSEKEIWFVIRKPVTNAFTDAEVNAIVDEGIKSRILKHGLKNIKTEEGWILLPSEKDGHGKEIKEMLIKKVRVKTRNTDLPKIKAQSHVSQGNRKAHKESYYATLENIFAMAIYENITEIGKKEQTFRTISAFDLAKYNKGNTKLEMPVEEIIVKNKGKKSEIIIPLSKVLKINQMVIFYENNLEELKTISKENLSKRLFKITQFESDGRIQFRHHAQGGADKDLKKESSLDFEKSAQKLRISLSNVKAIFERKDFILHSSGKIDFKF

SEQ ID NO: 19592 - protein, 1125 aa, unidentified
  REGION 1..1125: note = Cas Enzyme sequence
MTKILGLDLGTNSIGWALIDDVQNKILGTGSRVFPMGVENLGDGDGEISKNASRTGARGVRRQFFRRRLRKKILLKALSENKMCPMLANDFEDWKKTKEFPSEKLANWFALNPYELRQKALNEKLSLEEIGRIFYHLIQRRGFLSNSRKGGSDDGAIFKGNPKEGKIGITETQDRIQDKTLGSYLFEIYPKENQPFQDGLERIRNRYTTRKMYVEEFELIWNKQSQFHTELTDELKNLFGGRKLDGYKEDGILFHQRALRSQKHLVGNCSFEPTKTKCPISAIPFEQFRVWQWVNTVEYNGMKISEEEKEKIVDFLYANEKPEFKKIRKVIGKESAEFKFNYKDDDKIVGTHTISNLSNKKYFGKKWFEFTEKEQEDIWHVLYFFDSKSNLKEYAIKNWNFTDEQAESIAKFNVKDGYSSLSRKAITNILPFLKLGSTYDVAVVLGGIKNVFGSDWDKLSDEKRDFFTDNVYEIIRSKNKGGFITIIKDILRDDYNISDNQLRKLYHHSATIDVTELLDKLPVGKDADKEIQAIRNPIVITALFELRKLVNELIEEHGKIDEIKVEMARDLKVSKSQRNKIRKEQKRLERENDRVKDRLRENDVRITHDNILLYKLWEECKKTCPYTGKPISVSQLFSGEVQIEHIHPWSRSLNDSFSNKTLCYADENRKKGDKTPFEFYGSDEANWSAIKERALKLFSDTKEYPSAYQKFKRFVQIKFDDDFSLRQLNDTRYISKEAKNYLSRICKKVIVSPGQATSNLRQKWGMNNILNDENEKTREDHRHHAVDALVMACTKVSYVQELSKWNRYNRNSELKNFPLPWETFRKDAEVAVDKILVSHKKVSNDITVRFKTIEKNGKKYINKGVAARGQLHKETVYGKRTFNGEEAFHVRKSIDSLTTEKQLDKVVDESIKLLIRKRIQELGGFLKGIIPANTFFVVDENGIKQPQIFLPNKNGAPVPVLKVRIKESIGRAEKLKENVNQWVNPRNNHHVLIYKDEKGNLKEEVVTFWTVVERKRTGQSVYQLSIDGKEIVTTLHINDMFLLGLNEDEINWENPDYEVLKEHLYRVQKLSSKFYEFRLNTEASIKQNSLPFYRRITGYGEGIGGWLSHNPIKVKISVSGKIQKL

SEQ ID NO: 19593 - protein, 1128 aa, unidentified
  REGION 1..1128: note = Cas Enzyme sequence
MAKILGLDLGTNSIGWALIDDKQNKILGIGSRIFPMGVENLGEGEGREMLKNAGRTGARGVRRQFFRRRLRKKILLKALTENKMCPMVVSDFEDWKKTKEFPSEKLANWFAINPYELRQKALNEKLSLEEIGRIFYHLIQRRGFLSNSRKGGNDDGTIFKGNLKEGKIGIDDTLESIEGKTLGSYLYEIFPKQNQPFQDGLERIRNRYTTRKMYVDEFELIWNKQSQYHANLNEDLKTLFGGRKLDGYKEDGILFHQRPLRSQKHLVGYCSFEPTKTKCPVSAIPFEQFRVWQWVNTIEYNGKKIPHQDKDKIVEFLYANEKPDFKRIRKVIGKESAEFKFNYKDEDKIVGTHTISNLLNKKYFGKKWFEFSDKEQEDIWHVLYFFDSKSNLKEYAFKNWNFTDEQADVISRFNVKDGYSSLSRKAITNILPFLKIGFTYDVAVVLGGIRNVFGSDWEKLSDEKRNYLIDNVEGIVRSKTKGGFIDVVKDILRNDYSITDNQLRKLYHHSAAIDVSELLEKLPVDSVADKEIQKIKNPIVITALFELRKLVNELIDEHGKIDEIKVEMARDLKISKSERYKIRRNQQRLEKENDRVKAEVLKYTNLSHDTILKFKLWEECKRTCPYTGLSIPINELFTNKWQIEHIHPWSKSLNDSFANKTLCLGTENIKKGNQTPFEFYGNDEVSWSAIKERALKLFSDTKEYPNAYQKFKRFVQQKFDDDFSSRQLNDTRFISKEAKNYLSKVCKNVMVSPGQATSNLRQKWGLNNILHDENAKTREDHRHHAVDALVMACTKLSYVQELSKWNRYNRTYDLKQFPLPWETFSYDAEKAVEKILISHKKVSNDITVRFKSVEKNGKKHTNKGVAARGQLHKEFIYGKRIAPFIGEAYHIRKPIGSLETEKHIEKVVDVTIRNLIYKKVNELGGFINGKIPNNTFFTVDENGNKQPQILLPNKNGQPVPILKIRIQETINKAKQLKKDSNQFVNPRNNDHVLIYETIDGNLEKDVVSFWEVVERKKEGLNKIKLPSDGKKIINTFKENDMFILFKNEDEINWDSSIDLSDNLYKVQKIAGADYFMEICFRKHNDSRDDKNAKGDYVYIKGFGEGKTGWFTFNPIKVKISVSGKISKV

SEQ ID NO: 19594 - protein, 1118 aa, unidentified
  REGION 1..1118: note = Cas Enzyme sequence
MAKILGLDLGTNSIGWALIDDVQNKILGIGSRIFPMGVENLGDGDGEISKNASRTGARGVRRQFFRRKLRKKTLLKALAENKMCPLVAQDFEDWKKTKEFPSEKLSNWFALNPYELRHKALIEKLALEELGRILYHLIQRRGFLSNSRKGGSNDGTIFKGNPKEGKIGITETQESIHDKTLGSYLFEIYPKEKQPFQVGLERIRNRYTTRKMYVDEFELIWNKQSQFHSELTDELKTLFGGRKLDGYKEDGILFHQRPLRSQKHLIGNCSFEPNKTKCPISAIPFEQFRVWQWVNTVEYNGKKISQEEKEKIVEFLYANEKPDFKKIRKVIGKESTEFKFNYKDDDKIVGTHTISNLSNKKYFGKKWFEFTEKEQEDIWHVLYFFDSKSNLKEYGIKNWNFTEEQAESIAKFNLKDGYSSLSRKAISNILPFLKLGFTYDVAVVLGGIKNVFGSEWEKLSDAKRNYLIDNVEGIVRSKTKGGFIDIIKDILRNDYAISDNQLRKLYHHSATIDVAELLEKLPIGKEADAAIQAIRNPIVITALFELRKLVNELIDEHGKIDEIKVEMARDLKISKSQRNKTRREQKRLEKENDRVKARLLEEGQRITHDNILLYKLWEECKRTCPYTGKSISVAQLFSGEVQIEHIHPWSRSLNDSFSNKTLCYADENRKKGDKTPFEFYGNDEANWSAIKERALKLFSDTKEYPNAYQKFKRFVQQKFDDDFSSRQLNDTRYISKEAKNYLSRICKNVIVSPGQATSNLRQKWGMNNILNDENEKTREDHRHHAVDALVMACTKVSYVQELSKWNRYNRNSELKDFPMPWEHFWSDANRAVDKILVSHKKVSNDITVRTHTCEKNGKTHVNLGVAARGQLHKETVYGKRTFNGEEAFHVRKAIDSLTTEKQLDKVVDESIKLLIRKRIQELGGFVKGNIPANTFFVVDENGVKQPQIFLPNKNGEPVPVLKVRVKESIGRAEKLKDKVNQWVNPRNNHHVLIYKDEKGNLKEEVVTFWTVVERKRTGQSAYQLPIDGKEMVTTLHINDMFLLGLSEEEITWEDPNYDLLRSHLYRVQKLTSGDYFFRDNKASSINNKNEEKRLSLKGLFLLTPIKVKISVSGKISKI

SEQ ID NO: 19595 - protein, 1080 aa, unidentified
  REGION 1..1080: note = Cas Enzyme sequence
MSKNAGRTGARGVRRQFFRRRLRKKILLKALTENKMCPMVVSDFEDWKKTKEFPSEKLANWFAINPYELRQKALNEKLSLEEIGRIFYHLIQRRGFLSNSRKGGNDDGTIFKGNLKEGKIGIDDTLESIEGKTLGSYLYEIFPKQNQPFQDGLERIRNRYTTRKMYVDEFELIWNKQSQYHANLNEDLKTLFGGRKLDGYKEDGILFHQRPLRSQKHLVGYCSFEPTKTKCPVSAIPFEQFRVWQWVNTIEYNGKKIPHQDKDKIVEFLYANEKPDFKRIRKVIGKESAEFKFNYKDEDKIVGTHTISNLLNKKYFGKKWFEFSDKEQEDIWHVLYFFDSKSNLKEYAFKNWNFTDEQADVISRFNVKDGYSSLSRKAITNILPFLKIGFTYDVAVVLGGIRNVFGSDWEKLSDEKRNYLIDNVEGIVRSKTKGGFIDVVKDILRNDYSITDNQLRKLYHHSAAIDVSELLEKLPVDSVADKEIQKIKNPIVITALFELRKLVNELIDEHGKIDEIKVEMARDLKISKSERYKIRRNQHRLEKENDRVKAEVLKYTNLSHDTILKFKLWEECKRTCPYTGLSIPINELFTNKWQIEHIHPWSKSLNDSFANKTLCLGTENIKKGNQTPFEFYGNDEVSWSAIKERALKLFSDTKEYPNAYQKFKRFVQQKFDDDFSSRQLNDTRFISKEAKNYLSKVCKNVMVSPGQATSNLRQKWGLNNILHDENAKTREDHRHHAVDALVMACTKLSYVQELSKWNRYNRTYDLKQFPLPWETFSYDAEKAVEKILISHKKVSNDITVRFKSVEKNGKKHTNKGVAARGQLHKEFIYGKRIAPFIGEAYHIRKPIGSLETEKHIEKVVDVTIRNLIYKKVNELGGFINGKIPNNTFFTVDENGNKQPQILLPNKNGQPVPILKIRIQETINKAKQLKKDSNQFVNPRNNDHVLIYETIDGNLEKDVVSFWEVVERKKEGLNKIKLPSDGKKIINTFKENDMFILFKNEDEINWDSSIDLSDNLYKVQKIAGADYFMEICFRKHNDSRDDKNAKGDYVYIKGFGEGKTGWFTFNPIKVKISVSGKISKV

SEQ ID NO: 19596 - protein, 1435 aa, unidentified
  REGION 1..1435: note = Cas Enzyme sequence
MERIKLGLDLGTNSIGWAVLIKKDGKYEFLEFEDKEGNAISTKGSYIFPKGVNADENSKAVERRGFRSARKRSQRIILRKIKTLRVLNEYELCPTFEEGELSKWKNKKIYPCENEAFIEWQRTGKKGGNTETERRKQPYYLRHLAATQEGLMNSKNGKLQLGRAFYHLAQRRGYLSNSDEEQTEDKLEQFKIDVRNILEENSDCAAFKEPFEVIFDAAKKDDKVKRLGNKIVRELKKEIVFENLKSFINKEFDKPENLGTVMKAIGALSQEIKSANEKGNCEPTLGSYFNFIYTTSNDKGLINKIRGRYTHRNEHYLEEFNYICKKQNITEDLKKELHFAIFHQRPLKSQKGLVANCPLETKRKRIALSHPLFEEFRMWESINRIKISRNENSKLEFLSVEEKELIKPLFLKVQDFEFRKIASIICNDKWYAYIKEPHKVYLKEEVKAIKGGVAEVFFNFPLDKKFSACPTTARLNTLLGKDEFKKLPFLNTSYKDEKNKQQVSIEDIWHCLFLDDFGKKTKQEGRKDFAIKHLTLDEKGITSFQKIKLAKGYGNLSKAALKKIVPFLKIGEIYSHAVFLANVSDVLGRKLSKSEETTVSEEVKKALKLHKEENKINGIVNNYIAKLKDKDKPEMLGSNSFNQDAHKKSLLDEIINWVTKSVFNKLNEREKNNLIENCWNKFNEVALDKLPKEIRFISTKVIPEFILEILQKSFPNEKIDISKLYHPSAMDKYPQANKRLGNPEIASIKNPVFNRAMHQIKRLCNKLILEGIIDKNTEVNVEVAGEINSASYRRALSLWQKEQETIRAWAKKEIINTYPKECRAEINPTETDVIKYIFWKEQSHQCLYTKKQISICDFLGGKTTYDIEHTIPRSRVNDNSLVNKTLADSEFNRKIKKDILPGLLNVTYKGEEINKETILQNRTANLNSYSFLGKKPNVSVQWNVSLFQLKTNYKKYKNAAKFMSDPTQHSEMMVKVHYTKMKLDYLSAKYKTFEVEEITKQFSNANLVDTRIITKYARAYLNSYFNKVNVVNGKITDTLRKMWGLEGENEQKDRSNHIHHCIDAIVVACVERGTVNWISEAFHKYERDYFKGNQNPRYQLKSPMNNFAERMHNLHKEVFIYHRQIDRIKPLIENLKKENAKKLNLRGKLNSQNPYAHIKKNDALIFVKRELITKFKIKDFKNIVDEGIKRRILTLGSDEYVDNFLKESIKKGYIELPECVNSKGKKISKMIIKKIRLQSSKSNLKDYKEIRLLDKSKFEYKRDYYFDKAKYTNYEAWIFGDLVPDENGKLRGRKSLIINHYDIVKNVFQEENTKPILKLHTDDLFIVFDKNPNEEIDWENVKDLQMRLFSVAKFIENKEKGVIKEIILKRHSYALGNVDKVPKENCIERGAEGIQLSDLDRVVLRRSPSTLKVIPVKQDALGNLDIEYSKSFLNF

SEQ ID NO: 19597 - protein, 1435 aa, unidentified
  REGION 1..1435: note = Cas Enzyme sequence
MERIKLGLDLGTNSIGWAVLIKKDGKYEFLEFEDKEGNAISTKGSYIFPKGVNADENSKAVERRGFRSARKRSQRIILRKIKTLRVLNEYELCPTFEEGELSKWKNKKIYPCENEAFIEWQRTGKKGGNTETERRKQPYYLRHLAATQEGLMNSKNGKLQLGRAFYHLAQRRGYLSNSDEEQTEDKLEQFKIDVRNILEENSDCAAFKEPFEVIFDAAKKDDKVKRLGNKIVRELKKEIVFENLKSFINKEFDKPENLGAVMKAIGVLSQEIKSANEKGNCEPTLGSYFNFIYTTSNDKGLINKIRGRYTHRNEHYLEEFNYICKKQNITEDLKKELHFAIFHQRPLKSQKGLVANCPLETKRKRIALSHPLFEEFRMWESINRIKISRNENSKLEFLSVEEKELIKPLFLKVQDFEFRKIASIICNDKWYAYIKEPHKVYLKEEVKAIKGGVAEVFFNFPLDKKFSACPTTARLNTLLGKDEFKKLPFLNTSYKDEKNKQQVSIEDIWHCLFLDDFGKKTKQEGRKDFAIKHLTLDEKGITSFQKIKLAKGYGNLSKAALKKIVPFLKIGEIYSHAVFLANVSDVLGRKLSKSEETTVSEEVKKALKLHKEENKINGIVNNYIAKLKDKDKPEMLGSNSFNQDAHKKSLLDEIINWVTKSVFNKLNEREKNNLIENCWNKFNEVALDKLPKEIRFISTKVIPEFILEILQKSFPNEKIDISKLYHPSAMDKYPQANKRLGNPEIASIKNPVFNRAMHQIKRLCNKLILEGIIDKNTEVNVEVAGEINSASYRRALSLWQKEQETIRAWAKKEIINTYPKECRAEINPTETDVIKYIFWKEQSHQCLYTKKQISICDFLGGKTTYDIEHTIPRSRVNDNSLVNKTLADSEFNRKIKKDILPGLLNVTYKGEEINKETILQNRTANLNSYSFSGKKPNVSVQWNVSLFQLKTNYKKYKNAAKFMSDPTQHSEMMVKVHYTKMKLDYLSAKYKTFEVEEITKQFSNANLVDTRIITKYARAYLNSYFNKVNVVNGKITDTLRKMWGLEGENEQKDRSNHIHHCIDAIVVACVERGTVNWISEAFHKYERDYFKGNQNPRYQLKSPMNNFAERMHNLHKEVFIYHRQIDRIKPLIENLKKENAKKLNLRGKLNSQNPYAHIKKNDALIFVKRELITKFKIKDFKNIVDEGIKRRILTLGSDEYVDNFLKESIKKGYIELPECVNSKGKKISKMIIKKIRLQSSKSNLKDYKEIRLLDKSKFEYKRDYYFDKAKYTNYEAWIFGDLVPDENGKLRGRKSLIINHYDIVKNVFQEENTKPILKLHTDDLFIVFDKNPNEEIDWENVKDLQMRLFSVAKFIENKEKGVIKEIILKRHSYALGNVDKVPKENCIERGAEGIQLSDLDRVVLRRSPSTLKVIPVKQDALGNLDIEYSKSFLNF

SEQ ID NO: 19598 - protein, 1458 aa, unidentified
  REGION 1..1458: note = Cas Enzyme sequence
MAKILGLDLGTNSIGWAIVDKAKNEKEFKLIDKGVRIFSEGVKTEKGIESSRAAERTGYRSARKIKYRRKLRKYETLKVLSKNGMCPLSVDEVEAWKRTGFKEYPLNPEFLKWLRTSEDTNENPYAFRDRASKHKVSLFELGRAFYHMAQRRGFLSNRLDQSAEGVFEEHCPKIQNQIEDLISHEEILMELQDYFSNTGILDESVKGGFTKDLDEGDKKLKLLYNSLKNIIKRNADDIVKCKEELIERLNKKEDLGKVKGKIKDISQAMIDGDFKTLGQYFYSLYNKEKIRNQYTSREEHYLEEFMIICRTQNIKGINDSEKLPEKRFSGLAKDLYRAIFYQRPLKSQKGLIGKCSFENNKSRCAISHPDFEEYRMWSFLNTIKIGTHSDKTMRFLSQEEKLKVIPKFYRKKEHFNFEDLAKELIEKGASFGFYKSSKRSGFHYWFNYKPTDTVSGCPVSASLRLAIGDDWRTKTFSYKTTTANDDEVSRTVDYKDLWHLISVATSDTYLYEFAKYKLELEEKYAKAFSKIKLKKDFASLSLSAINKILPYLKEGLLYSHAVFMANLKSVVDVAIWENLSQRKFIQDKIDEIIQNNTFENKLLEAVNSLIKECKVNESYYSQEAEPIYLKELENKLISTFKYFEINNKREQEIIVNDLFSVFIDQLKVYEFIKIKRLDEKVLEFLTGENEDGEVFCSDKKRLKKLYHPSDLSQFKKKIVTDPNGNKTLVLGSPLTSSIKNPMAMRALHQLRKVLNALILEGQINENTRVHIEMARELNDANKRKGIQDYQNENKKKREEAVKEIKKLYFEDCNKEVEPTEDDLLRYQLWIEQNRCEIYENGNNISICDIIGANPEYDIEHTIPRSVSQDNSQMNKTLCSQKFNRDVKGNKMPIELVNHLDILPRIAHWREEAENYTREIEIITRTIKSIATKEAKDKKIRRRHYLTLKRDYLKGKYDRFIWEEPRVGFKNSQIPDTGIITRYAQRYLKSYFKRVDSVKGGMVAEFRKQWGIQESYIDENGQKHYEVKDRSKHTHHTIDAITIACMTKDKYDVLARAWTLEDEQNKTQARAIIEAAKPWKTFKEDLLKIEEDILVSHYTPDNVKKQSKKIIRVRGKKQYVAEIERDGRGKAVPLKDENGKIVYKLDSENKRIPRFQQGDTIRGSLHQDSIYGAIKDPFNNEAIRYVIRKDLESLKKTDIDQIVDKVVKEKVQRAIENGVLIISSNAQQKNKLDGSVWMNEEKGIPINKVRLYANSVKNPLEIKEHSVVSKSRHEHKQVIYGQNDENYCMAIYELNGKRDFELVNNFNLAKLLKQGQGYYPLFKEKEVKGKTLQLPIVKRNKRDLILKRGQQVVFYDNDIEKPESVFDLVDLKNRIYIIEGLSIQRIKSGNNEFEYGVIMLRYFQEARKADDIKKDKIKPDGVFRLDENKPLRKMNHNQFSAFVEGVDFKVSSTGRIEKI

SEQ ID NO: 19599 - protein, 1125 aa, unidentified; identical to SEQ ID NO: 15145
  REGION 1..1125: note = Cas Enzyme sequence

SEQ ID NO: 19600 - protein, 1435 aa, unidentified
  REGION 1..1435: note = Cas Enzyme sequence
MAKVLGLDLGTNSIGWALVEKERGEKEFTLIDKGVRIFSEGVNLEPKTSSESSKAAERTGYRSGRKLKYRRKLRKLELLKVLSDNDLCPKLTDEELNLWRYKKIYPTNDEFRLWLSTDNQDDKIERKNQNKNPYVFRFKASTQKLDLNKTSDRHELGRALYHIAQRRGFLSNRLDTSDNSIVEEKNNEIEEIVQQSSTAEDFLKIYDEFLEAYDKTEANSKALFSLGRAFKSILKENVNEEFDSVKEKLLERLNRKEFLGKVKSAISDLSAKMEEANCNTLGEYFHGLHKEGLRIRNHYTHREEHYLHEFHVICDKQNLSTTLKKDIENAIFFQRPLKSQKGLVAKCPLENDKACVPISHPDFELFRMYGFINSIKIKPEEEDKLRFLNSDEKAIIESLFYRKSKPNFDFEEITKKLTPKNLKSGYYKDKNAKDSDVLFNFGNYTNVSGCPTIANLRAVFGDDWKAYLNQNFNKKNKDDSNKSEHQVVDAIWHVLFRFDKTEKLKQFVKSYLDCDDDIAVKFSKIKLKQDYGSLSLKAIRNILPYLEKDLIYSHAVFLANMKTVLPKDVWNNEEDRKVINNEVFSIIENYNTYRNTVDIVNGAIKNVKNNQETWNAKNTFVIEAYKKDINKSIQDYYGLKSWDSFSEAEKDTILKDSFKLFSTQMELNSGSGEFLKKETLDERVKEFLRDNFNVSEASLKALYHPSAIEVYKKAKRSDIDGKLYLGSPLISSIKNPMAMRALHQLRKVINQLIKDDAIDENTIIRIEMARELKSANERVAIRQWQNDLQNNRKDHIEAIKKLYKEDSGLDIEPSQDEVLKFQLWNEQNKICLYTGKTISICDFIGANPKFDIEHTIPRSKSLDNSQINKTLCCSIYNRDVKKDKIPTECQNHEDIIPRIKHWYANYKSLENQIRDLTKKVRAATTKENRDSSIQKRTKLRFEYNYLRDKYKTFTMLEIPRGFKNSQSVDIGIISKYGNLFLKSLFSQVYPVKGKTTSNLRDIWGLDKKERINHAHHAKDAVVVACCSKDINDALAEYYHDYEDYKFYGKPKPSFKHRIPWKGFNNDVRDFDDNTLISHHIPDVLPIQSKKAIRKRGIIQRNKNGDIKYKQGDTVRGALHKESFYGAIKREEKNKKGEVEDVIKYVLRKPLDSFLDTDLKNIVDDKIREIVTNGRKQEKVFKKEIETLKKQINKVNDAEEEVIRTQIEMVSNKIENEIYVLPNKNGKPIPINKIRYFATDVKVPLEIKKHRDVSRHEHKQHYFAKNDSNYCMAIYEGIDTNGKIKRSNLLINNLDAGSYFKMSNTNNEIYPIAPEQDENNNPLKYILTKGKMILVYDKIPNELYDMETSQLLERLFQITQLDVEASCIKLLHHTEAREKKTLTSIMGLKTGMKGGKNIGEQKKYPWIKIGVNSFDCLVEDYDFKITASGQLEFMKN

SEQ ID NO: 19601 - protein, 1458 aa, unidentified; identical to SEQ ID NO: 19598
  REGION 1..1458: note = Cas Enzyme sequence

SEQ ID NO: 19602 - protein, 1125 aa, unidentified
  REGION 1..1125: note = Cas Enzyme sequence
MAKILGLDLGTNSIGWAIINDKENKILGVGSRIFPMGVENLGDGDNEMSKNASRTGARGVRRQFFRKRLRKKVLLKALSENEMCPLLENDFQDWKKTKQFPSEKLKTWFALNPYELRQKALTEELSLVEIGRIFYHLIQRRGFLSNSRKGGSDDGAIFKGNAKDGKIGITETQGKIEDKTLGSYLFEIYPKDNEPFEFGLDRIRNRYTTRKMYVDEFELIWEKQSVYHSNFTKELKTLFGGRKIDDYKEDGILFHQRPLRSQKHLVGNCSFETSKTKCPMSAIPFEQFRVWQWVNTVEYNGKKISQKEKEKIVEFLYANEKPDFKKIRKIIGKESAEFKFNYKDDDKIVGTHTISNLSNKKYFDKKWFEFSEKEKEDIWHILYFFESKSNLKEYAIKNWNFKEDQAESISKFNVKDGYANLSRKAILNILPFLKMGYTYDVAVVLGGIKNTFGLDWEKLSNEKRNFFYDNIYEIVRSKSKGGFINIIKDLLRNDYKISDNQMKKMYHHSATIDANVLLDNLPMGKEADKEIQAIRNPIVITALFELRKLVNELIAEHGAIYEIKVEMARDLKISKSQRNKIRINQKRLERENDRVKAEVLKYTNLSHDNILKFKLWEECRKTCPYTGKAIAINQLFTGEVQIEHIHPWSRSLNDSFSNKTLCYADENRNKGDKTPFEFYGSDENNWSAIKERALKLFSDTKEYPTAYQKFKRFVQEKFDDDFTSRQLNDTRYISKEAKNYLAKICNKVIVSPGQATANLRHKWGLNNILNNENEKTREDHRHHAIDALVMACTKTAYVQELSRWNRYNRKPELKDFPMPWETFRYDAEKAVDKILVSHKKVSNDITVRKHITEKNGKKHINVGVAARGQLHKETVFGKRNFNGEEAFHVRKPIDSLTTLKQVEKVVDESTRILIHKRIQALGGVVKDKIPADTFFVVDENGIKQPQIFLPNRNGEPVPILKVRMKENIGGAEKLKDKVNQWVNPRNNHHVLIYKDDKGTLQEEVVTFWTVVERKRQGFPVYQLPINGKEIVTTLHINDMFLLGLNADEIDWENLDYDFMNTHLFKVQALSQMFYEFRLNSDATQNKDTNSKVFKRIQSFGEGKTGWSKFNPIKVKISVSGKIQKL

SEQ ID NO: 19603 - protein, 1291 aa, unidentified
  REGION 1..1291: note = Cas Enzyme sequence
MSKILGLDLGTNSIGWAIRDTNKEGNQIVDANVIVFSQGVGEEKGVEFSLASERTKHRASRKLYRRRKQRKTDLLNLLIGNGFCPLTTDELLVWSVYKKGQEMKYPTENYEFSEWLKINPYEIRAKAVNTSVSKLELGRALYHMCQRRGFKSGRKDADAGKDLIQFKKEQVELEKHGFTTLGEYYYDLLQNNQKVRKTKFSADDEEVNSSRISYVEEFNYLMKCQNIKKDLADKFFDAIFFQRPLKSQKGSVGKCTLEKTKSRLAISHPLFEEFRMFQYLNSIKVKERNDDKFVFLSEFPEYYKIAEDKFYRKVKNFKFIDISKSINLTAKKNNLFFEFNYNDKYPIVGSPTISQFIEVFDAENWKNCKSIITSKYKKQDTKSAHDLVDELWHRLFFAGDFINDTTSHKVKSFIRDRFSIPEEKINYYEAINLKQGYSSLSKKAIGKILPFLEEKIIYPYAVFFANVDEVVGKEKWNENKQLIQDTIIDIISNYKDKTLKIDIVNGLVGDFIKEYDNSNYDYILDETDKKDVLNKIKIFYGKYLWDKMTEDEKAVLQKEIETEFQFQLQKRRVGGYYLSKQRIDEVIKDFLIQEFKITKEQSSKLYHPSAMDAYPQSQDGFLGLPFTNSIKNPMAMRTLFYLRKLVNTLLKENKITPDTEIIIELARELNDKNKRLAIERWQRERENENKKYREKLEEFAKDTNSNVTETDVIKYRLCQEQNNKCLYTNETINIENLLGSNPQFDIEHTFPRSKSFDNSLVNKTLADKKFNQIKGNQIPQDLDDKYKLNFINNTKHWQENIVDLEEKIEQQRYFSKVASTVEQKNRAIQQRHYLKLQLDYWKQKLYRFTATEIKPNFKNSQLVDTGIITKYSELFLKSLFQRVFPAKGTMVADIRKSWGLDAKDRNYHYHHAIDAVVLSCMDKSIRDGLAEAFKESEENRYNDKFKVQKPWKTFTENVNQLKDTIIVVHNHKDNIDKQTVKKLRKRNKIQYDKLGKIIYEKGQGVRASLHKDTFYGAIERENENSEKEIWFVIRKPVTNAFSDAEVSTIVDEGIKSRILKHGLKNLSRTEQGWIKLPSEKDAQGKEIKEMLIKKIRVKTRNTDLPKIKAQSHVSQGKRKEYKESYYATLENIFAMAIYEAVNDKGKKEQAFNTISAFDLAKHNQGNSNLEMPVEQNIFKNKGKKNEILLPLSKVLKVNQMAIFFEKNPKELKVLNKEELSKRLFKITVFEGDGRIRFRHHAQGGADKDLKGESSLDFEKSAQKLRISLSNIKAIYEGEDFEITPSGRIIFK

SEQ ID NO: 19604 - protein, 1536 aa, unidentified
  REGION 1..1536: note = Cas Enzyme sequence
MAKILGLDLGTNSIGWAVVDDEKQEILGIGSRIFPEGVVAKTIGTGEKEESKNAARRNSRQQRRQFYRKRLRKIKLLRILIDLNMCPLTHKELDVWAKWNKLKGKAGRMAPSSKAYEKWHKQNPYYLRNKALNEDLTLDEMGRVLYHLIQRRGFLSNRKGKDDGKIFKGKEGMVGIDQTQISIKNGTLGSFLNSIYPIEGEPFKLIIDENGNELRVRARYTLRDMYVEEFDKIWEKQAGLLNLTEKTGEKKKLRFLKGSLTSIRNKKKIEKLTDKYGKKNVSIEKIFNDDSEKFLHKITTKTLVPLKEFFGGEIDYDDQGKIKHKSEDSVLFWQRPLRSQKGLLAKCRFEPTVIKNGKYLQKGKSPCHISHPVYEEFRAYQFINNIEYGRKQKLNESQRLHVLDLINTKDSNFNFSEIPKKLKMEYEKWNYADDQKVPGNYTTKHLSGLFPKETWENHKNEIWHCFVDFEDNDNLIEKLISDFDLDEKLIDKVEKINLKEGYSNVSLKAIKNILPFLREGYQMSDATILGGVMNAFGEQINYFKDSEKQLQKEIINIIKQKSNKEGEAIEKIKFYLIENKFGFSLEDKRFQKLYHHSQDIEQKELKVKLDAIENLRNPIVQQGLNETRRLVNQLIKVHGKFDRIQVELGREIKNSKKGRQEQSDRIRENTAKNDEARKLLTEYGLKHDRNNIQKVLLYKEMQARGVVTVCPYTNISINISDVLGKENKIQIEHIMPKSISLNDSFSNKTLCDSKFNGLKDNLTPYQFYLKNNDPKLWGGAETWEDIEQRVYRLLPYPKAKRFTSKIKLEDTDVKSSFIERQLNDTRYISKKTKEIMSQVCEDVRVLPGGLTSELRHLWGLNNILQPVINLDLNIENIEEDRAYPHYVVMDENNNLISSLPIYNEKPKLEINQTTITGKVDKGVFKTLDKYVNLNINIPELVNGNYWLKLNLSEPEKMVRVFKERPESTESDIVLRGSIEREKFKNNSIGLVSTKGLDNGSYWGKLPITNKKFIVPEKDKQPKKSGKQVLLFGEVKDNYFKSYIYECETNSVDGKYWLLLDIDTDKSFFERAINEKPAFTLNQICVEGTVNNENVFVSEIDTEHQFVVPEKEGKYWVIFDIVNEPKEFNVIENPKPTLEENQSLIEGNIWVDKYTGEIKFDPKKNREDHRHHAIDALVIALSKQSYFQQLSTYNSLREAKYKGLPYEKEQMNFPEPWLNFHSSAKKEAEKILVSHKQNRNVLTQVRKRITKNGKTFVSVGDAVRGQLHMEFVYGKRQAPFETTKGYHKRKKVSEVKDNQISKIVDLEIRKIITNARHEEIKINKEIILLEKQKKKARSDKEDSVLSNQIKLLKGHIKQLYTLKNKNGEPVPIKKVRIREEMSNAQKVKEINQFVNPRNNNHIIVYKNDKGELDKSVVNFWTAVEREKQNIDLIQLPEDGIEIIETFQENDMFLLFLGQDTNVQELSDDVIFKHLYKVQKIAGADYFMEICFRRHLDGKSSSEAEYVYIKGFGSGKTGWNSFNPIKVDISETGSLNEI

SEQ ID NO: 19605 - protein, 1125 aa, unidentified
  REGION 1..1125: note = Cas Enzyme sequence
MAKILGLDLGTNSIGWAIIDDKENKILGVGSRIFPMGVENLGDGDNEMSKNASRTGARGVRRQFFRKRLRKKVLLKALSENEMCPLLENDFQDWKKTKQFPSEKLKTWFALNPYELRQKALTEELSLVEIGRIFYHLIQRRGFLSNSRKGGSDDGAIFKGNAKDGKIGITETQGKIEDKTLGSYLFEIYPKDNEPFEFGLDRIRNRYTTRKMYVDEFELIWEKQSVYHPNFTKELKTLFGGRKIDDYKEDGILFHQRPLRSQKHLVGNCSFETSKTKCPMSAIPFEQFRVWQWVNTVEYNGKKISQKEKEKIVEFLYANEKPDFKKIRKIIGKESAEFKFNYKDDDKIVGTHTISNLSNKKYFDKKWFEFSEKEKEDIWHILYFFESKSNLKEYAIKNWNFKEDQAESISKFNVKDGYANLSRKAILNILPFLKMGYTYDVAVVLGGIKNTFGLDWEKLSNEKRNFFYDNIYEIVRSKSKGGFINIIKDLLRNDYKISDNQMKKMYHHSATIDANVLLDNLPMGKEADKEIQAIRNPIVITALFELRKLVNELIAEHGAIYEIKVEMARDLKISKSQRNKIRINQKRLERENDRVKAEVLKYTNLSHDNILKFKLWEECRKTCPYTGKAIAINQLFTGEVQIEHIHPWSRSLNDSFSNKTLCYADENRNKGDKTPFEFYGSDENNWSAIKERALKLFSDTKEYPTAYQKFKRFVQEKFDDDFTSRQLNDTRYISKEAKNYLAKICNKVIVSPGQATANLRHKWGLNNILNNENEKTREDHRHHAIDALVMACTKTAYVQELSRWNRYNRKPELKDFPMPWETFRYDAEKAVDKILVSHKKVSNDITVRKHITEKNGKKHINVGVAARGQLHKETVFGKRNFNGEEAFHVRKPIDSLTTLKQVEKVVDESTRILIHKRIQALGGVVKDKIPADTFFVVDENGIKQPQIFLPNRNGEPVPILKVRMKENIGGAEKLKDKVNQWVNPRNNHHVLIYKDDKGTLQEEVVTFWTVVERKRQGFPVYQLPINGKEIVTTLHINDMFLLGLNADEIDWENLDYDFMNTHLFKVQALSQMFYEFRLNSDATQNKDTNSKVFKRIQSFGEGKTGWSKFNPIKVKISVSGKIQKL

SEQ ID NO: 19606 - protein, 1125 aa, unidentified
  REGION 1..1125: note = Cas Enzyme sequence
MAKILGLDLGTNSIGWAIIDDKENKILGVGSRIFPMGVENLGDGDNEMSKNASRTGARGVRRQFFRKRLRKKVLLKALSENKMCPLLENDFQDWKKTKQFPSEKLKTWFALNPYELRQKALTEELSLVEIGRIFYHLIQRRGFLSNSRKGGSDDGAIFKGNAKDGKIGITETQGKIEDKTLGSYLFEIYPKDNEPFEFGLDRIRNRCTTRKMYVDEFELIWEKQSVYHSNFTKELKTLFGGRKIDDYKEDGILFLQRPLRSQKHLVGNCSFETSKTKCPMSAIPFEQFRVWQWVNTVEYNGKKISQKEKEKIVEFFYANEKPDFKKIRKIIGKESAEFKFNYKDDDKIVGTHTISNLSNKKYFDKKWFEFSEKEKEDIWHTLYFFESKSNLKEYAIKNWNFKEDQAESISKFNVKDGYANLSRKAILNILPFLKMGYTYDVAVVLGGIKNTFGLDWEKLSNEKRNFFYDNIYEIVRSKSKGGFINIIKDLLRNDYKISDNQMKKMYHHSATIDANVLLDNLPMGKEADKEIQAIRNPIVITALFELRKLVNELIAEHGAIYKIKVEMARDLKISKSQRNKIRINQKRLERENDRVKAEVLKYTNLSHDNILKFKLWEECRKTCPYTGKAIAINQLFTGEIQIEHIHPWSRSLNDSFSNKTICYADENRNKGDKTPFEFYGGDENNWSAIKERALKLFSDTQEYPTAYQKFKRFVQEKFDDDFTSRQLNDTRYISKEAKNYLAKICNKVIVSPGQATANLRHKWGLNNILNNENEKTREDHRHHAIDALVMACTKTAYVQELSRWNRYNRKPELKDFPMPWETFRYDAEKAVDKILISHKKVSNDITVRKHITEKNGKKHINVGVAARGQLHKETVFGKRNFNGEEAFHVRKPIDSLTTLKQVEKVVDESTRILIHKRIQALGGVVKDKIPANTFFIVDENGTKKPQIFLPNRNGEPVPILKVRMKENIGGAEKLKDNVNQWVNPRNNHHVLIYKDDKGNLQEEVVTFWTVVERKRQGFPVYQLPINGKEIVTTLHINDMFLLGINEDEIDWKNLDYEVLKEHLFKIQTLTSGIYEFRLSADATQNKDTKSVVFRRVQSFGDGKTGWKRLNPIKVRISVSGRISKV

SEQ ID NO: 19607 - protein, 1125 aa, unidentified
  REGION 1..1125: note = Cas Enzyme sequence
MAKILGLDLGTNSIGWAIINDKENKILGVGSRIFPMGVENLGDGDNEMSKNASRTGARGVRRQFFRKRLRKKVLLKALSENEMCPLLENDFQDWKKTKQFPSEKLKTWFALNPYELRQKALTEELSLVEIGRIFYHLIQRRGFLSNSRKGGSDDGAIFKGNAKDGKIGITETQGKIEDKTLGSYLFEIYPKDNEPFEFGLDRIRNRYTTRKMYVDEFELIWEKQSVYHSNFTKELKTLFGGRKIDDYKEDGILFHQRPLRSQKHLVGNCSFETSKTKCPMSAIPFEQFRVWQWVNTVEYNGKKISQKEKEKIVEFLYANEKPDFKKIRKIIGKESAEFKFNYKDDDKIVGTHTISNLSNKKYFDKKWFEFSEKEKEDIWHILYFFESKSNLKEYAIKNWNFKEDQAESISKFNVKDGYANLSRKAILNILPFLKMGYTYDVAVVLGGIKNTFGLDWEKLSNEKRNFFYDNIYEIVRSKSKGGFINIIKDLLRNDYKISDNQMKKMYHHSATIDANVLLDNLPMGKEADKEIQAIRNPIVITALFELRKLVNELIAEHGAIYKIKVEMARDLKISKSQRNKIRINQKRLERENDRVKAEVLKYTNLSHDNILKFKLWEECRKTCPYTGKAIAINQLFTGEIQIEHIHPWSRSLNDSFSNKTICYADENRNKGDKTPFEFYGGDENNWSAIKERALKLFSDTQEYPTAYQKFKRFVQEKFDDDFTSRQLNDTRYISKEAKNYLAKICNKVIVSPGQATANLRHKWGLNNILNNENEKTREDHRHHAIDALVMACTKTAYVQELSRWNRYNRKPELKDFPMPWETFRYDAEKAVDKILISHKKVSNDITVRKHITEKNGKKHINVGVAARGQLHKETVFGKRNFNGEEAFHVRKPIDSLTTLKQVEKVVDESTRILIHKRIQALGGVVKDKIPANTFFIVDENGTKKPQIFLPNRNGEPVPILKVRMKENIGGAEKLKDNVNQWVNPRNNHHVLIYKDDKGNLQEEVVTFWTVVERKRQGFPVYQLPINGKEIVTTLHINDMFLLGINEDEIDWKNLDYEVLKEHLFKIQTLTSGIYEFRLSADATQNKDTKSVVFRRVQSFGDGKTGWKRLNPIKVRISVSGRISKV

SEQ ID NO: 19608 - protein, 1541 aa, unidentified
  REGION 1..1541: note = Cas Enzyme sequence
MAKILGLDLGTNSIGWAVVDDNANKILGMGSRIFPEGVKAETIGKGDKEESKNAARRNSRQQRRQLYRKRLRKIKLLRNLIDLEMCPLTHQELDVWAKWDKKKGKAGRKAPDSATYEEWHRLNPYVLREKSLHKDLTKFEMGRVLYHLIQRRGFLSNRKGKDDGAIYKGKPGMIGISRTQEQIGSKTLGSFLNSIYPTEGEPFQLIIDENGNELRVRARYTLRDMYVEEFEQIWNRQANVLGLDNATAMKTKVRFLKGSLDRNRNKKKIEKLREKYGAENVKIEKLKDERNKKTLFKVTTTTQEPLKIFLGGEIYHDDEGNVKHKSQDSVLFWQRPLRSQKGLLAKCRFESDIKKDGKYLQRGKSPCLLSHPLYEEFRAYQYINNIEYGKRHKLEETQRLQVLDLINSKDSNFNFSEIPKKLKMQYEKWNYGDDQKVAGNKTIKQLSALFPNEVWKNKKEEIWHSFHFFDDDDNLIEKLKNDFGLAQKDIEKIEKVDLKEGYSNVSLKAIKNILPYLQRGLQMSDATILGGVRNAFGKRWHYFKDAQEQLENDILKINHQKNNKEGEALEKIKNYLADPDNKFGFSKNDKSFIKLYHHSQEIEEKQLKDKLDAVENLRNPIVQQGINETRRLVNQLIDEYGKFDRIKVELGREVKNSKKGRQEQSRRIYDNTAKNDDARRLLTEYGLKHNRDNIQKVLLYKEMQEKGVTTICPYTNKSINISDVLGRENKIQIEHIIPKSVSLDDSFANKTLCDAKFNGLKGNLTPYQFYLKNSDSKLWGGATSWEDIEQRAFKVLPYPKAKRFTSKIKVEDADVKSSFIERQLNDMRYISRKTKEIMSQVCDDVRVLPGGLTSELRHLWGLNSILQPAMNLNIDIKNIQEDRVYPHYVVLDEDNKPVLTVPIYNDKPKLGVNETTITGKVDKGVFKTTEKTEKYVKLSAETPELANGDYWLNLKLSEPKEIVRIFKERPEATADGLVLRGEINKEKFKNDGIGLITSKGLDNGKYWAKFTIIGKKFIAPEKDKQPKKIGKQVLLFGEVKEGLFKSYIYACETNEIDGKYWLLLDVDTDNVFFDKAINERPQVTESKIIIEGSVNEEGVFVSEMDADHQFKTKEKPGKYWVVFDILNEFTEFNAIEQPKPLLQEKQILLEGVFWVNKDTGEIEFDPKKNRDDHRHHAIDALVIALSKQSYFQQLSAYNAARDAKKKLNPFEKEQLKFPHPWNSFRIDAQKEAEKILVSHKQNRKVLTEVRKKITKNGKTFTSVGNAVRGQLHMENVYGQRQAPFETTKGYHIRKKVADLKDNQLDKIVDLEIKKIIKNARKEEAILKKHIDTLEKQKKKVRTDEEEAQLNLQMQELKKQIELLYTLKNKNGEPVPIKKVRIREKMTNAQQLKESNQFVNPRNNHHVLIYKKENGELDKNVVSFWTTVERMKQNSKVVQLPSDGVEIIETFQENDMFLLFLEKDTNIEQLSQKELFNHLYKVQKIAGAVYFMEICFRSHIDSKISTEADYVYIKGFGDGKTGWNRFNPIKVKITPTGKIKKV

SEQ ID NO: 19609 - protein, 1559 aa, unidentified
  REGION 1..1559: note = Cas Enzyme sequence
LYIETFIIRESIYSKKIIMAKILGLDLGTNSIGWAVVDDNANKILGMGSRIFPEGVKAETIGKGDKEESKNAARRNSRQQRRQLYRKRLRKIKLLRNLIDLEMCPLTHQELDVWAKWDKKKGKAGRKAPDSATYEEWHRLNPYVLREKSLHKDLTKFEMGRVLYHLIQRRGFLSNRKGKDDGAIYKGKPGMIGISRTQEQIGSKTLGSFLNSIYPTEGEPFQLITDENGNELRVRARYTLRDMYVEEFEQIWNRQANLLGLDNATAMKTKVRFLKGSLDRNRNKKKIEKLREKYGAENVKIEKLKDERNKKTLFKVTTTTQEPLKIFLGGEIYHDDEGNVKHKSQDSVLFWQRPLRSQKGLLAKCRFESDIKKDGKYLQRGKSPCLLSHPLYEEFRAYQYINNIEYGKRHKLEETQRLQVLDLINSKDSNFNFSEIPKKLKMQYEKWNYGDDQKVAGNKTIKQLSALFPNEVWKNKKEEIWHSFHFFDDDDNLIEKLKNDFGLAQKDIEKIEKVDLKEGYSNVSLKAIKNILPYLQRGLQMSDATILGGVRNAFGKRWHYFKDAQEQLENDILKINHQKNNKEGEALEKIKNYLADPDNKFGFSKNDKSFIKLYHHSQEIEEKQLKDKLDAVENLRNPIVQQGINETRRLVNQLIDEYGKFDRIKVELGREVKNSKKGRQEQSRRIYDNTAKNDDARRLLTEYGLKHNRDNIQKVLLYKEMQEKGVTTICPYTNKSINISDVLGRENKIQIEHIIPKSVSLDDSFANKTLCDAKFNGLKGNLTPYQFYLKNSDSKLWGGATSWEDIEQRAFKVLPYPKAKRFTSKIKVEDADVKSSFIERQLNDMRYISRKTKEIMSQVCDDVRVLPGGLTSELRHLWGLNSILQPAMNLNIDIKNIQEDRVYPHYVVLDEDNKPVLTVPIYNDKPKLGVNETTITGKVDKGVFKTTEKTEKYVKLSAETPELANGDYWLNLKLSEPKEIVRIFKERPEATADGLVLRGEINKEKFKNDGIGLITSKGLDNGKYWAKFTIIGKKFIAPEKDKQPKKIGKQVLLFGEVKEGLFKSYIYACETNEIDGKYWLLLDVDTDNVFFDKAINERPQVTESKIIIEGSVNEEGVFVSEMDADHQFKTKEKPGKYWVVFDILNEFTEFNAIEQPKPLLQEKQILLEGVFWVNKDTGEIEFDPKKNRDDHRHHAIDALVIALSKQSYFQQLSAYNAARDAKKKLNPFEKEQLKFPHPWNSFRIDAQKEAEKILVSHKQNRKVLTEVRKKITKNGKTFTSVGNAVRGQLHMENVYGQRQAPFETTKGYHIRKKVADLKDNQLDKIVDLEIKKIIKNARKEEAILKKHIDTLEKQKKKVRTDEEEAQLNLQMQELKKQIELLYTLKNKNGEPVPIKKVRIREKMTNAQQLKESNQFVNPRNNHHVLIYKKENGELDKNVVSFWTTVERMKQNSKVVQLPSDGVEIIETFQENDMFLLFLEKDTNIEQLSQKELFNHLYKVQKIAGAVYFMEICFRSHIDSKISTEADYVYIKGFGDGKTGWNRFNPIKVKITPTGKIKKV

SEQ ID NO: 19610 - protein, 1559 aa, unidentified
  REGION 1..1559: note = Cas Enzyme sequence
LYIETFIIRESIYSKKIIMAKILGLDLGTNSIGWAVVDDNANKILGMGSRIFPEGVKAETIGKGDKEESKNAARRNSRQQRRQLYRKRLRKIKLLRNLIDLEMCPLTHQELDVWAKWDKKKGKAGRKAPDSATYEEWHRLNPYVLREKSLHKDLTKFEMGRVLYHLIQRRGFLSNRKGKDDGAIYKGKPGMIGISRTQEQIGSKTLGSFLNSIYPTEGEPFQLIIDENGNELRVRARYTLRDMYVEEFEQIWNRQANVLGLDNATAMKTKVRFLKGSLDRNRNKKKIEKLREKYGAENVKIEKLKDERNKKTLFKVTTTTQEPLKIFLGGEIYHDDEGNVKHKSQDSVLFWQRPLRSQKGLLAKCRFESDIKKDGKYLQRGKSPCLLSHPLYEEFRAYQYINNIEYGKRHKLEETQRLQVLDLINSKDSNFNFSEIPKKLKMQYEKWNYGDDQKVAGNKTIKQLSALFPNEVWKNKKEEIWHSFHFFDDDDNLIEKLKNDFGLAQKDIEKIEKVDLKEGYSNVSLKAIKNILPYLQRGLQMSDATILGGVRNAFGKRWHYFKDAQEQLENDILKINHQKNNKEGEALEKIKNYLADPDNKFGFSKNDKSFIKLYHHSQEIEEKQLKDKLDAVENLRNPIVQQGINETRRLVNQLIDEYGKFDRIKVELGREVKNSKKGRQEQSRRIYDNTAKNDDARRLLTEYGLKHNRDNIQKVLLYKEMQEKGVTTICPYTNKSINISDVLGRENKIQIEHIIPKSVSLDDSFANKTLCDAKFNGLKGNLTPYQFYLKNSDSKLWGGATSWEDIEQRAFKVLPYPKAKRFTSKIKVEDADVKSSFIERQLNDMRYISRKTKEIMSQVCDDVRVLPGGLTSELRHLWGLNSILQPAMNLNIDIKNIQEDRVYPHYVVLDEDNKPVLTVPIYNDKPKLGVNETTITGKVDKGVFKTTEKTEKYVKLSAETPELANGDYWLNLKLSEPKEIVRIFKERPEATADGLVLRGEINKEKFKNDGIGLITSKGLDNGKYWAKFTIIGKKFIAPEKDKQPKKIGKQVLLFGEVKEGLFKSYIYACETNEIDGKYWLLLDVDTDNVFFDKAINERPQVTESKIIIEGSVNEEGVFVSEMDADHQFKTKEKPGKYWVVFDILNEFTEFNAIEQPKPLLQEKQILLEGVFWVNKDTGEIEFDPKKNRDDHRHHAIDALVIALSKQSYFQQLSAYNAARDAKKKLNPFEKEQLKFPHPWNSFRIDAQKEAEKILVSHKQNRKVLTEVRKKITKNGKTFTSVGNAVRGQLHMENVYGQRQAPFETTKGYHIRKKVADLKDNQLDKIVDLEIKKIIKNARKEEAILKKHIDTLEKQKKKVRTDEEEAQLNLQMQELKKQIELLYTLKNKNGEPVPIKKVRIREKMTNAQQLKESNQFVNPRNNHHVLIYKKENGELDKNVVSFWTTVERMKQNSKVVQLPSDGVEIIETFQENDMFLLFLEKDTNIEQLSQKELFNHLYKVQKIAGAVYFMEICFRSHIDSKISTEADYVYIKGFGDGKTGWNRFNPIKVKITPTGKIKKV

SEQ ID NO: 19611 - protein, 1135 aa, unidentified
  REGION 1..1135: note = Cas Enzyme sequence
MSKILGLDLGTNSIGWALLENNSILGMGSRIFPEGVVNLGEGEGRESSKNASRTEARGTRKQFFRRRLRKRYLLKELAKNNLCPISSNLIKDWNGIEIFKNEELQDWFKLNPYNLRAKAIKEEISLYELGRIFYHLIQRRGFLSNSRSAGAEVKESSAIFKGDAKIGKIGISKTQESIEQSKTLGSYLKTIQPVENEPYSGELERIRNRYTTRQMYIDEFETIWEFQKKYHSELTEHLKSLFGGRKKDGYKEDGVLFHQRPLRSQKHLVGYCSFEPKKTKCPISAIPFELFRIYQWLNTLSYDVNGKKQEITLEEREKIVALLLSKEKPSFKEIRKAIDKVDGIYKFNYEDKDKIVGSYTISKLSSNKFFGEKWFDFSEKQQEDIWHVLTFFDDSDKLKEYAIKNWGFDAKKAVDISKFNLKDGYANLSRKAINIILPFLKQGFMYDVAVGLAGAKNALGNNWEQHQQFVLDNVPYIVRSNLKGGYIDPLKNMMKVEFNCSEKQLKKLYHHSSAIEITKVLGKLPVNKEADNEIQKIKNPVVITALFEIRKLVNEIIDVYGKPDEIKVELARDLKSSKKNRYETRRKQQFLEKENERVKKELEKLGQRINHTNILKYKLWEECNRTCPFTGRVITISQLFTGEIQIEHIFPYSRSLNDSFNNKTLCFVNENIAKGNKTPYEFYSQQGEEKWEAIKLQVLSCFNDKYPNYPNAYRKFQHFVKQKHDEDFISRQLNDTRYISKEAKNYLSKICTNVMVAPGQMTATLRHYWGLNTILNKEDDAKTREDHRHHAIDALVMACATRSHLQELSKRNRYNKNHELKDFPDPWFNFRIDAENAVEQILVSHKKKKNLLTVRTHKTKKNGVEHKNVGVAARGQLHKESVYGKREAPNSNTAFHIRKPLESLTTERHLEKIVDVTIKFLILKKINELGGFVKGKIPNETFFKVDENGVKQPQIFLPNKNGNKVPIKKIRIKENIGGAEQLKETINQHVNPRSNHHLVVYLNKENKYKSRVVTFWEAVERKRNEMNVIQIPLECKLLMSIQKNDMFLLGNHMDEINWNNNSLLKNTLYKVQKISKKPDLSMKEVCFRKAIDSRSDKEAQKDYIYIKGFGTGKTGWQAFNPIKVKISVTGKIEKL

SEQ ID NO: 19612 - protein, 1368 aa, unidentified
  REGION 1..1368: note = Cas Enzyme sequence
GMVGITETQEQIGGKTLGSFLNSILPKEGEPFKLITDEKGNELRARARYTLRDMYVEEFEQIWNRQSKVLDLDNKKALKTKTQFLKGSLNNNRNKKKIEKLKELYGAENVKIEELKGEATNKTLYKVTTSKNVSLKIFLGGHIHHDEDGNVKHRSQDSVLFWQRPLRSQKGLLAKCRFEPDFKNKDGKYLQKGKTPCHLSHPLYEEFRAYQYINNIEYGKKQKLEETQRLQVLELINSKDSNFNFSEIPKKLKMEYEKWNYGDDQKVAGNKTIKQLSALFPNEVWENNKEEIWHSFHFFDDNDNLIEKLKNDFGLEENDVEKVEKIDLKEGYSNVSLKAIKNILPYLKRGLQMSDATILGGVRNAFGNRWDYFTEAHEQLENDILKINHNKINKEGEAIEKIKNYLADSENKFGFSTNDKSFIKLYHHSQEIEEKELKDKLDAVENLRNPIVQQGINETRRLVNQLIEEYGKFDRIQVELGREVKNSKKGRQEQSRKIYDNTAKNDEARKLLTEYGLKHDRENIQKVLLYKEMQEKGVTTICPYSNKSINISDVLGKENKIQIEHIIPKSVSLDDSFANKTLCDAKFNGLKGNLTPYQFYLKNSDSKLWGGATSWEDIEQRAYKVLPYAKAKRFTSKIKVEDADVKSSFIERQLNDMRYISRKTKEIMSQICEDVRVLPGGLTAELRHLWGLNSILQPVMLVDLPTYKLEEGKVIPHYVVMDENNKPVLTLPIYNDKPKLGSNETTITGKVEKGIFKTTEQYVKLITETPELVNGEYWLNLKLSEPKKIIRIFKERPTTTEDEIVLRGKVEKEKFKNDGIGLVSAKGLDNGTYWAKFTIINKKFEAPEKDKQPKKTGKQVLLFGEVKEGFFKSYIYSCETNELDGKYWLLLDIDTENASFERAINERPIVSDTKIIIEGSINDEGLFVSEIDAQHQFKTTEKPGKYWFVFDILNELTDFNAIEQPKPLLQEKQTLVEGTIWVDKYTGEIKFDPKKNRDDHRHHAIDALVIALSKQSYFQQLSAYNAARDAKKKGLTFEKEQLDFPDPWTGFHTDAKKEAEKILIAHKQNRKVLTEVRKKITKNGKTFTSVGNAVRGQLHKENVYGQRQAPFETTKGYHMRKKVVDLKDNQLDKIVDLEIRKIIINARKEEVTIKKQIDALDKQKKKVHSDEEENALNIQIIELKKQIELLYTLKNKNGERVPIKKVRIREEMSNAQQVKVINQFVNPRNNHHLLVYVNDKGELDKNIVSFWTAVKRLKKGDDLIQLPKDGLEIVETFQENDMFILFLEKDRNIEDLSQKEMFNHLFKVQKIAGADYFMEICFRRHTDSKISTEADYVYIKGFGDGKTGWYSFNPIKVQITPTGKIEKG

SEQ ID NO: 19613 - protein, 1565 aa, unidentified
  REGION 1..1565: note = Cas Enzyme sequence
MTKILGLDLGTNSIGWAVVDYERDYLKIANNRNVNEKFELRDKGVYIFKEGVDKDSYGNPQSRAASRTDKRSARRLKFRRKLRKYETLKALIKHKMCPLEMEDLEKWRQFKNPITGKLETFKHYPTNSDFIEWLQTDNQGEKNNAEDKKLRKSKTKNPYFFRNKAANEKINNLHQLGRAFYHIAQRRGFLSGRLDKSDIVFIEKVKAELYECIADTDNFTDLFFEINNFFNPRTSEDSNDENKELLKLQKKIENDFKKLKNDFKECKNYIVELLTKQPKLGPVKQQISDLTEEIEKNNLKTIGQLFYNWHLEDKKIRKNYLGREEHYEAEFKEICKVQGIPENSEIYKEIYNGIFYQRKLKSQKGLVGKCTLEPKYPRCPVSHPEFEMFRALKFINNVKRKEGEEWRLLNDEEKKKIWHKFFRKKDQFDFKEIAKIINPNYPQTHKLEDDPDPKKEYFNYKGNATVTGCYTSGCLMEILGKDWKEKESWESRNWQDILENPIWKTNLFNRCKKKEIRDRKTNEVKGEKKIDTIVNDVWHVLFTYDKKSKQKEFAINYFGADDNESEAFSKIQLKQEYASFSIKALRNINQFLREGLIETYAVFLAKIPELIPDIWNNPEDQKLIRDEINYRINNFRETKRKQTIVNDLYKNFRDEFGRKDKTYLLDDKDKENTINKIISFYGKKTLSEKSNDEQEEIKEFVITNFKNCIHKNTFIKIKRVDKVIQDFFIEHPALGIDEEKANKLYHPSDIEKFKEPITKKDKDDNLIKDRNGNILEFLNSPISGSIKNPTVFRAMFQLRKVLDELIRTEKIDRETRVHIEVAGNLNDMNYRKAIEDWQAEREKENQHYKEIIIGLFKAEKNIDITDPEDDDIKKIKSWYDQYLLENDKNLFDLLPKDEKDPVKKYRLWREQEGRCVYTGKQIPLHKLFDGISFDIEHTIPRSKSNDNSLENLTICDATFNRQNKIGRIPFELGEEKHKEILGYIAHWQKKYKDLEKQIKKLAKQAAANKDNKEKHDKIVRDKHKLTFEKNYWSAKYSRFTMEEVPDGFTNRNLNDTRIISRYAQQWLKSYFDTVHSINGNITSDFRKIWGLQKEYDSKQRTNHIHHCIDAITIACITKDKYDQLSHAYQLEETGAKEVATKLKTESKPWKTFVPDLKKLNDEVIITHQFLDNLPKQTKKYLRVRGKKQYVVEYKKDLNGKYLLDVKGKRIIEKDDEDKIIYNLKDGKRIPKIQKGDTVRGQLHQETFYGAIKVAQRENNKILKDEQGEIIFEKDKEGNEIFYVIRKELEKLKKEDVEKIVDEEIKKKIKSIIGTQITFKKTGATIKHPIWQNEEKQIPIKKVRLFTNVKNPLLDFKKHRDPSKSSHKHKEQIYVTNAENYCLAIYEGENENRKVERISKLVNNIDAGKKFKLSNRNDENFPPLSDEKTGYINIATLKKGQMMLRNIMNESMEDILDLSLEEQLNRLFIIEGIDKDGIKVRYHNEARQGTELVKFMKEVISQQNIAENKLDKNGKVKESKITGPVGGVKVGEHKNFPYQKFKPGNFNAFISGVDFKITPTGKIEII

SEQ ID NO: 19614 - protein, 1033 aa, unidentified
  REGION 1..1033: note = Cas Enzyme sequence
IVNDVWHVLFTYDKKSKQKEFAINYFGADDNESEAFSKIQLKQEYASFSIKALRNINQFLREGLIETYAVFLAKIPELIPDIWNNPEDQKLIRDEINYRINNFRETKRKQTIVNDLYKNFRDEFGRKDKTYLLDDKDKENTINKIISFYGKKTFSEKSNDEQEEIKEFVITNFKNCIHKNTFIKIKRVDKVIQDFFIEHPALGIDEEKANKLYHPSDIEKFKEPITKKDKDDNLIKDRNGNILEFLNSPISGSIKNPTVFRAMFQLRKVLDELIRTEKIDRETRVHIEVAGNLNDMNYRKAIEDWQAEREKENQHYKEIIIGLFKAEKNIDITDPEDDDIKKIKSWYDQYLLENDKNLFDLLPKDEKDPVKKYRLWREQEGRCVYTGKQIPLHKLFDGISFDIEHTIPRSKSNDNSLENLTICDATFNRQNKIGRIPFELGEEKHKEILGYIAHWQKKYKDLEKQIKKLAKQAAANKDNKEKHDKIVRDKHKLTFEKNYWSAKYSRFTMEEVPDGFTNRNLNDTRIISRYAQQWLKSYFDTVHSINGNITSDFRKIWGLQKEYDSKQRTNHIHHCIDAITIACITKDKYDQLSHAYQLEETGAKEVATKLKTESKPWKTFVPDLKKLNDEVIITHQFLDNLPKQTKKYLRVRGKKQYVVEYKKDLNGKYLLDVKGKRIIEKDDEDKIIYNLKDGKRIPKIQKGDTVRGQLHQETFYGAIKVAQRENNKILKDEQGEIIFEKDKEGNEIFYVIRKELEKLKKEDVEKIVDEEIKKKIKSIIGTQITFKKTGATIKHPIWQNEEKQVPIKKVRLFTNVKNPLLDFKKHRDPSKSSHKHKEQIYVTNAENYCLAIYEGENENRKVERISKLVNNIDAGKKFKLSNRNDENFPPLSDEKTGYINIATLKKGQMMLRNIMNESMEDILDLSLEEQLNRLFIIEGIDKDGIKVRYHNEARQGTELVKFMKEVISQQNIAENKLDKNGKVKESKITGPVGGVKVGEHKNFPYQKFKPGNFNAFISGVDFKITPTGKIEII

SEQ ID NO: 19615 - protein, 1330 aa, unidentified
  REGION 1..1330: note = Cas Enzyme sequence
EDSNDENKELLKLQKKIENDFKKLKNDFKECKNYIVELLTKQPKLGPVKQQISDLTEEIEKNNLKTIGQLFYNWHLEDKKIRKNYLGREEHYEAEFKEICKVQGIPENSEIYKEIYNGIFYQRKLKSQKGLVGKCTLEPKYPRCPVSHPEFEMFRALKFINNVKRKEGEEWRLLNDEEKKKIWHKFFRKKDQFDFKEIAKIINPNYPQTHKLEDDPDPKKEYFNYKGNATVTGCYTSGCLMEILGKDWKEKESWESRNWQDILENPIWKTNLFNRCKKKEIRDRKTNEVKGEKKIDTIVNDVWHVLFTYDKKSKQKEFAINYFGADDNESEAFSKIQLKQEYASFSIKALRNINQFLREGLIETYAVFLAKIPELIPDIWNNPEDQKLIRDEINYRINNFRETKRKQTIVNDLYKNFRDEFGRKDKTYLLDDKDKENTINKIISFYGKKTLSEKSNDEQEEIKEFVITNFKNCIHKNTFIKIKRVDKVIQDFFIEHPALGIDEEKANKLYHPSDIEKFKEPITKKDKDDNLIKDRNGNILEFLNSPISGSIKNPTVFRAMFQLRKVLDELIRTEKIDRETRVHIEVAGNLNDMNYRKAIEDWQAEREKENQHYKEIIIGLFKAEKNIDITDPEDDDIKKIKSWYDQYLLENDKNLFDLLPKDEKDPVKKYRLWREQEGRCVYTGKQIPLHKLFDGISFDIEHTIPRSKSNDNSLENLTICDATFNRQNKIGRIPFELGEEKHKEILGYIAHWQKKYKDLEKQIKKLAKQAAANKDNKEKHDKIVRDKHKLTFEKNYWSAKYSRFTMEEVPDGFTNRNLNDTRIISRYAQQWLKSYFDTVHSINGNITSDFRKIWGLQKEYDSKQRTNHIHHCIDAITIACITKDKYDQLSHAYQLEETGAKEVATKLKTESKPWKTFVPDLKKLNDEVIITHQFLDNLPKQTKKYLRVRGKKQYVVEYKKDLNGKYLLDVKGKRIIEKDDEDKIIYNLKDGKRIPKIQKGDTVRGQLHQETFYGAIKVAQRENNKILKDEQGEIIFEKDKEGNEIFYVIRKELEKLKKEDVEKIVDEEIKKKIKSIIGTQITFKKTGATIKHPIWQNEEKQIPIKKVRLFTNVKNPLLDFKKHRDPSKSSHKHKEQIYVTNAENYCLAIYEGENENRKVERISKLVNNIDAGKKFKLSNRNDENFPPLSDEKTGYINIATLKKGQMMLRNIMNESMEDILDLSLEEQLNRLFIIEGIDKDGIKVRYHNEARQGTELVKFMKEVISQQNIAENKLDKNGKVKESKITGPVGGVKVGEHKNFPYQKFKPGNFNAFISGVDFKITPTGKIEII

SEQ ID NO: 19616 - protein, 1330 aa, unidentified
  REGION 1..1330: note = Cas Enzyme sequence
EDSNDENKELLKLQKKIENDFKKLKNDFKECKNYIVELLTKQPKLGPVKQQISDLTEEIEKNNLKTIGQLFYNWHLEDKKIRKNYLGREEHYEAEFKEICKVQGIPENSEIYKEIYNGIFYQRKLKSQKGLVGKCTLEPKYPRCPVSHPEFEMFRALKFINNVKRKEGEEWRLLNDEEKKKIWHKFFRKKDQFDFKEIAKIINPNYPQTHKLEDDPDPKKEYFNYKGNATVTGCYTSGCLMEILGKDWKEKESWESRNWQDILENPIWKTNLFNRCKKKEIRDRKTNEVKGEKKIDTIVNDVWHVLFTYDKKSKQKEFAINYFGADDNESEAFSKIQLKQEYASFSIKALRNINQFLREGLIETYAVFLAKIPELIPDIWNNPEDQKLIRDEINYRINNFRETKRKQTIVNDLYKNFRDEFGRKDKTYLLDDKDKENTINKIISFYGKKTLSEKSNDEQEEIKEFVITNFKNCIHKNTFIKIKRVDKVIQDFFIEHPALGIDEEKANKLYHPSDIEKFKEPITKKDKDDNLIKDRNGNILEFLNSPISGSIKNPTVFRAMFQLRKVLDELIRTEKIDRETRVHIEVAGNLNDMNYRKAIEDWQAEREKENQHYKEIIIGLFKAEKNIDITDPEDDDIKKIKSWYDQYLLENDKNLFDLLPKDEKDPVKKYRLWREQEGRCVYTGKQIPLHKLFDGISFDIEHTIPRSKSNDNSLENLTICDATFNRQNKIGRIPFELGEEKHKEILGYIAHWQKKYKDLEKQIKKLAKQAAANKDNKEKHDKIVRDKHKLTFEKNYWSAKYSRFTMEEVPDGFTNRNLNDTRIISRYAQQWLKSYFDTVHSINGNITSDFRKIWGLQKEYDSKQRTNHIHHCIDAITIACITKDKYDQLSHAYQLEETGAKEVATKLKTESKPWKTFVPDLKKLNDEVIITHQFLDNLPKQTKKYLRVRGKKQYVVEYKKDLNGKYLLDVKGKRIIEKDDEDKIIYNLKDGKRIPKIQKGDTVRGQLHQETFYGAIKVAQRENNKILKDEQGEIIFEKDKEGNEIFYVIRKELEKLKKEDVEKIVDEEIKKKIKSIIGTQITFKKTGATIKHPIWQNEEKQVPIKKVRLFTNVKNPLLDFKKHRDPSKSSHKHKEQIYVTNAENYCLAIYEGENENRKVERISKLVNNIDAGKKFKLSNRNDENFPPLSDEKTGYINIATLKKGQMMLRNIMNESMEDILDLSLEEQLNRLFIIEGIDKDGIKVRYHNEARQGTELVKFMKEVISQQNIAENKLDKNGKVKESKITGPVGGVKVGEHKNFPYQKFKPGNFNAFISGVDFKITPTGKIEII

SEQ ID NO: 19617 - protein, 925 aa, unidentified
  REGION 1..925: note = Cas Enzyme sequence
KQTIVNDLYKNFRDEFGRKDKTYLLDDKDKENTINKIISFYGKKTLSEKSNDEQEEIKEFVITNFKNCIHKNTFIKIKRVDKVIQDFFIEHPALGIDEEKANKLYHPSDIEKFKEPITKKDKDDNLIKDRNGNILEFLNSPISGSIKNPTVFRAMFQLRKVLDELIRTEKIDRETRVHIEVAGNLNDMNYRKAIEDWQAEREKENQHYKEIIIGLFKAEKNIDITDPEDDDIKKIKSWYDQYLLENDKNLFDLLPKDEKDPVKKYRLWREQEGRCVYTGKQIPLHKLFDGISFDIEHTIPRSKSNDNSLENLTICDATFNRQNKIGRIPFELGEEKHKEILGYIAHWQKKYKDLEKQIKKLAKQAAANKDNKEKHDKIVRDKHKLTFEKNYWSAKYSRFTMEEVPDGFTNRNLNDTRIISRYAQQWLKSYFDTVHSINGNITSDFRKIWGLQKEYDSKQRTNHIHHCIDAITIACITKDKYDQLSHAYQLEETGAKEVATKLKTESKPWKTFVPDLKKLNDEVIITHQFLDNLPKQTKKYLRVRGKKQYVVEYKKDLNGKYLLDVKGKRIIEKDDEDKIIYNLKDGKRIPKIQKGDTVRGQLHQETFYGAIKVAQRENNKILKDEQGEIIFEKDKEGNEIFYVIRKELEKLKKEDVEKIVDEEIKKKIKSIIGTQITFKKTGATIKHPIWQNEEKQVPIKKVRLFTNVKNPLLDFKKHRDPSKSSHKHKEQIYVTNAENYCLAIYEGENENRKVERISKLVNNIDAGKKFKLSNRNDENFPPLSDEKTGYINIATLKKGQMMLRNIMNESMEDILDLSLEEQLNRLFIIEGIDKDGIKVRYHNEARQGTELVKFMKEVISQQNIAENKLDKNGKVKESKITGPVGGVKVGEHKNFPYQKFKPGNFNAFISGVDFKITPTGKIEII

SEQ ID NO: 19618 - protein, 1565 aa, unidentified
  REGION 1..1565: note = Cas Enzyme sequence
MTKILGLDLGTNSIGWAVVDYERDYLKIANNRNVNEKFELRDKGVYIFKEGVDKDSYGNPQSRAASRTDKRSARRLKFRRKLRKYETLKALIKHKMCPLEMEDLEKWRQFKNPITGKLETFKHYPTNSDFIEWLQTDNQGEKNNAEDKKLRKSKTKNPYFFRNKAANEKINNLHQLGRAFYHIAQRRGFLSGRLDKSDIVFIEKVKAELYECIADTDNFTDLFFEINNFFNPRTSEDSNDENKELLKLQKKIENDFKKLKNDFKECKNYIVELLTKQPKLGPVKQQISDLTEEIEKNNLKTIGQLFYNWHLEDKKIRKNYLGREEHYEAEFKEICKVQGIPENSEIYKEIYNGIFYQRKLKSQKGLVGKCTLEPKYPRCPVSHPEFEMFRALKFINNVKRKEGEEWRLLNDEEKKKIWHKFFRKKDQFDFKEIAKIINPNYPQTHKLEDDPDPKKEYFNYKGNATVTGCYTSGCLMEILGKDWKEKESWESRNWQDILENPIWKTNLFNRCKKKEIRDRKTNEVKGEKKIDTIVNDVWHVLFTYDKKSKQKEFAINYFGADDNESEAFSKIQLKQEYASFSIKALRNINQFLREGLIETYAVFLAKIPELIPDIWNNPEDQKLIRDEINYRINNFRETKRKQTIVNDLYKNFRDEFGRKDKTYLLDDKDKENTINKIISFYGKKTLSEKSNDEQEEIKEFVITNFKNCIHKNTFIKIKRVDKVIQDFFIEHPALGIDEEKANKLYHPSDIEKFKEQITKKDKDDNLIKDRNGNILEFLNSPISGSIKNPTVFRAMFQLRKVLDELIRTEKIDRETRVHIEVAGNLNDMNYRKAIEDWQAEREKENQHYKEIIIGLFKAEKNIDITDPEDDDIKKIKSWYDQYLLENDKNLFDLLPKDEKDPVKKYRLWREQEGRCVYTGKQIPLHKLFDGISFDIEHTIPRSKSNDNSLENLTICDATFNRQNKIGRIPFELGEEKHKEILGYIAHWQKKYKDLEKQIKKLAKQAAANKDNKEKHDKIVRDKHKLTFEKNYWSAKYSRFTMEEVPDGFTNRNLNDTRIISRYAQQWLKSYFDTVHSINGNITSDFRKIWGLQKEYDSKQRTNHIHHCIDAITIACITKDKYDQLSHAYQLEETGAKEVATKLKTESKPWKTFVPDLKKLNDEVIITHQFLDNLPKQTKKYLRVRGKKQYVVEYKKDLNGKYLLDVKGKRIIEKDDEDKIIYNLKDGKRIPKIQKGDTVRGQLHQETFYGAIKVAQRENNKILKDEQGEIIFEKDKEGNEIFYVIRKELEKLKKEDVEKIVDEEIKKKIKSIIGTQITFKKTGATIKHPIWQNEEKQIPIKKVRLFTNVKNPLLDFKKHRDPSKSSHKHKEQIYVTNAENYCLAIYEGENENRKVERISKLVNNIDAGKKFKLSNRNDENFPPLSDEKTGYINIATLKKGQMMLRNIMNESMEDILDLSLEEQLNRLFIIEGIDKDGIKVRYHNEARQGTELVKFMKEVISQQNIAENKLDKNGKVKESKITGPVGGVKVGEHKNFPYQKFKPGNFNAFISGVDFKITPTGKIEII

SEQ ID NO: 19619 - protein, 1127 aa, unidentified
  REGION 1..1127: note = Cas Enzyme sequence
MSKILGLDLGTNSIGWAIVDDKQHKITGIGSGIFPMGVENLGDGDGELSKNASRTGARGVRRQFFRKRLRKKILLKALSQNNMCPLNEDDFNDWKKTKQFPSEILTNWFAVNPYELRHKALSEKLSLEEIGRLFYHLIQRRGFLSNSRKGGSDDGAIFKGNAKEGKIGIDETVQSIQDKTLGSYLFEIYPKENQPFENGLERIRNRYTTRKMYVDEFEMIWEKQKQFHTVLNEDLKQLFGGRKQDGYKEDGILFHQRPLRSQKHLVGNCTFEPTKTKCPISAIPFEQFRVYQWVNTVECNGRKITEKERNIMADFLFANEKPDFKKLRKAIGKESAEFKFNYKDDDKIVGTHTISNLSNKKYFGKKWFDFSEKEQEDIWHVLYFFDSKSNLKDYAIKNWGFTEEQAIAISKFNVKDGYASLSRKAINNILPFLKMGFTYDVAVVLGGIKNVFGSNWAKLTDEKRNFLTDNIEDIVRSKISGGFIETVKEVLKNEFDLKDNELKKLYHHSASIEATTILKKLPIGAEADKEIQSIRNPIVITALFELRKLVNELIEEHGVIDEIKVEIARDLKISKSQRNQIRRNQKRLERENDRIKDRLQEYDLRITHDNILKMKLWEECKETCPYTGKNIGVKDLFEYGKVQIEHIHPWSRSLNDSFGNKTLCWADENRLKGDKTPFEFYGNDDANWSAIKERTLKLFSDTKEYPNSYQKFKRFVQQKFDDDFSSRQLNDTRYISKEAKNYLGQICKKVSVSPGQMTSNLRHKWGLNSILNDDNQKSREDHRHHAIDALVMACGKVSYLQELSKWNRYNRNYELKDFPMPWNTFRLDAEKAIEQVLVSHKHLNNVLTVRTHKTEKDGKVYKNIGVAARGQLHKETVFGKRTAPFSEEAFHVRKPIDSLTTQKQIEKVVDETTKNLILKKINEIGGFIKDKIPANTFFVVDENGVKQPKIFLPNKNGNPVPILKVRLKENIGGAEKLKENVNQWVNPRKNHHVLIYKDSNENLKEDVVTFWTVVERKRKGYPIYQLPSDGKEIVTTLHINDMFLLGLNEDEIDWENPNYEVLKESLFRIQKLSSKFYEFRLNTESSIQNNFPPFYNRIQGFGDGKTGWNTFTPIKVKISVSGKIEKL

SEQ ID NO: 19620 - protein, 1565 aa, unidentified; identical to SEQ ID NO: 19613
  REGION 1..1565: note = Cas Enzyme sequence

SEQ ID NO: 19621 - protein, 1466 aa, unidentified
  REGION 1..1466: note = Cas Enzyme sequence
MTKILGLDLGTNSIGWAVVEKDGTDFSLVDKGVRIFSEGVKSEKGVESSRAAERTGFRSARKIKFRRKLRKYETLKVLALNNMCPLGVDEVVAWRKSGFKEYPLNDEFLKWLKTDDDQNINPYLFRDKASKGKANLFELGRAFYHMAQRRGFLSNRLDQSAEGILEEHCPKIEDAIEECLTIVELKTEIQDYFEGLDILDKNAKDLDEGEKKLKSLFNSLDKIIKANTKDFEKAKNEIVERLNKKENLGAVKQKISEISQAMADGNFKTLGQYFYSLYNKEVELENSTTKEKEKFNRSKIRNQYTAREEHYLAEFEIICKAQGIEGINDAELLPEKKYSGLAKELYKAIFFQRPLKSQKGLIGKCSFEKSKSRCAVSHPDYEEYRMWEYINTIKIKTPEDEILRFLTAEERQNLVAKFLRKKDNFSFEDLAKELIPKGATFDFYKSFNSKAAQYLFNYKPKDSVSGCVVSASLKNIFGDDWKTKTFSYQTKNGKGENVNRNVDYKDLWHLISVSNNDIYLQEYAKEKLGLDEKRAKSFSKIKLKKDFASLSLNAINKILPYLKEGLLYSHAVFMANIENIVDEKIWNDATQRKYIQDSIAKIIETNTYDNGLLEVINGLMKEYKKDGVYYSREAEPSFKNDLQKKLTLFYKQHKITEKQDQILNDLFPVFIEQIKKQEFITVKRLDEKVLEFLSGKNEDGEIFCSDEKQLKKLYHPSDIEKFKKIIVKDENGNETVVLGSPLSSSIKNPMAMRALHQLRKVLNTLILEGQIDSKTRIHIEMARELNDANKRKGIQDFQNENKKARESYREAIKKLYFEETKKEIEPTEDDVLRYQLWLEQDKKEIYEEGKSIGISQIIGTNPEYDFEHTVPRSRSQDNSLMNKTLCSKRFNRDVKKTKMPFELSNHEEIKLRVDHWRKEAEKLTWEIDQIVKSTKGTTTKEAKDRKIRKRHFLTLKRDYLKGKYDRFVWEEPKVGFKNSQIPDIGIITKYAQAYLKSYFNRVESVKGGMVAEFRKIWGVQKSYQENGKKYYEIKDRSKHTHHTIDAITMACMTKDKYDVLASAWTLEDKEQISDARKLLAESKPWKTFTEDLVKIEEEILVSHYTPDNVKKQAKKIIRVRGKKQYVAEIEKDENGKTISKKDANGKVIYKLNEKGERIPRLQQGDTIRGSLHQDSIYGAIKNPLNTEEIRYVIRKDLESIKATDIENIVDETVKDIVRMAKENKIIVFSANAQQKNKLNGTVWMNEEKGIPINKVRIYANSVKNPLEVKEHAALSKSRHEHKQMVYAQNDENYAMAIYDDGKNKEFELINNFDVAQLQKSGQGYYPLYKEKMAKGKAIQIPIAKRNGRDVVLKRGQQVIFYEKKTESFQDVLEIPDLKGRIYIIEGLSIQRIVRPTGKVDEYGVIMFRYFKEARKSDDIKKDNFKPDGDFKLGENKPTRKMNHNQFEAFLEGIDFKVLSTGKIEKI

SEQ ID NO: 19622 - protein, 1237 aa, unidentified
  REGION 1..1237: note = Cas Enzyme sequence
VEFKEICNVQGIAENSEIYKDIYNGIFYQRKLKSQKGLVGKCILEPKYPRCPVSHPEFEMFRALKFINNVKRKEGEEWRLLNDEEKKKIWHKFFRKKDQFDFKEIAKIINPNYPQTHKLEDDPDPKKEYFNYKGNATVTGCYTSGCLMEILGKDWKEKESWESRNWQDILENPIWKTNLFNRCKKKEIRDRKTNEVKGEKKIDTIVNDVWHVLFTYDKKSKQKEFAINYFGADDNESEAFSKIQLKQEYASFSIKALRNINQFLREGLIETYAVFLAKIPELIPDIWNNPEDQKLIRDEINYRINNFRETKRKQTIVNDLYKNFRDEFGRKDKTYLLDDKDKENTINKIISFYGKKTLSEKSNDEQEEIKEFVITNFKNCIHKNTFIKIKRVDKVIQDFFIEHPALGIDEEKANKLYHPSDIEKFKEPITKKDKDDNLIKDRNGNILEFLNSPISGSIKNPTVFRAMFQLRKVLDELIRTEKIDRETRVHIEVAGNLNDMNYRKAIEDWQAEREKENQHYKEIIIGLFKAEKNIDITDPEDDDIKKIKSWYDQYLLENDKNLFDLLPKDEKDPVKKYRLWREQEGRCVYTGKQIPLHKLFDGISFDIEHTIPRSKSNDNSLENLTICDATFNRQNKIGRIPFELGEEKHKEILGYIAHWQKKYKDLEKQIKKLAKQAAANKDNKEKHDKIVRDKHKLTFEKNYWSAKYSRFTMEEVPDGFTNRNLNDTRIISRYAQQWLKSYFDTVHSINGNITSDFRKIWGLQKEYDSKQRTNHIHHCIDAITIACITKDKYDQLSHAYQLEETGAKEVATKLKTESKPWKTFVPDLKKLNDEVIITHQFLDNLPKQTKKYLRVRGKKQYVVEYKKDLNGKYLLDVKGKRIIEKDDEDKIIYNLKDGKRIPKIQKGDTVRGQLHQETFYGAIKVAQRENNKILKDEQGEIIFEKDKEGNEIFYVIRKELEKLKKEDVEKIVDEEIKKKIKSIIGTQITFKKTGATIKHPIWQNEEKQIPIKKVRLFTNVKNPLLDFKKHRDPSKSSHKHKEQIYVTNAENYCLAIYEGENENRKVERISKLVNNIDAGKKFKLSNRNDENFPPLSDEKTGYINIATLKKGQMMLRNIMNESMEDILDLSLEEQLNRLFIIEGIDKDGIKVRYHNEARQGTELVKFMKEVISQQNIAENKLDKNGKVKESKITGPVGGVKVGEHKNFPYQKFKPGNFNAFISGVDFKITPTGKIEII

SEQ ID NO: 19623 - protein, 1319 aa, unidentified
  REGION 1..1319: note = Cas Enzyme sequence
LLEEINDSGAFKEPFQVLFDNRKGDKDVVKLEKKISKELKNEIEFEKIRTFIITEFTKPENLGKVMKSIGELSEAIQKSGQSTMGSYFYSIYTKADKKTGLITKIRGRYTHREVHYLAEFNYICNKQNIKGDLRDKLHHAIFYQRPLKSQKGLVAMCPLEPKRKRIAISHPLFEEFRMWESINRIKIGRGEKTRLDFLTKEEKELIKPLFLQKTDFEFSKIAEKLSGDKTYCYVKFPEKVFFKKGDEPIEGRVAELFFNFPLDKKFSACPTISALSKLLGKDKYKENPLLNTGYKEEKNKTQISVEDIWHCLFIDDYGKKDRNTIRKEFAQKHLSLDEKGVEDFQKIKLIKGYGSLSKSALKKIVPFLEKGEIYSNAVFLANISKVLNRKINDEEQKIIAKKINEALNIHKVEKQNIGIVNNYISKLKDSKNESLGNNSFSKEVHKKGLISEIINWIGESEYHNLKENEKYQLENNCWNKFSEAALDKSAKEIVYLSTKTIPEFICDKLTEAFPNDTIDVTKLYHPSAMEVYKPAEKKLGNPEISSIKNPVFNRSMHQIKRLCNKLINEGIVDKDTEVNVEVAGEINSASYRKAISLWQKEQEIIRDWTKNEIINTYPKECQHEINPTDTDIIKFILFKEQNHQCLYTETQISICDFLGGKTTYDIEHTVPRSKFHDNSLTNKTLANKEFNRDYKKDTLPGLLNENYNGKTINKESIIKNRNANLKSYSLKNNVPTWSVSLKSLKDEFKKYKNAAKAIADPISHDEVMTKAHYTKIKLDYLSKKYKNFECEEITNQFTNANLVDTRIIAKYARAFLNSYFNKVIVVNGKITETLRKMWGLESEYAVKDRSNHIHHCIDAVTVACVERGTTNWISEAFHKYESDYFKGNSNPKYQLKEPMNDFAKRMHNLHQEVFIFHKQIDRIKPLLEAIEKGNDTKLNLRGKLNSQNPYAHIKKDGELIFAQRKPITKISGVDIKDIIDEGIKSRLLALADTKGWGKLMEFSVKENEDVLEKEKEHKNSIALKIFEKIKKDDKKREVVVQTVTKQNFSVEFLDISELITILFNKIIRLDIDEKKRESYKEKISKEVTNLSRTKGLELLLKESEGVIILPEYYDEKKKKPISRMVIKNIRLKSSKSNLKDYKEIRTVDKSKFEHKRDYYFDKDRYTNYEARIFGDLIPDESGKLKNRKYKLINHYNIVKNIFEEEKGKPILNLHQDDMFLVFDKNPKDEIKWESKKDLQNRLFKIVKFDENGIIVLIRHNYAKGNVDNSKAIKSESDLSDISEVVLRRGPSTLKVIPAKIDALGNIDIEFSKKFIELNS

SEQ ID NO: 19624 - protein, 1370 aa, unidentified
  REGION 1..1370: note = Cas Enzyme sequence
KSDIVFIEKVKAELYECIADTDNFTDLFFEINNFFNPRTSEDSNDENKELLKLQKKIENDFKKLKNDFKECKNYIVELLTKQPKLGPVKQQISDLTEEIEKNNLKTIGQLFYNWHLEDKKIRKNYLGREEHYEAEFKEICKVQGIPENSEIYKEIYNGIFYQRKLKSQKGLVGKCTLEPKYPRCPVSHPEFEMFRALKFINNVKRKEGEEWRLLNDEEKKKIWHKFFRKKDQFDFKEIAKIINPNYPQTHKLEDDPDPKKEYFNYKGNATVTGCYTSGCLMEILGKDWKEKESWESRNWQDILENPIWKTNLFNRCKKKEIRDRKTNEVKGEKKIDTIVNDVWHVLFTYDKKSKQKEFAINYFGADDNESEAFSKIQLKQEYASFSIKALRNINQFLREGLIETYAVFLAKIPELIPDIWNNPEDQKLIRDEINYRINNFRETKRKQTIVNDLYKNFRDEFGRKDKTYLLDDKDKENTINKIISFYGKKTLSEKSNDEQEEIKEFVITNFKNCIHKNTFIKIKRVDKVIQDFFIEHPALGIDEEKANKLYHPSDIEKFKEPITKKDKDDNLIKDRNGNILEFLNSPISGSIKNPTVFRAMFQLRKVLDELIRTEKIDRETRVHIEVAGNLNDMNYRKAIEDWQAEREKENQHYKEIIIGLFKAEKNIDITDPEDDDIKKIKSWYDQYLLENDKNLFDLLPKDEKDPVKKYRLWREQEGRCVYTGKQIPLHKLFDGISFDIEHTIPRSKSNDNSLENLTICDATFNRQNKIGRIPFELGEEKHKEILGYIAHWQKKYKDLEKQIKKLAKQAAANKDNKEKHDKIVRDKHKLTFEKNYWSAKYSRFTMEEVPDGFTNRNLNDTRIISRYAQQWLKSYFDTVHSINGNITSDFRKIWGLQKEYDSKQRTNHIHHCIDAITIACITKDKYDQLSHAYQLEETGAKEVATKLKTESKPWKTFVPDLKKLNDEVIITHQFLDNLPKQTKKYLRVRGKKQYVVEYKKDLNGKYLLDVKGKRIIEKDDEDKIIYNLKDGKRIPKIQKGDTVRGQLHQETFYGAIKVAQRENNKILKDEQGEIIFEKDKEGNEIFYVIRKELEKLKKEDVEKIVDEEIKKKIKSIIGTQITFKKTGATIKHPIWQNEEKQIPIKKVRLFTNVKNPLLDFKKHRDPSKSSHKHKEQIYVTNAENYCLAIYEGENENRKVERISKLVNNIDAGKKFKLSNRNDENFPPLSDEKTGYINIATLKKGQMMLRNIMNESMEDILDLSLEEQLNRLFIIEGIDKDGIKVRYHNEARQGTELVKFMKEVISQQNIAENKLDKNGKVKESKITGPVGGVKVGEHKNFPYQKFKPGNFNAFISGVDFKITPTGKIEII

SEQ ID NO: 19625 - protein, 1019 aa, unidentified
  REGION 1..1019: note = Cas Enzyme sequence
HWIALNPYEFRNKALTEKLTNEELGRVFYHLIQRRGFLSNSRSAGKDDGAIYKGNPKDGKIGIDQTKQEIADKTLGAYLYEISPKEGQPFVDELERIRNRYTTRQMYVDEFEKIWEIQAKFNQSLTLDLKEKIGGRKKDGYNSDGVLFHQRPLRSQKHLVGNCTFELNKTKCPISAIPFELFRIHQWINTIEYNGKLLNAEERKKAFDFLILKDKPSFKDIRKAIDKLDAAFKFNYKDEDKIVGTFTISNLSNKKFFGAKWFDFSEKEQEDIWHILYFFEDKSNLKEYAIKNWGFDDEKADVISKFNLKDGYASLSRKAINNILPFLELGEQYDVAVVLGGIKNAFGKSWDNLTDDKKSLILDNVPAIVRSNFKGGFIEHLKKFLVDEFSFSEKQLKKLYHHSINLNTAEILKKLPVNAEADNEIQAIRNPVVITALFEIRKLVNEIIDIYGKPDEIKVELARSLKASKSGRNEERRRQQKLEKENDRVKNEVNYLGKHLSHDNILLYKLWEECKKTCPYTGKSINVTQLFSGEVQIEHIHPWSRSLNDSFMNKTLCFADENRAKGDRTPFEFYGKQGEEKWSEVKNRALKLFSDTAQYPNAYQKFKRFVQQKFDDDFASKNLNDTRYISKEAKNYLTKVCEKVNVAPGQMTANLRMKWGLNSILNLEDNTKTRDDHRHHAVDALVMACSKVSYLQELSKWNRYNRTSELKDFPMPWENFRNDADKAIDAILVSHKKTNNILTVRTHKTEKNGKVYKNVGVAARGQLHKETVFGKRTAPFSEEAFHVRKPIESLTTEKQVVKVVDEAIRKLIFKRVNELGGYDKGKIPANTFFLVDENGVKHLQLFLPNKNGAPVPILKVRMKENFSGAEQLKSEVNQWVNPRNNHHVLIYKDENDNLKEDVVTFWTVVERKRKGFPVYQLPIGGKEIITTLHINDMFLLGLNEEAIDWENPNNEALKESLYRVQKLTSSDYFFRKHKSSTITDDDYKQIRGFGEGKTGWLNFNPIKVKVSVSGKIKKL

SEQ ID NO: 19626 - protein, 1445 aa, unidentified
  REGION 1..1445: note = Cas Enzyme sequence
MAKILGLDLGTNSMGWAIVDKESNKFSLVDKGVRIFSEGVKSEKGIESSRAAERTAFRSARKLKYRRKLRKYETLKVLSKNNMCPLSIEEVEEWKKSGFKEYPLNPEFLKWLRTDEDKNINPYVFRDRASKQKVSLFELGRALYHIAQRRGFLSNRLDQSAEGILEEHCPQINSKIEDCNSNTEILKELKDYFFNVGILDEMNKGGFKKELDEGEAKLKTLFNALLGIVKRNENKFIVAKEEIIARLNRKEDLGKVKGKIKDISQAMLDGNFKTLGQYFFSLYSKSKIRNQYTSREEHYLEEFNVICEKQGIGEINVDELLPEKKYNGLAKDLYKAIFFQRPLKSQKGLIGKCSFEKSKTRCPISHPDFEEYRMWTYLNTIKIGTPSDKTLRFLSHDEKQSLIPKFLRKKDNFNFDDLAKELIPKGATSGFYKSSKANEVNYLFNYKPYDTVTASPVSASFKNIFGEDWKIKTISYKTKNAKGNEVSRTVDYKDLWHLLSVSTSDIYLFQFAKEKLGLDDNNAKAFSKIRLKKDFASLSLNAITKILPYVREGLLYSHAVFMANIENIVDENIWNDESQRKFIQDKIAEIIEYHTFENGKLEVINSLIKECKTAGAFYSNEAESIYKSDLDKKLIPFIKYHKIESDKESILNELFPVLIEQLKKYEYIKINRLDEKVLDFIKGKNDDGEIFCTNEKRINKLYHPSDVEVFKKKIIKDEFGNEKVVLGSPLTSSIKNPMAMRALHQLRKVLNTLIFEGQVDEKTIIHIEMARELNDANKRKGIQDYQNENKKFRDDAIKEIKKLYLDAKGIEIEPTDDDVLRYQLWMEQDRKEIYENGNSIGISQIIGSNPDYDFEHTIPRSRSQDNSQMNKTLCSQKFNREIKGNKMPIELNNYFEILPRIAHWKEESDNLTREIEIISRSIKAASTKELKDKKIRRRHYLTLKRDYLKGKYDRFIWEEPKVGFKNSQIPDTGIITKYSQAYLKSYFKRVESVKGGMVAEFRKIWGIQESFQENDKKYFHEKDRSKHTHHTIDAITIACMTKEKYDVLANAWTHEDKGQLGEARKLLADSKPWKTFKEDLKKIEEEILVSHYTPDNVKKQSKKIVRVRGKKQYVAETIKDTNGKAIVQKDGNDKIIFKLDKEEKRIPRLQQGDTIRGSLHQDSIYGAIKNPLNTEEIRYVIRKDLESIKASDVENIVDEMVKEKVKDAIANKVLVMSSNAQQKNKLDGTVWMNEEKGIPIIKVRLYANSVKNPLEIKAHGSLSKSRHEHKQKVYGQNDENYCMAIYEGLDKNGKIKRSSLLINMLDAGKYFKLSNDLKKQYPIAPEKDENKFLLKYVLTKGKMVLIYDMSPDEFLEMTDNKILERLFQITQLDVEGSCIKLLHHQEAREKKIITESMGLKIGMKGGKNLGEHKKFPWIKISENSFDCLVQDYDFKISPSGKIIFL

SEQ ID NO: 19627 - protein, 1353 aa, unidentified
  REGION 1..1353: note = Cas Enzyme sequence
RTDDDKNINPYFFRDKASRGKANLYEIGRAFYHIAQRRGFLSNRLDQSAEGILEEHCPKIEDIIEECLTIEELKTEIHQYFEVLDILDKNSKDLDEGEKKLKSFFNSLDKIINTNLKDFEKAKNEIIEKLNKKENLGAVKQKISEISQAMADGGFITLGQYFYKLYNKEAEIKNINTQEIERFNRSKIRNQYTAREEHYLKEFEIICKAQNIEGVIEKELLPEKRFTGLTKELYKAIFFQRPLKSQKGLIGKCSFEKSKSRCAVSHPDFEEYRMWTYINTIKIKTPEDETLRFLTVEERQKIVPKFFRKKDSFNFEDIAKDLIPKGASFDFYKSFNAKSAHYLFNYKPKDSVSCCVVSASLKNIFGEDWKTKAFSYQTKNSKGEIVNRNVDYKDLWHLLSVSTSDIYLQEYAKENLGLDQKRAKSFSKIKLKKDFASLSLNAINKILPYLKEGLLYSHAVFMANIENIVDKEIWKDEKQRKYIQQKIAILIETNTYENGLLEIVNGLIKECKSDDAYYSKEAEETYKNDLKNKLNSFYKYNKIEENREQIFNELFPVFMDQLKKQEFIKIKRLDEKVLEFLDGKNEDGEVFCSNEKRLNKLYHPSDIEVFKKKIIKDEFGNEKIVLGSPLTSSIKNPMAMRALHQLRKVLNALILEGQIDSKTRIHIEMARELNDANKRKGIQDFQNENKKARESYREEIKKLYLAETKNEIEPTEDDVLRYQLWIEQNKMEIYEEGKSIGISQIIGDNPDYDIEHTIPRSISQDNSLMNKTLCSQRFNREVKKTKMPFELTNHEEIKLRVDHWRKEADKLNWEIEQIVKSTKGAATKEAKDRKIRRRHYLTIKSKYLQGKYDRFIWEEPKVGFKNSQIPDIGIITKYSQAYLKSYFNRVESVKGGMVAEFRKIWGIQESYQENGKKYYEIKDRSKHTHHTIDAITMACMTKDKYDILASAWTLEDKEQISDARNLLANSKPWKTFTEDLKQIETEILVSHYTPDNVKKQSKKIVRIRGKKQYVAEVEKEENGKTVPKKDSNSRIIYKLNENGERTPRLQQGDTIRGSLHQDSIYGAIKNPLNHEEIRYVIRKDLESIKATDIENIVDETVKEKVREAKENKILVFSANAQQKNKLNGTVWMNEEKGIPINKVRLYANSVKNPLEIKEHVALSKSRHEHKQKVYAQNDENYAMAIYELDGKREFELINNFNLAKLMKLGEGDYPLFKEKVSKGKIIQMPIAKSNKRDMVLNKGQQVILYDIEVENPKDITEIVDFKGRVYIIEGLSINRVKSGKKNFEYGVIMLKYFKEARISDEIKKDNFKPDGDFKLGEDKPTRKMSPGQFTAFLEGIDFKVLSTGKIEKL

SEQ ID NO: 19628 - protein, 1206 aa, unidentified
  REGION 1..1206: note = Cas Enzyme sequence
MADGNFKTLGQYFYNLYNKEVEIKNTNTQEIEKFNRAKIRNQYTAREEHYLAEFEIICKAQNIEGVIEKELLPEKRFTGLAKNLYKAIFFQRPLKSQKGLIGKCPFEKSKSRCAVSHPDYEEYRMCAYINTIKIKTSEDEILRFLTAEERQKIVSKFYRKKDNFNFEDLAKELIPKGASFDFYKSFNAKAAHYLFNYKPKDSVSGCVVSTSLKNIFGENWKTKTFSYQTKNAKGEIVNRNVDYKDLWHLLAVSTSDIYLQEYAKENLGLDEKQAKSFSKIKLKKDFASLSLNAINKILPYLKEGLLYSHAVFMANIENIVDQEIWNNPAQRKYIQNKIAEIIETNTYDNGLLEIVNGLIKDCKSEDAYYSKEAETTYKNDLQKRLISFCKFHKIERNKGQILNDLFPVFIEQLKKYEFIKIKRLDEKVLEFLDGKNEDGEVFCSNEKRLNKLYHPSDIEVFKKKIIKDEFGNEKVVLGSPLTSSIKNPMAMRALHQLRKVLNALILEGEIDPKTRIHIEMARELNDANKRKGIQDFQNENKKARASYREEIKKLYFEETKKEIEPTEDDVLRYQLWIEQDKKEIYEDGKCISISQIIGNNPDYDIEHTVPRSRSQDNSLMNKTLCSQRFNREVKKNKMPIELANHEEIKLRVDHWRKEADKLTREIDDIVKSTKGAATKEAKDKKIRRRHYLSLKRDYLKGKYDRFIWEEAKVGFKNSQIPDIGIITKYSQAYLKSYFNRVESVKGGMVAEFRKIWGIQESYQENGKKYYEIKDRSKHTHHTIDAITMACMTKDKYDILASAWTLEDKEQISDARKLLANSKPWKTFTEDLKQIEEEILISHYTPDNVKKQSKKIVRIRGKKQYVAEVENDLNGKTIPKKDANGKIIYKLNEKGERIPRVQQGDTIRGSLHQDSIYGKIRNPLSFDDIRCVIRKDLESIKATEIENIVDEAVKEKVRMAKENKVLVFSVNAQQKNKLNGTVWMREPDIENNISGIPINKVRLYASVKNPLEIKEHVSLSKSRHEHKQKVYAVNDENYAMAIYEGIDRKGNIKRSFESVNYMDAGAYYKLSNKMNNDDSLVPMIHLKTQLPLKYEVKKGDLVLFYNENKAELNEIGINDLGKRLYKVIGFEGDGRIQFRHHKTAMQQSSSNKEELTIVKFMADNQLKNSQVDFENPVPWLRLTTGNFNFLLNKKEFEINSIGKISIF

SEQ ID NO: 19629 - protein, 1189 aa, unidentified
  REGION 1..1189: note = Cas Enzyme sequence
YNKEVEKENITTKEKEKFNRAKIRNQYTAREEHYLAEFEVICKAQKIDYINENELLPEKKYSGLAKELYKAIFFQRPLKSQKGLIGKCSFEKTKSRCSVSHPDYEEYRMWAYINTIKIKTPEDNALRFLTAEERQKIVPKFYRKKDNFNFEDLAKELIPKGASFDFYKSFNAKSVHYLFNYKPKNSVSGCVVSASLKNLFGEDWKTKTFTYQAKNGKGENVNRNVNYKDLWHLLSVATTDIYLQEYAKEKLGLDEKKAKSFSKIKLKKDFASLSLNAINKITPYLKEGLLYSHAVFMANIENIVDDKIWNDQTQRKYIQDNIAKIIETNTYENGLLEVLNGLIKEYKKDSVYYSKEAETSFKNDLQKKLISFYKYHKIEENQDQILNDLFPVLIEQIKKQEYITIKRLDEKVLEFLSGENEDGEIFCTNEKQLKKLYHPSDIEVFKKKIVKDANGNEKVVLGSPLTPSIKNPMAMRALHQLRKVLNVLILEGHIDEKTIIHIEMARELNDANKRKGIQDFQNDNKKFREDAVKEIKKLYYEESKKEIEPTEDDLLRYQLWIEQDKKEIYEDGKSISICQIIGTSPEYDIEHTVPRSRSQDNSLMNKTLCSQRYNREVKKTKMPVELANHEEILLRVDHWRKEAEKLTWEIDQIVKSTKAMATKEAKDRKIRRRHYLTLKRDYIKGKYDRFVWEEPKVGFKNSQIPDIGIITKYSQAYLKSYFKRVLSVKGGMVAEFRKIWGVQKSYQENGKKYFEIKDRSKHTHHTIDAITIACMTKDKYDVLASAWTLEDKEQAGNARKLLAESKPWKTFTEDLVKIEEEILVSHYTPDNVKKQSKKIIRVRGKKQYVAKIEKDKNGKTILKKDANGKLIYQLDEKGKKIPRLQQGDTIRGSLHQDSVYGAIKNPLNTEELRYVIRKDLESIKVTDIENIVDEAVKEKVRMAKENGILIIPSNAQQKNKLNGTVWMNEEKGVPINKVRIYANSVKNPLEIKEHSIISKSRQEHKQKVYAQNDENYCMVIYDDGKNKDFELINNFNLAQLQKLEHGDYPLYKEKISKGKTIQVPIVKRNNRDLVLKRGQQVICYDKSVENPKDINEITDFSGRIYIIEGLSIQRIVRPSGKVDEYGVIMMRYFKEARKSDEIKKDNFKPDGIFKLGDNKPTRKMNHNQFNAFIEGIDFKLLPSGKMIKI

SEQ ID NO: 19630 - protein, 1286 aa, unidentified
  REGION 1..1286: note = Cas Enzyme sequence
MAKILGLDLGTNSIGWAIRDNNAGNENEILDSGVLVFPQGVGEVKGVEFSLASERTKNRAARKLYARRRKRKADLLKLLINKGYCPLSIEELNARAVYKKGRDIRYPTENVDFQEWLKIDPYQVRAKAPNERVSKFELGRALYHICQRRGFKSGRKDSDAGKDLEVYKLEKEKRGNRTLGEYLFEQLEKGEKVRKTKYKADDNEVNSSRISYIEEFNALMKSQNIDNDLADEFFEAIFFQRPLKSQKGSIGKCTLEPSKSRYAVSHPLYEEYRMYQFLNSLKVKERGSETFRFLSDYPDYFNVARKLFFRKSKPNFKFGDLSKAVNNLAKKENQYFTFNYKDKYPIVGNPTMSRFIDVFNAEDWEDCKIKMAEAYKIGDSKNAEQLVDELWHTLYFAGDFVNDVTSEKIKKFIRDRYDISEEQVETYEKISLKQGFASLSKKAITKILPFLKDNIIYSHAVFYANIEAIVGEEIWNENQQFIQDTIYDIIEGYKEKILKIDIVNELVGGFIKEYDNAHNEYILDETDKKHTMEKIVAFYGTERWEKLDEAQQAELYLEITSLFQKQLQKRRTGGYFLTKPRLDEDIKQFLIDEFKVSKEQAKKLYHPSAVDIYPQSDDGLLGSPFTDSVRNPMAMRTLHNLRKLVNSLIEEGKIEPDTTVIIELARELNDKNKRLAIERWQRERENENNKYRAYLEEKQKEYQNYSVSDVDVMKYRLWKEQREKCIYTDKTIGISEIIGPNPKFDIEHTFPRSKSFDNSLANKTLTDKEFNQKIKGNKIPQELDEKYIQTALINISHWKTTIEDLKEKVEQQKYFSKIASTVEQKDRAIQQKHYLMLDLNYWRDKYNRFTDKEINPKFKNSQLVDTGIITKYASSFLKSLFDNVFPAKGTMVADIRNSWGLPEKDRSLHYHHAVDAIVLTCMTKDIRDSLAKAFRQAEEIGRVEKFKVAKPWTTFTEDILGMQQSILVVHKHKDNLLKQTKRKLRKRGKIQYDKSGNVIFEKGQGIRSSLHKDTFYGAIERLNEKDEKEIWFVIRKPVDSSFTEADVSNIVDEGIKERINKHGLKNIRTEEGFIELPAEDGKKSMLIKRVRIKTKFKELPIIKKQSHLSQKGKKPYKENYYATLENIFGLAVYESTNTNGKVDRSFKTISALEVAKFNHGNHKMELPIDNNMLKNEGKKSETLLPLAYVLKVNQMVLFYENDKEELRQLPNSELSSRLYKITQFENDGRIQLRHHAQGGADKDLKKESTLDFDRPAQKLRISLSNFKAAFEKEDFDILPSGKIKFK

SEQ ID NO: 19631 - protein, 1301 aa, unidentified
  REGION 1..1301: note = Cas Enzyme sequence
YHIAQRRGFLSGRLDQSGEGILEEVSPIIIGLVEVSENLNDVKTSIHDFFEDRGIFDSSQKNGYVKDADEGDKKLISLYKALNAIISKNIDDYDAARKDLIARLTLKENLGVVKGEIHDLTSEMKERGFDTIGQLFYDKYSKSRIRNQHTSREEHYLAEFELICKIQELGQINENEKLPEKRFEGLAKDLYRAIFYQRPLKSQKSLIGKCSFEPTKSRCAVSHPDFEEFRMWNYLNTIKMAENGGELLPLSQEQKEQLIPKFYRKKENFNFEDLAKELVPPKASYGFYKSSKKNEFDYWFNYQNNDSVSGCPVSASLKSILGEDWNTIELNYSTTNAKGEQVNRVVNYHDLWHLLSSSTTNDYLYDYAQKKLNFSEKQAKAFSKIRLKKDFGNLSLNAIRKILPYTRNGLLYSHAVFLANLDKIVDENLWNDLTVKAEIQQSIGRIIENHTFENAKLEVLNGVLKKMRNDDGHYSDAAESVYRDELKDGIKWLINKFKLNNSVDELESLLFPTLKNQLKKEEFIKIQRIDDKVMAFLLGENEDAQVFVSDENKLKKMYHPSDIEKFKLKVVYDENNQVVREELGSPISSSIKNPMAMRAIHQLRKVLNTLIQEGKIDKNTHIHIEMARELNDANRRKGIQDYQKELQNLREEYKKEIKKLYQEETGKDVEPTQDDILRYQLWIEQNKQEIYEPSINGGKAKTIGISQIIGANPEYDIEHTIPRSISQDNSQSNKTLCSRFFNREIKKNKTPIELQNHDLILPFVEHWKKEADSIDVEINILNRRIKAASTKENKDRSIRKRHYLSLKKAYLEDKYYNFIRKEPKTGFKNSQIPDTGIITKYAQSYLRSYFKRVESVKGGMVAEFRKLWGVQKSFRDENDKKHYEEKDRSKHTHHTIDAITIACMTKQKYDMLAHAWTLEDEARLPEARRIIESSKPWKTFAEDIAKIEEEILVSHYTPDNLKKQSKKILRVRGKKQFVAEVTTDEKGKKIPKTDANGKIIYKLNEAGQKIPRLQQGDTVRGSLHQDSIYGRVLDPETKEIRSVIRKSLESLKANDIEKIVDPEVKEIVKKAVADKIIIMSSNTQQANKIDKEIGVWMNKEKGVAINKVRIYADSVKNPLQIKKHAESSKSRHEHKQFVLGQNDENYAMAIYEGVDKKGNAKRVYEILNNIDAGKFYRLSNKDKNDTLIPQSHLETNYPLSYIVKKGDLILFYEKDVEELYNMNSAELGKRLYKLAKFDAQGRLTFRFHKEARQASDLKEVYQVDFNAPFEQIRLQVSKLNILLQKKDFDFSPSGKIFFKKK

SEQ ID NO: 19632 - protein, 1135 aa, unidentified
  REGION 1..1135: note = Cas Enzyme sequence
MTSSRKILGLDLGTNSIGWAIVDEGKEEILGMGSRIFPMGVENLGDGDGEISKNASRTGARGVRRQFFRKRLRKKVLLKALSENNMCPLTSEDFQEWKNKKVFPEEKLKMWFAMNPYELRDKALTEKLDLHEVGRVFYHLIQRRGFLSNSRKGGADDGAIFKGNPKEGKIGIDETNEKINDKTLGSYLNEIYPKDKAPFKSGLERIRNRYTTRKMYVDEFEQIWQNQEKYYQSFTKEMKQLFGGRKVEEDFSEDGILFHQRPLKSQKHLVGNCSFENNKIKCPISAIPFEEFRAWQWVNTVECNGKKITQGEKEKIVESLYSLPSSKDKVEFKAIRKVIGRIGAEYKFNYKDDDKVVGAYTISSLSNKKFFSNEWASFSEKEKEDIWHVLYFFDSKSNLKEYAIEKWGFDEVKAEAISKFNLKDGYSSISRKAINNILPFLKLGFTYDMAVVFGGVKNAFGEKWSKLTDLEMEFLMTNIPSIVRSKMKGGFIEPLKEILMNEYGLTEKELKKLYHHSESLKKEDILNKLPIGKEADKEIQDLRNPIVVTALFELRKLINELIDEHGSFYEIKVEMARDLKASKSQRNAIRSEQKRLERENDRVKGEVEKYTRVSHDNMLKFKLWEECKQTCPYTGVQIPLNKLFTGEIQIEHIHPWSRSLNDSYNNKTLCWADENRKKGDKTPYEFYSGDEANWEVIKHRALKLFSDTKEYPKAYQKFKRFVQQKFDDDFSSRQLNDTRYISKEAKDYLSKICRKVTVSPGQMTAVLRQKWGLNSLINEENIKTREDHRHHAIDALVLTCSKQSYLQELSKWNRYNRNSELNDFPIPWEMFRKQAETNVNSILVSHKRSKNVITVRSHKVEKNGETYRNLGVAARGQLHKETVFGKRKAPFAEEAFHVRKAIDSLTTEKQVLKVVDTKIRELIYKRIEQLGGFQKDKIPNNTFFIVDENGIKQPQIFLPNKNGAPVPVLKVRMKENFSGAEKLKDKINQWVNPRNNHHVLIYKDSDGNLKEDVVTFWTAVERKRNGDSVYKLPFDGAEIITSLHINDMFVLGYDNNKINLDEINSEQLKKSLFKIQTLSSGFYEFRLSTDSTQIKDTNSDVFRRIQSFGNGKTGWLTFNPIKVKISSSGKLAFAN

SEQ ID NO: 19633 - protein, 1447 aa, unidentified
  REGION 1..1447: note = Cas Enzyme sequence
MENSRKILGLDLGTNSIGWAIVEQDDNKFSLADKGVRIFSEGVKSEKGVESSRAAERTSYRSARKIKYRRKLRKYETLKVLALNDMAPLTLEQVEDYKKSGFKNYPMHDNFLSWLKTDDKIDKNPYAFRDKASREKINPMEVGRALYHIAQRRGFLSGRLDQSGEGILEEVSPIIIGLVEVSENLNDVKTSIHDFFEDRGIFDSSQKNGYVKDADEGDKKLISLYKALNAIISKNIDDYDAARKDLIARLTLKENLGVVKGEIHDLTSEMKERGFDTIGQLFYDKYSKSRIRNQHTSREEHYLAEFELICKIQELGQINENEKLPEKRFEGLAKDLYRAIFYQRPLKSQKSLIGKCSFEPTKSRCAVSHPDFEEFRMWNYLNTIKMAENGGELLPLSQEQKEQLIPKFYRKKENFNFEDLAKELVPPKASYGFYKSSKKNEFDYWFNYQNNDSVSGCPVSASLKSILGEDWNTIELNYSTTNAKGEQVNRVVNYHDLWHLLSSSTTNDYLYDYAQKKLNFSEKQAKAFSKIRLKKDFGNLSLNAIRKILPYTRNGLLYSHAVFLANLDKIVDENLWNDLTVKAEIQQSIGRIIENHTFENAKLEVLNGVLKKMRNDDGHYSDAAESVYRDELKDGIKWLINKFKLNNSVDELESLLFPTLKNQLKKEEFIKIQRIDDKVMAFLLGENEDAQVFVSDENKLKKMYHPSDIEKFKLKVVYDENNQVVREELGSPISSSIKNPMAMRAIHQLRKVLNTLIQEGKIDKNTHIHIEMARELNDANRRKGIQDYQKELQNLREEYKKEIKKLYQEETGKDVEPTQDDILRYQLWIEQNKQEIYEPSINGGKAKTIGISQIIGANPEYDIEHTIPRSISQDNSQSNKTLCSRFFNREIKKNKTPIELQNHDLILPFVEHWKKEADSIDVEINILNRRIKAASTKENKDRSIRKRHYLSLKKAYLEDKYYNFIRKEPKTGFKNSQIPDTGIITKYAQSYLRSYFKRVESVKGGMVAEFRKLWGVQKSFRDENDKKHYEEKDRSKHTHHTIDAITIACMTKQKYDMLAHAWTLEDEARLPEARRIIESSKPWKTFAEDIAKIEEEILVSHYTPDNLKKQSKKILRVRGKKQFVAEVTTDEKGKKIPKTDANGKIIYKLNEAGQKIPRLQQGDTVRGSLHQDSIYGRVLDPETKEIRSVIRKSLESLKANDIEKIVDPEVKEIVKKAVADKIIIMSSNTQQANKIDKEIGVWMNKEKGVAINKVRIYADSVKNPLQIKKHAESSKSRHEHKQFVLGQNDENYAMAIYEGVDKKGNAKRVYEILNNIDAGKFYRLSNKDKNDTLIPQSHLETNYPLSYIVKKGDLILFYEKDVEELYNMNSAELGKRLYKLAKFDAQGRLTFRFHKEARQASDLKEVYQVDFNAPFEQIRLQVSKLNILLQKKDFDFSPSGKIFFKKK

SEQ ID NO: 19634 - protein, 956 aa, unidentified
  REGION 1..956: note = Cas Enzyme sequence
VNYHDLWHLLSSSTTNDYLYDYAQKKLNFSEKQAKAFSKIRLKKDFGNLSLNAIRKILPYTRNGLLYSHAVFLANLDKIVDENLWNDLTVKAEIQQSIGRIIENHTFENAKLEVLNGVLKKMRNDDGHYSDAAESVYRDELKDGIKWLINKFKLNNSVDELESLLFPTLKNQLKKEEFIKIQRIDDKVMAFLLGENEDAQVFVSDENKLKKMYHPSDIEKFKLKVVYDENNQVVREELGSPISSSIKNPMAMRAIHQLRKVLNTLIQEGKIDKNTHIHIEMARELNDANRRKGIQDYQKELQNLREEYKKEIKKLYQEETGKDVEPTQDDILRYQLWIEQNKQEIYEPSINGGKAKTIGISQIIGANPEYDIEHTIPRSISQDNSQSNKTLCSRFFNREIKKNKTPIELQNHDLILPFVEHWKKEADSIDVEINILNRRIKAASTKENKDRSIRKRHYLSLKKAYLEDKYYNFIRKEPKTGFKNSQIPDTGIITKYAQSYLRSYFKRVESVKGGMVAEFRKLWGVQKSFRDENDKKHYEEKDRSKHTHHTIDAITIACMTKQKYDMLAHAWTLEDEARLPEARRIIESSKPWKTFAEDIAKIEEEILVSHYTPDNLKKQSKKILRVRGKKQFVAEVTTDEKGKKIPKTDANGKIIYKLNEAGQKIPRLQQGDTVRGSLHQDSIYGRVLDPETKEIRSVIRKSLESLKANDIEKIVDPEVKEIVKKAVADKIIIMSSNTQQANKIDKEIGVWMNKEKGVAINKVRIYADSVKNPLQIKKHAESSKSRHEHKQFVLGQNDENYAMAIYEGVDKKGNAKRVYEILNNIDAGKFYRLSNKDKNDTLIPQSHLETNYPLSYIVKKGDLILFYEKDVEELYNMNSAELGKRLYKLAKFDAQGRLTFRFHKEARQASDLKEVYQVDFNAPFEQIRLQVSKLNILLQKKDFDFSPSGKIFFKKK

SEQ ID NO: 19635 - protein, 1465 aa, unidentified
  REGION 1..1465: note = Cas Enzyme sequence
MAKILGLDLGTNSIGWAVVEKDGKEFSLIDKGVRIFSEGVKSEKGVESSRAAERTGFRSARKIKFRRKLRKHETLKVLAKNKMCPLSVDEVISWRKSGFRKYPMNDEFLKWLRTDDDKNINPYYFRDKASRGKASLLEVGRALYHIAQRRGFLSNRLDQSAEGILEEHCPKIEDAIEECTTVVELKTEIQDYFEGLDILDKNAKDLDEGEKKLIRLYKDLDKIIKTNASDFEKAKNEIVERLNKKENLGAVKQKISEISQAMAGGNFKTLGQYFYSLYNAEVEKENSITKEKEKFNRAKIRNQYTAREEHYLKEFEAICKAQSIEGINDAELLPEKKYSGLAKDLYKAIFFQRPLKSQKGLIGKCSFEKNKSRCAVSHPDYEEYRMWAYINTIKIKTPEDETLRFLSADERQKIVSKFYRKKDNFNFEDIAKELIPKGAAFEFYKSFNSKSAHYLFNYKPKDSVSGCVVSASFKNIFGDDWKTKIFSYQTKNGKDETVHRNVDYKDLWHLISVSNNDIYLQEYAKEKLGLDEKRAKSYSKIKLKKDFASLSLNAINKILPYLKEGLLYSHAVFMANIENIVDDKIWNDSTQRKYIQDKIAKIIDTNTYDNGLLEVINGLIKEYKKDGVYYSVEAETSFKKDLKEKLSSFYKYHKITEKQDQILNDLFPVYIEQIKKQEFITVKRLDEKVLEFLSGKNEDGEIFCSDEKQLKKLYHPSDIEKFKKIIVKDEHGNETVVLGSPLSSSIKNPMAMRALHQLRKVLNTLILEGKIDSKTRIHIEMARELNDANKRKGIQDFQNENKKARESYREEIKKLYLAETNKEIEPTEDDILRYQLWVEQDRKEIYEEGKSIGITQIIGNNPEYDIEHTIPRSRSQDNSLMNKTLCSQQFNRAVKKNQMPIELSNHEEILLRVDHWRKEAEKLTWEIDQIVKSTKGATTKEAKDRKIRKRHYLTLKRDYLKGKYDRFVWEEPKVGFKNSQIPDIGIITKYSQAYIKSYFDRVESVKGGMVAEFRKIWGIQKSYHENDKKYYEVKDRSKHTHHTIDAITIACMTKDKYDALASAWTLEDKEQINDARKLLAESKPWKTFTEDVAKIEEEILVSHYTPDNVKKQAKKVVRIRGKKQYVAEIEKDANGKTIAKKDANGKTIYKLNEKGERIPCLQQGDTIRGSLHQDSIYGAIKNPLNTEEIRYVIRKDLESIKVTDIENIVDESVKEKVRMAKENKILVFSSNAQQKNKLNGTVWMNEEKGIPINKVRIYANSVKNPLEIKEHAALSKSRHEHKQKVYAQNDENYAMAIYDDGKNKDFELINNFDLAQLQKSGQGYYPLNKEKTSKGKTIQIPIAKRNGRDVVLKRGQQVIFYDKKTENFEDVFEIPDLKGRIYLIEGLSIQRIKVGNKQFDYGVIMLRYFKEARKADDIKKDNFKPDGDFKLGENKPTRKMNHNQFEAFLEGIDFKVLSTGKIEKL

SEQ ID NO: 19636 - protein, 1073 aa, unidentified
  REGION 1..1073: note = Cas Enzyme sequence
MARILGLDLGTNSIGWALIDDAQNKILGIGSRIFPMGVENLGEGEGREMSKNAGRTGARGVRRQFFRRRLRKKILLKALSENKMCPMVVADFEDWKKTKEFPSDKLANWFALNPYELRQKALNEKLSLEEIGRIFYHLIQRRGFLSNSRKGGTDDGAIFKGNPKEGKIGITETQESIQGKTLGSYLFEIYPKENQPFQDGLERIRNRYTTRKMYVDEFELIWNKQSQFHSQLTNELKTLFGGRKLDGYKEDGILFHQRPLRSQKHLVGNCSFEPNKTKCPISAIPFEQFRVWQWVNTVEYNGKKISQEEKEKIVEFLYANEKPDFKKIRKAIGKESAEFKFNYKDDDKIVGTHTISNLSNKKYFGKKWFEFSEKEQEDIWHVLYFFDSKSNLKEYAIKNWNFTEEQAESIAKFNLKDGYSSLSRKAISNILPFLKLGFTYDVAVVLGGIKNVFGSDWEKLSDEKRNFFYDNVYEIIRSKNKGGFIDIIKDILRNDYNISDHQLRKLYHHSAAIEVSELLEKLPLGSEADKEIQQIKNPIVITALFELRKLVNELIDEHGKIDEIKVEMARDLKVSKSERYKTRRNQQRLERENDRVKAEVLKYTNLSHDNILKFKLWEECKRTCPYTGLSIPINELFTNKWQIEHIHPWSKSLNDSFSNKTLCLGTENIKKGNKTPFEFYGSDEANWSAIKERALKLFSDTKEYPNAYQKFKRFVQQKFDDDFSSRQLNDTRYISKEAKNYLSKVCKNVMVSPGQATSNLRQKWGLNHILNDENAKIREDHRHHAIDALVMAYTKLSYVQELSKWNRYNRTYDLKQFPLPWETFNYDAEKAVEKILISHKKVSNDITIRYKTVEKNGKKHTNKGVAARGQLHKETVFGKRTFNGEEAFHVRKPIESLETAKQIDKVVDETTRLLILKRVNELGGFVKDKVPANTFFVADENGVKQPQIFLPNKNRAPVPILKVRIKENIGGAEKLKDKLNQWVNPRNNHHVLIYKDEKGNLKEEVVAFWTVVERKRTGQSAYQLPIDGKEIVTTLHINDMFLLGLNEDEINWENPDYEILKEHLYRVQKFTYG

SEQ ID NO: 19637 - protein, 1122 aa, unidentified
  REGION 1..1122: note = Cas Enzyme sequence
MAKILGLDLGTNSIGWALIDDVQNKILGIGSRIFPMGVENLGDGDGEVSKNASRTGARGVRRQFFRRKLRKKVLLKALAENKMCPMVTQDFEDWKKTKEFPSEKLSNWFALNPYELRQKALNEKLSLEEIGRIFYHLIQRRGFLSNSRKGGSDDGAIFKGNPKEGKIGITETQESIQDTTLGSYLFEIYPKENQPFQDGLERIRNRYTTRKMYVDEFELIWNKQSQFHSQLTNELKTLFGGRKLDGYKEDGILFHQRPLRSQKHLVGNCSFEPSKTKCPISAIPFEQFRVWQWVNTVEYNGKKISQDEKEKIVEFLYANEKPEFKKIRKAIGKESAEFKFNYKDDDKIVGTHTISNLSNKKYFGKKWFEFSEKEQEDIWHVLYFFDSKSNLKEYAIKNWNFTEEQAESIAKFNVKDGYSSLSRKAISNILPFLKLGFTYDVAVVLGGIKNVFGANWEKLSEEKRNYLIDNVEGIVRSKTKGGFIDIIKDILRNDYSISDNQLRKLYHHSATIDVAELIEKLPIGKEADKEIQAIRNPIVITALFELRKLVNELIDEHGKIDEIKVEMARDLKISKSQRNKIRREQKRLEKENDRVKARLLEEGQRITHDNILLYKLWEECKRTCPYTGKPISVTQLFLGEVQIEHIHPWSRSLNDSFSNKTLCYADENRKKGDKTPFEFYGNDEANWSAIKERALKLFSDTKEYPNAYQKFKRFVQIKFDDDFSSRQLNDTRYISKEAKNYLSRICKNVIVSPGQATSNLRQKWGMNNILNDENEKTREDHRHHAIDALVMACTKVSYVQELSKWNRYNRNSELKNFPLPWETFRKDAEVAVDKILVSHKKVSNDIIVRTHKCEKNGKIHANVGVAARGQLHKETVYGKRTFNGEEAFHVRKAIDSLTTEKQLDKVVDESIKQLIRKRIQELGGFVKGNIPVNTFFLVDENGVKQPQIFLPNKNGAPVPVLKVRMKENIGGAEKLKNKVNQWVNPRNNHHVLIYKDQKGNLKEEVVTFWTVVERKRTGQSAYQLPLDGNKILTTLHINDMFLLGLNEDEINWEKPDYEVLKEHLYRVQKLTSGDYFFRKHKSSTVTDDDFKQVRGFGDGKTGWFTHNPIKVKISVSGKIEKV

SEQ ID NO: 19638 - protein, 1122 aa, unidentified
  REGION 1..1122: note = Cas Enzyme sequence
MAKILGLDLGTNSIGWALIDDTQNKILGVGSRIFPMGVENLGDGDGEISKNASRTGARGVRRQFFRRKLRKKILLKALSENKMCPMVANDFEDWKKTKEFPSEKLANWFALNPYELRQKALNEKLSLEEIGRIFYHLIQRRGFLSNSRKGGSDDGAIFKGNPKEGKIGITETQESIQDKTLGSYLFEIYPKENQPFNDGLERIRNRYTTRKMYVDEFELIWNKQTQFHSNLNEDLKTLFGGRKLDGYKEDGILFHQRPLRSQKHLVGNCSFEPTKTKCPISAIPFEQFRVWQWVNTIEYNGKKISQEEKEKIVDFLYANEKPEFKKIRKVIGKESAEFKFNYKDDDKIVGTHTISNLSNKKYFGKKWFEFSDKEQEDIWHVLYFFDSKSNLKEYAVKNWGFTDEQAVSIAKFNVKDGYSSLSRKAISNILPFLKSGFTYDVAVVLGGIKNVFGSDWEKLSDEKRNFLTDNIYDIVRSKTKGGFIDIIKDILRNDYNISDNQLRKLYHHSATIDAAELLDKLPVGKDADKEIQAIRNPIVITALFELRKLVNELIDEHGKIDEIKVEMARDLKISKSQRNKIRREQKRLERENDRVKARLLEEGQRITHDNILLYKLWEECKRTCPYTGKPISVTQLFSGEVQIEHIHPWSRSLNDSFSNKTLCYADENRKKGDKTPFEFYGNDEANWSAIKERALKLFSDTKEYPSAYQKFKRFVQIKFDDDFSSRQLNDTRYISKEAKNYLSRICKNVIVSPGQATSNLRQKWGMNNILNDENEKTRDDHRHHAVDALVMACTKISYVQELSKWNRYNRNSELKNFPLPWESFRYDAEKAVEKILISHKKVSNDITVQFKTVEKNGKKYINKGVAARGQLHKETVYGKRNFNGEEAFHVRKAIDSLTTEKQLDKVVDESIKLLIRKKIQELGGFVKGNIPANTFFIVDENGIKQPQIFLPNKNGAPVPILKVRIKENIGGAEKLKEKVNQWVNPRNNHHVLIYKDEKENLKEEVVTFWTVVERKRTGQSAYQLPIDGKEMVTTLHINDMFLLGLNEDEINCENPDYEVLKDHLYRVQKLTSGDYFFRKHKSSTVTDDDYRQIRGFGEGKTGWFTFNPIKVKISVSGKIQKL

SEQ ID NO: 19639 - protein, 1449 aa, unidentified
  REGION 1..1449: note = Cas Enzyme sequence
MAKILGLDLGTNSIGWAIVEKDGNDFSLVDKGVRIFSEGVNIEAKTNSESSKAAKRTEFRSARKIKYRRKIRKIQLLKVLSDNNLCPKLSDDELNDWRYKKIYPQNDEFRIWLSTDNQDSKEERKKQNKNPYSYRFKAATENLNLNKREDRFILGRAFYHIAQRRGFLSNRLDNSDNSIIEEKNSEITSIINDANSIVEFSEAFSEFLSSFDKDDISTSPMFKLLRAFNAIIKENSALVYTDLKDKLHERLNKKEFLGPVKRAISDLTEKIKEQNCSTLGEYFYKLYKKGEKIRGEYTHRIDHYFTEFNFICNKQNIPNEIKEAIEKTIFFQRPLKSQKGLVAKCPLENRKACVPISHPDFEEFRMLSYLNNVKIKFPLDEKLRLLNEDEREQIESLFFRKSKANFDFIDIAKKLTPKGLVPKYYKDKEISNENVLFNYTLGSNVAGCPTIANLVDVFGINWKEYLLSNYEKNTKTEGYIKVQKSIEDIIDDVWHVLFRFDNEDLLKQFAIENLNCDEKKATKFSKIKLKQDYGSLSLKAIRNILPYLKQNLIYSHAVFLANMKNILPLEIWNNDENRNVINKEINSIIENYKLYSNNIDIVNGLIKNVKKENGTWSSTNSFLADAYRNGLEKQVKDFFGTKKWNETPENFQTKILAECFELFSNQMKLNSERGEFAKKQTIDEILKTFLSDNFNVNEESLKKLYHPSAIEVYKKAKRSDVDGKKYLGSPLISSIKNPMAMRSLHQLKKVVNQLIKDDMIDEETIIHIEMPRELNSSNERVAIRQWNEILKDRRNKHSEAIKSIFKGEIKTEGCDDVNSNYNDYEPTETDILKYQLWIEQNKVCLYTGKTICLSDFIGNNPKFDIEHTIPRSRSLDNSQINKTLCCATYNRQTKKDRIPFECHNHEGILPRIKHWYAKVKDLENQIKDITKKVKAASTKDKRDKYIIERTKLRFEYSYYFNKYKSFTREEVPESFKNSQSVDIGIISKYGNLFLKTVFSKVYPIKGKTTANLRQMWGLNEKSRDNHAHHAKDAVVVACCTRDINDALANYYHELEQNEFYGKPKPSFSHRIPWEGFHKDVDEFDNNTLISHHTPDNLPIQSKKKIRKRGIIQRNANSEVKYKQGDTVRGTLHKESYYGAIKREEINKKTGETEEVVKYVKRQGIEMFKDADLKNIVDDKIKEIVTNGREQEKLIKKEIEDLKKQMKNAKDEEEQPLKDAIQLLENKIKNDLYVLPNKNGSPIPIKKIRYYTSDVTNPLFIKKHRDVSRHEHKQFYHAKNDGNYCMALYEGIDKMGKISRSNQLINVIEAGKYFKLSNVDKKLYPIAPEKDENLNPLKYILTKGKMVLIYDKSPNELFEMSEEKLLERLFEITQMDVEKSAEIKLLHHSEARDKKRITEYMGLKTGMKGGKNIGEHKKYPWIKIGVNSFDCFVEGYEFKLTPTGKINFLK

SEQ ID NO: 19640 - protein, 954 aa, unidentified
  REGION 1..954: note = Cas Enzyme sequence
EFNYNDKYPVVGSPTVSKLIEVFDAENWKDCKKVIQSKYKKQDNKTVDELVDEIWHTLFFSGDFVNDITSEKVKNFIRNRYSISEEKVNYYESISLKQGYSSLSKKAIVKILPFLEEKIIYSYAVFFANVDTIIGKEKWNENKQFIQDTIIDIISNYKDEILKIDIVNGLVGDFIKEYDNSNYDYILDDTDRKNVLEKIKVFYGKYLWDKMAETEKEILQKEIEITFQNQLQKRRFGGYYLSKPRIDEVIKDFLIQEFKVTKEQADKLYHPSAMDAYPQSQDGFLGLPFTDSIKNPMAMRTLFYLRKLVNTLLKEKKIAPDTEIIIELARELNDKNKRLAIERWQRERENENKKFREKLEEFAKDTNSKVTETDVIKYRLCQEQNNRCLYTNETINCEKLLGSNPQFDIEHTFPRSKSFDNSLVNKTLADKKFNQIKGNQIPQDLDNKYKQNFIHNTSHWKDSIESLEEKIEQQKYFSKVASTVEQKDRAIQQRHYLKLELDYWKQKLYRFTATEIKPNFKNSQLVDTGIITKYSELFLKSLFQRVFPAKGSMVADVRKSWGLNAKDRNFHYHHAIDAVVLSCMDKSIRDGLAEAFKESEENRYSDKFKIKKPWNTFTEDVNQLKNTIIVVHNHKNNIDKQTVKKLRKRNKIQYDKLGNVIYEKGQGIRASLHKETFYGAIERENENSEKEIWFVIRKPVTSAFSDAEVNAIVDEGIRSRILKHGIKNVKTDEGWILLPSETDAQGKEIKEMLIKKIRVKTRNTDLPKIKAQSHVSQGRRKEYKESYYATLENIFAMAIYETVNDKGKNEQFHKTISAFDLAKYNKGNSKLEMPVEENIIKNKAKKNEILIPLSKVLKVNQMAIFYENNPEELKTLSKENLSKRLFKITVFEGDGRIRFRHHAQGGADKDLKGESSLDFEKSAQKLRISLSNIKAIFEGKDFILHSSGKIDFLI

SEQ ID NO: 19641 - protein, 1124 aa, unidentified
  REGION 1..1124: note = Cas Enzyme sequence
MAKILGLDLGTNSIGWAIVDDIQNKILGVGSRIFPMGVENLGDGDNEMSKNASRTGSRGTRRQFFRRRFRKKKLLKALSENKMCPLVNNDFEDWKKTKQFPSDKLEEWFTLNPYELRQKALTEKLALEEIGRIFYHLIQRRGFLSNSRKGGSDDGTIFKGNAKEGKIGITETQEKIEDKTLGSYLYEIYPKENEPFKDGLERIRNRYTTRKMYVDEFELIWNKQSQFHSNLNEDLKTLFGGRKLDGYKEDGILFHQRPLRSQKHLVGNCSFEPTKTKCPISAIPFEQFRVWQWVNTVDYNGMKISNEEKERIVEFLFANEKPEFKKIRKVIGRESAEFKFNYKDDDKIVGTHTISNLSNKKYFGKKWFEFSDKEQEDIWHVLYFFDSKSNLKDYAIKNWHFTEEQAISISKFNVKDGYASLSRKAIDNILPFLQMGFTYDVAVVLGGIKNSFGLDWVNLSDEKRNYFYDNVYEIIRSKNKGGFIDIIKDILRKDYNLLDNQMKKLYHHSATIDVNELLEVLPTGKEADKEIQTIKNPIVITALFELRKLVNELINEHGVLDEIKVEMARDLKISKSQRNKIRKDQKRLERENDRVKEEVLKYTRLSHDNILKFKLWEECKKTCPYTGLTIPVNELFTNKWQIEHIHPWSKSLNDSFSNKTLCLGTKNIEKGNQTPFEFYGNDEASWSAIKERALKLFSDTKEYPNSYQKFKRFVQQKFDDDFTSRQLNDTRYISKEAKNYLSKVCKKVMVSPGQATSNLRQKWGMNNILNDENEKTREDHRHHAVDALVMACTKVAYVQELSKWNRYNRNSELKQFPLPWETFRFDAEKAVEKILVSHKKVSNDITIRKHKCEKNGKTHINVGVAARGQLHKETVFGKRTFNGEEAFHVRKAIDTLTTLKQVEKVVDETTKKLILKRIEELGGIEKDKIPANTFFIVDENGIKQPQIYLPNKNGNPVPILKVRMKENFSGAEKLKDNINQWVNPRNNHHVLIYKDEKGNLKEEVVTFWTVVERKRTGQSAYHLPIDGKEIVTTLHINDMFLLGLKDDEINWENPDYDVLKEHLYRVQKLSSKFYEFRLGSESSIQKNVLPFYRRITGYGEGIGGWLTHNPIKVKVSVAGKISKI

SEQ ID NO: 19642 - protein, 1461 aa, unidentified
  REGION 1..1461: note = Cas Enzyme sequence
MAKILGLDLGTNSIGWAIVDKDDNDFSLVDKGVRIFTEGVKSEKGIESSRAAERTGYRSARKLKYRRKLRKYETLKVLSKNGMCPLSIKEVEEWKKSGFKEYPLNPEFLKWLRTDEESNVNPYYFRDKASKQKATLYEVGRAFYHIAQRRGFLSNRLDQSAEGILEEHCPKIQSIIEDINSSDEILEELKDYFFETGILDSNEKSSFAKDLDEGDKKLVSLYKSLQAIVKKNDTDFEKCKSEIIERLNKKDVLGKVKGKIKDISQAMLDGNFKTLGQYFYSLYNKERIRNQYTSREEHYLAEFITICKTQGIGSINEMEILPEKKFENLAKDLYKAIFFQRPLKSQKGLIGKCSFETSKSRCAISHPDFEEYRMWTYLNTIKIGRQSEKTMRFLTQDEKLKLVPKFYRKNDFNFEVLAKELVEKGASFGFYKSSKKNDFFYWFNYKPTDSVSACQVSASLKNVIGEDWKTKTFEYKTINSKKEQVTRTVNYTDLWHLLYAPTSKDEIYLNEFAKNKLGFDPKNAKAFSKIKLKKDFASLSLSAITKILPYLKQGLLYSHAVFMANIENIVDTDIWNDINQRKFIQSQIAEIVENYTFEKNQLEIINGLIRDSKLKEEYYSKEAESIYKKDLVDKLMSFYKYNSIENESDQKSIHDNLFPVFIEQLKKHEYIKVKRLDEKVLEFLSGENEDGQVFCNNSKNLKKLYHPSDIDVFKKQIAQDENGNETGQLILGSPLTPSIKNPMAMRALHQLRKVLNTLILEGQVDENTRIHIEMARELNDANKRKGIQDYQKDNKDFRINAIKEIKKLYFEETKKEVEPTEDDILRYQLWVEQDMKEIYEQGNNISISDIIGSNPSYDIEHTIPRSISQDNSQMNKTLCSQRFNRDVKKQKMPVELTNHLEILPRIAHWKEQANNLSREIEIISRSIKVVATKEAKDKKIRRRHYLTFKRDYLQGKYDRFIWEEPKVGFKNSQIPDTGIITKYSQAYLKSYFKRVESVKGGMVAEFRKQWGIQESYIDENGFKQYKAKDRSKHTHHTIDAITIACMTKDKYDVLAHAWTLEDEQNKKEAKVIIEKAKPWKTFKEDLLKIEDEILVSHYTPDNVKKQSKKIVRVRGKKQFIAEIKRNEKGKAIPKKDANGKVIYKLDEEGKKIPRFQQGDTIRGSLHQDSIYGAIKNPLNTEEIRYVIRKDLESLKASDIENIVDEIVKEKVKEAVANKILSLSSNAQQKNKIDGTVWMNQEKQVLINKVRIYANSVKNPLEIKEHSLLSKSRHEHKQQVYGQNDENYAMAIYELDGKREFELINNFNLAKLLKQDQGFYPLHKEKEVKGKKVLIPIAKSNNIDIVLKKGQQVIFYDKTIEKPKDISEIMNFKGRKYIIEVLSIQRQKDKKTGKINEYGIIQLRYYKEARKSEEISKDNFKPDGAFKLGEYKPTRKMNHSQFSAFVEGVDFKVLPTGKFEKI

SEQ ID NO: 19643 - protein, 1531 aa, unidentified
  REGION 1..1531: note = Cas Enzyme sequence
MAKILGLDLGTNSIGWAIVDKNGNDFSLVDKGVRIFTEGVKSEKGIESSRAAERTGYRSARKLKYRRKLRKYETLKVLSKNGMCPLSIKEVEEWKKSGFKEYPLNPEFLKWLRTDEESNVNPYYFRDKASKQKATLYEVGRAFYHIAQRRGFLSNRLDQSAEGILEEHCPKIQSIIEDINSSDEILEELKEYFFETGILDSNEKSGFAKDLDEGDKKLVSLYKSLQAIVKKNDTDFEKCKSEIIERLNKKDVLGKVKGKIKDISQAMLDGNFKTLGQYFYSLYNKERIRNQYTSREEHYLAEFITICKTQGIGSINEMEILPEKKFENLAKDLYKAIFFQRPLKSQKGLIGKCSFETSKSRCAISHPDFEEYRMWTYLNTIKIGRQSEKTMRFLTQDEKLKLAPKFYRKNDFNFEVLAKELVEKGASFGFYKSSKKNDFFYWFNYKPTDSVSACQVSASLKNVIGEDWKTKTFEYKTINSKKEEVNKSVNYKDLWHLLTVATSDIYLNEFAKNKLGFDPKNAKAFSKIKLKKDFASLSLSAITKILPYLKQGLQYSHAVFMANIENIVDTDIWNDINQRKLIQSQIAEIVENYTFDKNQLEIINGLIRDSKLKEEYYSKEAESIYKKDLADKLMSFYKYNSIENESDQKSIHDNLFPVFIEQLKKHEYIKVKRLDEKVLEFLSGENEDGQVFCNNSKNLKKLYHPSDIDVFKKQIARDENGNETGQLILGSPLTPSIKNPMAMRALHQLRKVLNTLILEGQVDENTRIHIEMARELNDANKRKGIQDYQKDNKDFRINAIKEIKKLYFEETKKEVEPTEDDILRYQLWVEQDMKEIYEQGNNISISDIIGSNPSYDIEHTIPRSISQDNSQMNKTLCSQRFNRDVKKQKMPVELTNHLEILPRIAHWKEQANNLSREIEIISRSIKVVATKEAKDKKIRRRHYLTFKRDYLQGKYDRFIWEEPKVGFKNSQIPDTGIITKYSQAYLKSYFKRVESVKGGMVAEFRKQWGIQESYIDENGFKQYKVKDRSKHTHHTIDAITIACMTKDKYDVLAHAWTLEDEQNKKEAKVIIEKAKPWKTFKEDLLKIEDEILVSHYTPDNVKKQSKKIVRVRGKQSYSIKSELPKGYQNKVEGKDYFKLIFDSEILYKMPKNKEKQTDTYYEELPKNYLNKIEGKDYFIIKTNEETFYKIPKFNLGDTIRGSLHLAGNYGAIKQPEIDEVTRKPKHSTNGSFILKKDIKGNEIIKFVERKSLSKLSENDISNIVDDVVSGKIQKAILEGIITFKTVLGKKVAVLKDGATIWMREPNEEKELVGIPINKVRVFIPNVKNPLEIKKHSLLSKSRFEYKQTIYSQNDENYAMAIYELDGKREFELINNFNLAKLLKQDQGFYPLHKEKEVKGKKVLIPIAKSNNIDIVLKKGQQVIFYDKTIEKPKDISEIMNFKGRKYIIEVLSIQRQKDKKTDKINEYGIIQLRYYKEARKSEEISKDNFKPDGAFKLGEYKPTRKMNHSQFSAFVEGVDFKVLPTGKFEKI

SEQ ID NO: 19644 - protein, 1125 aa, unidentified
  REGION 1..1125: note = Cas Enzyme sequence
MNNILGLDLGSNSIGWSLVNADSQKFINTGVRIFPKGVNEEKGNESSKNEDRRKARGIRRQYFRRRLRKKFLLRFLIENELTPITASDADYWIKYGKFPDNVDIRAWFNLDPYQLRADAIEHKLSNYELGRVLYHLSKRRGFLSNRKSATKEDGAIFKGDPTSGKTGIIETRQELENHKTLGSYLASIDPHQTRLRNRYTTRRMYVEEFELIWEKQSSLNSSLTKEMKVALCEGAFNETQLPTEGILFHQRPLRSQKHLIGKCSLISNKPRALLAALEVEEFNMRKILNTIAYKDILLSNDQKEQAWLYLQKQKKAIDFKILKKYLGFEGLQLNYLDNAKLPNVNSHYHLQAIFGKEFWGLNSKEQNDRWHLIQSSDNADWLNKYAVENWGLNDKQIAILKKTHFKEGYSAYSLKAIKLMLPYIRQGYNEYLAKLFAGIVNAFGDEWELIDNEEKEIIVNTVEGFCLDKEATVIQQIRLFLKGQYGLTDKQLKKLFFNQDVRSERELLNKFPEIEEDLRNPIVQTALNELRKLINDLIETYGPINTIRIEMARDLKNSAKKREEIKIKQAQQQKENDKSKAKLEELNINPSRDNVLRMKLYEELKKKICPFTGKTISLSKDEGGNNLALFSNRVQVEHIYPWSRTLNDSFSNKTLCASATNQDKGNNTPYEYFSGIGEKSLLEAKERAFQVLPYHKYKHFIKKEIPDDFISQQLNDTRYISKVALDKLKDIAPNVNINTGRLTASLRHLWGLNSILNPSKDSKTRNDHRHHAIDAIVVAFSTTGYLQQMSKLAKYSHHMKDRSIELPWETFRADVEEQIENILISHKRNTKVLSRKTTRIKKERSQNGKKETISYTFKGGGPRGQLHNESIYGKRKNPITEKEAFHIRKPLSEINSKTKVDKIVDPTIRNLVLNHLKNHGVDTSKKKFNFDSSIFFKVNEDNSKESVLLLPNKNGTKIPIKKIRIAENIGNAESIDKDQTKWVDPRNNHHIAIYKDMNDNYFEEVVTFWVASQRALQGEPIIKITYQNGAKLVTALEVNKTYLLGLGIKDKYDFKHFTKYELSQALYRVQKISSKYYSFRLVSESTIDNDFDPYYKSIQSFKSWLINSPTEVKIDRIGNIQWLGS

SEQ ID NO: 19645 - protein, 1356 aa, unidentified
  REGION 1..1356: note = Cas Enzyme sequence
MSKILGLDLGTNSIGWAVVETEDNKTFTPVDKGVRIFQEGVKIEKGVEGSKAAERTGYRSARRLKYRRKLRKIETLKALVQFDLCPPLSTDELNNWRYKKDYPTNEAYRNWWLTDNDANIETRKEQTKNPYYFRFLVATKKLDLRAQENRYALGRAIYHMAQRRGFLSNRLESTKESEGAVKSGIAEISKAKGERTLGQYFYDLYLKGDKIRDHYTHREDHYLEEFNHICKTQELPTEQIDILRKAIFYQRPLKSQKGLIGTCPFETNKPRCAVSHPLFEEYRMLCFLNNIKIKTPDDEKLRVLSEKEREDVMPVFYRKSKEHFDFDDIAKQLAPKKQYKYFKSADKNPEDWLFNYTMKTTVSGCPVSARFKSVFGDDWKSLSIPHIREKDKKASFINIDDVWHVLMTFDSDEKLAAFATEKLKLNEEQKKEFVNIHLKQDFASLSLKAINKILPYLQQGLIYSHAVFLANMEAVIPADIWSDKENRELIQNEIHQIIQTQNEEKQIVDIVNGLIKHNKEADAVWSKEAIDLYQADLLKQIKIYYGENTFEAFKLERKERIEKNAFELFSHQMQKKMGCGEYAKMQRIDDRIKSFLADQFEVNGSAEKLYHPSAIETFKPAKKSEDGNYYLGSPMTNSVRNPMAMRALHQLRKVVNELIKAETIDESTTIHIEMSRGLMNANERKALQNWQRKRETERKKYAEEIKKHFDAQGIKAEPNESEILKYQLWEEQKHICIYTGNNIGLSDFLGGGTSYDIEHTIPQSLSFDNSQVNKTLCENKFNRADKRNKIPYGLTNHEIILERIGHWKINFENLDKQIIQAVRSAKGAATKEAKDKAIQKRHELTFERNYWRDKYQRFTMRDVPSGFKNSQLVDIGIITKYSRLYLQTLFNKVFTVKGSTVADFRKFWGLQDVYEKKARVNHVHHCIDAITIACMTKPQYEKLANFYHDWEGLREDGHDKKPVFDKPWPTFTEDVKKIENELFVSHYTPDNLPKNNKKILRKRGKKQYDSKGNPIIQTGDSVRGSLHKDTFYGAIEREVENKKGELEKVIKYVVRKKVGDLSDADLNNIVDDKVREIVEEARKMEKSLLKKIEGLRKDLQKAEEHDESDIKSAIVAIEEHILGLYCMPNKNGTPVPIKKVRLFQPTVTNPLAIKKQRDKKKDGSKEYKQNYYAANDGNYMMAIYEGKDLKGKVKRDFELVNIMKAGEYFKKSVQSTLQPQGIDQFEGLFPKFKINGKLELPHKANIKIGTMVILWENTPEEVWDLEMKDIKKRLYKVVGLSINRIKSGNKFYEFGMSVLRFHQEANAASELKTQDGMFQHDEPYIPQRKMSHNQFDALVEHVDFKISTLGKIIKIK

SEQ ID NO: 19646 - protein, 1357 aa, unidentified
  REGION 1..1357: note = Cas Enzyme sequence
MEQILGLDLGTNSIGWAVVERENKEFRLVKKGVRIFQEGVKIEKGIESSKAAERTEHRSSRRLKFRRKLRKIETLKVLSEHGFCPRLTLEQLIDWRYKKIYPANIAFRDWLRTDINTSKDERQRQIRNPYYYRNLAVTCKLNLNSEEDRYKIGRAFYHIAQRRGFISNRLEGTKESDGAVKESISELNVAKGDKTLGQYFYSNYCNNEKIRNVYTHREEHYLQEFNTICEYQNIPGEIKEKLYKAIFYQRPLKSQKGLIGKCVFEADKQRCSASHPKFEEYRMLCFINNIKIKTPNDDKLRFLNEDERGKIKPLFFRKSKEVFDFEDIAKAVSPKKRYKFFKSPNTEPGDFLFNFSMKTAVSGNPVSSRLKELFGDSFMDVEFEYTREKDGKQSVIDINDIWHVVYTFDSSDKLKEFGGKRLGLNDEQAESFVKIHPKREYSSLSLKAINKILPYLREGLIYSHAVFLANMEQIIPDFVWNDPQNKKIISEGIKRIIETQNEEKIIIDVINGLIKNARDKSYVWSDEAKGIYKKDLFGEIRSQLGEKKYSSFSVAEKQYIEKNSLGLFEEQMNKNMGRGEFLQSKRIEDRVKSFLSDNFDIDDSRLQLLYHPSAIEVYKPPYRAEDGKYYLGSPMITSVRNPMAMRSLHQLRKLINELIRNEIIDKDTKINIEMARNLMNSNERKAYQEWQRDRENLRKTYYNRIKEYYAYSGSNAEPSQDDILKYQLWEEQNHKCIYTGKEIAVSQFLGANPSYDIEHTIPRSQSFDNSQVNKTLCNNVFNRDIKKNKIPFELKNHEEILARVEHWKNKYEDLEKQIQNTVKQARGNIDKQKKDRIIQKRHRLRFERYYYYNKYRRFVMEDVPEGFKNSQIVDTGIITKYARLYLKTLFSNVYTVKGNTVADFRVLWGLNKEYIKKERVNHIHHCIDAVTIACITKESYENLAKFYHEWEYLEKAGMERKPKVNKPWSTFVEDIKDLEKEVLVSHYTPDVFPKQTKKKLRKKSIVKKNKDGVPIYQRGDTVRGSLHQETFYGAIEQEIQNKEGEKEKQIKYVVRKPLDDLDNNGIEKIVDDRVRNIIINARKKEKELRVDLEDLRKQMNNAEEYEERDIQREIEKIENDIKKLYCLPNKNGNPVPIRKVRVYTPMLTNPIHLKEHRDKSMKRRYPHKEQYHVANDGNYMIAIYEGKNEKGKTKRDFEIVNNLEAGEYFKLSVQREFKPKGVGKYEGLISALKENEDIQMPLKGILKIGTMIILWEDNPEEVWEIEQEEISKRLYKVIGLSNQRIKSKAGKINEYATIVLRFHQESRPSSELKVQDGVFVRNEDYKAQRKLNHNQFNALIEGLNFEISTLGEIKRMD

SEQ ID NO: 19647 - protein, 1157 aa, unidentified
  REGION 1..1157: note = Cas Enzyme sequence
MSRILGLDLGTNSIGWAIVDFNKQQVIDTGVRVFPEGINRDSSGKEISKNATRREARQMRRQHFRTRMRKKFLLDTLKEQGLCPKENKSFEQWIAKDPYELRARALDEKVSPEDLGRIFFHFSQRRGFKSNRKAGKEDSAIFKGSSKTDTISINETKEELNQGYRTLGELLYNLNPHEERRRNRYTTRQMYVDEFNKIWDKQKQYHPGVLTDELKHKIGHPEEGLLFYQRPLRSQKHLLGKCTFESYWFYDKNTKRWVEKGKPVCAVSHPEYELFRAWQFANTIKYDKDKPLTNEQRGKVVEVINSKDKRFEFQKIKKALGMENEFFNYENSHKVFGNKTHTKLSKLLLKEIWEQNKNDIWHCFFSYDKNEKLVEKLKRSYGLKEKDAKKVENIHLDQDYSRLSLKAIRNILPFLREGYLYDEAVLLGGVKNAFGEQWEDLSEEQHKFIRDNVESISAGKYKEGELIEKLREFLIQQFGLTNKQLNKLYHHSQVDTKDGNQNKLDSPPEIRNPIVQKALNETKRVVNAIINEYGKPDEIRVEMARELKQSKEARERQRLEKSQREEKNDEVRKVLDEYGLAHSRNNRHKYLLWEESQGVCPYTGKQIGIEDLFSDNQFQVEHIIPYSISLDDSFMNKTICEGKENQLKGNQTPYQFYKDNPDKWEEVKERAKNLIAPNNFRKYQRFISTQDYNLDDFIERQINDTRYISKAARDYLKSVCPKVYVTQGEVTNQLRHLWGLNAILQLPKKTSEVREGHYWAALDEQGEIKEMVRWGFDKRKEMPQKLAKKGELVYGFVRGGQFIPQKQRDDHRHHAIDALATACSKASFLRELSNATKQEKGFRYENFPQPWENFYNEATSAISNILVSFSANRKVTDTIKKTIKKNGKKYKSKGLAARGELHKESVFGRHKGENGQSYYHIRKPLEQITKKTHVEKIADPSVKAAVEQKLLENGVDLTKDYKIKGGMLFETDPETKQKKTRVYLPNKNGAPVPVKKVRIREVLNNARNLKPKSGVNQYVNPRNNHHVAIYKDADGELHEEVVTFWEAVQRKKENQSVFEPQPHKGWQLIETLQENDLFLMGLSNEEIRNNRENLNFLKDYLYRVQKISSMDYNFRHHSASTLDNPNQMIRIRSFKAWNSYNPVSVKQNILGQLTVNV

SEQ ID NO: 19648 - protein, 1261 aa, unidentified
  REGION 1..1261: note = Cas Enzyme sequence
MKTLGLDIGTNSIGWGIVDEAAGKIEDCGVYIFPEGVKKEKGNESSKAAERTSFRLARRLKFRRKLRKYETLKVLIKNKMCPLTIEELEKWRRQKIYPTSKDFLNWYRTDELKNWEPYFLRKKCVEQKAEPYEIGRSLYHIAQRRGFLSNRKETTKASEGEVSKSIDELSSLMGDKTLGQYFYELKQSGEKVRGKYTSRKEHYEKEFNKICEVQGFSSELKSDLYRAIFFQRKLKSQKFLVGKCTFEPNKSRSPISHFEFEEFRMLSFINSIKLAKNSREDENSDFEFLTDEEKEMIKPLFFRISKPTFQFADIEKKLKGKNEFWKFNYRKETNVSGCPVCAGLKNIFGDDSSDESWKDKKIGQYDMNDIWHVLFDFDDEEKLLEFAKEKLFLSDETARRFCTIRIQQGYANLSLKAIRKINPFLRKGYIYSTAVFLANIPTMIGQDAFLQNEKEIEDSVKNIIGTLRDKNNIIVLANRCIESVFKDKSNDFRFEEWDKSVVENSAQDLFGKKKWNEYDEEKRKNIISQVSEKVEDNLKIAVGKNPNDYKYPLLRTDDLILDYLNQKGFTVKGKLYHPSDTDYNFESPVQADDGKIYLASPRSQSVKNPVVMRALHQLRKLVNYLIKTGKIDSSTKINVELANDVNDKNRRKALAEFAKDSEKNNADARKKIEELCNEAGFKVVPTESDVKKFRLWKEQNETCPYTGKHISFTDLFGPLPKFDFEHTIPRSLSYDDSLENLTLCDSEFNRNIKKQKLPSELPNFEEINKRFKKFYEDKIDNCLKIIERSTKLGGSYEEPTAKDSRIVKKHKAEYELDYYKGKLRRFSATEVTSGFKHSQLNDTRIITKFSLSYLKSIFSYVQPVKGSMTDTFKRQWGLMERNEVKDRSNHMHHTVDALTIACVNRGKFNLLSEAIKNSPDGKHLKFPKPWATFDADVLNAVQYIIPKYFSDENSLRQSKRIMRNRDGKPVLKNGKPVFVQGATARGSLHKDTFYGRIKTVPEKGGKSEMIFVQRVLVSTLDEKSAEKIIDKGIRETFEKNLLNGIQTLQEIQTNGILLPFKKDGRNVFVKRIRIKAQPTSPITLKEHHNVISKNPKDYKQNYYVVNDENYLLAIYRGKDEKGKDVSDYKICNLLDAVKSRQNKTELYPDFKEKKGINLKLYKILKPGKIVILQNDIQEDVFALPKEKLWKRLYRIAGLATSGNDIQIKLVHIISARPWKYMKGEKDLNAGTECLMYLTSNFKGLVEGQDFAVSPIGEIIRK

SEQ ID NO: 19649 - protein, 1072 aa, unidentified
  REGION 1..1072: note = Cas Enzyme sequence
MPTYLGLDVGTNSVGSAWVDTDRRLVELAVSVFPAGVDDRRESRAKTRRKMRSQRRTIGRRAARKRRLYAELFRAGLLPAGEPEHPALHPLMDSEPWVLRNLALTRPLSPHEFGRILVHLNQRRGWQAGLEDEDDEEEKKDQGKIKEAIEATYAEKARRNAETFGQMIAQCRAERAHANYNDPVRNRQGAYGFYADRDLIREEFATLWQRQAAFASPLASILTQPLRETLEGILFFQRKTYWKTSTLGRCELEPTDRECPHADMSAQRFLMLETVNRLRLNGEPLSATQRDAVVNLLSTQERATVTDLRNALHLKHRRDQLNIQAEKRPEINTDWFSAAIVRGVFGAEPWKALAERRRQSVNRAIQKFGQGDEEKLRRGARDWWNLTPEEAEKLIAAWRRRPRKNASLSRKAILNLLPYMENGDDVSTAKQKCGYPPQGFRLNKATRHFLSKHPEQLPPPPDLPNPIVRKAIHEVRRHVQAYIQRFGRKPDRIVVELAREARQPKKVRDLKLDANRERERERKQILDSVVRPNNIDESQWDKAIDRVLLHRRQKGMCPYSGLGLGQAPCISEHDSATGLGVEVDHIVPYSRSFDNSLDNKLLCRREANRNKGDRTPKEWLTPDQFAELKTRLQHFEKTYPRAWDNLTRDAPTLDDFVASQLSDTGYITRQVLAYLRETLFADRPHEVLCTKGVYTAILRRDWGIMEEKRRDDHRHHALDAVAIALTDRPRLHALARIAQAQEAARARLGQWPKREPLPPPWLEAFREQVMARCADLIVAHRPQQGITGAFHEDTLFGAVPGYEGVFTRRIPVSLLTPKMLQDPKEAIIGGARTLIMGKGGVVRDARLRRHIRNWVEDRLRARGIGVPVDKLSPKEMQTLLKEDKLTMPSGVPIRRVRLLKKIEDPVAIESDPAHPRYYIGGNNHHLEIVQDERTGRWRARGVKMFDVARRVHPPKGRPKLPAILGPKAPALAQLGLLSKADELFYRGARFVMALCKGDMIAMADPESRSQAHFVTVKVNPDSVELVEHWDARPAAETERQQPRRLIKLPPERLRALGARKVRLDPLGRLAPQ

SEQ ID NO: 19650 - protein, 1129 aa, unidentified
  REGION 1..1129: note = Cas Enzyme sequence
MNESTSQKSTLVFGLDLGTTSIGWAVVRPEQEKIVGMGVRIFPIGVNEDDYNKNFKETSKSKDRRTARMARRRKHRLHLRRENLTKLLKIRGLYDENLPQNESIYEWRSLAVSQKIPLAQLGAILLHLNKRRGFKSSKKDASIKDKEADKELDGIKGNIQQLEKAIQEAGFQTMGQYFHHLLSKNKDAQKETGNLLRVRGRHTSRELYQKEFDTIWQQQATHYPEILTDKFRKEVRNRCIFYQRPLKSAKNLIAKCEFEHLRRVAPKASFVFQEFRIWQLLANLRVTVPSQKRYGDTLTVEEKQKGAKALQTVESMTIANLCKHIFGKSDAKLQYEEGDKVKGNTTYTKLINALTEDWWNQQSTEKQHLIWHTAYFAENEQWLYDYALKKLGMNPAQASAYSKLTFEADYGRLSDKAMKGILAHLKIGQDYSEACLSVNYDHSKNQQAFSEADLLPYLNHLEKNELRNPIVQQAISELIRVVNALLKEYGRPDVIRIEMAREFKQAKEKRENRLRDNKARRERRELHAKFLSEKLEKEVLPESDLVKKYELWLELGLENTHEKTFDKDLPIFLNFTRKIDDKTQTKYRLWLEADRRSPYTGKTISLTALLQENSPIEIEHIIPYSRSMDNSWANLTLSEKWFNNEKGNQTPYEYFQKRPEHERIAFRERVQIFPKAKREKFLAANIEQDFNPNQLTDTAYIARYARGLLHKICLKVEPTIGGTTAFLREKWQLDSLLAPKKRVEQIIKEQNEGLVVKMSKNRGDHRHHAVDALVIALTDIRYVQILSRDSQFNNGKFDNPKIPKEPWKEFKLQVGDFLKGLYISHRSKNRLIQKRALKKKDKNAPKSYSTAIRGQLHKETFYGARKFPHHFSKKFAFGEEVFEERKALEALKDKDLDAILDLKVRQQIEAYAAQYNKGKVEGAFVNLKENPLWMYSTKGAKVPIKKVRLAFKASSLIEVHPKTFVESGDNYVLGIYRSDDGKITEVELVKFFEAVKRKKAGSAILPSHKTKKGQQLPLVYTLHKGDMFILYEEHEDAIEWNNPAYLLRRLYKVSIVAKNGAVATIYLVHHRSARPNEYTPQPVPEGKTDLGKPKVYRGSGNFKGVPVRIDRLGNIVRLSDGKVIKGGGQ

SEQ ID NO: 19651 - protein, 994 aa, unidentified
  REGION 1..994: note = Cas Enzyme sequence
MNAYRLGLDLGANSVGWILIGLDGDKKPCNIIDIGVRVFPEGVNRDTAGAEIGKNEQRRLARGSRRQRARKVMRREALLHVLKTNDLLPDNDNELDAIFEQCPYRLRKDGLDSKLTRHQFGRVLFHLNQRRGFKSNRKTGKANENSVVLKACNELQQRIEAANCRTLGEFFAGLDPEQDRYRNHYTFRTMYENEFDLLWQSQKKFHPDILTDDLYEKIRNGIMFFQRPLKPSDELIGDCSLEENEKRCHKGHFYARRYTMLQDINNLEIVGRDGSSRKLTDPERAAVLELLEQSKDRTYDQLRKALVPFGMIDGDRFNLEERQSDNKKLKGDAFATAMRNKNIFGRKRWDALSLTEQIAVNDAVLELDDDELAARMVEDYGFNEKQVEAILKVPLPQKYMSYSLKAIQKLLPFMEQGLLLHEAKEQAGYKQETIKDKNACDKLPLPDDLRNPIVNQAIFQVRKIVNSIIREYGKPDKIIIEMARDLKNSKKQRDEISKKQKENQKTNDRAREMLISSIGFSNEPKHDDILKYKLWEECGRQCPFTGKIISRDQLFGPTPEFQIEHILPYKRSLDDSYMNKTLCHVDVNREKGDRLPYEAFGHDSERYEAMLQRIAILPYPKRRRFTQKTIDLDKCIERKLNDTRYISREVIRYLGQLGVYVQGTRGEATADLRWEWGVNDILNPLADSKNRDDHRHHAVDAAVIAVTEPRHLKELARFKYTHERDTFDQPWPGFRKELEEKVSQINVSHRVSRKVSGRLHEDTSYGPTEDENTYVYRKPLESLTTAMIGKIRDDKVREIVKQRLAQFGIDPDQKGAKIAKEVWAKPLYMYSKKGVKVPIKKVRIVETFKNLIPVKDKVGQVYRYVDSGNNHHIVIFEYIDNREKIKKGFEVVPLIEAARRLKNREPVINKQRSAGETFLNSLSINELVLIQNKEGVKDLYRVQKMDVTGLIRFRHHTAASVGNENKLYIDKRIGALEFKKVTVDLLGRIYPAHD

SEQ ID NO: 19652 - protein, 1242 aa, unidentified
  REGION 1..1242: note = Cas Enzyme sequence
MSQRILGLDPGTDSLGWAVVEKHDDGTYTLIKKGVLRFDAGAEGDNQGKTPAAIRREYRAARRRIYRRRLRKIELLKVLVAHGLCPFIPADDLKSWRYRKVYPMIKEFLDWQKTDEKGNRNPYLFRYLCLTEDLDLSTQEDRYILGRALYHLVQRRGFLSNRKDSLTVKSKDENAGKTKGNAKTKEDELGEIKKGIKQLEQDMADAGCTWLGQYLHLRYVGAIKPNTIRLRGLYTSRQMYVDEFEAICKKQDLEKVLGKDEVDKLRKAIFFQRKLKSQKYTMGNCRFEKLHTRCHVSHPDSEEFRMLSFINNVKVMKKGYDFEPRPLNDKERALAIEYILSRKTSCKFKAIADVIAGKNNYYCYKDDESEKGSKVYGFNYSMDTEVPNCPFTYAMRQVFGDDWRTAITRTYTRMVTDKGNVKTLQQAVDDIWHVLHDFDDEKNLLQFAKDKLQLDEEKALKFSQIKMPREIASLSLKAIRNILPFLRKGLKYSHAVFMAKVPWIMGYHYTAEFENRLIDGITNCDKRHIRDYMVESISNVTRKKEYNITQYLYHPSMTDVYPKVEIPKDEAPQLGSPETRSFRNPTAMKALHQIRYVINTLLAEKIIDRTSMVHVEYPRALNNPAQRKALEGFNKWMKVKREKAENLIDEFKKETGREFSVTDDLILRVTLWLEQGGTDIYSTSSDIYDGSQIAFSDVINGECDIDHIIPRSKHGDDSQMNKVLTRAHFNRDVKKNRLPYQLRGFQEMKNNLACKFYYKPYKDLDKAVKSRHPKEQKEKENRYLQMLKRDYYKGKWERFTATKEPEGFSMWQGPGNAAITRYLGMYLRSFFYDPNNPEKKQVWIVKSPVTAKLRKMWGLQEEWEDKDRSNHCHHAKDAIVVACAGHGEMQDLYEWMKSHETGIPYKFPLPWPTFVADMNALHEDTVVYYRTKSKFDTFTLRRLKDLEKKYGKGKSREDYLYKRGLGVRESLYMDTFYACIKMKDEQGVERKQVVKREQLSKFAEHKEYIDRIVDKQVREAIREWVDGGCQGIPYMDKTHGIPINGARMTTSVKPSEVKKCRDLSEKEWKQNYLSKNDGNFCIALYKGSGKKKSYLLFSNIDVANWMKENKSKADLQTLIPESDADGLPLYAILDKGTHIIFHNGDKNEVRFWSQEELVSKLWYVTKYDIKGVIGCKFHQCGMESTLFKKNGKLKENNDEISKLPLVIANNTCIEISYGNYNNALVEGKDFTISALGEIKLKF

SEQ ID NO: 19653 - protein, 1242 aa, unidentified
  REGION 1..1242: note = Cas Enzyme sequence
MSQRILGLDPGTDSLGWAVVEKHDDGTYTLIKKGLHRFDAGAEGDNQGKTPAAIRREYRAARRRIYRRRLRKIELLKVLVAHGLCPFIPADDLKSWRYRKVYPMIKEFLDWQKTDEKGNRNPYLFRYLCLTEDLDLSTQEDRYILGRALYHLVQRRGFLSNRKDSLTVKSKDENAGKTKGNAKTKEDELGEIKKGIKQLEQDMADAGCTWLGQYLHLRYVGAIKPNTIRLRGLYTSRQMYVDEFEAICKKQDLEKVLGKDEVDKLRKAIFFQRKLKSQKYTMGNCRFEKLHTRCHVSHPDSEEFRMLSFINNVKVMKKGYDFEPRPLNDKERALAIEYILSRKTSCKFKAIADVIAGKNNYYCYKDDESEKGSKVYGFNYSMDTEVPNCPFTYAMRQVFGDDWRTAITRTYTRMVTDKGNVKTLQQAVDDIWHVLHDFDDEKNLLQFAKDKLQLDEEKALKFSQIKMPREIASLSLKAIRNILPFLRKGLKYSHAVFMAKVPWIMGYHYTAEFENRLIDGITNCDKRHIRDYMVESISNVTRKKEYNITQYLYHPSMTDVYPKVEIPKDEAPQLGSPETRSFRNPTAMKALHQIRYVINTLLAEKIIDRTSMVHVEYPRALNNPAQRKALEGFNKWMKVKREKAENLIDEFKKETGREFSVTDDLILRVTLWLEQGGTDIYSTSSDIYDGSQIAFSDVINGECDIDHIIPRSKHGDDSQMNKVLTRAHFNRDVKKNRLPYQLRGFQEMKNNLACKFYYKPYKDLDKAVKSRHPKEQKEKENRYLQMLKRDYYKGKWERFTATKEPEGFSMWQGPGNAAITRYLGMYLRSFFYDPNNPEKKQVWIVKSPVTAKLRKMWGLQEEWEDKDRSNHCHHAKDAIVVACAGHGEMQDLYEWMKSHETGIPYKFPLPWPTFVADMNALHEDTVVYYRTKSKFDTFTLRRLKDLEKKYGKGKSREDYLYKRGLGVRESLYMDTFYACIKMKDEQGVERKQVVKREQLSKFAEHKEYIDRIVDKQVREAIREWVDGGCQGIPYMDKTHGIPINGARMTTSVKPSEVKKCRDLSEKEWKQNYLSKNDGNFCIALYKGSGKKKSYLLFSNIDVANWMKENKSKADLQTLIPESDADGLPLYAILDKGTHIIFHNGDKNEVRFWSQEELVSKLWYVTKYDIKGVIGCKFHQCGMESTLFKKNGKLKENNDEISKLPLVIANNTCIEISYGNYNNALVEGKDFTISALGEIKLKF

SEQ ID NO: 19654 - protein, 1068 aa, unidentified
  REGION 1..1068: note = Cas Enzyme sequence
LIWDKQRKYYPHLTGSRKEYDEICKLSVEDKRAKLKIFKETYYWKIKNQTIFFQRPLKSQKKFIGKCQFKKNKRTAPASSLLFQEFRIWKQLADIRYTDKANDIYSQPLPPQWKQQIFEYLQMNLSLNLREGNKKKDGTRNTDVLDIIGLPNKKNFQFNYDGNEDEKIFHGNKTLYAIYTACGEEKFKQLKAENKLEKLWHILYMAKDDEWLQDTLTYKWGFDDGTAKKLVEMGLEEGFANYSSKVLEKLLPYLKDGNDEYEALINAKYKQSSDDTPAIEILNKKIKQLSNNELRNPVVEKAVGETIRLVNTILKLNDIDQEVFTIRIESTRELKKPKQEREGIRRKNLDTEKRREEYARFLNEKKEKGELNFSRYIQKNDSIINKFELWLELGADKNDPEFKAFENIVERKDREKHTLWLDCNRICPYTGKIISLSKLFSPEIEIEHIIPYSWSLDDSFSNKTLTFGYINKEKANKSAYEYMKGKGEEEFKIYQSRVKGNKQFSKEKIDNKFLNAKPEQTFTNAQGRNASYIAVYVRKKLQEVCRDVQFTNGFATSELRRNDWRLGSLLDKVRYEEETGINIDKYTKEFANYKRDFETYKKRKANSSDVLKTDWRNLTQEITAEYEAETKNPIYEWWLELQEFDKFRGAKGKKDRSDHRHHLLDAIVIAMCSPSIIQRLSTLNQLREKQGATLYDEKGELTRERIDLPIPYNEIKMALESILVYHKPEQRLITAKQNRIHKKKHSKEDLSVIKQRTIAPRGSLVGDNFYGKLKNPQHQGFAKNDVFVKRVSVNGENFKNKKSLDKVVDKNIRKILELRLDKYEDKGEKAFSEEMLFSDPLFVYSTTKYPNGLPDNPTSRAGTPLPAIKKVRIANKNSRNLIQLVAKDEEKNIVNSNRYSEADGNYVMALYEKKETDKKGKPKIKRDFEIVSFFKAVDRRRKKEKLFADEKEQKDGTFLPLMKSCPYLKAGDFVIMYEYEESEIDWDVKEELMKRLYKVTQLSSKVVNNVYEFGDIFFVKHNISSSNAKYESAGYVNTKERKFLQNSHIQLKAIKVSRDRTGNIKPLK

SEQ ID NO: 19655 - protein, 1297 aa, unidentified
  REGION 1..1297: note = Cas Enzyme sequence
MAKFILGLDVGTNSIGWVLLRDNKVFDKGVVIFPIGTNVDERGRETTKNMVRGTYRRTSRTNFRYKLRRKDLKRFLTTLNMLPTFLNTFNVKEKYQASELYKLRADALNSQIPIEEIGRIFLLINKHRGFKSNSKILSEAKDDEGVVKADINGLSEAMNDNGARTIGEYFHKMYEKSSKLFNDGRWHNIDEPFDERSFDNEGNFLLHNSRGIRREGRFTGREMYATEFDLIWDKQRKYYPHLTGSRKEYDEICKLSVEDKRAKLKIFKETYYWKIKNQTIFFQRPLKSQKKFIGKCQFKKNKRTAPASSLLFQEFRIWKQLADIRYTDKANDIYSQPLPPQWKQQIFEYLQMNLSLNLREGNKKKDGTRNTDVLDIIGLPNKKNFQFNYDGNEDEKIFHGNKTLYAIYTACGEEKFKQLKAENKLEKLWHILYMAKDDEWLQDTLTYKWGFDDGTAKKLVEMGLEEGFANYSSKVLEKLLPYLKDGNDEYEALINAKYKQSSDDTPAIEILNKKIKQLSNNELRNPVVEKAVGETIRLVNTILKLNDIDQEVFTIRIESTRELKKPKQEREGIRRKNLDTEKRREEYARFLNEKKEKGELNFSRYIQKNDSIINKFELWLELGADKNDPEFKAFENIVERKDREKHTLWLDCNRICPYTGKIISLSKLFSPEIEIEHIIPYSWSLDDSFSNKTLTFGYINKEKANKSAYEYMKGKGEEEFKIYQSRVKGNKQFSKEKIDNKFLNAKPEQTFTNAQGRNASYIAVYVRKKLQEVCRDVQFTNGFATSELRRNDWRLGSLLDKVRYEEETGINIDKYTKEFANYKRDFETYKKRKANSSDVLKTDWRNLTQEITAEYEAETKNPIYEWWLELQEFDKFRGAKGKKDRSDHRHHLLDAIVIAMCSPSIIQRLSTLNQLREKQGATLYDEKGELTRERIDLPIPYNEIKMALESILVYHKPEQRLITAKQNRIHKKKHSKEDLSVIKQRTIAPRGSLVGDNFYGKLKNPQHQGFAKNDVFVKRVSVNGENFKNKKSLDKVVDKNIRKILELRLDKYEDKGEKAFSEEMLFSDPLFVYSTTKYPNGLPDNPTSRAGTPLPAIKKVRIANKNSRNLIQLVAKDEEKNIVNSNRYSEADGNYVMALYEKKETDKKGKPKIKRDFEIVSFFKAVDRRRKKEKLFADEKEQKDGTFLPLMKSCPYLKAGDFVIMYEYEESEIDWDVKEELMKRLYKVTQLSSKVVNNVYEFGDIFFVKHNISSSNAKYESAGYVNTKERKFLQNSHIQLKAIKVSRDRTGNIKPLK

SEQ ID NO: 19656 - protein, 1061 aa, unidentified
  REGION 1..1061: note = Cas Enzyme sequence
MSLLFSFDQGANSIGWAVIDKEKNALIDSGVRIFEGGVENLGTRKETSKNVKRREARQRRKQLRRKKFRLNKIKDFFISQFELNENNIKFKISDESPYILRAKALDNKLNIPDIFKTCYHIAKHRGYKNPRSIFSPENETEGTIEKGDEKSGKVGVNVIKEALEGGKFRSIGEYLNSLDPHNQRRRNRYTLREHYEIEFDLIMSKQQEFYKNILTDKIIKQLRAIIFFQRPLKSQKHTLGHCPFEKNKSRIPMSHPIYQEFRMLQQVNNLKLKINQRIDSDYQLTQSEQEFLLAHLEINSSLSLSKSNSKLKKIIGINHKGNMPTNFDHQKKLNGCDTLTKLKKCLGDEYIRLSYESNTDDFLKLYHFIYSANRDNKEKFLNKIKDKFELSDKIAENLFAVKLETGYGNLSNKAIKNIIPYMRQGQRYDQACESFGQLCTENGNNAKAIAYRHNLYEETKILDTLPKFKENGVSNPVVIIAMTELRKVTNALIKRYGLPDKINIEVARNMKMSSKQRVDEISKIDKNRTQNEEDTKEIISFNVFSENATPKKNDLIKLRLWKECNQICPYTGKSISKSDLFNGEFEIEHIIPLSKSLDDSYMNKTLCHKDANHKKSNRTPFETWAGSNEWNNILLRAKELPKSKFDRFKTTSTEEWFDAKGNGDFINSQLNDTAYITKISLRFLKNICKEIVPVRGNMTAMLRNHWKLNDILWQTHSDSLLEEMPKGEKLRLDHRHHAIDAIVIGMMDRALLQNLSSYTSVNGSMSLKYKHDRFELPWVGFKEAVEKSISNIIISHKVKQKPTGQLHEETFYGLSKDRFGNPILDHKSKKLYRVRKNLNTLTEKMIGQIADPKVKELVQERVASFGEIPYKSNIIFEKPIEYIDKKGKTQIIKKVRLLLPFSNSTQIADYNKHVQTGNNFMVIIYQDLEKNKQDAKVLTLYEASKIGKMNREGVNQFLGPNKELINTLKMNELVLWSDLPEGFDFNDKSLYRMLTKSIYRYQKASSDNTITLRNHLVSQVQISTSKNNKDQSYGRNFVIAHNFKLLKLKIDNIGFLSIADD

SEQ ID NO: 19657 - protein, 1207 aa, unidentified
  REGION 1..1207: note = Cas Enzyme sequence
MESNRILGIDTGTNSLGWAIIDRNGDICTLIDWGVHLFQEGVKIDKGIESPKASERTLHRALRNIYYRRKIRKIRVLTVLSQYGLCPALSPELLSGWRLKRVYPAIAEFMQWQATDDKAGVNPYAMRCECLHRKLDLSLQSDRYILGRALYHIAQRRGFKSNRKADGADDKELGKVKTGIGELSKSMESEGCQYLAEYFLKLYNRGERIRTRYTSRDDHYLAEFRAICTKQELDPALAAALEKAIFDQRPLKSQKFAVGRCPFEPSKTRCQISHPDFEEFRMLQFINGIRMRTPQDDELRPLSAEERASICQLFFRKTKKNFTFEDIAKSLSKPYGKGKIYGDIKTSPHQAVTFNYPMDTPVSGCPVTASLVSIFGDDWRNGIAQVYLGGAGKSKRQIVDDVWHALSFFEDADKLRTFAIEKLQLNEDDATAFSKISLPDAYASLSRKAIDNILPLLRRGMIYSYAVLLANLGKVMPSYEWQNDAMREAAIDRLIEHLDQYDPKTTPGTMDSWLKDYLKERYHISDSVLKQLYHPSQLEVYPRRQPDDDGTLRLGSPIISAIRNPMAMRSLHQIRHLINTLLESGQIDENTEIHIEFARELNDFNMRQAIYRDNARNRKENERIAAEIAKCRDIEIHDVPQRDILKYKLWEEQGHICLYTGDQIGLADFLGDNPLYDIEHTVPRSAGGDSTLENLTLCQSRFNRETKKTHLPSQLPGYATILERVRFMKDRAEDLTRQIRKLRTDPSMDKGMKDGVIQKRHLLELERNYWRGKYRRFEMESVPEGFSRRQGAGIGLISRYARLFLQSVFRRVDVIKGAATADFRKAWGLQDEYTKKERVNHTHHLIDAIVIACISAGDYNRLAASYHRSGYADSVKADIPAPWKTFQADIKSILDRTLVSSDTPDNMHKASIRHFKTAAGAIKRAKCDAARSSLHNDTIYGAIEQDGAVKYVVRRSLDSFSSEKDLNSIVDPAVRERILEAVHRLGFKEAMASTIWMNEEKHIPIKKVRCYAASVTRPLHIRPLRDASAKEYRRHHHVANDRNYAIAIYAGKDARGKEKRSFIIINNLDAATYFARRNHGEVQAPLIPETDSKGLPLYCVLKTGTKVLLYENSPQEIWDATPQELQRRLYKVSGISSMTVRKNSYGRIILQHSQEARPSGEIKAIAGAYKCGEDKRAAIFMIHTQFNALIDGVDFKLDILGKIIRLK

SEQ ID NO: 19658 - protein, 1095 aa, unidentified
  REGION 1..1095: note = Cas Enzyme sequence
MKYAIGLDIGITSVGYAVLELDSSDMPRRIERIGAHIFDVAENPKNGESLAKPRRDARSMRRRLRRRRHRMERIRGLLVSSGLLTKEELLHLYNNDPQDVYELRTRALDQAVTPREWARILIHLAQRRGFKSNRKSAGENDKEAGQLLNAVKENLALCAEKHYRTVGEMLYKDEKFAEYKRNKGENYQNTVSRDAIEAEVKTLFAAQRSFGSPVASSEFEEKYLSILLSQRSFAEGPACGPYSGNQIERMRGVCTLEKGEPRAAKASYTFQIFSLWQRLNHLRIRRGEQVRDLTDTERQELFLLAHQKNEMSYADVRKSLNLDPADVFVGLNYRVNDPAETEKKAKIRDLSPYHKIRKALDGVEKRYVEKLTPNQLDAVGEALSKNQSDEDITAELKKADIPDDAVEVLLTLPNFPKFGHLSVVACRKIIPFLEQGLTYDKACEAAGYNYKDDQKETSFTLPPLPQDDNGITSPVVRRAVSRTIKVINAIVREQGVSPVYINLELAREMSKNFKDRDKIRKAQQENADENERAMAALKEQLSEYCEGHAPSGQDLIKYKLWQQQDGVCPYSQQRIELDRLLEPGYVDIDHIVPYSKCFDDRMTNKVLVMTAENRQKGNRLPLEYMQGRQRDRFIVWVKNQSGIPFSKKQRLLMEHISNETEWKQRNLTDTQFIGAFLAKYIDQHLQFAPFTTSRQRHVTCVNGAVTAYMRKRWGLTKLREDGDLHHAMDAAVIACVTQGMIHQITNYAKYNECRYAEDCYVIDEETGELISQFPQFPEPWEGFRKELEIRLNGDPQTVRQMLNDCDPVNYRDVDLDTVKPAFVSRMCNQKVTGPAHKETAQSARRYATDGQTVSKRPLTELKLKDGEIEGYYNPSSDRLLYEALKARLQKFGGDAKAAFAAPFHKPCADGSEGPVVKKVKIAENASLAVEIYNGAAIAANDSMVRVDVFLVPGDGYYFVPVYVADTVKSQLPMLAPTANKDKSKKWVEMKNETFVFSLFKNSLIRVYGKGDMELTAVSKGTSLPQSKTVKDGEGVWLYFDGLDISTGTFTGITHDNTYKKRGMGKTLPLIEKYEVDVLGNIRKIAVPEKRQDFGH

SEQ ID NO: 19659 - protein, 1375 aa, unidentified
  REGION 1..1375: note = Cas Enzyme sequence
MKKILGLDLGTTSIGWALVYESENTDEKSSIVRLGVRVNPLSVDEKGNFEKGKAITTNADRQQTHGARINLQRYKLRRENLKDCLQKQGWIGTEALCEEGKASTFETYMLRAKAAEEEISLHELCRVLFMMNKKRGYKSNRKANNKEDGKLFDGMTVAKKLYEEHLTPAEYSFQLLSSGKKFKQEYYRSDLKEEFDRIWNEQQKYYPEILTDDFKQQLQGKSKGNTSKIFLGKYGIYSADLKGLDRKLQPLKWRVEALKQQVDKEVLAFVISDLNGQIASTSGLLGAISDRSKELYFNKQTVGQYLWTSLKETPHVSIKNKPFYRQDYLDEFEKIWETQATYHKELTPELKQEIRDIIIFYQRPLKSKKGLISVCELEQRKVKVTIDGKEKEISIGPKVAPKSSPMFQEFRIWQNLNNILLIDKGNNSNCPLYEEERNLLYEELSVKEKLSKAEALKVLNKNSKQWDLNYKEIGGNRTQAVLYDCYNRIIVMTGHEECNFKKLKASEIRSYFKTIFTGLGFNTDILEFDSSLTGHELERQPSYQLWHLLYSYESDNSRTGNDALLRKLETAFGFPKEYAAVLSDVVFEDSYGNLSVKAMRKILPHLQAGLDYSQACEEAGYKHSRRSLTKNELDQKEYKEKLDLLPKNSLHNPVVEKILNQMINVINAVIDEYGKPDEIRIELARELKIGAAERENMTRSISQGNAENKRIREILQKEFALSYISRNDIIKYKLYEELKSNGFKTLYSDTYISKDKLFSKDFDIEHIIPKARLFDDSLSNKTIEARDVNIAKSNKTAFDFIFGKYGQQGIEAYKKKLDILLQDGSISKAKYNRLLMKEADIPSGIIDRDLRDTQYIAKKAYEILSDLVRNVTPTTGAVTSRLREDWQLVDVMKELNFEKYQKLGLAEVIEDRDGRKIKRIKDWTKRNDHRHHAMDALTIAFTKPSYIQYLNNLNARSDKNSSIYGIENKELHREDNKLRFNAPLPINEFRAEARRHLKSILVSVKAKNKVMTQNVNVIKTKHGVIKKVQLTPRGELHNATFYGTKKRPIIKMVKVGAALDEATIKKVSSSLIREALLDRLHEYNGDAKKAFTGRKSIDKNPIYIDEEHKKTVPSLVKTIEWEMYHPTRKLISPDLKIDKVIDKGIREILKTRLAKFNGDAQKAFSNLDENPIYKDEAKKITLKRVSLEGVSSVIPLHTIKDREGKPVVGKDGKPVLGDYVQTSNNHHIAFYMDENGNLQDNVVSFFEAAERKSQGVPVIDKSYNHDKGWHFLFTMKQNEYFVFPNEVTGFNPSEVDLMDEANYGIISPNLYRVQKMSKTSGRDYWFRHHLEAMLNDDPKLRNSMFKRITSLKALEGIVKVRINCIGKIVAVGEYD

SEQ ID NO: 19660 - protein, 1206 aa, unidentified
  REGION 1..1206: note = Cas Enzyme sequence
MAKILGLDLGTNSIGWAITTQQDSSFTLLERGVYIFQEGVNRTKTGEEPMVKIRTDARAIRRHYYRRRLRKIELLKVLVANNLCPYLSNEQLDAWRYEKQYPLVDEFMLWLHSCNNSNPYADRFRSLTEVLDLKKIDDRYILGRALYHLSQRRGFLSNRKDSESSEDGVVTGCIKRLDEDMAAAGCTYLGEFYYKLFLAGKKIRTGDGYGYAGRIAHYEKEFNAICETQRLSDDLRKALYRAIFYKRPLKSQKGLVGSCTFEKDKARCPISHPRFEEFRMWCFLNNVKVKTYLDDEYRPLNEEEIAKALPMFYRKSNFDFEDIAKAIAGKKRGSYAYKDDQCDAPYHFNFRMSTSVSGCPVTAHLREIFGNEWERSICEVYLKGEGKSQEQIVNDVWHTLYFFDDNDKRFAWAKTNLQLNDEEAEKFVKIRIQQDFASLSLCAIDKILKWLRLGYRYDEAVFLANLPWVVAADAWRNEVKREKIISAVAGVVAEGYNTRGNRKESAIYNALLDCGLCGDEIRIDRLYHPSMIETYQDAKPDEQGLTLLGSPRTSSLRNPMAMRALFRMRDLINHLIKEGKIDDETKINIEFARGLNNANKRKAIEVYQREQEKRHKEYAENIRKLYKEECGVDIEPTEDDILKYQLWEEQSHLCLYTGQTIGISDFIGANPRFDIEHTVPRSRGGDNSQMNKTLCESNFNRNIKKGKLPAELATHAEVLARIEQIGWEAKCEELHKQIERTKGTFSTKEIKDAMIQKRHRLMMELDYWKGKLIRFTMTEVPEGFSNRQGVDIGIIGRYARLYLKSLFKRVYVVKGATTADFRRAWGLQDEYSKKERVNHIHHCIDAITIACIDSKSYQAWAAYQKEVEYTERYRTSRPQFQKPWSTFTEDVKAIAEDLLVSHHTAVNLPKHTRKKLRVRGKVQLNSDGQPIYVQGDTARASLHQQTFYGAIKRDDDIKYVVRKSLDSLQQSDVDKIVDDAVRECVKAAIERDGFKALAKPICFNEAKGVYIKKVRIYTPSVTSPIRLKRHQMLSRFDHKQEYYVANDGNYCMAIYEGTDARGKTKRTFQIVNNLEAAKFYNGKTNRYDLVPQSDSNDYPLKYILRTGTMVLFYENSSEELYECSRSELSKRLYKVTGMAADGRIKFTYHQEARDDKSISAECGMGISSVDVLNPVARLRLTLGSLNMYVDGYDFELTVTGEIKFKH

SEQ ID NO: 19661 - protein, 1080 aa, unidentified
  REGION 1..1080: note = Cas Enzyme sequence
LCKGLVLIFECVIKIQVVLNDCKGNFMGRVLGLDVGSNSLGWAIVDQSEDAIIGMGVRVFTAGVDNLNGEKEESRNAQRRLKRQLRRQYERTRQRRNALRLYLIGNGLLPDVADDFGDLLRQDPYALRKKGLDYYLEPFEIGRIVDHINARRGFRSNRKASSDEESSGVIYEGSKDDAKPGINAINDELQPMLRSVKLYESVKERVVAGDPDFAMVPRTAGEYLAGLNPREVRRRKRFLLREHLEIELDLILRKQAQFHSMITDEVIDRIKSLVFWQRPLKSVRKFVGNCRFEPGKKRCHKSHPQFQRFRLLQQLNQFEVYGPGRVLDDDRKLTAAERSALERYLTEKKSIDTVKNSKDLYKILGLTSKAEYRFKPERLDACTTMIKLREVFGPDKLALMSTQEIHEVWNVFNLATDAEWLEDYSVRSWGLTREQAKNAAKVRLEDGYGSLSLRAIKKILPHLENEHLYHKACELAGYHHSRPEGDIVVSDVVPAMSNADVRNPIVLRSYSEMRRVVNLLIKRYGPFESIRVELGRELKKPKTERLKIEKRNREFKDANELIRQRLRLDFGIQNPSRSDIDRYKLWEEQNHKCIYTGKAISQDSLFSGPIDVDHILPYSRTLDDGRNNKVLCLREINLAKGNMTPVEACDAGIINRTELRERVEALVRANKYTKSKSVKFFMSTEDMQKIYGDDFVEHQLNDTRYVGRLTAQKLRFVCKDVVVTNGLLTSSLRRRWGLDSILPDLAAEGRAWLDSKAHSAGAKSRADHRHHAVDALVVALTSRSLLATVAKLNSRGLGADLEKHYADGRIRLPEEPLAGLKAMARQRVDSIVVSHAVNRKRRGQLHEETIYGIAHDEHGVPLTNDTGIRLYVVRKPVESLTASMVEDIVDPAIKALVLERLSSLGVDVSSKYIVPKTAFLEPLYMPTKDGKPGPRIKRIRIYKASSNMVQLRVNGAFAEPGSNDHIRLYDFDADGKKRTWFVPSLFEALSTRAGWSDPEPPIMTLRINEMYVHEVPLPGNPIDSWGLYRVQKLEKKAGTIAFRHHAAASLDDNSSRLFTAPNTTRGAKVQVNSIGEVVFR

SEQ ID NO: 19662 - protein, 1408 aa, unidentified
  REGION 1..1408: note = Cas Enzyme sequence
MNRNKQVLMDRANVCDSTNKTMEQLYNIALDIGTSSVGWCVTDMNGKLMKFKRRNMWGARLFDKGQTAETRRLKRSLRRRYARRRQRIILLQNLLGDMVNQKDKNFFVRLNESFLWKCDKTEKSDYLLFADKDYTDKEYYKKYPTIYHLRKHLIESNEKADPRMVYLAIHNIIKHRGHFLYQGQKFEEVSDLSDIINELSDCLKCNFEGAEFKIEKEVIEKVEEIFNEKTKEGVNNEHKKSKAEKCEDLEKILVDNKWDKKISKEIAKACLGYKFNVGTVIGESELKGEDGKSIKIQFDDSKYEEKILELAEKINDKIEIINILQNVYSWIVMEDILSGYKYISDAMVDKYERHNKQLNMLKRLFRKYLSRDDYLEFFRKEKGKEKDENKEKYIINYVNYIKRNKRCANTKGTARENLYKEIKGKFKGMAENDAEYQLILKEMDNDEFLLKQKDVNNSNIPYQINLIELEKIIDNQGKYYPVLLENREKIIKLLTFRIPYYIGPVNPRKNDNKFAWVKKKEGHETETVNPWNLEEIVDIDVTAERFIDNMTGFCTYLPEEKVLPKNSLIYQEYKVLNELNKIKVNDKGLDIKTRNDIIEGVFKKQKNINEKTLKNYLLSINYLGAKVIEEYKIEGYQGDKQFANSMGSYIDFKKILGSVDVRNLDMIEEIVYWLTVFEEKSIVKRKMIQKYSDKLSEKQLSRILDLKYDGWGRFSKKFLTGIYGDYYGEKKTIMDVLKEDNKLPNLMQIINKKEFGFNEIIEKNRIKLDEGEVLKDAIDKIHCSPEVRRGIWQSMKLVEEVIEIENGVLPKNIYIEFARSEEDKKRTKKRKNKLEAAYKVLKKEIDVYNEKVLKELGEYKEKLDEEKVYLYFLQNGQCMYTKQELNLNGYLKDCEIDHIIPQSVYDEDSLDNKVLVLKGANQEKGNRIPYDYIKEKNKVNWESMKIWWEKLYKCGLMSEKKYKRLTTQNIGEIINSGFIKRQLTVTSQMIKNVANLITDYYGGKVNVMAVRAAFSTKIRKTYSELVKGSDGNYIEKNDGDCFIKNRFLNDFHHAHDAYLASIIGKYLNTVYPKMADEINYNKYIKYYNEQCKKNRKQKFNFILSKFDKIFERDGEIVWNGVEQIKYLKNILNYRDCIITHKLEENTGSFYDENRLPKNDKSEKLIPIKEGLPVERYGGYQGGEAAYCCLISYVEKKKQQLELVKISVMTAKKIYDGKTTLENYLKDKMGLDDIHIIRKKIMKYQLIEEDGCRYYLVSAEELANAKQLVLGSKNVRFNRILNIIEDNRYNGYSPEYIQRGLDDFYEFLIGKIQKEFGRSSSVVEEIYDTKVFYELESAKDKGDFIMEILKLTNIGSDYPYLKKYKKYNKISSSLIDRKGRSKYQGYKIKPGTVLIDQSVTGLYERRLEL

SEQ ID NO: 19663 - protein, 1408 aa, unidentified
  REGION 1..1408: note = Cas Enzyme sequence
MNRNKQVLMDGANVCDSTNKTTGQLYNIALDIGTSSVGWCVTDMNGKLMKFKRRNMWGARLFDKGQTAETRRLKRSLRRRYARRRQRIILLQNLLGDMVNQKDKNFFVRLNESFLWKCDKTEKSDYLLFADKDYTDKEYYKKNPTIYHLRKHLIESNEKADPRMVYLAIHNIIKHRGHFLYQGQKFEEVSDLSDIINELSDCLKCNFEGAEFKIEKEVIEKVEEIFNEKTKEGVNNEHKKSKAEKCEDLEKILVDNKWDKKISKEIAKACLGYKFNVGTVIGESELKGEDGKSIKIQFDDSKYEEKILELAEKINDKLEIINILQNVYSWIVMEDILSGYKYISNAMVDKYERHNKQLNMLKRLFRKYLSRDDYLEFFRKEKGKEKDGNKEKYIINYVNYIKRNKRCANTKGTARENLYKEIKGKFKGMAENDAEYQLILKEMDNDEFLLKQKDVNNSNIPYQINLIELEKIIDNQGKYYPVLLENREKIIKLLTFRIPYYIGPVNPRKNDNKFAWVKKKEGHETETVNPWNIEEIVDIDVTAERFIDNMTGFCTYLPEEKVLPKNSLIYQEYKVLNELNKIKVNDKGLDIKTRNDIIEGVFKKQKNINEKTLKNYLLSINYLGAKVIEEYKIEGYQGDKQFANSMGSYIDFKKILGSVDVRNLDMIEEIVYWLTVFEEKSIVKRKMIQKYSDKLSEKQLSRILDLKYDGWGRFSKKFLTGIYGDYYGEKKTIMDVLKEDNKLPNLMQIINKKEFGFNEIIEKNRIKLDEGEVLKDAIDKIHCSPEVRRGIWQSMKLVEEVIEIENGVLPQNIYIEFARSEEDKKRTKKRKNKLEAAYKVLKKEIDVYNEKVLKELGEYKEKLDDEKVYLYFLQNGQCMYTKQELNLNGYLKDCEIDHIIPQSVYDEDSLDNKVLVLKGANQEKGNRIPYDYIKEKNKVNWESMKIWWEKLYKCGLMSEKKYKRLTTQNIGEIINSGFIKRQLTVTSQMIKNVANLITDYYGGKVNVMAVRAAFSTKIRKTYSELVKGSDGNYIEKNDGDCFIKNRFLNDFHHAHDAYLASIIGKYLNTVYPKMADEINYNKYIKYYNEQCKKNRKQKFNFILSKFDKIFERDGEIVWNGVEQIKYLKNILNYRDCIITHKLEENTGSFYDENRLPKNDKSEKLIPIKEGLPVERYGGYQGGEAAYSCLISYVKKKKQQLELVKIPVMTAKKIYDGKTTLENYLKEKMGLDDIHIIRRKIMKYQLIEEDGCRYYLVSAEELANAKQLVLGSKNVRFNRILNIIEDNGYNRYSPEYIQRGLDDFYEFLIGKIQKEFGRSSSVAEEIYDTKVFYKLESAKDKGDFIMEILKLTNIGSDYPYLKKYKKYNKISSSLIDRKGRSKYQGYKIKPGTVLIDQSVTGLYERRLEL

SEQ ID NO: 19664 - protein, 926 aa, unidentified
  REGION 1..926: note = Cas Enzyme sequence
LLENREKIIKLLTFRIPYYIGPVNPRKNDNKFAWVKKKEGHETETVNPWNLEEIVDIDVTAERFIDNMTGFCTYLPEEKVLPKNSLIYQEYKVLNELNKIKVNDKGLDIKTRNDIIEGVFKKQKNINEKTLKNYLLSINYLGAKVIEEYKIEGYQGDKQFANSMGSYIDFKKILGSVDVRNLDMIEEIVYWLTVFEEKSIVKRKMIQKYSDKLSEKQLSRILDLKYDGWGRFSKKFLTGIYGDYYGEKKTIMDVLKEDNKLPNLMQIINKKEFGFNEIIEKNRIKLDEGEVLKDAIDKIHCSPEVRRGIWQSMKLVEEVIEIENGVLPQNIYIEFARSEEDKKRTKKRKNKLEAAYKVLKKEIDVYNEKVLKELGEYKEKLDDEKVYLYFLQNGQCMYTKQELNLNGYLKDCEIDHIIPQSVYDEDSLDNKVLVLKGANQEKGNRIPYDYIKEKNKVNWESMKIWWEKLYKCGLMSEKKYKRLTTQNIGEIINSGFIKRQLTVTSQMIKNVANLITDYYGGKVNVMAVRAAFSTKIRKTYSELVKGSDGNYIEKNDGDCFIKNRFLNDFHHAHDAYLASIIGKYLNTVYPKMADEINYNKYIKYYNEQCKKNRKQKFNFILSKFDKIFERDGEIVWNGVEQIKYLKNILNYRDCIITHKLEENTGSFYDENRLPKNDKSEKLIPIKEGLPVERYGGYQGGEAAYSCLISYVKKKKQQLELVKIPVMTAKKIYDGKTTLENYLKEKMWLDDIHIIRKKIMKYQLIEEDGCRYYLVSAEELANAKQLVLGSKNVRFNRILNIIEDNRYNGYSPEYIQNGLDDFYEFLIGKIQKEFGRSSSVAEEIYDTKVFYELESAKDKGDFIMEILKLTNIGSDYPYLKKYKKYNKISSSLIDRKGRSKYQGYKIKPGTVLIDQSVTGLYERRLEL

SEQ ID NO: 19665 - protein, 1242 aa, unidentified
  REGION 1..1242: note = Cas Enzyme sequence
LAIHNIIKHRGHFLYQGQKFEEVSDLSDIINELSDCLKCNFEGAEFKIEKEVIEKVEEIFNEKTKEGVNNEHKKSKAEKCEDLEKILVDNKWDKKISKEIAKACLGYKFNVGTVIGESELKGEDGKSIKIQFDDSKYEEKILELAEKINDKIEIINILQNVYSWIVMEDILSGYKYISNAMVDKYERHNKQLNMLKRLFRKYLSRDDYLEFFRKEKGKEKDENKEKYIINYVNYIKRNKRCANTKGTARENLYKEIKGKFKGMAENDVEYQLILQEMDNDEFLLKQKDVNNSNIPYQINLIELEKIIDNQGKYYPVLLENREKIIKLLTFRIPYYIGPVNPRKNDNKFAWVKKKEGHETETVNPWNLEEIVDIDVTAERFIDNMTGFCTYLPEEKVLPKNSLIYQEYKVLNELNKIKVNDKGLDIKTRNDIIEGVFKKQKNINEKTLKNYLLSINYLGAKVIEEYKIEGYQGDKQFANSMGSYIDFKKILGSVDVRNLDMIEEIVYWLTVFEEKSIVKRKMIQKYSDKLSEKQLSRILDLKYDGWGRFSKKFLTGIYGDYYGEKKTIMDVLKEDNKLPNLMQIINKKEFGFNEIIEKNRIKLDEGEVLKDAIDKIHCSPEVRRGIWQSMKLVEEVIEIENGVLPQNIYIEFARSEEDKKRTKKRKNKLEAAYKVLKKEIDVYNEKVLKELGEYKEKLDDEKVYLYFLQNGQCMYTKQELNLNGYLKDCEIDHIIPQSVYDEDSLDNKVLVLKGANQEKGNRIPYDYIKEKNKVNWESMKIWWEKLYKCGLMSEKKYKRLTTQNIGEIINSGFIKRQLTVTSQMIKNVANLITDYYGGKVNVMAVRAAFSTKIRKTYSELVKGSDGNYIEKNDGDCFIKNRFLNDFHHAHDAYLASIIGKYLNTVYPKMADEINYNKYIKYYNEQCKKNRKQKFNFILSKFDKIFERDGEIVWNGVEQIKYLKNILNYRDCIITHKLEENTGSFYDENRLPKNDKSEKLIPIKEGLPVERYGGYQGGEAAYSCLISYVKKKKQQLELVKIPVMTAKKIYDGKTTLENYLKEKMWLDDIHIIRKKIMKYQLIEEDGCRYYLVSAEELANAKQLVLGSKNVRFNRILNIIEDNGYNGYSPEYIQRGLDDFYEFLIAKIQKEFGRSSSVAEEIYDTKVFYELESAKDKGDFIMEILKLTNIGSDYPYLKKYKKYNKISSSLIDRKGRSKYQGYKIKPGTVLIDQSVTGLYERRLEL

SEQ ID NO: 19666 - protein, 1408 aa, unidentified
  REGION 1..1408: note = Cas Enzyme sequence
MNRNKQVLMDRANVCDSTNKTMEQLYNIALDIGTSSVGWCVTDMNGKLMKFKRRNMWGARLFDKGQTAETRRLKRSLRRRYARRRQRIILLQNLLGDMVNQKDKNFFVRLNESFLWKCDKTEKSDYLLFADKDYTDKEYYKKYPTIYHLRKHLIESNEKADPRMVYLAIHNIIKHRGHFLYQGQKFEEVSDLSDIINELSDCLKCNFEGAEFKIEKEVIEKVEEIFNEKTKEGVNNEHKKSKAEKCEDLEKILVDNKWDKKISKEIAKACLGYKFNVGTVIGESELKGEDGKSIKIQFDDSKYEEKILELAEKINDKIEIINILQNVYSWIVMEDILSGYKYISDAMVDKYERHNKQLNMLKRLFRKYLSRDDYLEFFRKEKGKEKDENKEKYIINYVNYIKRNKRCANTKGTARENLYNEIKGKFKGMAENDAEYQLILQEMDNDEFLLKQKDVNNSNIPYQINLIELEKIIDNQGKYYPVLLENREKIIKLLTFRIPYYIGPVNPRKNDNKFAWVKKKEGHETETVNPWNLEEIVDIDVTAERFIDNMTGFCTYLPEEKVLPKNSLIYQEYKVLNELNKIKVNDKGLDIKTRNDIIEGVFKKQKNINEKTLKTYLLSINYLGAKIIEEYKIEGYQGDKQFANSMGSYIDFKKILGSVDVRNLDMIEEIVYWLTVFEEKSIVKRKMIQKYSDKLSEKQLSRILDLKYDGWGRFSKKFLTGIYGDYYGEKKTIMDVLKEDNKLPNLMQIINKKEFGFNEIIEKNRIKLDEGEVLKDAIDKIHCSPEVRRGIWQSMKLVEEVIEIENGVLPQNIYIEFARSEEDKKRTKKRKNKLEAAYKVLKKEIDVYNEKVLKELGEYKEKLDDEKVYLYFLQNGQCMYTKQKLNLNGYLKDCEIDHIIPQSVYDEDSLDNKVLVLKGANQEKGNRIPYDYIKEKNKVNWESMKIWWEKLYKCGLMSEKKYKRLTTQNIGEIINSGFIKRQLTVTSQMIKNVANLITDYYGGKVNVMAVRAAFSTKIRKTYSELVKGSDGNYIEKNDGDCFIKNRFLNDFHHAHDAYLASIIGKYLNTVYPKMADEINYNKYIKYYNEQCKKNRKQKFNFILSKFDKIFERDGEIVWNGVEQIKYLKNILNYRDCIITHKLEENTGSFYDENRLPKNDKSEKLIPIKEGLPVERYGGYQGGEAAYCCLVSYVKKKKQQLELVKIPVMTAKKIYDGKTILENYLKEKMGLDDIHIIRKKIMKYQLIEEDGCRYYLVSAEELANAKQLVLGSKNVRFNRILNIIEDNRYNGYSPEYIQRGLDDFYEFLIGKIQKEFGRSSSVAEEIYDTKVFYKLESAKDKGDFIMEILKLTNIGSDYPYLKKYKKYNKISSSLIDRKGRSKYQGYKIKPGTVLIDQSVTGLYERRLEL

SEQ ID NO: 19667 - protein, 1094 aa, unidentified
  REGION 1..1094: note = Cas Enzyme sequence
MKYFLGLDIGITSVGWGVIDKNNNIIKCGVRLFDEADQKNNADRRAFRGSRRLIRRRKLRIDDVKSLLMEKGLINNKFKPFKDPYKLRKKGLTEKLTDKELATVLLFYAKRRGSSLEVAEEITTKSEESTKFILNENKQLLKKEGFIVDVQLKRKKELGSIRGINNVFKTEDYLYELKAILNNQNLDENFKKELIEIIFRRRHFSEGPGNLYSPSPYGRYRLVEGKLLKELKEYLITNFNNKYLKEEIIFNYEGKNYLAYKNGEIVNKDKYDLIALMRGNCSIYEDEFRAPKNAFSAELFNLLNDLNNLKFTNREEKITGEEKHEVINVIREKGNITFNQLLKLLGVTLIDVTGYRIDKNDKPILTEFNGYKKVLKIIKDLKKKMLDDETIDQIMEILTETVVVEERFDKINRIVKDELLAMSLSNLTGINGYHNLSLKAIYQLKEELLITSLNQQQIITNKNLTQKTDSSKLVLDESAILSPVARRAHREALRVVDELSKEYGTFDTIIIETTRDKNSADQRKRIRDTQKYFEKSKKEAEEVVKDYDMEVISSSLILKLRLYKEQHGKCAYSGKSISLGTLIRDHQTYQIDHIIPLSISFDDSYNNKVLITALENQRKANKTPFGYFVSGMVDKNNPINNWNDFETTVKGNTNYSSVKKRNLLFKKDISKYEVLEEFKNRNIVDTSYAVRSLMTTLRNYYQSNEIDTKVRTIRGKQTNHFRKIGANLWFHKYQNSKEVNPFLKDRNKYIHHVIDALIIAGLSKQNYLRSLYRDKMSLNDDLDEITKAILNIDSPYNDPNLKQYLLQIASLKEDEINYSWKIDTKINRTLADQTIYSTRIVDDVHRVVKKYDNIYELNNERLEKVFSEKQRENLLVFKHDPQTYEILYKAYMQYAHEKYPFKAYYEEHGFLQKYAKNNNGPVIKQLKYLEDKLGSHLDITPQGAIDKKVVKLQVKSYRADIYYSKKENRYKFITIRHSDIVLRKGSYLIEEDWYNKEKKKKEINESYQFLFSLNRNNIIEITKLDKKDKIVEISRFIGVNNDIANKIEVKPLNYYEKKRLMPTIGRNTLKIRKFNVSLTGKIAEAVNEPLKLVF

SEQ ID NO: 19668 - protein, 1071 aa, unidentified
  REGION 1..1071: note = Cas Enzyme sequence
LTQRRGFLSNRLDQNEEAEETGKVKSAISELCKEMKEAGCEFLGDYFYLLYRTEGNRVRIRSRYTDREKHYLQEFKEICRVQELDKDLAKALEKTIFFQRPLKSQRQGVGKCTMEKGHSRCAVSHPLYEEYRLLCYLNNIRIKTPSDDRLRPLNAEEREKITPLFYQKSNFDFKKIAKKLAGKTPFGWIRDEEDWPYQFNYRMTQEAPACPTTAQLIKVFGEDWKAALAETYTMSAKQDGTLKTEDEICTDIWNVLYSFSSKEKLKEFGLKKLQLDEAQAKAFSEIRLTRDFASLSLKAIRKILFFLRTGEDYSKAIFLANIPTIVGEEIWNDIERRSRLLYKVDLALRPQEEDDAEEHRTIAERIKAAVAAEVPDAPIDLLYHPSMIEAYPDAKRNERFDCYQLGSPKTNAVRNPMAMRSLHMVRKVINHLLRKHIIDEKTEIHIEYARELNDANKRQAIADWQRELSKRHTAYAKNIRQLYKAETGLEIEPTKTDILKYQLWEEQQHVCLYTGKKIGIADFLGANPKFDIEHTIPRSRGGDSTQENLTLCESQFNRDIKRDKLPTELANYEEILARIEHWKKQCYALKLKRDGIRTHSGLEKSIKDSKIRRRHLVGLEYGYLKGKYDRFTMKEVPEGFSRRQGAGIGLISKYAGLFLKSLFKDPKNPNRSNVYVVKGAITAEFRKLWGLQQADEAKSRENHTHHCIDAYTIACIGPCEYAALAAYYRSDEEFKYGRRREKPQFEKPWPTFTEDLLKLQEELLIVHQTTDKLGKRDRRKVKTPRGKFLTGGDSARGRLHQETYYGAINYDGKIKYVVRKPLDSLTEKDLDKIVDETVKGIVKGAVEAKGSLKEALADGIYMNKEKGILIRRVRIFTRLTQPLALRSLRDQSQKEHKRKVYVTNESNYMMTIYEGVVKGKTKREFDLVNNIEAAKFFRKRIGQEQDLPLMPEKSASDFPLKQTLKIGTLVLLYETSPSEIDFSDPKDIAKRLYKVVGLSTLHINKYIYGIISLRHHQEARPTGELKFKNGEFRNGEALRPAITMLHSQLNALVEGQDFDLDITGKITLKRP

SEQ ID NO: 19669 - protein, 1429 aa, unidentified
  REGION 1..1429: note = Cas Enzyme sequence
MAKNILGLDLGTNSIGWALINQDFENKQGKILGMGGRIIPMSQDILGDFGKGNSVSQTAARTGYRGVRRLRERFLLRRERLHRVLNIINYLPEHYASQIDFEKRFGKFNEETEPKLAYNKDGFVFKNSFEEMLADFKNNQPQLLENDKKIPYDWTIYYLRKKAISQKIEKEELAWILLNFNQKRGYYQLRGEEEEENPNKLVEFYSLKIVDVLADEPQKGKSDIWYSLVLENGWVYRRASKTPLFDWKDKTRDFIVTIDLNDDGSVKTDKDGNEKRSFRAPAETDWTLVKKKTEQEIDKSHKTVGVYIYEALLQNPKQKIKGKLVRTIERKFYKDELKQILEKQKEFHQELKNDDLYNDCVRELYRNNEAHQLTLSKKEFVHLLMEDIIFYQRPLRSQKSSISNCSLESRKYKDENGVEHIQFLKAIPKSNPYYQEFRIWQWIFNLNIYKKDDDANVTKEFLNTTENFENLFEFLNNRKEVDQKALLKHFKLNEKTYRWNFVEDKKYPCNETKTMISSRLDKVENISDDFFTRETEQKIWHIIYSVNDKMEYEKALKSFARKNNLDENSFFEAFKKFPPFKSEYGSFSEKAIKKLLPLMRLGKYWNYADIDKYSKDRIQKIINGEFDENIKDKVREKAVHLTSENDFQGLQLWLAQYVVYGRHSEASIIGKWNSTDDLEEFLKEFKQHSLRNPIVEQVITETLRVVKDIWIKYGNGAKDFFNEIHIELGREMKLPADEREQLTRQISENENTNLRIKALLAEMMTDNSVENVRPYSPMQQEILKIYEDGILKSDIEIEDDILKISKTAQPSSSDLKRYKLWLEQRYKSPYTGQIIPLNKLFTPEYEIEHIIPQSRYFDDSFSNKIICESAVNKLKDNYIGLGFIKQFGGTIVECGLGKNVKVFEVDEYEDFVKKHYANNRGKRNKLLLEEIPEKMIERQLNDTRHISKYISGVLSNIVRVEDGSDEGVNSKNIVPGNGKITTQLKQDWGLNDVWNDLILPRFERMNQLTNSTDFTAWNENHQKYLPTVPIKESKGFSKKRIDHRHHALDALVIACATKDHVNLLNNQSAKSDTKRYDLKKKLMKFEKAVYKHPQTGERIERDVPKQFLKPWESFTIDAKNNLDKIIVSFKQNLRVINKATNYYEKYVEKDGIKTKEKIQQTGTNWAIRKPMHKETVSGKIDLPWVKVPKGKILTATRKNLDTSFDLKSINSITDTGIQKILRSYLEFKGSAEAAFSPEGIEDMNKNIEKYNDGKLHQPINKVRVFELGSKFQVGQTGNKKDKYVEAAKGTNLFFAVYEDKNGKRSYETIPLNIVIERQKQGLSVVDLKGVNDFYLCPNDLVYIPSEDELENVNNIDFKNFTKEKNERIYKVVSFSGSQIFFVRQDVSTSVVNKAEFSTLNKMERAIDGSMVKEHCLKLNVDRLGNISKT

SEQ ID NO: 19670 - protein, 1110 aa, unidentified
  REGION 1..1110: note = Cas Enzyme sequence
IKGKLVRTIERKFYKDELKQILEKQKEFHQELKNDDLYNDCVRELYRNNEAHQLTLSKKEFVHLLMEDIIFYQRPLRSQKSSISNCSLESRKYKDENGVEHIQFLKAIPKSNPYYQEFRIWQWIFNLNIYKKDDDANVTKEFLDTIENFESLFEFLNNRKEVDQKALLKYFKLNEKTYRWNFVEDKKYPCNETKTMISSRLDKVENISDDFFTRETEQKIWHIIYSVNDKMEYEKALKSFARKNNLDENSFFEAFKKFPPFKNEYGSFSEKAIKKLLPLMRLGKYWNYENISDDSIERIQKIITGEYDENIKNKVREKTIHLTSENDFQGLQLWLAQYIVYGRHSEASIIGKWNSTDDLEEFLKEFKQHSLRNPIVEQVITETLRVVKDIWLQYGNGAKDFFNEIHIELGREMKQTKDERLDATKRITENENTNLRIKALLAEMMTDNSVENVRPYSPMQQEILKIYEDGILKSDIEIDDDILKISKTAQPSSSDLKRYKLWLEQRYKSPYTGQIIPLNKLFTPEYEIEHIIPQSRYFDDSFSNKIICESAVNKLKDNYIGLGFIKQFGGTIVECGLGKNVKVFEVDEYEDFVKKHYANNRGKRNKLLLEEIPEKMIERQLNDTRHISRYISGVLSNIVRVEDGSDEGVNSKNIVPGNGKITTQLKQDWGLNDVWNDLILPRFERMNQLTNSTDFTAWNENHQKYLPTVPIKESKGFSKKRIDHRHHALDALVIACATKDHVNLLNNQSAKSDTKRYDLKKKLMKFEKAVYKHPQTGERIERDVPKQFLKPWESFTIDAKNNLDKIIVSFKQNLRVINKATNYYEKYVEKDGIKTKERVEQTGTNWAIRKPMHKETVSGKIDLPWVKVPKGKILTATRKNLDTSFDLKSINSITDTGIQKILRNYLEFKESSELAFSSEGIEDMNKNIEKYNDGKLHQPINKVRVFELGSKFQVGQTGNKKDKYVEAAKGTNLFFAVYEDKNGKRSYETIPLNIVIERQKQGLSVVDLKGVNDFYLCPNDLVYIPSEDELENVNNIDFKNFTKEKNERIYKVVSFSGSQIFFVRQDVSTSVVNKAEFSTLNKMERAIDGSMIKEHCLKLNVDRLGNISKT

SEQ ID NO: 19671 - protein, 1240 aa, unidentified
  REGION 1..1240: note = Cas Enzyme sequence
MPNFWSIFTENLQTYLMKTRILGLDTGTNSLGWAVVDRDENNQYTPICRGDLIFTEGVKQEKGIEFSLAAERTSYRASRRHYFRRRLRKVEVLKVLVKHKLCPQLSDEALNRWHTKKEYPLDEDFILWQRTSEADNKNPYHDRHICLHRKLNLKDSQTDRYTLGRALYHLTQRRGFLSNRLDQNEEAEETGKVKSAISELSKEMKEAGCEFLGDYFYLLYRTEGNRVRIRSRYTDREKHYLQEFKEICRVQELDEDLAKALEKTIFFQRPLKSQRQGVGKCTMEKGHSRCAVSHPLYEEYRLLCYLNNIRIKTPSDDRLRPLNAEEREKITPLFYQKSNFDFKKIAKKLAGKTPFGWIRDEEDWPYQFNYRMTQEAPACPTTAQLIKVFGEDWKTAMAETYTMSTKQDGTLKTEDEICTDIWNVLYSFSSKEKLKEFGLKKLQLDEVQAKAFSEIRLTRDFASLSLKAIRKILFFLRTGEDYSKAIFLANIPTIVGEEIWNDIERRSRLLYKVDLALRPQKEDEAEEHRTIAERIKAAVAAEVPDAPIDLLYHPSMIEAYPDAKRNERFDCYQLGSPKTNAVRNPMAMRSLHMVRKVINHLLRKHIIDEKTEIHIEYARELNDANKRQAIADWQRELSKRYTAYAQNIRQLYKAETGLEIEPTKTDVLKYQLWEEQQHVCLYTGKKIGIADFLGANPKFDIEHTIPRSRGGDSTQENLTLCESKFNRDIKRDKLPTELANYEEILARIEHWKKQCYALKLKRDGIRTHSGLEKSIKDSKIRRRHLVGLEYGYLKGKYDRFTMKEVPEGFSRRQGAGIGLISKYAGLFLKSLFKDPKNPNRSNVYVVKGAITAEFRKLWGLQQADEAKSRENHTHHCIDAYTIACIGPCEYAALAAYYRSDEEFKCGRRREKPQFEKPWPTFTEDLLKLQEELLIVHQTTDKLGKRDRRKVKTPCGKFLTGGDSARGRLHQETYYGAINYDGNIKYVVRKPLDSLTEKDLDKIVDETVKGIVKGAVEAKGSLKEALADGIYMNKEKGILIKRVRIFTRLTQPLTLRSLRDQSQKEHKRKVYVTNESNYMMAIYEGVVKGKTKREFDLVNNIEAAEFFRKGNNRAQGLPLLPEKSDSGFPLKQTLKIGTLVLLYETSPSEIDFPDPKDIAKRLYKVVGLSTLHINKYIYGIISLRHHQEARPTGELKFKNGEFRNGEALRPAITMLHSQLNALVEGQDFDLDITGKITLKRP

SEQ ID NO: 19672 - protein, 1234 aa, unidentified
  REGION 1..1234: note = Cas Enzyme sequence
MPNFWSIFTENLQTYLMKTRILGLDTGTNSLGWAVVDRDENNQYTPICRGDLIFTEGVKQEKGIEFSLAAERTSYRASRRHYFRRRLRKVEVLKVLVKHKLCPPLSDEALNRWHTKKEYPLDEDFILWQRTSEADNKNPYHDRHICLHHKLNLKDSQTDRYTLGRALYHLTQRRGFLSNRLDQNEEAEETGKVKSAISELSKEMKEAGCEFLGDYFYLLYRTEGNRVRIRSRYTDREKHYLQEFKEICRVQELDEDLAKALEKTIFFQRPLKSQRQGVGKCTIEKGHSRCAVSHPLYEEYRLLCYLNNIRIKTPFDDRLRPLNAEEREKITPLFYQKSNFDFKKIAKKLAGKTPFGWIRDEEDWPYQFNYRMTQEAPACPTTAQLIKVFGEDWKTAMAETYTMSAKQDGTLKTEDEICTDIWNVLYSFSSKEKLKEFGLEKLQLNEAQAEAFSAIRLTRDFASLSLKAIRKILVFLRRGDDYSKAIFLANIPTIVGEEIWNDIERRSRLLYKVDLALRPQEERDAEEHCTIAERIKAAVAAEVPDAPIDLLYHPSMIEAYPDAKRNERFDCYQLGSPKMNAVRNPMAMRSLHMVRKVINHLLRKHIIDEKTEIHIEYARELNDANKRQAIADWQRELSKRHTAYAQNIRQLYKAETGLEIEPTKTDILKYQLWEEQQHVCLYTGKKIGIADFLGANPKFDIEHTIPRSKGGDSTQENLTLCDSKFNRDIKRDKLPTELDNYEEILARIEHWKKQCYALKLKRDGIRTHSGQEKSIKDSKIRRRHLIGLEYGYLKGKYDRFTMKEVPEGFSRRQGAGIGLISKYAGLFLKSLFKDPKNPNRSNVYVVKGAITAEFRKLWGLQQADEAKSRENHTHHCIDAYTIACIGPCEYAALAEYYRSDEEFKYGRRREKPQFEKPWPTFTEDLLKLQEELLIVHQATDKLGKRDRRKVKTPRGKFLTGGDSARGRLHQETYYGAINYDGNIKYVVRKPLDSLTEKDLDKIVDETVKGIVKGAVEAKGSLKEALADGIYMNKEKGILIRRVRIFSDVSEPINLKQLRDVSTKEYKRHIHLRKDENYLFAIYEGLDKKKNKKQTETATVDYLDAAKFYKDSKRRDKANSLVGDYSKKNKLPLKCILKKRQMVLFYEHSPEEIRFKDKKDLSKRLYIVTSIAKDGRVKFLHHQAATATGIQSSPSPFTNDGEHQPYYRLSASNIKVLVAGIDFDINILGEITPKL

SEQ ID NO: 19673 - protein, 1234 aa, unidentified
  REGION 1..1234: note = Cas Enzyme sequence
MPNFWSIFTENLQTYLMKTRILGLDTGTNSLGWAVVDRDENNQYTPICRGDLIFTEGVKQEKGIEFSLAAERTSYRASRRHYFRRRLRKVEVLKVLVKHKLCPPLSDEALNRWHTKKEYPLDEDFILWQRTSEADNKNPYHDRHICLHHKLNLKDSQTDRYTLGRALYHLTQRRGFLSNRLDQNEEAEETGKVKSAISELSKEMKEAGCEFLGDYFYLLYRTESNRVRIRSRYTDREKHYLQEFKEICRVQKLDEDLAKALEKTIFFQRPLKSQRQGVGKCTMEKGHSRCAVSHPLYEEYRLLCYLNNIRIKTPSDDRLRPLNAEEREKITPLFYQKSNFDFKKIAKKLAGKTPFGWIRDEEDWPYQFNYRMTQEAPACPTTAQLIKIFGEDWKAALAETYTMSAKQDGTLKTEDEICTDIWNVLYSFSSKEKLKEFGLKKLQLNEVQAKAFSEIRLTRDFASLSLKAIRKILFFLRTGEDYSKAIFLANIPTIVGEEIWNDIERRSRLLYKVDLALRPQEERDAEEHRTIAERIKAAVAAEVPDAPIDLLYHPSMIEAYPDAKRNERFDCYQLGSPKTNAVRNPMAMRSLHMVRKVINHLLRKHIIDEKTEIHIEYARELNDANKRQAIADWQRELSKRHTAYAQNIRQLYKAETGLEIEPTKADILKYQLWEEQQHVCLYTGKKIGIADFLGANPKFDIEHTIPRSRGGDSTQENLTLCESKFNRDTKRDKLPTELANYEEILARIEHWKKQCYALKLKRDGIRTHSGLEKSIKDSKIRRRHLVGLEYGYLKGKYDRFTMKEVPEGFSRRQGAGIGLISKYAGLFLKSLFKDPKNPNRSNVYVVKGAITAEFRKLWGLQPADEAKSRENHTHHCIDAYTIACIGPSEYAALAEYYRSDEEFKYGRRREKPQFEKPWKTFTEDLLKLQKELLIVHQTTDKLGKRDRRKVKTPRGKFLTGGDSARGRLHQETYYGAINYDGNIKYVVRKPLDSLTEKDLDKIVDETVKGIVKGAVEAKGSLKEALADGIYMNKEKGILIKRVRIFSDVSEPINLKQLRDVSTKEYKRHIHLRKDENYLFAIYEGLDKKKNKKQTETATVDYLDAAKFYKDSKRRDKANSLVGDYSKKNKLPLKCILKKRQMVLFYEHSPEEIRFKDKKDLSKRLYIVTSIAKDGRVKFLHHQAATATGIQSSPSPFTNDGEHQPYYRLSASNIKVLVAGIDFDINILGEITPKL

SEQ ID NO: 19674 - protein, 1145 aa, unidentified
  REGION 1..1145: note = Cas Enzyme sequence
VEVLKVLVKHKLCPPLSDEALNRWHTKKEYPLDEDFILWQRTSEADNKNPYHDRHICLHHKLNLKDSQTDRYTLGRALYHLTQRRGFLSNRLDQNEEAEETGKVKSAISELSKEMKEAGCEFLGDYFYLLYRTESNRVRIRSRYTDREKHYLQEFKEICRVQKLDEDLAKALEKTIFFQRPLKSQRQGVGKCTMEKGHSRCAVSHPLYEEYRLLCYLNNIRIKTPSDDRLRPLNAEEREKITPLFYQKSNFDFKKIAKKLAGKTPFGWIRDEEDWPYQFNYRMTQEAPACPTTAQLIKIFGEDWKAALAETYTMSAKQDGTLKTEDEICTDIWNVLYSFSSKEKLKEFGLKKLQLNEVQAKAFSEIRLTRDFASLSLKAIRKILFFLRTGEDYSKAIFLANIPTIVGEEIWNDIERRSRLLYKVDLALRPQEERDAEEHRTIAERIKAAVAAEVPDAPIDLLYHPSMIEAYPDAKRNERFDCYQLGSPKTNAVRNPMAMRSLHMVRKVINHLLRKHIIDEKTEIHIEYARELNDANKRQAIADWQRELSKRHTAYAQNIRQLYKAETGLEIEPTKADILKYQLWEEQQHVCLYTGKKIGIADFLGANPKFDIEHTIPRSRGGDSTQENLTLCESKFNRDTKRDKLPTELANYEEILARIEHWKKQCYALKLKRDGIRTHSGLEKSIKDSKIRRRHLVGLEYGYLKGKYDRFTMKEVPEGFSRRQGAGIGLISKYAGLFLKSLFKDPKNPNRSNVYVVKGAITAEFRKLWGLQPADEAKSRENHTHHCIDAYTIACIGPSEYAALAEYYRSDEEFKYGRRREKPQFEKPWKTFTEDLLKLQKELLIVHQTTDKLGKRDRRKVKTPRGKFLTGGDSARGRLHQETYYGAINYDGNIKYVVRKPLDSLTEKDLDKIVDETVKGIVKGAVEAKGSLKEALADGIYMNKEKGILIKRVRIFSDVSEPINLKQLRDVSTKEYKRHIHLRKDENYLFAIYEGLDKKKNKKQTETATVDYLDAAKFYKDSKRRDKANSLVGDYSKKNKLPLKCILKKRQMVLFYEHSPEEIRFKDKKDLSKRLYIVTSIAKDGRVKFLHHQAATATGIQSSPSPFTNDGEHQPYYRLSASNIKVLVAGIDFDINILGEITPKL

SEQ ID NO: 19675 - protein, 1224 aa, unidentified
  REGION 1..1224: note = Cas Enzyme sequence
MKTRILGLDTGTNSLGWAVVDRDENNQYTPICREDLIFTEGVKQEKGVEFSLAAERTSYRASRRHYFRRRLRKVEVLKVLVKHKLCPPLSDEALNRWHTKKEYPLDEDFILWQRTSEADNKNPYHDRHICLHRKLNLKDSQTDRYTLGRALYHLTQRRGFLSNRLDQNEEAEETGKVKSAISELSKEMKEAGCEFLGEYFYLLYRTEGNRVRIRSRYTDREKHYLQEFKEICRVQELDEDLAKALEKTIFFQRPLKSQRQGVGKCTMEKGHSRCAVSHPLYEEYRMLCYLNNIRIKTPSDDRLRPLNAEEREKITPLFYQKSNFDFKKIAKKLAGKTPFGWIRDEEDWPYQFNYRMTQEAPACPTTAQLIKVFGEDWKAALAKTYTMRAKQDGTLKTEDEICTDIWNVLYSFSSKEKLKEFGLKKLQLDEAQAKAFSEIRLTRDFASLSLKAIRKILFFLRTDKDYSKAIFLANIPTIVGEEIWNNIERRSRLLNKVDLALRPQEEDDAEEHRTIAERIKAAVEAEVPNALIDLLYHPSMIEAYPDAKRNERFDCYQLGSPKTNAVRNPMAMRSLHMVRKVINHLLRKHIIDEKTEIHIEYARELNDANKRQAIADWQRELSKRHTAYAQNIRQLYKAETGLEIEPTKTDVLKYQLWEEQQHVCLYTGKKIGIADFLGANPKFDIEHTIPRSRGGDSTQENLTLCDSKFNRDIKRDKLPTKLDNYEQILARIEHWKKQCYALKLKRDGIRTHSGLEKSIKDSKIRRRHLIGLEYGYLKGKYDRFTMKEVPEGFSRRQGAGIGLISKYAGLFLKSLFKDPKNPNRSNVYVVKGAITAEFRKLWGLQPADEAKSRENHTHHCIDAYTIACIGPCEYAALAEYYRSDEEFKYGRRREKPQFEKPWSTFTEDLLKLQEELLIVHQTTDKLGKRDRRKVKTPRGKFLTGGDSARGRLHQETYYGAINYDGNIKYVVRKPLDSLTEKDLDKIVDETVKGIVKGAVEAKGSLKEALADGIYMNKEKGILIKRVRIFTRLTQPLALRSLRDQSQKEHKRKVYVTNEGNYMMAIYEGVIKGKTKREFDLVNNIEAAKFFRKRIGQEQDLPLMPEKSASDFPLKQTLKIGTLVLLYETSPSEIDFSDPKDVAKRLYKVVGLSTLRVSKYTYGIISLRHHQEARPTGDLKFQNKSFKNGEPSLPAMLLLHTQFNALVEGQDFDLDITGEITLKRP

SEQ ID NO: 19676 - protein, 1234 aa, unidentified
  REGION 1..1234: note = Cas Enzyme sequence
MPNFWSIFTENLQTHLMKTRILGLDTGTNSLGWAVVDRDENNQYTPICRGDLIFTEGVKQEKGIEFSLAAERTSYRASRRHYFRRRLRKVEVLKVLVKHKLCPPLSDEALNRWHTKKEYPLDEDFILWQRTSEVDNKNPYHDRHICLHHKLNLKDSQTDRYTLGRALYHLTQRRGFLSNRLDQNEEAEETGKVKSAISELSKEMKEAGCEFLGDYFYLLYRTEGNRVRIRSRYTDREKHYLQEFKEICHVQELDEDLAKALEKTIFFQRPLKSQRQGVGKCTMEKGHSRCAVSHPLYEEYRLLCYLNNIRIKTPFDDRLRPLNAEEREKITPLFYQKSNFDFKKIAKKLAGKTPFGWIRDEEDWPYQFNYRMTQEAPACPTTAQLIKVFGEDWKAALAETYTMSAKQDGTLKTEDEICTDIWNVLYSFSSKEKLKEFGLKKLQLDEVQAKAFSEIRLTRDFASLSLKAIRKILFFLRTGEDYSKAIFLANIPTIVGEEIWNNIERRSRLLNKVDLALRPQEEDDAEEHRTIAERIKAAVAAEVPNAPINLLYHPSMIEAYPDAKRNERFDCYQLGSPKTNAVRNPMAMRSLHMVRKVINHLLRKHIIDEKTEIHIEYARELNDANKRQAIADWQRELSKRHTAYAQNIRQLYKAETGLEIEPTKTDVLKYQLWEEQQHVCLYTGKKIGIADFLGANPKFDIEHTIPRSKGGDSTQENLTLCESKFNRDTKRDKLPTELDNYEEILARIEHWKKQCYALKLKRDGIRTHSGLEKSIKDSKIRRRHLVALEYSYLKGKYDRFTMKEVPEGFSRRQGAGIGLISKYAGLFLKSLFKDPKNPNRSNVYVVKGAITAEFRKLWGLQQVDETKSRENHTHHCIDAYTIACIGPCEYAALAAYYRSDEEFKYGRRREKPQFEKPWPTFTEDLLKLQEELLIVHQTTDKLGKRDRRKVKTPRGKFLTGGDSARGSLHQETYYGAINYDGNIKYVVRKPLDSLTEKDLDKIVDETVKGIVKGAVEAKGSLKEALADGIYMNKEKGILIKRVRMFTRVSDPIKLKQLRDISSKGYKQHIHVNKEENYLIAIYEGLNKKNQKQTETYTVDYLDAAKFYKDSKRRDKTNNLVSDYSEKYKLPLKYILKKRQMVLFYEHSPEEIRFRDKKDLSKRLYIVTCIEKDGRIQLLHHQTANTGGIKPSSSPFTNDGEHQTFYRLRASKLNILVAGVDFDINILGKITSKLQ

SEQ ID NO: 19677 - protein, 1375 aa, unidentified
  REGION 1..1375: note = Cas Enzyme sequence
MKKILGLDLGTTSIGWALVNECENEDEKSSIIRLGVRVNPLTTDEKGNFERGKAITTNSDRQQTHGARINLQRYKLRRKYLCDCLNKHGWIGSEPMYEDGKSSTFETYKLRAKAAVEEVSLHEFSRILFMMNKKRGYKSNRKAYDKEEGKLFDGMTVAKKLYEEHLTPAEYSLLLLNKGKRFTPEYYRSDLIEEFEKIWNEQKKYYPEILTDEFKRQLEAKTKTSTSKIFLGKYGIYSADLKGLDRKLQPIKWRVEALRQQIDKDVLAFVISDLKGQIANTSGLLGAISDRSKELYFNKQTIGQYLWASLKENPHVSVKNQPFYRQDYIDEFEKIWETQASFHKELTPELKQEIRDIIIFYQRPLKSKKGLISVCELEQRKVKITIDGKEKEITIGPKVAPKSSPMFQEFRIWQNLNNIQLIDNERNSKRSLYEEERNLLYEELSIRDRLSKAEALRVLGKKNRQWDLNYKELEGNRTQATLFSCYNKIIMMTGHEECNFKQLKAPEIRHYIKTIFKNLGFNTGILEFDSSLNGHELEQQPMYQLWHLLYSYESDKSRTGNEALLKKLETIFGFPREYASVLAEVAFEDSYGNLSVKAIREILPHLQAGLDYSQACKEAGYKHSRRSLTKEELDQKEYKEKLELLPKNSLHNPVVEKILNQMINVINAVIDEYGKPDEIRIELARELKIGAAERENMTRSISQGNAENKRIREILEKEFALSYISRNDIIKYKLYEELKSNGYKTLYSDTYIPKDMLFSKDFDIEHIIPKARLFDDSLSNKTIEARDVNIAKSNKTAFDYISGKYGQQGIEAYKKKLYILLQDGSINKAKYNRLLMKEADIPSDFINRDLQNTRYITRKAYEILSDLVRVVSPTSGAVTSRLREDWQLVDIMKELNFEKYQKLGLTEVIEDKDGRKIKRIKDWTKRNDHRHHAMDALTIAFTKPSFIQYLNNLNARSNKGDSIYAIENKELHREDGKLCFNAPLPINEFRAEAKKHLKAVLVSIKAKNKVMTQNVNKIKTKHGVIKKVQLTPRGELHNATFYGTKKRPIIKMVRVGAALDEVTIKKVSSSFIRKVLLDRLYEYNGDAKKAFTGRNSIDKNPIYIDEERKRTVPALVKTIEWEMYHPTRKLISPDLKIDKVIDKGIRDILKTRLAKFNGDAQKAFSNLDEDPIYKDEAKKIILKRVSLEGVSSVIPLHTLKDRSGKPITGKLGDYVQTSNNHHVAFYIDENGNLQDNIVSFFEAAERKSQGVPIIDKNFNHDIGWRFLFTMKQNEYFVFPNEVTGFNPSEVDLMNEANYDIISPNLYRVQTMSKVVYGKRIIRDYVFRHHLETTVEANANLKGLAYKQLKSLSYLEGIVKVRINCIGKIVAVGEYD

SEQ ID NO: 19678 - protein, 1106 aa, unidentified
  REGION 1..1106: note = Cas Enzyme sequence
MGRLVLGLDIGITSVGYGVIDIDNNVFVDYGVRLFKESDSENNVARRAHRGGRRLKRRRKNRLDDMKKLLFDAGILTKDYNPIKNIYEVRVKGLTEKLTNNELAAALLHITKNRGTTIEALESADADKEALGTKSVLAKNKEELREYEYICKVQLHRLKEYGNVRGTENNFKTIDYVKEARAILEYQGIDVELSDRILHIIQRRREYYEGPGSEKSPTKYGRWIEKGVEPIDLIEKMRGKCSIFHDELRAPKSSYSAELFNLLNDLNNISINGEKLTQEDKELVISEVNKIGEIKVNKLLKILNTKEEDVEGFRIDKNGKMLITDMKCYDQFKKIFDKNNEYAYRENKEIIDQIAEINTSKKGISERCEAIQKKFPAFDLNLVRDLAGMKGMTQYHSLSLKAIKIINDEMMKCPYNQMQVIHELGLQHYRKSYKGMKKIQADDEAILSPVAKRAQRETFKVINRLREIYGEFESIVVETTRDKNSAEKKKRIKNTQKYYEGRNKNVDKLLKEKGYDPALVNGKTKMKIKLYLDQDGKSAYTLVPLDLNLLISDPHAYEIDHIIPISISLDDSFNNKVLITHEENQIKGNRTPVFTYLNGLFKNCDLNTYKSAVKNNHNISRKKKHYMLYDKDITKYSNMKEFIARNLVDTSYANRVVLNTLTSYFKDNDISTNVHTIKGFATSLFRKRINLPKDREEDYLHHAIDALIIASVKKQPIFRDYLAKYNLDELYNKETGELIKVEDDDRVIDPVYIEFISNLKTIYEQSNQYYNGYISREEMKFKPIKISHKVDTKPNRQISDETIYSTRNVNGVERVVKKAKDIYDPKFAALTNDIINNQYHDKWIMAEKDEQTFEIIKSIVMEHFNTYKDDKDIYKSEVKKGVTVWSLKGSNNPLSHFKEEHGKVRKYSKKGNGPEITAMKYYEDELGNHVDITSKYNVHDKNVVLLQISPYRTDFYLSPKGKYVIVTIRYNNVFYKESVKKYVIDKDWYESEKKRKKIDESYQFVCSLHHDELLGVKLKDGKAYIYDQSTEGDGIKRHHHGQYEILKFTATNNDKNNRIEVKPIYTYCKKRCMPSCGTFIKLTKFATDVLGNLYEVKDNVLKLEFD

SEQ ID NO: 19679 - protein, 1244 aa, unidentified
  REGION 1..1244: note = Cas Enzyme sequence
MKKILGLDLGSASIGWALIKENGNTDNPKTEIIDLGCRIIPYDRTEGRDFSKGTGETRNAIRTRARTIRRGYDRYQMRRKYLTDILVKHSMMPDETLKALPKMQLWELRSKAVNEEISLQELGRILLFLNQKRGYKSSRSEANLDKKETEYVSAVKNRHELIKEQDLTIGQYFFQELKKDEFYRTKEKVFPREAYMEEFDRICKTQQAFHPELSQALVDKIRNEIIYYQRPLKSQKGLVSVCEFAGTWIKKDGKDYFIGPKVAPKSSPLFQVEKIWETINNIKLTSRSGIDLQLTHEQKAAVFKHLDNNEKLTVTDLFKILNLKKGSYVPNTQISKGLQGNLTKHLIRECLESKDVYSDLLRMNLNLKKVNSETYLYDRKTGEVTNSKPILEIDPCVEKEPLYKLWHTIYSINDRQECANALLKNFGIEEPVASKLASIDFSRQGFGNKSAKVIRKILPYLMEGDGYPEAMSYAGYSHSGTLSKEDNLTRKLENELKPIPKNSLRQPVVEKILNQMVNLVNAVIEKYGKPDEIRIELARELKQSREERNKTERSIRERERENETISKKLAEYGLRGTRNNIIKWRLYEEINSQGNKLNAICIYCGKPISLTEAILGNDIDVEHIIPKSKLFDDSQSNKTLAHRHCNRDKNEQTAYDFMKSKSEQAFNDYIERVNMLYANGVIGEAKRDKLLMTETKIPTDFIDRQLRESQYISRKAREILQTVCHNVWATSGKVTSELRYLWGWDDVTMNLQLPKYREIGLTEFQEWESDFGNHKHKKEVIKDWSKRDDQRHHAIDALTIACTKQGYIQRFNTLNSQKTKEELQSIVSKNKIIAREKLSLLEKYIISQRPIPVNEVENAVSRILISYKSGKRVAVKGKRKMGKRGDKRVVQSNIIVPRGALSEESVYGKINTIDRNKPLKYLFENSNLIVNPRVKEVIENRISQNGGNIKNAISSLRAEPLYIDKEKDLLLEKASCFKQEYVIRYKIDVNFNKVDKVIDDSIRYILQKRLNKFGGKPKEAFKDVSIEGNKSVKWYEDEGLPYPINSVRCFTGLSAVVPARKDEEGRDIGFVKPGNNHHIAIYEDSDGNKTEHVCTFWHAVERKRYNLPVKIKDSSIVWDKILDAPEGKYPNSFLERLPKPGLKLNLSIQQNEMFILDLPYEEAIRAITLKDNNIISDNLYRVQKIAEKNYVFRHHLETQIIDDKNAQANKRFVIIQSLGALYSHFPIKVKVDCLGNITNTLAND

SEQ ID NO: 19680 - protein, 1208 aa, unidentified
  REGION 1..1208: note = Cas Enzyme sequence
MNKTLGIDLGSNSLGWAVLDETLKQVSAQGVVIFPECIGIDNKPTETPAATRRKYRMARRLKFRRKARKWKLLGILIREKMCPLTLAELDAWKTKGIYPLANKAFLGWLKATDTSNPYCDRARAAEVKVPLETLGRALYHIAQRRGFKSSRKEAPPDTGDEDENKKLMEKAQGVVESGIAELSAAIEKSGAKTLGQYFFRLLEEDRNSPEKRRVRKHYTHRVEHYEKEFAVIMDCQGIPSGSTLRKDLYSALFMQRPLRSQRHLVGMCPLEPQSPRTFAGHPLFEEFRMWAFVNNLKFESPTGEEMPLTPEDRARVAGAFDYGKTTFKFKRITDFFKKDDRFKDYGWNKPEGWHFHHYKDAETLPSRSVGYRLRKYFGSIPYDEQQVVNALMFYEDVDRLIGWLKKHYPALDDAAAKLLASIRPSEATAQYSLKAIKRIVPFLRKGYQLYDATLLAKLPDFIADFDSHEDEICRNLLEIRHRQKEAREAAYSTGEKVVPFLDVFQDYLLTHWGVTEDQFKQLYVLRDSPYKTEKEGRIPAVQLGMLRNPLVQRALTTLRRLVNYLHDHGTIDEDTAIHVEMARSVNNYATRVAWQLWQKKRQEAREEARKTIEEHGCKVTEDAIERCLLWREQDGKCLYTGKSIGIEELLGGNAFDVEHTIPRSKSGDDSLANKTICEARYNRDVKKGRIPQECPNCAEIETRLRPWRENASRLEKDFLSQKAKSKGNPEARAKALAVKFELDYWRDKLRRFEITAVKLTDPREGLSKFKNRQLVDTGIMTKHAKALLETVYPRVLMVNGAATAFARKAWGLQPADEAKDRTNHMHHAKDAMVIAALTRARFNAICTALKDDAHAPKRECDVCPAPWDGFADDVRTAAETILVKHVLRRTTLKQSSKQTVLAKPHPDQKHPGRIVKYVHAKGDTVRGPLHKETFYGCIQKPGEDKKSYVVRKSLIGSLKAALKTAKDIVDPAVRDLVKEQLAALKSQNETNVEPGMIKMPSGVPVNKVRVIKGDVKNPQRLRVHAMSSRHDYKTFYYVTVAERSNFRMGVYDNDGKLSVVPDNSLEWAQNHKKTGYKTLDKRPGFIGFVYPGSLALTHATGNAEELHNLPPSELAKRLYKVRNIEGSGRLTLCLHTEARASTQLSADIKEANNHLAPGEMKKSPTGESKIDLKHPHELLRVSSGTYLKQMMFEGIHFKMMLDGTIRFL

SEQ ID NO: 19681 - protein, 1473 aa, unidentified
  REGION 1..1473: note = Cas Enzyme sequence
MNKKILGLDLGTNSIGWALVEQNFENKYGKILGMGSRIIPMSQDIICEFGKGNSVSQTAERTRFRSIRRLRERYLLRRERLHRVLNVLGFLPEHYAAEIDFEKRLGKFLDESEPKVAWKKNNEGKFEFLFQKSFAEMIEDFKSSGQEIKIPYDWTIYYLRKKALMAKIEKEELAWLILNFNQKRGYYQLRGEDDELPSNIKEYVELLTVVKIEKGEPDKKNNKKHWYNITLNNGWVYSATFSSEPQWLNAEKEFLVTEELDENGDIKIVKDRKQDKEGKEKRKITPLPTFDEIDLMSKADQDKIYKKIKAKTEITISNSGKTVGAYIYDTLLKKPQQKIRGKLIRTIERKFYKEELKSILQKQIELQPELFSNDLYNESIRELYRNNDSHQLQLSKKGFIHLFLEDIIFYQRPLRSQKSSISNCTLENRKYKDETGTEHTQWLKAIPKSNPYYQEYRIWQWMFNLSIYKKDDDRNVTAEFLNGLEDWESLFEFLNDRKEVEQKPLIKYFLELKGFKGKTLTAEVEKYRWNYVEDKKYPCNETKTLINTRLEKVQGVTNRFLTREIEQQLWHIIYSVTDKIDYEKALKSFAVKHQLDVTSFIEAFKKFPPFKSDYGSFSEKAIKKLLPLLRLGKYWSWDAIDKNSKDRIQKILSGEYDETIKDKIRDKALHFKQEDHFQGLQLWLAQYIVYGRHSEAAEIGKWNSVDDLEQYLQNFKQHSLRNPIVEQVVTETLRVVKDIWAKYGNGAKDFFDEIHIELGREMKLPAEERDRMTRQITENENTNLRIKALLAELMNDANVENVRPYSPMQQEILKIYEDGVLNSDIEIQEDILKISKTAQPSSSDLKRYKLWLEQKYRSPYTGEIIPLNKLFTSEYEIEHIIPQSRYFDDSFSNKVICEAAVNKLKDNHVGLAFIKNFHGQIVECGLGKKVKILEVNVYEEFVKQHYVKNRSKRNKLLLEDIPEKMIERQMNDTRYISKFISGILSNIVRAEVNDDGVNSKNVLQGNGKITSELKQDWGLNDVWNELIIPRFERMNKLTNSAHFTKWNENHQKFLPTVPLELSKGFSKKRIDHRHHALDALVIACATRDHINLLNNQSARSDTKRYDLKRKLMRFEKVVYNHPQTGERIEREVPKGFLKPWENFTADTKNRLENIIVSFKQNLRVINKATNYYEKWAIKDGVKAKETVEQKGVNWAIRKPMHKATVHGKVDLPRIKVPKGKILTATRMALDATYDLKSIEAITDTGIQKILKNYLATKGNNHELAFSPEGIEEMNKNIQNYNDGKPHQPIYKVRVFELGSKFQLGELGNKKTKYVEAAKGTNLFFAIYQDNNGKRSFETIPLNEVIERQKQGLSPVSQENEKGGQLLFHLSPNDLVYVPTVDERENASRIDFENLTKEQIKRLYNVNDFSSTCYFTPNNLAKAIAAKEVDLSFDKEKNKVTGSYDTKTASFEGEQIKDICIKLKVDRLGNISRG

SEQ ID NO: 19682 - protein, 1493 aa, unidentified
  REGION 1..1493: note = Cas Enzyme sequence
MKRILGLDLGTNSIGWAYLVFDDNGNLIKKIRLGSRIIPMSQDVMGKFESGISVSQTAERTQYRSTRHLRERSLQRRERLFRVLHMMGFLPQHFDQSIGWDKNNNKTYGKFLDESEPKLAWRRNKDGKMEFLFMDSFHEMIADFMAHDSSWTPDQKVPLDWTIYYLRSKALRAPISKEELAWIILNFNQKRGYYQLRGEEEEEDKTKRVEFLEARVVRVEATDRKKGKSTWYNVYLDNGMIDRRTSAISLENWVGQTRQFIVTTEYEADGVTLKLDKEGNVKRSFRIPKDDDWTLRKKRTEHDIEESGLHVGTFIYQALRDRPKVKIRGNFVHTIERKFYKQELRAILTKQAEFIPELQDQALLQDCIANLYPSNEAQRQKLRGKDFIYLFLDDIIFYQRPLKSKKNLISNCSLEKRISIDHSTGECIDRPIKCIARSNPYYQEFRLWQFITNIRLFDRDSQEDVTSRYLSTSEEWERLYAFLYNRKEINQDTLFKEFFGWKKPKGRNSVYPIHWNYAEDKEKTYPCNETRATLLTTFEKAEMNTAELNTREGEMQWWHLLYSVTDKLELEQALRKRGLSQEQIRVFTRIKPFEKDYGAFSEKAIKRFLTLLRKGSFWNADAIDTTTRARIDNIIAGNIDEKLRDKMQHKSYPLQKLEDFQGLPVWLASYIIYGRHSEVSEIVRWETLQDLQNYIHNFKQHSLRNPIVEQVVLETLRTVYDIWKKFGDIDEIHLEMGREMKKTAKQRQDDSQRIQRNENTKLRIKALLMELKNDATISDVHPYSPSQQDILRIYEEGALATLEKSDQDYDEIIKISQKSQPSASEMKRYKLWLEQKYQSPYTGRFISLTKLFTPAYEIEHVIPQKRFFDDSFSNKVICEAEINKAKSSMLAHEFITKRGGEIIHSQSLGDLRVLKVDDYESLVKHIYKDNATKRRKLLLDDIPTEFIQRQLNDSRYIARFIQSVLSNLVREEGEEEAKSKHVIVCTGGITNRLKKDWGLQDVWNHLVSPRYQRLNELTNSEDFGHWENKDGKRVFQTSMPIELQKGYSKKRIDHRHHAMDALVIACASHNIINYLNNENAASPQSREDLRKQLCDKGRTLRKPWKTFTQDVEQALHGVVVSFKNYVRIINKATNFYQHYEQGKKKYIPQKGETLWAIRKPMHKGMPFGRVNLRYPLMVSLAYALERPQNIVDKALREYILHLIAQNFDTKQLKKHFKSLGNKFENRDISKVEIWVMSDDREPLVASRKPLNENFDKESIAKITDTGIQKILLNFLKYKGDDPKVAFSPEGIIELNANIAKFNDGKSHQPIKKVRIFELLGNKYPVGQRGNRKTKFVEAQSGTNLYFAIFEDGEGKRSYETIQLIEVVERLKQGLSPVPDSNDKNISLKFFLSPNDLVYVPNEEEIGSNMKVEDLQRERIYKFIDSSNTTANFIPHRIATTLLNVKTPINNIQNELGLGSPQSKHQRALTGEIIKSVCWKLEVDRLGNITKIIR

SEQ ID NO: 19683 - protein, 1500 aa, unidentified
  REGION 1..1500: note = Cas Enzyme sequence
MKKVLGLDIGTNSVGWAVVNQNDKGEFLSIEKIGSRIIPMSQDVMDKFGAGQTESSTAQRTQYRGVRRLRERSLLRRERLHRVLHILHFLPQHYDAAIGWNKKENKTYGKFLPGVEVNIPWVATDQGHQFIFMDSYAEMLKDLKQHQPHLFEKSSTPVPLDWTIYYLRKKALTHAISKEELAWILLNFNQKRGYYQLRGEEVEDNTKREEFYALKVVKVELDEDNTSAKTWYKVHLENGFIYPCPSDTPIDNWVGMVKDFIVTTTLEKDGSEKRTADGEIKRSFRAPKEDDWTLLKKKTESELEKSGKQVGAFIYDTLLSNPDQKIIGGLIKTIERKYYKKELEQILETQQKFIAELSDKKLFQACAEELYPLNDSHRENLLERDFKHLFVQDIIFYHRPLKTKKSLISNCTYEYRTFYKNGEKQISPIKCIAKSNPLFQEFRVWQFVQNLRILQRQRSEGDSIKYNVDVTAEFLKDENDIANLFTWLNERKVIKQDQLLKSYFKLKVNKETKELVYRWNYVDDKNKEYPCNATRTHILSFLEKCKEEKRIEDDRFVYSLWHLLYSVVEPIELRGALAKFAEREHLHPSFVDVFAQFPPLEKEYGSYSEKAIKRLLPLMRMGDYWHEDKIDVKTKQRIQRIIDGEADDDITHRSREKVENLRSITDFKGLPLWKAGYVVYNRHSESGELTKWKTPHELSNYIQNEFKQYSLRNPIVEQIVLETLRVVHDLWVKHGDFSEIHLELGRDIKNSSDKRKRMAERQQENENSRQRVLEMLIDLKKEAAFADLNPYSPSQQEKLRIVEDGVLRSNIEIPKDIEKITKSAKPTSRELTKYRLWLDQKYRSPYTGQPISLAQLFTSKYEIEHVIPQAKYFDDSFTNKVICESEVNKEKGSMLAHEFILKNGGSTVNVGGRQVQVLKNDAYVELINRLYGKNNPVKAKKLLAEDIDEVVGDFSERQLNDTRYISRVVQKLLSNIVREEDEQESTSKHVIGCSGQVTTALKKDWGLNDIWNKIIQPRFERLNEMTATEDYGVWQSPNHFQIRVPEEIQKGFTKKRIDHRHHAMDALVIACATRSHINYISNRSGQDRNAKFETTRTDLRSKLCYKENSSGNNYNYIFNKPWDTFTQDAHRALENIVVSHKQNLRVLTKTNNYTQFINKDGKKDLQKQVKGDHFAIRKPMHDEFPFGRVSIRSINKKVALKRALENWKQIVDRKLKDKIRELIGAYGKYDAQTILKYFEDRDYKFNDISIRKVDTYVYNHNRAAKRKKLDDSFSESKIKELSDESIKRILINHLDSYGGDHKVAFTQENIHRMNENIQKLNGGKFHYPIKSVRIHSDLGEKIKLCANGINKYVNVGNNPYCAIYLDKNNKCKSMSISLDEVIENLYTKQVPVLKYKEGDKLKFYLGANDLVYVPTSQELINPDLVDFKNLRIDQIRRIYKMVKSSKTDCYFLPVTVAQVIIKKIEFGSQNCTQKDDAENMIKQICWKLKVNRLGEITDVK

SEQ ID NO: 19684 - protein, 1426 aa, unidentified
  REGION 1..1426: note = Cas Enzyme sequence
MKNILGLDLGTTSISFAHIVEDENKEKSEIKELGVRIVSLTTDEQSDFEKGKSITTNANRTLKHGARLNLDRYQQRRKFLIDLLQKANLITSSSILAENGKNTTHSTWQLRAKAVTERVEKEEFARVLLAINKKRGYKSSRKAKTEDEGQAIDGMAIAKRLYDENLTPGQLSLQLLQQNKKLLPDFYRSDLQREFDLVWNFQKQFYPDILTDSFYKELQGKGKDATSKAFSKRYHFDTAENKGSKESVRLQAYQWRAEAMSKQLSKEEVAYVLTEINNNLNNASGYLGAISDRSKELYFNRQTVGQYLYAQLQENRHNSLKNKVFYRQDYLDEFERIWETQASFHKELTEELKKQIRDVVIFYQRKLKSQKGLISFCEFESKEIEIEKDGKTITKSIGARVVPKSSPLFQEFKIWQILNNVTCKRKGIRKKKSSAKSTELDLFNEPSQTIFSLDMECKQLLFEELNLKGDLKSDKVLKLLGYSPQEWEINYNQLEGNRTQKALYEAYLKIVEMEAHDVKDILQIKSAKDDWSLDESPLSASEIKEKIKDIFQALGICTKILYFDPLLPVKEFEKQDSYQLWHLLYSYESDDSTSGNETLYRILEKKYAFKREHARILANVALQDGYGSLSTKAIRKLYPYIKENQYSTACEMAGYKHSKLSLTTEELEARELKNIIPLLKKNALRNPVVEKILNQMINVVNALIEKNSERDAEGKITKYFHFDEIRIELARELKKNAQERYEMTQNINKAKLEHQKISEILQKQFGIKNPTKSDIIRYRLYQELEHNGYKELYTNAPIARDMLFSKNIEIEHIVPKARVFDDSFSNKTLTFHRINSNKGEYTAFDYITSLNSEEELNQYLTRVENAYKTKSISLTKYKNLLKKASEIGNGFINRDLRDTQYIAKKAKEILFQVTKNVLSTSGSITDRLREDWGLVDVMKELNMPKYQSLGLTEVEERKEGNKVTVIKNWTKRNDHRHHAMDALTVAFTKPSYIQYLNHLNARKDENNKNYLVILAIEEKETIKVPTNNGKNKRVFIEPIPNFRQVAKKHLEEIFISHKAKNKVVTKNVNKPAGTDKQQITLTPRGQLHKETIYGKYQYYVNKEEKIGVKFDKETIAKVSNPVYREALLKRLQANDNDPKKAFTGKNTLSKKPIYLDEAKTKTLPEKVNLTYLEEDFSIRKDISPDNFKDLKSIEKVIDQGVKRILIKRLQAYGNDPKKAFVDLEKNPIWLNKEKGIAIKRVTISGVNNAQPLHIGKDHLGKTTLNKEGNEIPVDYVSTGNNHHVAIYRDKEGNLQEQIVSFFDAVVRAQQGLPIIDKTYKQAEGWQFLFTMKQNEMFVFPNATTGFNPAEIDLLDPKNKKQISPNLFRVQKIATKDYFFRHHLETNVETDNVLKNTTWKREGLSGLKDIVKVRINHLGDIVSIGEY

SEQ ID NO: 19685 - protein, 963 aa, unidentified
  REGION 1..963: note = Cas Enzyme sequence
SDKVLKLLGYSPQEWEINYNQLEGNRTQKSLYEAYLKIIEIEGYEVKDILQIKSTKDDWSLDESPLSASEIIERVKAIFQTLGICTKILYFDPLLPVKEFEQQYSYQLWHLLYSYESDDSTSGNETLYQILEKKYAFKREHARILANVALQDDYGSLSTKAIRKIYPYIKENQYSKACELAGYKHSKLSLTTEELEARELKNIIPLLKKNALRNPVVEKILNQMINVVNALIEKNSERDAEGKITKYFHFDEIRIELARELKKNAQERYEMTQNINKAKLEHQKISEKLQKQFGIKNPTKSDIIRYRLYQELEHNGYKELYTNTYIAPDVLFSKNIDIEHIVPKARVFDDSFSNKTLAFKEFNIKKGESTAFDYITSLNCEGELNQYLTRVENAYKTKSISLTKYKNLLKKASEIGDGFINRDLRDTQYIAKKAKEILFQVTKNVLSTSGSITDRLREDWGLVDVMKELNMPKYQSLGLTEVEERKDGNKVTVIKDWTKRNDHRHHAMDALTVAFTKPSYIQYLNHLNARKDENNKNYLVILAIEKKETIKVPTNNGKNKRVFIEPIPNFRQVAKKYLEEIFISHKAKNKVVTKNINKPAGTDKQQITLTPRGQLHKETIYGKYQYYVNKEEKVGVKFDERTITKVSNPLYREALLKRLQANDNDPKKAFTGKNALSKNPIYLDEAKTKTLPEKVNLTYLEEDFSIRKDISPDNFKDLKSIEKVIDQGVKRILIKRLQAYDNDPKKAFIDLEKNPIWLNKEKGIAIKRVTISGVSNAQPLHIGKDHLGKTTLNKEGKEVPVDYVSTGNNHHVAIYRDKEGNLQEQIVSFFEAVVRAQQGLPIIDKNYKQAEGWQFLFTMKQNEMFVFPNEATGFNPAEIDLLDPKNKKLISPNLFRVQTISIVKYGNSVVRDFKFRHHLEATLQDDKILQGITFQQIKSLEPLRNIVKVRLNHLGNIISVGEY

SEQ ID NO: 19686 - protein, 1435 aa, unidentified
  REGION 1..1435: note = Cas Enzyme sequence
MKNILGLDLGTTSIGFAHIVEDENKEKSEIKELGVRIVSLTTDEQSDFEKGKSISTNANRTLKHGARLNLDRYQQRRKYLIDLLQKANLITSSSILAENGKNTTHSTWQLRAKAVTERIEKEEFARVLLAINKKRGYKSSRKAKTEDEGQAIDGMAIAKRLYDENLTPGQLSLQLLQQNKKLLPDFYRSDLQREFDLVWNFQEQFYPNILTDAFYKELQGKGKDATSKAFSKRYHFDTAENKGSKESIRLQAYQWRSEAVSKQLSKEEVAYVLTEINNNLNNSSGYLGAISDRSKELYFNRQTVGQYLYAQLQENRHNSLKNKVFYRQDYLDEFERIWETQASFHKELTDELKKQIRDVVIFYQRKLKSQKGLISFCEFESKEIDIEKDGKTITKSIGARVVPKSSPLFQEFKIWQILNNVTCKRKGIRKKKSSTNPTQLDLFNEPSQTIFSLDMECKQLLFDELNLKGDLKSDKVLKLLGYSPQEWEINYNQLEGNRTQKSLYEAYLKIIEIEGYEVKDILQIKSTKDDWSLDESPLSASEIRERVKAIFQTLGICTKILYFDPLLPVKEFEQQYSYQLWHLLYSYESDDSTSGNETLYRILEKKYAFKREHARILANVALQDDYGSLSTKAIRKIYPYIKENQYSTACELAGYKHSKLSLTTEELEARELKNIIPLLRKNALRNPVVEKILNQMINVVNALIEKNSERDAEGKITKYFHFDEIRIELARELKKNAQERYEMTQNINKAKSEHQKISEKLQKQFGIKNPTKSDIIRYRLYQELEHNGYKELYTNTYIAPDVLFSKNIDIEHIIPKARVFDDSFSNKTLAFKDFNIKKGEYTAFDYITSLNNEEKLNQYLARVENAYKTKSISLTKCKNLLKKASEIGDGFINRDLRDTQYIAKKAKEILFQVTKNVLSTSGNITDRLREDWGLVNVMKELNMPKYQFLGLTEVEERKDGNKVTVIKDWTKRNDHRHHAMDALTVAFTKPSYIQYLNHLNARKDENNKNYSVILAIEKKETIKVPTNNGKNKRVFIEPIPNFRQVAKKYLEEIFISHKAKNKVVSKNINKPAGTDKQQITLTPRGQLHKETIYGKYQYYVNKEEKVGVKFDERTIIKVSNPLYREALLKRLQANDNDPKKAFTGKNALSKKPIYLDEAKTKTLPEKVNLTYLEEDFSIRKDISPDNFKDLKSIEKVIDQGVKRILIKRLQAYDNDPKKAFIDLEKNPIWLNKEKGIAIKRVTISGVSNAQPLHIGKDHLGKTTLNKEGKEVPVDYVSTGNNHHVAIYRDKEGNLQEQIVSFFEAVVRAQQGLPIIDKNYKQAEGWQFLFTMKQNEMFVFPNEATGFNPAEIDLLDPKNKKLISPNLFRVQTISIVKYGNSVVRDFKFRHHLEATLQDDKILQGITFQQIKSLEPLRNIVKVRLNHLGNIISVGEY

SEQ ID NO: 19687 - protein, 1435 aa, unidentified
  REGION 1..1435: note = Cas Enzyme sequence
MKNILGLDLGTTSIGFAHIVEDENKEKSEIKELGVRIVSLTTDEQSDFEKGKSISTNANRTLKHGARLNLDRYQQRRKYLIDLLQKANLITSSSILAENGKNTTHSTWQLRAKAVTERIEKEEFARILLAINKKRGYKSSRKAKTEDEGQAIDGMAIAKRLYDENLTPGQLSLQLLQQNKKLLPDFYRSDLQKEFDLVWNFQKQFYPDILTDSFYKELQGKGKDATSKAFSKRYHFDTAENKGSKESVRLQAYQWRAEAISKQLSKEEVAYVLTEINNNLNNASGYLGAISDRSKELYFNRQTVGQYLYAQLQENRHNSLKNKVFYRQDYLDEFERIWETQASFHKELTDELKKQIRDVVIFYQRKLKSQKGLISFCEFESKEIEIEKDGKTITKSIGARVVPKSSPLFQEFKIWQILNNVTCKRKGIRKKKSSAKSTELDLFNESSQAIFSLDMECKQLLFDELNLKGDLKSDKVLKLLGYSPQEWEINYNQLEGNRTQKALYEAYLKIVEMEAHDVKNILQIKSAKDDWSLDESPLSASEIKEKVKDIFQALGICTKILYFDPLLPVKEFEKQDSYQLWHLLYSYESDDSTSGNETLYRILEKKYAFKREHARILANVALQDDYGSLSTKAIRKIYPYIKENQYSKACELAGYKHSKLSLTTEELEARELKNIIPLLKKNALRNPVVEKILNQMINVVNALIEKNSERDAEGKITKYFHFDEIRIELARELKKNAQKRYEMTQNINKAKLEHQKISEILQKKFGIKNPTKSDIIRYRLYQELEHNGYKELYTNAPIARDMLFSKNIEIEHIVPKARVFDDSFSNKTLAFREFNIKKGESTAFDYITSLNSEEELNQYLTRVENAYKTKSISLTKYKNLLKKASEIGDGFINRDLRDTQYIAKKAKEILFQVTKNVLSTSGSITDRLREDWGLVDVMKELNMPKYQSLGLTEVEERKEGNKVTVIKNWTKRNDHRHHAMDALTVAFTKPSYIQYLNHLNARKDENNKNYSVILAIEEKETIKVPTNNGKNKRVFIEPIPNFRQVAKKHLEEIFISHKAKNKVVTKNVNKPAGTDKQQITLTPRGQLHKETIYGKYQYYVNKEEKIGVKFDKETIAKVSNPVYREALLKRLQANDNDPKKAFTGKNALSKNPIYLDEAKTKTLPEKVNLTYLEEDFSIRKDISPDNFKDLKSIEKVIDQGVKRILIKRLQAYGNDPKKAFVDLEKNPIWLNKEKGIAIKRVTISGVNNAQPLHIGKDHLGKTTLNKEGKEIPVDYVSTGNNHHVAIYRDKEGNLQEQIVSFFEAVVRAQQGLPIIDKNYKQAEGWQFLFTMKQNEMFVFPNEATGFNPAEIDLLDPKNKKLISPNLFRVQTISIVKYGNSVVRDFKFRHHLEATLQDDKILQGITFQQIKSLEPLRNIVKVRLNHLGNIISVGEY

SEQ ID NO: 19688 - protein, 1453 aa, unidentified
  REGION 1..1453: note = Cas Enzyme sequence
  REGION 1082..1085: note = misc_feature - Xaa can be any naturally occurring amino acid
MKRILGLDLGSNSIGWAFVEQDFENKQGKIIATGSRIIPMDQGILGDFERGNTVSQTAERTTYRSTRRLRERHLLRRERLHRVLHILGFLPPHYDAQIDFTKRYGKFIDNAEPKIAYNNGNFIFMNSFNEMIEDFKKYQPQLFYKKSNGEESKIPYDWTIYYLRKKALSQKITQQELAWLILHFNQKRGYYQLRGEEETENPNKEVAFHSLKVVDVEAEAPNKKGEIWYTIRLENGWIYRRTSKIPLDDWKGKTRDFIVTTDLNDDGTIKLDKEGKEKRSFRAPDENDWNLLKKKTEHDIDFSGKTVGAYIYDHLLQNPNQKIKGKLVRTIERKYYKDELKAILAKQIALQPELFTETLLADCIRELYRKNETQQQNLLSKDFLHLFVEDIIFYQRPLRSKKSTIANCTLEKRSYIDKETNERKDTPLKVCAKSNPYYQEFRVLQWLQNLRIYEIETDREVTAEFIETAEDYEALFNFLMSQKEIDNEGLLKYFLFAKNPQIKDKAAKSELKKWLTTYRWNYVYDAADNSSKKYPMNETGYDLQRYLQKVEGLPTNFLTFDITYRLWHLLYSVKDKVEFEKALKRFAKKKQLDETSFVESFKNFKPYPNEYGSFSEKAIKKLLPLMRFGNHWDFNRIDVSTQKRIDDLINGVANEDIRTIIREKAEKYQLNNETCFQGLPLWLAQYVVYNRHAEATDIEKWTSVSDLETYLEDFKQHSLRNPIVEQVVTETLRVVRDIWQQYGGGQANFFDEIHIELGRELKKTAEERKQLSNRNQENENTNLRIKKLLAELKEDASIQNVRPYSLVQQELLKIYEEGVFSSTDEIEEDIQKIRKKTEPSKADLQRYKLWLEQKYKSPYTGEVISLTKLFTEEYEIEHIIPQSRYYDDSFSNKVICESAVNKLKTNQLGLEFIQKHHGEKVCITGNKEVTIFTEEQYKDFVKKHYANNLAKQRKLLLNEIPEKTVARQLNDTRYISKYISEILSKIVRSDEKDEGVNSKNVIPCTGKITTALKQDWGLNDVWNELILPRFERMNLLTQTQLFTSYNDRLQKNLPTVPIEYSQGFQKKRIDHRHHAMDALVIXXXXNYMNNQHALDKSKDKKEKQQSRIDLRSILCEKKNNNWQFKKPWSTFTQEAKEALEHIVVSFKQNLRVINKATNYYEKWEEKNGVLVKKKVKQEGTNWAIRKPLHKETVSGKIILDKKVGKDKILTATRKAVDITFTEKIISSITDTGIQKILLNYLKYKGSPEVAFSAEGLEELNKNIAQYNDGKKHQPIYKVRIFEEGSKFPLGETGAKATKYVEAAKGTNLFFGVYQGKEKRSYATIPLNEVIERQKQGLPSVPERNEKGEPLLFSLSPNDLVYVPMEGEIAETIDFNNLSKEQKERIYKTVSFTGNECHFVKSTIASLIKSYDAKSKIGELGSLNKLEVTISGDSRIKEVCIKLKVDRLGNITKA

SEQ ID NO: 19689 - protein, 1392 aa, unidentified
  REGION 1..1392: note = Cas Enzyme sequence
  REGION 1385..1388: note = misc_feature - Xaa can be any naturally occurring amino acid
MKNILGLDLGSNSIGWALVQQDFENKQGRIMAAGSRIIPMDQSVLGDFEKGNTVSQTAERTTYRSTRRLRERHLLRRERLHRVLHILGFLPPHYDVQLDFTKRYGKFIDNAEPKIAYNNGTFIFMDSFNEMIEDFRKYQPQLFYKKPNGEESKIPYDWTIYYLRKKALSQKITQEELAWLILNFNQKRGYYQLRGEEEIQNPNKEIAFHSLKVVEVEAEAPNKKGEVWYTIHLENGWIYRRTSKISLKDWKGKTRDFIVTTDLNDDGTIKVDKEGNEKRFFRAPDENDWNLLKKKTEHDIDFSRKTVGAYIYDHLLQSPNQKIKGKLVRTIERKYYKDELKAILAKQIALQPELFTENLLASCIRELYRKNEIQQQNLLSKDFLHLFLEDIIFYQRPLRSKKSTIANCSLEKHSYIDKETNERKDAPIKVCAKSNPYYQEFRVLQWLQNLKIYKLETDCEVTAEFIKTAEDYQALFNFLMTQKEIDNEGLLKYFLLAKNPQIKDKAAKSELKKWLTTYRWNYVYDVADNSSKKYPMNETGYELQRYLQKVEGLPANFLTFELTYRLWHLLYSVKDKIEFEKALKKFAQKNQLDEASFVESFKNFKPYPNEYGTFSEKAIKKMLPLMRFGNHWDFSCIDVSTQKRIADLINGVENEDIRTIIREKAEKYQLNNETSFQGLPLWMAQYVVYNRHAEATDIEKWTSVSDLEAYLQDFKQHSLRNPIVEQVVTETLRVVRDIWQQYGGGQANFFDEIHIELGRELKNTSKERERLSKQNQENENTNLRIKKLLAELKEDTTIQNVRPYSPVQQELLKIYEEGVFSSTDEIDEDIQKIRKKAQPTTSEIQRYKLWLEQKYRSPYTGEVISLTKLFTEEYEIEHIIPQSRYYDDSFSNKVICESAVNKLKTNQLGLEFIQNYHGEKVPLAGNKEVTIFTEEQYKEFVKKHYANNSVKQQKLLLNEIPEKMVARQMNDTRYISKYISEILSKIVRSDEKDEGVNSKNIIPCTGKITTALKQDWGLNDVWNELILPRFERMNQLTQTQLFTSYNDRFQKNLPTVPMEYSQGFQKKRIDHRHHAMDALVIACATRKHINYMNNQHALDKSKDEKEKQQSRIDLRTILCEKKNNNWQFKKPWGTFTQEAKEALEHIVVSFKQNLRVINKATNYYEKWEEKNGVLVKKKVKQEGTNWAIRKPLHKETVSGKIVLDRKIGKDKILTATRKAVDITFTEKIISSITDTGIQKILLNYLNYKGSPEVAFSAEGLEELNKNIAQYNNGKKHQPIYKVRIFEEGSKFSLGETGTKTTKYVEAAKGTNLFFGVYQGKEKRTYATIPLNEVIERQKQGLPSAPERNEKGDPLLFSLSPNDLVYVPMEGEIAETIDFNNLSKEXXXXNVIL

SEQ ID NO: 19690 - protein, 1174 aa, unidentified
  REGION 1..1174: note = Cas Enzyme sequence
KELQGKGKDATSKAFSKRYHFDTAENKGSKESVRLQAYQWRAEAVSKQLSKEEVAYVLTEINNNLNNASGYLGAISDRSKELYFNRQTVGQYLYAQLQENRHNSLKNKVFYRQDYLDEFERIWETQALFHKELTDELKKQIRDVVIFYQRKPKSQKGLISFCEFESKEIEIEKDGKTITKNIGARVVPKSSPLFQEFKIWQILNNVICKRKGIRKKKISAKTTQLDLLNESSQTIFSLDMECKQLLFDELNLKGDLKSDKVLKLLGYSPQEWEINYNQLEGNRTQKALYEAYLKIVEMEAHDVKDILQIKSTKDDWSLDESPLSASEIRESVKAIFQALGICTKILYFDPLLPVKDFEEQDSYQLWHLLYSYESDDSTSGNETLYRILEKKYAFKREHARILANVALQDDYGSLSTKAIRKIYPNIKENQYSTACEMAGYKHSKLSLTTEELEARELKNIIPLLKKNALRNPVVEKILNQMINVVNALIEKNSERDAEGKITKYFHFDEIRIELARELKKNAQKRYEMTQNINKAKSEHQKISEILQKEFGIKNPTKSDIIRYRLYKELEHNGYKELYTNTYIAPDVLFSKNIDIEHIVPKARVFDDSFSNKTLAFKDFNIKKGESTAFDYITSLKNEEKLNQYLARVENAYKTKNISPAKYKNLLKKASEIGDGFINRDLRDTQYIAKKAKEILFQVTKNVLSTSGSITDRLREDWSLVDVMKELNMPKYQSLGLTEVEERKDGNKVTVIKDWTKRNDHRHHAMDALTVAFTKPSYIQYLNHLNARKDENNKNYSVILAIEKKETIKVPTNNGKNKRVFIEPIPNFRQVAKKHLEEIFISHKAKNKVVTKNTNKPAGTNKQQITLTPRGQLHKETIYGKYQYYVNKEEKVGVKFDKETIAKVSNPLYREALLKRLQANDNDPKKAFTGKNALSKNPIYLDEAKTKTLPEKVNLTYLEEDFSVRKKIVPKNPTSKEFVPNLKSIEKVVDEGVRNILIERLRVYNNDPEKAFVDLEKNPIWLNKEKGIAIKRVTISGVNNANLQEQIVSFFEAVVRTQQGLPIIDKTYKQEEGWQFLFTMKQNEMFVFPNEATGFNPAEIDLLDPKNKKQISPNLFRVQKIATKDYFFRHHLETNVETDNVLKNTTWKREGLSGLKDIVKVRINHLGDIVSIGEY

SEQ ID NO: 19691 - protein, 1502 aa, unidentified
  REGION 1..1502: note = Cas Enzyme sequence
MFSQRNHPYCELLSNCATKVGIIFLMCKYFYIEKIITFVLSKNIIPMKHILGLDLGSNSIGWALVQQDFENKQGKIIATGSRIIPMDQGILGDFERGNTVSQTAERTTYRSTRRLRERHLLRRERLHRVLHILGFLPPHYDAQIDFTKRYGKFIDNAEPKIAYNNGNFIFMNSFNEMIEDFKKHQPQLFYKKSNGKESKIPYDWTIYYLRKKALSQKITQQELAWLILHFNQKRGYYQLRGEEETENSNKEVAFHSLKVVDVEAEAPNKKGEIWYTICLENGWIYRRTSKIPLDDWKGKTRDFIVTTDLNDDGTIKLDKEGKEKRSFRAPDENDWNLLKKKTEHDIDFSGKTVGAYIYDHLLQNPNQKIKGKLVRTIERKYYKNELKAILTQQIALQPELFTENLLADCIRELYRKNEVQQQNLLSKDFLHLFVEDIIFYQRPLRSKKSTIANCTLERRSYIDKETNERKNASIKVCAKSNPYYQEFRVLQWLQNLRIYEIETDREVTAEFIETAEDYEALFNFLMSQKEIDNEGLLKYFLFAKNPQIKDKVAKSELKKWLTTYRWNYVYDAADNSSKKYPMNETGYDLQRYLQKVEGLPANFLTFDITYRLWHLLYSVKDKVEFEKALKKFAQEYQLDEASFVDSFKNFKPYPNEYGSFSEKAIKKLLPLMRFGNHWDFNRIDVSTQKRIDDLINGVANDEIRTIIREKAEKYQLNSETCFQGLPLWLAQYVVYNRHAEAADIEKWTSVNDLEAYLEDFKQHSLRNPIVEQVITETLRVVRDIWQRYGGGQANFFDEIHIELGRELKKTAEERKQLSNRNQENENTNLRIKKLLAELKEDASIQNVRPYSPVQQELLKIYEEGVFSATDEVEEDIQKIRKKAEPTTPEIQRYKLWLEQKYKSPYTGEVISLTKLFTEEYEIEHIIPQSRYYDDSLSNKVICESAVNKLKTNQLGLEFIQNHHGEKVRITGNKEVTIFTEEQYKEFVKKHYANNSAKQQKLLLNEIPEKMVARQLNDTRYISKYISEILSKIVRSEEKDEGVNSKNIIPCTGKITTALKQDWGLNDVWNELILPRFERMNQLTQTQLFTSYNDRLQKNLPTVPIEYSQGFQKKRIDHRHHAMDALVIACATREHINYMNNQHALDKSKDKKEKQQSRIDLRTILCEKKNNNWQFKKPWSTFTQEAQEALEHIVVSFKQNLRVINKATNYYEKWEEKNGVLVKKKVKQEGTNWAIRKPLHKETVSGKIILDKKVGKDKILTATRKAVDITFTEKIISSITDTGIQKILLNYLKYKGSPEVAFSAEGLEELNKNIAQYNDGKKHQPIYKVRIFEEGSKFPLGETGAKATKYVEAAKGTNLFFGIYQGKEKRTYATIPLNEVIERQKQGLPSVPERNEKGEPLLFSLSPNDLVYVPMEGEATETIDFNNLSKEQKERIYNVNDFSSTTCYFTPNRVAKAICPKEIDKKGKDSGSFDTKTASIEGVQIKEVCIKLKVDRLGNITKA

SEQ ID NO: 19692 - protein, 1480 aa, unidentified
  REGION 1..1480: note = Cas Enzyme sequence
MRTILGLDLGTNSIGWAKVCINDDGNYVREIKLGSRIIPMSQDTLSNFDKGVTDSPTAARTGFRGIRRIRERVLQRRERLHRVLHVMGFLPPHYENAIGWNREEATTYGKFLDNGEPKLAWERQEDGSMRFLFMDSFHEMMADFAKCQPGLVADGRKIPLDWTLYYLRKKALTQAIKKEELAWILLNFNQKRGYYQLRGEEDEEDPTKREEYYELKVVSVEAAEEGKGGNTWYNVTLENGWIYRRQSKIELNDWTGKIRQFIVTTEYEKDGITIKKDKNGEVKRSFRAPSEDDWGLRKKRTESRLEDSGKTVGEFIYDHILSEPADKIRGNFIRTIERKFYKKELEAILREQSKYHKELKDLNTLVNCIKELYPNNKAHQDSLMKKDMIYLLITDLIFYQRPLKSKKSLIADCPYEYYEYVIKETGEIKRQGIKCIAKSNPYYQEFRLWQFIINLRLFDRTNDKEITSEYLSSMEDYTKLFIYLNDRKEINQEILLKDFFKQKKVKMGMEKEFPIRWNYIEDKEKKYPCNETRHELLAALDKAGIDHSWLDDKERFYRLWHLLYSVESKEEAEGALRKLNDNEDFVNAFLKIKPFKKEYGAYSEKAIKKLLAVMRIGTLWNEDDICEQTRNRIQSIINGDIDEKIKERMGRTFSQLSDFQGLPEWLACYVVYGRHSETTDIQRWTKPENLMSYIKGFKQHSLRNPIVEQCILETLRTVHDIWKEAGHIDEIHIELGRSMKSTADQRARMSKSILQNENTNLRIKSLLMELKNAKEFENVRPYSPMQQEILRIYEEGALQELTKEDDQYPEISKISQMAQPSAKELLKYRLWLDQKYCSPYTGKPISLSKLFTSAYQIEHIIPQSRYFDDSFSNKVICEAEVNQLKSNMLGYEFIKKHSGEIVHCTMVGDVKILDAKEYYNFVTEHYANNRRKKEKLLLEDIPQEFLNRQMNDSRYISKKVMALLSNIVREEGEQEAKSKFVIACSGGITDRLKHDWGLIDVWNSIVYPRFERLNKLTNTENFGHWENKEGKQVFQTSLPLELQRGFSKKRIDHRHHAMDALVIACASNNIINYLNNESAKSQEKREDLRKKLCDKNRIIRKPWETFTQDVRTALEDVVVSFKNYVRVINKATNYYEKYDKNGKKGIAEQKGQDMWAIRKPMHKETVFGQVNLRRKVTVKLKDALEKIPAIYDKELRDYINILVAKQFNKKQILAHFKSINYRLNMKSVDKVDVWQFSNEKEPMVATRKSVDTSFDAKRIATITDTGIQKILRNYLETKDNDPNIAFTPEGIAEMNKHITEYNNGKQHQPILKVRVSEPKGAKYQVGETGNKTSKFVEAQKGTNLYFAIYEDKEGNRSYSTIPLNEVIERLKQGLSPAEDLNKRGENLKFYLSPNDLVYVPTEEEKLSGECKLNKDRIYKMVSSTGNECYFIPYTVSNVIFNKVEFESLNKMGRALTGEMIKAVCRKLEIDRLGNILKIIK

SEQ ID NO: 19693 - protein, 1497 aa, unidentified
  REGION 1..1497: note = Cas Enzyme sequence
MKTILGLDLGTNSIGWAKVCIDDNGNYLRDIKLGSRIIPMSQDVLGNFDKGVTESQTSVRTGYRGIRRLRERSLLRRERLHRVLHVLGYLPPHYDCSIGWNRNEPSTYGKYLNHSEPKLAWERQEDGSMRFIFMDSFHEMMADFAKRQPSLVSDGKRIPLDWTIYYLRKKALSQAIRKDELAWILLNFNQKRGYYQLRGEEDDTNSAKCEEYYELKVISVEADEEGKGGNTWYNVKLENGWIYRRQSKISLSDWVGKTREFIVTTEYEKDGVTLKRNKDGEIKRSFRSPSEDDWGLRKKRTEERLESSKMTVGAFVYEHLLSEPSDKIRGKFIRTIERKYYKEELYAILREQSKYHEELHSEGALKKCAEELYKNNQPHRDSLLKKDLIYLLLDDLIFYQRPLKTKKSLISECPYEAYSYVDKETGEIKRQGIKCIAKSNPYYQEFRLWQFISNLRFFDKVDDKDVTADYLSTRDDYVRLFAYLNDRKDINQETLLKDFLKLKKVIINSEKEFSVRWNYIEDKEKRYPCNETRHELLLALDRAGIDRSWLDEEGREYRLWHLLYSVESKEETEGALRKLKDDDEFIKSFLKIKPFKKEYGAYSEKAIKKLLAVMRIGSLWSEADICRTTRENITKILKGDIDEKFKEKISSCLSSYNQVSDFQGLPVWLACYVVYGRHSEAAEIQHWKTPKDLLVYINGFKQHSLRNPIVEQCILETLRTVHDIWKEAGHIDEIHVELGRNMKSTADQRARMSGNILRNENTNLRIKSLLLELKNDPDIKDIRPYSPMQQEKLRIYEEGALQELTKDDKDFAEIIKISTMAQPSAKELLRYKLWLDQKYCSPYTGRSISLAKLFTSAYQIEHVIPQSRYFDDSFNNKVICESEVNGLKDNMLGYEFIKECGGEIVHCTMLGDVKILSENEYKDFVNDHYAHNRRKRENLLLEDIPQEFLNRQMNDSRYISKVVKALLSNIVRAEGEEEATSKFVVSCSGGITDRLKKDWGLNDVWNKIVYPRFERLNKLTGTDSFGQWENKEGKKVFQTSVPLELQRGFNKKRIDHRHHAMDALVIACTSRGIVNYLNNESADNPKKREDLRQKLCDKNRIIRKPWDTFTQDATAALEDVVVSFKNYVRVINKATNYYEKYDKNGKKGIAEQKGQEMWAIRKPMHKETVFGRVNLRRKVTVKLKDALENIPSICDKTLRDYVNGLVKKNFKTKHLIAHFKSLNYRLNRQHIEKVEVWQFSDKKEQLVATRKPLDTSFDNKHIDSITDTGIQKILKNYLQAKGGDPNIAFTPEGIVELNQNISLYNDGKQHQPILKVRVFEPKGAKYCVGQNGNKSAKYVEAQKGTNLYFAIYEDEEGKRSYETIPLNEVVERLKQGLSPVPEKNKAQIPLKFYLSPNDLVYVPDTDDANEIKKEQIYKFVDSSGTTANFIPHRSSDLIYNVDKKFATSFCNREVIQNEYGIGSPQSKNQKAISGEMVKAICWKLVVDRLGNIIKIIK

SEQ ID NO: 19694 - protein, 1604 aa, unidentified
  REGION 1..1604: note = Cas Enzyme sequence
MYCNNNLFFLHLQTLVKKLLKKKRNTMENNVFNTARKILGLDIGTNSIGWALIDENSIDNEYVEKIIASGSRILGMDTDILKKFDQGQKVSINENRRIKRGARRLQQRYKNRRKRLLQVFKLLNWLPENFKIGGSNEIPDKILIPENIKYERINKLKEFLNLTENENISDELLVYFLKFYALENQITKEEFATILYHYNQKRGFKSSRKEKKTEIIDKKEEEEEQIIENFKIKNITDTGFKTKKAQNFILKIETEERGIGTFFYSSIPNWIGKNIDFIVTEKYNKKLKKDEIYYNLPKSDDIKFGKVISIVDTNEKTRFASIFKLEFQLSDGKIIDGFANKKSLPDWIGKEMEMNIKTETNKDGEATIIFKQVDSSNISETDNAKRRDELEKYLTENPDLTVTKYFLDNLKKERNFRIKNNIVYRKRYQEELLKIYEKQKELNSDFLKVSENNLQLIAKELYKNNKQNQNAIIKNDLKYLLVNDIIYYQRPLKSQKASIGNCTFEKFNFTDKTGKEYTSYYKVCPQSSLLFQEYRIWQNIHNLKIENIRTREDVTTEILTSQNKEKLFELFDNHVKVSLKTILKTLNLTEKEYELNFKTELWGNETKNKILNKVPDDKKIIFTENHEKLHFLWHILYSLNEDKDVINAIKSNFGFDEEICKNLAKINFDLKYASISAKAIKKVLPLMRCGKYWNEKDICPQALENIDRITETDEFIKKMPDKTRTKLFELKTLNDFQGLSSYLALSVVYGSHSDLDKEETYKSWKEIQPITLNSLRNPIVEQILNETQQVVKDIWKTYFAENERPDEIRIELSRELKNNAKEREQITKAIGNSTKDNERIKQILTELKLGSSDKQRDIEKLKLFIESGGEDSQKKFNDIKSFSKEDLKFKLWLECKHVSPYTGEPIILSELFTAKYQIEHIIPKTRFFDDSMQNKTICEYFINDEKGALTAYEYMKSKSYKNCKFGSFEEYEKFVTETFKKNKAKNRFLAKEIPQDFVNRQLKDSQYIAKKATQILSRICNVTTTSGGITDFLRQNWGVNDIFKELCQERYERLTAIKPDIDWITKKIITDHETNTEREVTVYKDFSKRIDHRHHALDAIVIACTKQGFIQRINNLHQEYQKFIYDLVKKEEVKKILEKNNIEITYNFAKDILQINACEDLRQYLKDKKVKSLYKIRQPHKHFTTIVKDALENIIISHKKKNKILTKARNFYQKYEFDENGNPIKKRKFKQENTIYSVKGALHQETINGMREIRTYKSVSIKEAIIKLDKIADKKHKIKILKATADFNNDIKKIEKYFKENPLTIDGKVAIYEHTTVYTSKQELIFKNIQSKVYTRKYIGKILDKETANQMLLHLVYENIKEIPDKELLNNKLYLDYILERERPFYEIDNSTKFKLNSLIEFIDKNCEPKNAFNADGVNKFNENRKIPVLKVTVYETSKEERKCLNPDNKFNKKFVQIGNNPFFVIYEKFASETQTLKRDFESLNLYDVVTCMINGMDYIPRKEGYEKYFFLQTDDLVYVPEKDENNAEIDWNNKKEISKRIYKVVKSSGKTCYFIPHNIAKILANKIEFDTQNCIATLNGMSIKEFCFKLEIDRLGNIKPVKS

SEQ ID NO: 19695 - protein, 912 aa, unidentified
  REGION 1..912: note = Cas Enzyme sequence
MKKWKSFLSFLRKSKPNFPFEDIAKRIAGKGNYSYYKDENDFPYVFNYPMYQSVSGCPTTAQLIDIFGANWVDTIKNSYVGAGNKNDEQIINDIWHVLRTFTDEDKLVAFGKCKLGLSGDDALKFSKISMRDDYASLSLNAINKILPYLRDGLLYSHSVFLANMGKVVPAEVWNSLHDRKIIIEEVVHIVNTFSEDDIKNKRTIEGNIGDFLSNNFNLSNGALDKLYHPSMIDTYPDTLPDEKGIKMLGSPRTDAIRNPMAMRAFFRLRALVNALIKEGKIDSATKVNIEFARELNDANKRKAIERYQRDREAERKQYVLAICEHLPGYEPSEDDLLKYRLWEEQNHKCLYTGKEIALTDFIGANPKFDIEHTIPRSSGGDDSIENKTLCDSHFNRDKKGTKIPSQLDNHSDIMARIGKWKDKYEQLDKEIDVQVSRSKRAATKEAKDAAMQQKHYLIMQRNYWRSKYGRFEMAEVPSGFKNSQGVDNSIIAKYGRLYLKTVFPRTYTVKGLATADFRKLWGLQDEYAKKERVNHVHHCIDAITIACIGRKDYDYMAHYFFDLERYRNCQSGNKPEYPKPWPTFTEDVKNIDNSVLVSHYTPDNLSKQSKRKLRVKGKIQYDTDGNPKYEQGDTVRGELHQSTFYGAIMRNDELKYVVRKNLGDLKESDVAKIVDDVVKEKIQKAIVEKGFKKATSEPVWMNEGKGVQIKKVRCFTPSIVKPIHLKKQRDLSKHDYKQDYYVANDNNYCMAIYEGLDCDGKLKRDFAIINNLDAAKFYKKKRNNPQEKLFNEKSKNGFPLKYILKKGTMVLFWEKDPSEIWSLSKEELKNRLYKVIGMTTLIVQNKYSYGMLDLKYHQEARIKGELNPKKGLWLSNEKYRPLITINHNQFNAIVQGYDFEFSVTGEITPIKR

SEQ ID NO: 19696 - protein, 1186 aa, unidentified
  REGION 1..1186: note = Cas Enzyme sequence
MKKVLGLDLGVASIGWAFIQEDEAKAEILGMGVRIIPLNPDERDEFTAGNAISKNAKRRMKRGMRRNIYRRTLRKDLLRKALVEAGIDPGKELFEGLSKLSLWELRAKAASEQISLEELGRVLYHLNQKRGFKSNRKTDGAEEDPKKESEYKAEIRKNAQMLEESKQTIGQYMFNELSNDQYFKLKGRIFPRQAYANEFNAIWECQSKFYSNTLTEELRIRIQDEIIFHQRPLKSQKALVSRCEFEKRYQWVNGKKMDVSPRVTPKSSPLAQWSKIYEAVNNIRFKDEYGKPIEVSTDLLAKVSDMLKWKAKMSSGEIIKVLGVPKDSTHNITDKDKGIQGDTTLSTIATAVKGLDGEAELIALLQDFSVNIDLKADVEQTLVDEETGEVFNFYSKRINDSFEKTNYYRLWHLLYSVDNEETLIKNLVEDFNCSFEMARRLVKIDFTKAGFSNKSAAAIKKILPYLMEGNGYSRAMECAGYRHSDYLDKAENEARVLLDKIPLLQKNSLRQPVVEKVLNQLINIVNAIIEHPSYGRPDEIRVELARELKQSKDERNRTSSNISKNEKRNKEIEERLRTEYGFVKITKSLINKVKIYEEVGGISPYTGKRIALADFLNGAGVDVEHIIPKSRLFDDSLSNKTMAESWVNKAKGNMTAFDFMQAQPIAGLQSFDNYISMVNLWLKAGANGGKINYTKFQRLICTEKDIPKDFIERQLRQTQYISKKASQVLGLACRNVHATSGGVTDFLREKWGWNDVLKKVNWERYEKLGLTSIETREDGKRIYNIEGWSKRDDHRHHAIDALVVACTKQSYIQSLNQLNQFVNKTNTATGLKDAEHFKLKDIAGKAPFLVDDIVERASKIIVSFKPGKRVSSKSKNKATGHVSIIPRGALSKETVYGKIKIQSKREVQLNKNFNAEWLIADKFLRVVIRERIKEYNGDFAKAFKAPIFLADGVTAIKKVEIYEWNEEAVVKYPLASIKLKDVEYVVDPAVKQKLQAFFDKYPNEKEAIKNIGTEPIWFNEEKKIPIHTVRLRTGLGKVVPQKQVSPTEAKGFVDSGNNHHLAVYERPDGTLFDVMISFQEAFERKANSIPLYLNEYEGAKLKWKFEQNDLFEIPNADGKVMYYRMQKVTKAASGQFDIFLRLISETELIDTKENILMNVYYRMQSIGALQKINPKAIRLNTLGEIL

SEQ ID NO: 19697 - protein, 1213 aa, unidentified
  REGION 1..1213: note = Cas Enzyme sequence
MEKRLGIDVGTNSLGWAIVEVDDEGCTLLDRGVDIFQEGVAREKNQEKPAVQDRTDARALRRHYFRRRLRKIALLRVLVRHDLCPALSEEQLNAWQGKGIYPLDDAFIRWQRTDDNADRNPYRDRFRCLTEELDLACREERYVLGRALYHLCQRRGFLSNRKDAGNEAEEGKVKQEIKTLSADMAAAGCEYLGEYFYRLYQRKEKIRKHYTARNEHYLAEFRAICRKQRLDEELRQALEKAIFYQRPLKSQKGLVGKCTFEKDKSRCPVSHPRFEEFRMLQFINNVRVTGPGDAEPRPLSPEEVEIVRPLFLRKSKPHFDFEDIAKKIAGKGNYACRGELLQAPYRFNCAGKSTVTGSPVSALFASVFGDDWQREICSLYTLGAGKNEEQILNDVWHVLFAFEDEERLQAWLQEKLQLSADDAKTLAAFRLPQGYASLSLNVINKILPYLRRGYRYDEAVFFANLGKVLPAEVYADPARRREVEQGISAQMDDLGDGEKTRKEERIRDYLRRYWGVEEKRLERLYHPSMIEAYPSASPNGQGLLQLGSPRIPAVRNPMAMRALFRLRVLLNELLREGKIDRGTKINIELARELNDANKRKAIERYQREREAENRKYAEEIRQQYVEATGHSIEPSEEDILKYRLWVEQGHCSLYTGKTIGISEFLGDGRRYDIEHTVPRSRGGEDAQYNKTLCEEEFNRDIKRDKLPSELANHTAILACVESCGWFERIEGLEHRVWGADRRAKSATTKSAKDFAIQDRHYWRIHLDYWRRKCEAFTMTEVPEGFSNRQGVDVGIIGRYARLYLQTVFDRVYTVKGATTAAFRRMWGLQEEYAAKERVNHVHHCIDAITIACIGSREYALWAQYVRQDELYRRGEADKPRCGKPWPTFTEDVRATADELLISHHTPDNMPKQSRKRLRVRGKVQRNDRGEVKYMQGDTARGALHQQTFYGAIERDGEIRYVVRKSLDQLLPADVEKIVDEAVRQKVREAVEAYGFKEATDPTKHTVWMNEEKQIPIRKVRILTGVKNPILLKPHRDVSVKEYKRYYHVVNDGNYCMAIYEGRDRQGRLKRTFEIVNKLEAARYFKRSADRESRPDLVPLSDVNGYSLKYLLKTGTMVLFYENSPDELYECSVGELAKRLYKVVGMAQDGRVQFLFHQEARDRKAVTAECGMGISVFDARHPAPKLRIRVSNFKMFVEGYDFELTVTGEVKFKR

SEQ ID NO: 19698 - protein, 1213 aa, unidentified
  REGION 1..1213: note = Cas Enzyme sequence
MEKRLGIDVGTNSLGWAIVEVDDEGCTLLDRGVDIFQEGVAREKNQEKPAVQDRTDARALRRHYFRRRLRKIALLRVLVRHDLCPALSEEQLNAWQSKGIYPLDDAFIRWQRTDDNADRNPYRDRFRCLTEELDLACREERYVLGRALYHLCQRRGFLSNRKDAGNEAEEGKVKQEIKTLSADMAAAGCEYLGEYFYRLYQRKEKIRKHYTARNEHYLAEFRAICRKQRLDEELRQALEKAIFYQRPLKSQKGLVGKCTFEKDKSRCPVSHPRFEEFRMLQFINNVRVTGPGDAEPRPLSPEEVEIVRPLFLRKSKPHFDFEDIAKKIAGKGNYACRGELLQAPYRFNCAGKSTVTGSPVSALFASVFGDDWQREICSLYTLGAGKNEEQILNDVWHVLFAFEDEERLQAWLQEKLQLSADDAKTLAAFRLPQGYASLSLNVINKILPYLRRGYRYDEAVFFANLGKVLPAEVYADPARRREVEQGISAQMDDLGDGEKTRKEERIRDYLRRYWGVEEKRLERLYHPSMIEAYPSASPNGQGLLQLGSPRIPAVRNPMAMRALFRLRVLLNELLREGKIDRGTKINIELARELNDANKRKAIERYQREREAENRKYAEEIRQQYVEATGHSIEPSEEDILKYRLWVEQGHCSLYTGKTIGISEFLGDGRRYDIEHTVPRSRGGEDAQYNKTLCEEEFNRDIKRDKLPSELANHTAILACVESCGWFERIEGLEHRVWGADRRAKSATTKSAKDFAIQDRHYWRMHLDYWRRKCEAFTMTEVPEGFSNRQGVDVGIIGRYARLYLQTVFDRVYTVKGATTAAFRRMWGLQEEYAAKERVNHVHHCIDAITIACIGSREYALWAQYVRQDELYRRGEADKPRCGKPWPTFTEDVRATADELLISHHTPDNMPKQSRKRLRVRGKVQRNDRGEVKYMQGDTARGALHQQTFYGAIERDGEIRYVVRKSLDQLLPTDVDKIVDETVKRKVQEAIEAFGFKEAMDPQKHTVWMNKDKNVPIRKVRILTGVKNPILLKPHRDVSVKEYKRYYHVVNDGNYCMAIYEGRDRQGRLKRTFEIVNKLEAARYFKRSADRESRPDLVPLSDVNGYSLKYLLKTGTMVLFYENSPDELYECSVGELAKRLYKVVGMAQDGRVQFLFHQEARDRKAVTAECGMGISVFDARHPAPKLRIRVSNFKMFVEGYDFELTVTGEVKFKR

SEQ ID NO: 19699 - protein, 1213 aa, unidentified
  REGION 1..1213: note = Cas Enzyme sequence
MEKRLGIDVGTNSLGWAIVEVDDEGCTLLDRGVDIFQEGVAREKNQEKPAVQDRTDARALRRHYFRRRLRKIALLRVLVRHDLCPALSEEQLNAWQGKGIYPLDDAFIRWQRTDDNADRNPYRDRFRCLTEELDLACREERYVLGRALYHLCQRRGFLSNRKDAGNEAEEGKVKQEIKTLSADMAAAGCEYLGEYFYRLYQRKEKIRKHYTARNEHYLAEFRAICRKQRLDEELRQALEKAIFYQRPLKSQKGLVGKCTFEKDKSRCPVSHPRFEEFRMLQFINNVRVTGPGDAEPRPLSPEEVEIVRPLFLRKSKPHFDFEDIAKKIAGKGNYACRGELLQAPYRFNCAGKSTVTGSPVSALFASVFGDDWQREICSLYTLGAGKNEEQILNDVWHVLFAFEDEERLQAWLQEKLQLSADDAKTLAAFRLPQGYASLSLNVINKILPYLRRGYRYDEAVFFANLGKVLPAEVYADPARRREVEQGISAQMDDLGDGEKTRKEERIRDYLRRYWGVEEKRLERLYHPSMIEAYPSASPNGQGLLQLGSPRIPAVRNPMAMRALFRLRVLLNELLREGKIDRGTKINIELARELNDANKRKAIERYQREREAENRKYAEEIRQQYVEATGHSIEPSEEDILKYRLWVEQGHCSLYTGKTIGISEFLGDGRRYDIEHTVPRSRGGEDAQYNKTLCEEEFNRDIKRDKLPSELANHTAILACVESCGWFERIEGLEHRVWGADRRAKSATTKSAKDFAIQDRHYWRMHLDYWRRKCEAFTMTEVPEGFSNRQGVDVGIIGRYARLYLQTVFDRVYTVKGATTAAFRRMWGLQEEYAAKERVNHVHHCIDAITIACIGSREYALWAQYVRQDELYRRGEADKPRCGKPWPTFTEDVRATADELLISHHTPDNMPKQSRKRLRVRGKVQRNDRGEVKYMQGDTARGALHQQTFYGAIERDGEIRYVVRKSLDQLLPADVEKIVDEAVRQKVREAVEAYGFKEATDPTKHTVWMNEEKRIPIRKVRILTGVKNPILLKPHRDVSVKEYKRYYHVVNDGNYCMAIYEGRDRQGRLKRTFEIVNKLEAARYFKRSADRESRPDLVPLSDVNGYSLKYLLKTGTMVLFYENSPDELYECSVGELAKRLYKVVGMAQDGRVQFLFHQEARDQKAVTAECGMGISVFDARHPAPKLRIRVSNFKMFVEGYDFELTVTGEVKFKR

SEQ ID NO: 19700 - protein, 1225 aa, unidentified
  REGION 1..1225: note = Cas Enzyme sequence
MSKRILGIDVGTNSLGWAVVDRTDCDNYTLVKRGDVIFQEGVNIEKGNIEKSRASERTGHRSTRKHYFRRRMLKIKVLEILVEHQLCPYLSHEELHQWMTRKVYPTNEDFRLWLRTNDANDQNPYHDRHVCLHERLDLRLQENRYRLGRALYHLAQRRGFLSNRLEQNSKTDETGAVNSGISQLNEEMEKAGCQYLGDYFYRLYQECGNQVTLRSRYTDRIQHYQKEFEAICQRQQLSDELVDKLRRAIYFQRPLKSQRAGVGKCTFEPDKPRCALSHPRYEEFRMLSFLNNVKVKGPSDDSLRPLSPSEKEKIKPLFLRKSKANFDFEDIAKAIAGKGKYACIRDKEGAQKPYQFNYALSQGVSGCPVTAKLTAVFGESWERNLVNAYRSRNDTRKSDEEIVNEVWNVLYSFSSKEKLRAWGMEKLGLDEACAGEFADITLPTAFAALSLKAVNKILPFLRQGFIYSHAVMLANIPYIIGMDRWNDPRQRQFIMDNLQELLDNFTASDKALQQTLDFCIKDFLLNNYELAPGKADRLYHPSMIETYPDAKADGQGIYQLGSPATNAIRNPMAMRSLHILRRVVNQLLKEKTIDSETEVHIEYARELNDANRRWAINQWQREQESRRKDYAEQIRKVYADEFGKVIEPTQEELLKYQLWEEQQHLCLYTGEQIGLTDFIGPNPRYDIEHTIPRSVGGDSTRMNLTLCERTYNRTVKGNRMPSQLAEHESILTRIKPWKDKYEELTVKINKLRTHPGMDKASKDNIIRKRHLLELERDYWFQKYQRFTMTEVPEGFSLRQGTGIGLIGKYAGLFLKSLFHHVKERNRKQVYVIKGPITAEFRRLWGLQNLYEQKSRDNHAHHCIDAIVIACINPAEYARMASYYRQEEDFRLNKGNKPVFPKPWTTFTQDLQALEAELLVVHETRNNLTKKARKRIRTKGGNVLSESDSARGSLHNDTYYGAIQKDGVIRYVVRKALSSLSEKDVKDIVDKTVREKVQAAIQEKGAKKALAGTIYMNEEKGITIKKVRCFTKIASPLAIRRHRDASAKEYKRPYYVTNESNYVMGIYEGCIKKKTKREFILVNNLEAVRQLKTARKQGVVSSILPPVSAKSQFPLKYRLYTGTLVLLYENSPEEIDFTNQADICKRLYKVTGLSSMTVTGNQYGTIQLRYHQEARQAKDLKAQNGAYKEGEEHRPAIMMLHTQFKALVEGTDFRMNILGEIEPLRK

SEQ ID NO: 19701 - protein, 1216 aa, unidentified
  REGION 1..1216: note = Cas Enzyme sequence
VGTNSLGWAVVDRTDCDNYTLVKRGDVIFQEGVNIEKGNIEKSRASERTGHRSTRKHYFRRRMLKIKVLEILVEHQLCPYLSHEELHQWMTRKVYPTNEDFRLWLRTNDANDQNPYHDRHVCLHERLDLRLQENRYRLGRALYHLAQRRGFLSNRLEQNSKTDETGAVKSDISQLNEEMEKAGCQYLGDYFYQLYQEYGNQVALRIRYTDRKQHYQKEFEAICQRQQLSDSLVDKLRRAIYFQRPLKSQRAGVGKCTFEPDKPRCALSHPRYEEFRMLSFLNNVKVKGPSDDSLRPLSPSEKEKIKPLFLRKSKANFDFEDIAKAIAGKGKYACIRDKEGAQKPYQFNYALSQGVSGCPVTAKLIAVFGESWERNLVNAYRSRNDMRKSDEEIVNEVWNVLYSFSSKEKLRAWGMEKLGLDEACAGEFADITLPTAFAALSLKAVNKILPFLRQGFIYSHAVMLANIPYIIGMDRWNDPRQRQFIMDNLQELLDNFTASDKALQQTLDFCIKDFLLNNYELAPGKADRLYHPSMIETYPDAKADGQGIYQLGSPATNAIRNPMAMRSLHILRRVVNQLLREKIIDSETEVHIEYARELNDANRRWAINQWQREQESRRKDYAEQIRKVYADEFGKVIEPTQEELLKYQLWEEQQHLCLYTGEQIGLTDFIGPNPRYDIEHTIPRSVGGDSTRMNLTLCERTYNRTVKGNRMPSQLAEHESILTRIKPWKDKYEELTVKINKQRTWPGMDKASKDNIIRKRHLLELKRDYWFQKYQRFTMTEVPEGFSLRQGTGIGLIGKYAGLFLKSLFHHVKERNRKQVYVIKGPITAEFRRLWGLQNLYEQKSRDNHAHHCIDAIVIACINPAEYARMASYYRQEEDFRLNKGNKPVFPKPWTTFTQDLQALEAELLVVHETRNNLTKKARKRIRTKGGNVLSESDSARGSLHNDTYYGAIQKDGVIRYVVRKALSSLSEKDVKDIVDKTVREKVQAAIQEKGAKEALAGTIYMNEEKGITIKKVRCFTKIASPLAIRRHRDASAKEYKRPYYVTNESNYVMGIYEGCIKKKTKREFILVNNLEAVRQLKTARKQGVVSSILPPVSAKSQFPLKYRLYTGTLVLLYENSPEEIDFTNQADICKRLYKVTGLSSMTVTGNQYGTIQLRYHQEARQAKDLKAQNGAYKEGEEHRPVIFLYHTQFKALVEGTDFRMNILGEIEPLRK

SEQ ID NO: 19702 - protein, 1214 aa, unidentified
  REGION 1..1214: note = Cas Enzyme sequence
MTKILGLDLGTNSIGWAITEQQDDHFTLLDRGVDIFQEGVNRTKSGEEPMVKIRTDARALRRHYYRRRLRKIEVLKVLVANNLCPYLGDEQLDAWRYKKQYPLAEEFMQWLRSSDSNNPYTDRFKSLTEALNLNKIEDRYTLGRALYHLSQRRGFLSNRKDNESNDDGTVKGAITKLDKDMLAEGCTYLGEFYYKLFVAGKKIRTGDAYGYAGRIAHYEKEFNAICEKQGLSDDLRTALHRAIFFQRPLKSQKGLVGSCTFEKDKARCPISHPRFEEFRMWSFLNNVKVKTYLDDEYRPLNEEEIRKVLPLFYRKSKANFDFEDIAKAIAGKKKGSYAYKEDKCEAPYRFNFRMSTSVSGCLVMAQLREIFGEDWEDSISEVYLKGEGKSQEQIVNDVWHALYFFDDNEKLHTWARINLQLNDDEANKFVKIKIPQDYGSLSLCAINKILSWLRIGYRYDEAVFLANLPKVVSANVWCDENRRKIVIDAVKVTVADSYNAKGASKENEIYNTLLDCGLSNDEIHIDRLYHPSMIETYQDAKPNGQGLTLLGSPRTRSVRNPMAMRALFRLRALINQLFKDGKIDSETKINIEFARGLNNANKRKAIEVYQREQEKRHKEYADNIRKLYKVECGADIEPTDDDILKYQLWEEQNHLCLYTGRNIGICDFIGADPHFDIEHTVPRSRGGDNSQMNKTLCERGFNRDVKKGKLPSELANHTEVLARIEQLGWSAKCEELHRQIERTKGSFSTKEIKDAMIQKRHRLMMELDYWRGKLMRFSMDEVPDGFSNRQGVDIGIIGRYARLYLKTAFEKVYVVKGATTADFRRAWGLQEEYAKKERVNHVHHCIDAITIACIDGKSYQRWTAYQQEVEYTENHSISRPQFPKPWPTFTEDVKAVAEDLFVSHYTANNIPKHSCKKLRVRGKVQLNADGKPIYVQGDTARAALHQQTFYGAIKRDDELKYVVRKSLNSLQQTDVDKIVDDAVRECVKAAVEREGFKDAMSKPICFNEAKGVYIKKVRIYTPSITSPIHLKKHQMLSRFDHKQEYYVANDGNYCMAIYEGTDARGKTKRTFQIVNNLEAAKFYNGKTNRYDLVPQSDSNDYPLKYILRTGTMVLFYENSSEELYECSRSELPKRLYKVTGMSEQVVSGQYHYGTFTFRHHKEARPAGELKAKGGEYKQGEEYRPIIGLKHTQLNALVEGYDFWLTVTGEIKFKH

SEQ ID NO: 19703 - protein, 1217 aa, unidentified
  REGION 1..1217: note = Cas Enzyme sequence
MTKILGLDLGTNSIGWAITEQQEDHFTLLDRGVDIFQEGVAREKGEEKPMVQTRTDARALRRHYYRRRLRKIELLKVLVENDMCPYLSPDELNGWRYEKHYPTSEEFLAWQRTDDNTNKNPYYDRHIALTEELDLTIRANRHLLGRALYHLAQRRGFLSNRKDQSSDNDGKVNGGISELTKNMEKAGCEYLGNYFYHLYHSGDNIRARYTGRKEHYLVEFDAICQKQRLSEELKKTLYRAIFFQRPLKSQKGLVGGCTFEKGKARCPISHPRFEEYRMWSFINNIKVKTPYGEELRDLLPEEVQLIEPLFYRKTKEHFDFEDIAKKISGGKKGSYAHISDKVDAAYKFNIKMSHTVSGSPVTASLRSIFGEDWLATMCSLYLKGEGKTPDQILGDVWHVLFSFDDEDKLSEWAKTNLQLTEEQAKEFVKIPIKQGYASLSLCAINRILPWLRNGYRYDEAVFLANLDKVVPLEVWSNTTKRSHIVECVSNTIANFAPTKAGKTKEDAIYSTLLDCGLYGDELKMDRLYHPSKVESYKDAQPNAKGLILLGSPRTSSVRNPMAMRALFRLRALVNQLLKDGKIDSKTKINIEFARGLNDANMRAAIERYQRENEKRHREYADEIAKLFKEECGVDITPTEDDILKYQLWIEQNKLCLYTGEQISITDFIGANPKYDIEHTIPRSRGGDNSQMNKTLCQSDFNRHIKCEKLPAQLANHTEIMARIEQLGWDKEVEALEKRIFGQDRAAKSAATKEAKDRAIRERHFLRMKLNYLRGKLSRFETTEVPEGFSNRQGVDIGIIGKYAKMYLETVFDRVFTVKGATTADFRKMWGLQEEYTKKERTNHVHHCIDAITIACIDAGTYAKWAQFLRDTERYYWHRDLRPVVEKPWPTFTEDVKAVAEELLISHHTANNLPKHSKKAMRVRGRIQRNEAGQIKYMQGDTARGVLHQQTFYGAIKRDDEIKYVVRKKLDELKTMADVDKIVDDAVRECVKAAIDREGFKEAMSKPILFNASKGVYIKKVRIYASSVTSPIHLKPHRDLSRHEHKQHYHVANDSNYCMAIYEGEVRGKTKRTFELVNNLEAALFYNSKSDNETIVPQVKDGLPLKYLLRTGTMVLFYETSPEEFYECTKADLVKRLYKVTGMSEQVVSGIYHYGTFTLKHHQEARPAGDLKAKGGEYKMGEPYRPVIGIKHTQFNAIVEGYDFELTVTGEIRFKHKF

SEQ ID NO: 19704 - protein, 1204 aa, unidentified
  REGION 1..1204: note = Cas Enzyme sequence
MNKILGIDTGTNSLGWAIVEKKGNGGYTLLEHGVNVFQEGVKIEKGNESSKASERTEHRSVRKHYWRRKVRKVRLLTILAAENLCPPVSKEELRLWRTRKVYPQNESFLDWQRTNEQENVNPYYFRYLCLTKKLDLTLLPNRYILGRALYHLNQRRGFLSNRKEETKESDGAVKQGISQLSEDMEKAGCSYIGEYFYQLYQKGERIRAHYTDRKEHYLNEFHAICEKQELDVALVEKLEKAIFTQRPLKSQKQQVGKCTFEPKKARCSASHPLFEEFRMYQFLNSIKMKSPADADLRPLTQEEKQQVVPLFMRYNKSDRTFNFEDIAKKLTGKNKYAYAGKPAGKPYLFNYQMDTKVSRCPVTAQLRNIFGDDWVTGAHEVYTLAEGKSRLEVMNDIWHVLFFYSDTEKLQEFAEKRLQLSTDEAEAFSKIQLPGEYAALSLHAIKKILPYMRDYNLIYSKAVFLANLCEVLPSYIWNTLESRETVIESIIELMDDDELYAGIPVEQRVKEFLQNRYQVSEENLKKLYHPSMIESYPRQRSNDQGIYQLGSPRINSVRNPMAMHSLFRLRKVVNTLLAEGKIDEDTTIHIEFARELNDANRRKAIQTVQRNNEKERDAVRKKIQEFYDERNIKAIPSEMEILRYQLWEEQNHVCLYTGDKIGCADFLGSNPKYDIEHTVPRSAGGDSTKMNLTLCQNKFNRETKKNMLPAQLANHEDILQCIETWKEKYEELEKQIRKLKGSSASTKDLKDLIIQKRHRLMLERDYWKGKYNRFIMTEVPEGFSRRQGTDISVISRYARLYLRSVFRKVYIVKGIATSDFRKIWGIQEEFEKKERVNHCHHCIDAITIACIGLDEYDKLAQYYHELEDFEKYGTKKPQFAKPWENFVADIKHIQDDLLVAHYTQDNLPKSARRRIVTPEGKVLSKGDVARGSLHLDTYYGAIERDGEIKYVVRKSLATLDEKDVKNIVDDEVRARVEEAIATYQGLKKAVEADGIWMNREKGVRISKVRVYTGSVKHPINIRRQRDLSVHEYKQQYHVQNNRNYLMAIYTGKTDKGKEKREFTIVSNIAAGNYYRRSRQYTESEKQLVPEINAKGYKLEYLLKIGGMVLLYQNSPEEVWNADSKEIQRRLYKVTGMSTSENSGRIFLTHHQEARPSEEVDVKIGAYVENEELRHSIRLNHTQIKALVEGKDFRMNEIGEITRLT

SEQ ID NO: 19705 - protein, 1002 aa, unidentified
  REGION 1..1002: note = Cas Enzyme sequence
MKKILGLDLGTTSIGWAFVKEAEDGDNEPSSIVKIGVRVNPLTTDEQKDFEKGKSVSVNADRTLKRGARRNLQRYKQRRGNLIEVLKQNNLINTDSILAENDKDTTHFTYAIRAKAAAEGITKEEFARILLMINKKRGYKSSRKATKEDEGQAIDGMAVAKQLYEDNLTPGQLSYQFLKEGKKHLPDFYRSDLQAELSRVWDYQEKFYPNILTAEFKKELEGKGQRATSAIFWNKYKFNTAENKGTRDEKKLKAYEWRSKAINSQLAIEEVAFVITEINNNINNSSGYLGAISDRSKELYFNKQTIGQYLFNQLQNNPHTRMKNQVFYRQDYFDEFETIWETQAKYHAELTLVLKEEIRDIIIFYQRKLKSQKGLVSFCEFESKKVEYEIDGKTVIKTIGARVIPKSSPLFQEFKIWQNLNNIELKNKKDKSRILIKDFDLDIKEQLFNELNIKGNLTKAKILPILVDKPNDWELNYMVIEGNRTHQALYESYFKMMEYESHDDIDLEKLTAAEMKSAVLSFFETQHIDRTILDFNAELDGNHFEKQPAYQFWHLLYAYEGDNSNTGNDKLYELLKSKFGFKKEYASILANIKIQDDYGSLSAKAIKKIFPFIKENNYSDACALAGYNHSSSLTKEENDKRPLKGELKILPKNSLRNPVVEKILNQMVNVINAIIKDPPLGKPDEIRIELARELKKNAKEREEDTKRINEAKSNHDKIREILIREDKIPNPTRNDIIRYKLYQELKFNAYKDLYTNEYIARQDLFTKKYDIDHIIPQASLFDDSFSNKTLAPREANYTKGNRTAYDYIDKDRGAESLTDYLERVEMLYQVNYKSKDEGISKAKYKKLLLKGSEIGEGFIQRDLRDTQYIAKKAKEMLHEVCRTVVATTGSITDKLRDDWGLVNVMQELNMDKYRKLGLTEMIEKKDGGFKERIVDWTKRNDHRHHAMDALTIAFTKHEHIQYLNNLNAKTKEDKKGKEIYAIEQKITEKFDKDKRRFKSPLD

SEQ ID NO: 19706 - protein, 1166 aa, unidentified
  REGION 1..1166: note = Cas Enzyme sequence
MGEMMHLNRKAEVPKPTDLNYRIGLDIGIASVGWAVLENNTHDEPFRIIDLGVRIFDTAEQPKTGASLALPRREARSARRRLRRRGHRLERIKKLFEAEGLINIEEFEARYKRTGLPDVYKLRYEGLDRRLTNDELAQILLHIAKHRGFKSTSKAADGADSDTGEVKKGISANKTLMQEKRYRTVGEMIYLDEKFRTDCPWNENGYILTPRNKSGDYKHTVLRDMLADEVMKIFKAQRALGNDAATEKLERAYLDIMLSQRSFDMGPGAPSRYAMEGFEDRVGLCTFEGKNGEKRAPKAAYTSEFFVALEKINHTKIVSADGSTRFFTSDERHAIIALMHRQQTVKYTAVRKTIGLAEEDKFYNLNYSQKSGSKKSPEDTDFVKMENYHKIRKALREEVASEHLSPDKIKLYDDIARILTLYKNDDSRIRRLAEHDIASECYDALLEMSPSKFHNLSLKAMGKIIPFLLQGNTYDKACELAGYDFRTENNGEKSILLKGKNITNIVNDITNPVVRRSVSQTIKVINAIILEYGSPQAVNIELAREMSKDFDERRKMKSDMETREKENDKVLSRVREYKPNPTGQDIVKFRLWEEQGGVCLYSGDKIDINDLFSSNGGYDVDHILPYSITFDDSYRNKVLVKASENRQKGNRTPYEYIMAEKGEQAWNEYETLVRNTVKDYKKQLKLLKKHISDEEKAEFKERNLTDTKYITRIIYNMIRQNLVLKPYFNLERERKKQVMAVNGAITHYLSKRWGLAGKDRRTDTHHAQDAVVIACTTDGMINRISRYSKGRELAYSRGFGFVDEETGEILNRDNFSREDWDEKFGVRLPMPWEHFVDELDIRMSRYSTMGEGVSSGTSPREFILSHRDVFNWINYPEWMFVEGRPGRRGVLDGIFVSRMPNHKVSGQAHEETIRSAKYYEDGGCGVEKGYVVYKTAITNLKLDKNGEISNYFNPESDSLLYNALVKRLKDYENDPKKAFEKAFYKPKSDGTNGPIVKKVKVFEKKTIGVLLEKVKGFANNDSMIRVDIYCVNGKYYFVPVYASDVVRDRLPNKCAAKNKNSSDWEIVDDKYFLFSLYKNDLLYIKKDKLPLKSIDECKYPIPNSSKGVYMYFGGADVSGLAFSCEAHDKSFSFRSSVVTVDKLCKCQVDVLGNVSFVKNEKRMTFN

SEQ ID NO: 19707 - protein, 1168 aa, unidentified
  REGION 1..1168: note = Cas Enzyme sequence
MEEMKHLNRKAEVPKPTDLNYRIGLDIGIASVGWAVLENNTHDEPFRIIDLGVRIFDTAEQPKTGASLALPRREARSARRRLRRRGHRLERIKKLFEAEGLINIEEFEARYKRTGLPDVYKLRYEGLDRRLTNDELAQVLLHIAKHRGFKSTSKAADGADSDTGEVKKGISANKTLMQEKRYRTVGEMIYLDEKFRTDCPWNENGYILTPRNKSGDYKHTVLRDMLADEVMKIFKAQRALGNDAATEKLERAYLDIMLSQRSFDMGPGAPSRYAMEGFEDRVGLCTFEGKNGEKRAPKAAYTSEFFVALEKINHTKIVSADGSTRFFTSDERHAIIALMHRQQTVKYTAVRKTIGLAEEDKFYNLNYSQKSGSKKSPEDTDFVKMENYHKIRKALREEVASEHLSPDKIKLYDDIARILTLYKNDDSRIRRLAEHDIASECYDALLEMSPSKFHNLSLKAMGKIIPFLLQGNTYDKACELAGYDFRTENNGEKSILLKGKNITNIVNDITNPVVRRSVSQTIKVINAIILEYGSPQAVNIELAREMSKDFDERRKMKSDMETREKENDKVLSRVREYKPNPTGQDIVKFRLWEEQGGVCLYSGDKIDINDLFSSNGGYDVDHILPYSITFDDSYRNKVLVKASENRQKGNRTPYEYIMAEKGEQAWNEYETLVRNTVKDYKKQLKLLKKHISDEEKAEFKERNLTDTKYITRIIYNMIRQNLVLKPYFNLERERKKQVMAVNGAITHYLSKRWGLAGKDRRTDTHHAQDAVVIACTTDGMINRISRYSKGRELAYSRGFGFVDEETGEILNRDNFSREDWDEKFGVRLPMPWEHFVDELDIRMSRYSTMGEGVSSGTSPREFILSHRDVFNWINYPEWMFVESRPGRRGVLDGIFVSRMPNHKVSGQAHEETIRSAKYYEDGGSVFETGGYVVTKKSIQDIKLKDGEIKEFFNPDSDRLLYEALVDRLNQYGNDPKKAFAEPFHKPKSDGTPGPVVKKIKVFEKQTSGVLVREGNGIAANGSMVRIDVFCEENKGKKKYYFVPIYTADVVKKRLPNRAATQAKMPSEWRLMNDENFIFSLYSRDLIYIESDKGVQTKDIDNVTGKVEKMYAYYTGADTSTASIAGKLHDSSAMFRGLGIQSLRKLQKCQIDVLGNISFVSKEKRMTFN

SEQ ID NO: 19708 - protein, 1166 aa, unidentified
  REGION 1..1166: note = Cas Enzyme sequence
MEEMKHLNRKAEVPKPTDLNYRIGLDIGIASVGWAVLENNTHDEPFRIIDLGVRIFDTAEQPKTGASLALPRREARSARRRLRRRGHRLERIKKLFEAEGLINIEEFEARYKRTGLPDVYKLRYEGLDRRLTNDELAQVLLHIAKHRGFKSTSKAADGADSDTGEVKKGISANKTLMQEKRYRTVGEMIYLDEKFRTDCPWNENGYILTPRNKSGDYKHTVLRDMLADEVMKIFKAQRALGNDAATEKLERAYLDIMLSQRSFDMGPGAPSRYAMEGFEDRVGLCTFEGKNGEKRAPKAAYTSEFFVALEKINHTKIVSADGSTRFFTSDERHAIIALMHRQQTVKYTAVRKTIGLAEEDKFYNLNYSQKSGSKKSPEDTDFVKMENYHKIRKALREEVASEHLSPDKIKLYDDIARILTLYKNDDSRIRRLAEHDIASECYDALLEMSPSKFHNLSLKAMGKIIPFLLQGNTYDKACELAGYDFRTENNGEKSILLKGKNITNIVNDITNPVVRRSVSQTIKVINAIILEYGSPQAVNIELAREMSKDFDERRKMKSDMETREKENDKVLSRVREYKPNPTGQDIVKFRLWEEQGGVCLYSGDKIDINDLFSSNGGYDVDHILPYSITFDDSYRNKVLVKASENRQKGNRTPYEYIMAEKGEQAWNEYETLVRNTVKDYKKQLKLLKKHISDEEKAEFKERNLTDTKYITRIIYNMIRQNLVLKPYFNLERERKKQVMAVNGAITHYLSKRWGLAGKDRRTDTHHAQDAVVIACTTDGMINRISRYSKGRELAYSRGFEFVDEETGEILNRDNFSREDWDEKFGVRLPMPWEHFVDELDIRMSRYSTMGEGVSSGTSPREFILSHRDVFNWINYPEWMFVEGRPGRRGVLDGIFVSRMPNHKVSGQAHEETIRSAKYYEDGGCGVEKGYVVYKTAITNLKLDKNGEISNYFNPESDSLLYNALVKRLKDYENDPKKAFEKAFYKPKSDGTNGPIVKKVKVFEKKTIGVLLEKVKGFANNDSMIRVDIYCVNGKYYFVPVYASDVVRDRLPNKCAAKNKNSSDWEIVDDKYFLFSLYKNDLLYIKKDKLPLKSIDECKYPIPNSSKGVYMYFGGADVSGLAFSCEAHDKSFSFRSSVVTVDKLCKCQVDVLGNVSFVKNEKRMTFN

SEQ ID NO: 19709 - protein, 1164 aa, unidentified
  REGION 1..1164: note = Cas Enzyme sequence
MHLNRKAEVPKPTDLNYRIGLDIGIASVGWAVLENNTHDEPFRIIDLGVRIFDTAEQPKTGASLALPRREARSARRRLRRRGHRLERIKKLFEAEGLINIEEFEARYKKTGLPDVYKLRYEGLDKRLTNDELAQVLLHIAKHRGFKSTSKAADGADSDTGEVKKSISANKSLMQEKGYRTVGEMIYLDEKFHTDCPWNENGYILTPRNKSGDYKHTVLRDMLADEVMEIFKAQRALGNDAATEELERAYLDIMLSQRSFDLGPGAPSKYAMEGFEDRVGLCTFEGKNGEKRAPKAAYTSEFFVALEKINHTKIVYADGNTRFFTDDERYAIIALMHRQQTVKYTAVRRAIGLAEEDKFYNLNYSPKSGNKKSPEDTDFVKMENYHKIRKALGEEVVSEHLSPDKIKLYDDIARILTLYKNDDSRIRRLAEHDIASECYDALLEMSPSKFHNLSLKAMGKIIPFLLEGNTYDKACELAGYDFRAENNGEKSVLLKGKNITNIVNDITNPVVRRSVSQTIKVINAIILEYGSPQAVNIELAREMSKDFDERRKIKSDMEAREKENDKVLGRVREYKPNPTGQDIVKFRLWEEQGGVCLYSGEKIDINDLFSSNGGYDVDHILPYSITFDDSYRNKVLVKAAENRQKGNRTPYEYIMAEKGETAWNKYETLVKNTVKDYKKQLKLLKKHISDEEKAEFKERNLTDTKYITRIVYNMIRQNLVLKPYLNLERDRKKQVMAVNGAITHYLSKRWGLAGKDRRTDTHHAQDAVVIACTTDGMINRISRYSKGRELAYSRGFEFVDEETGEILNRDNFSREDWDEKFGVRLPMPWEHFVDELDIRMSRYSTMGEGVSSGTSPREFILSHRDVFNWINYPEWMLVEGRPGRRGVLDGIFVSRMPNHKVSGQAHEETIRSAKYYEDGGSVFETGGYVVTKKSIQDIKLKDGEIKEFFNPDSDRLLYEALVDRLNQYGNDPKKAFAEPFHKPKSDGTPGPVVKKIKVFEKQTSGVLVRDGNGIAANGSMVRIDVFCEENKGKKKYYFVPIYTADVVKKRLPNRAATANKMLSEWRMMNDENFIFSLYSRDLIYIESDKGVQTKDIDNVTGKVEKMYAYYTGADTSTASIAGKLHDSSAMFRGLGIQSLRKLQKCQIDVLGNISFVSKEKRMTFN

SEQ ID NO: 19710 - protein, 1168 aa, unidentified
  REGION 1..1168: note = Cas Enzyme sequence
MEEMKHLNRKAEVPKPTDLNYRIGLDIGIASVGWAVLENNTHDEPFRIIDLGVRIFDTAEQPKTGASLALPRREARSARRRLRRRGHRLERIKKLFEAEGLINIEEFEARYKRTGLPDVYKLRYEGLDRRLTNDELAQVLLHIAKHRGFKSTSKAADGADSDTGEVKKSISANKALMQEKGYRTVGEMIYLDEKFHTDCPWNENGYILTPRNKSGDYKHTVLRDMLADEVMEIFKAQRALGNDAATEELERAYLDIMLSQRSFDLGPGAPSKYAMEGFEDRVGLCTFEGKNGEKRAPKAAYTSEFFVALEKINHTKIVYADGSTRFFTSDERHAIIALMHRQQTVKYTAVRKTIGLAEEDKFYNLNYSQKSGSKKSPEDTDFVKMENYHKIRKALREEVASEHLSPDKIKLYDDIARILTLYKNDDSRIRRLAEHDIASECYDALLEMSPSKFHNLSLKAMGKIIPFLLQGNTYDKACELAGYDFRTENNGEKSILLKGKNITNIVNDITNPVVRRSVSQTIKVINAIILEYGSPQAVNIELAREMSKDFDERRKMKSDMETREKENDKVLSRVREYKPNPTGQDIVKFRLWEEQGGVCLYSGDKIDINDLFSSNGGYDVDHILPYSITFDDSYRNKVLVKASENRQKGNRTPYEYIMAEKGEQAWNEYETLVRNTVKDYKKQLKLLKKHISDEEKAEFKERNLTDTKYITRIIYNMIRQNLVLKPYFNLERERKKQVMAVNGAITHYLSKRWGLAGKDRRTDTHHAQDAVVIACTTDGMINRISRYSKGRELAYSRGFGFVDEETGEILNRDNFSREDWDEKFGVRLPMPWEHFVDELDIRMSRYSTMGEGVSSGTSPREFILSHRDVFNWINYPEWMFVEGRPGRRGVLDGIFVSRMPNHKVSGQAHEETIRSAKYYEDGGSVFETGGYVVTKKSIQDIKLKDGEIKEFFNPDSDRLLYEALVDRLNQYGNDPKKAFAEPFHKPKSDGTPGPVVKKIKVFEKQTSGVLVREGNGIAANGSMVRIDVFCEENKGKKKYYFVPIYTADVVKKRLPNRAATQAKMPSEWRLMNDENFIFSLYSRDLIYIESDKGVQTKDIDNVTGKVEKMYAYYTGADTSTASIAGKLHDSSAMFRGLGIQSLRKLQKCQIDVLGNISFVSKEKRMTFN

SEQ ID NO: 19711 - protein, 1174 aa, unidentified
  REGION 1..1174: note = Cas Enzyme sequence
MEEMKQTGRKNEAHKPTDLNYRIGLDIGIASVGWAVLENNSHDEPFRIIDLGVRIFKEAEQSNGDPLALPRRKARSARRRIRRRRDRIERIKRFFQAEGLINIDEFEARYKKAGLPDVYKLRYEGLDRKLTDDELAQVLLHIAKHRGFKSTSKAEEAENENDAAKKKEAGALKKGISNNKKLMEEKGYRTVGEMMYLDENFRTDCPWNENGYILTPRNKSGDYKHTVLRDMLVDEVREIFKSQRSLGNIHASEELENAYLDIMLSQRSFDMGPGAPSKYAMEGFEDRVGLCTFEGKNGEKRAAKAAYTSELFVALEKINHTKIVSDDGTTRFLTTYERKSIIELMHKQQTVKYTAVRKAIGLAEEDKFYNLNYSPKAGSKKSSEDTDFVKLENYHKIRKALGEDIVSEHLPAEKIKLYDSIATILTLFKNDDSRIKRFIELGIGEECFDGLLSLSPSKFHNLSLVAMGKIIPFLLDGNTYDKACELAGYDFKADNKGEKSVLLKGKNITDMVNDITNPVVRRSVSQTIKVINAIILEYGSPQAVNIELAREMSKNFDERRKLKSDMESREKENNNVIKRVKEYKLNPTGQDIVKFRLWEEQDRRCLYSGEKIDINDLFSRDGGYDVDHILPYSITFDDTYRNKVLVKASENRQKGNRTPYEYFMAEKDDDAWNAYETLVRNTVKDYKKVLKLLKKHITEDEKSEFRERNLTDTKYITRIIYNMIRKNLVLKPYLNLEKERKKQVMAVNGSITHYLSKRWGLESKDRRTDTHHAQDAVVIACTTDGMINKISRYSKGRELLYSRGFKFVDEETGEILSRDNFAREEWDEKYGVKIPMPWEYFRDELDIRMSRYNGTGDDSIDKTTPRDFILSHRDVHKWINYPEWMFVEGRPGRRGVLDGIFVSRMPNHKVSGQAHEETIRSAKYYNDGGSVFESGGYVVTKKSIQDIKLKDGEIKEFFNPDSDRLLYNALVDRLNKFENDPKKAFAEPFYKPKADGTQGPIVKKIKVFEKQSSGVFVRDGKGIAANGAMVRIDVFCEEDKGKKKYYFVPIYTADVVKKKLPDRAATANKRISEWRVMKEENFIFSLYSRDLIYIESDKGVKLKTVDAESISVEKVYAYYIKANIATASIYGELNDKSAEFKEMGIQGLRALKKCQVDVLGNISFVNKEKRMPFN

SEQ ID NO: 19712 - protein, 1497 aa, unidentified
  REGION 1..1497: note = Cas Enzyme sequence
MKTILGLDLGTNSIGWAKVCIDDNGNYLRDIKLGSRIIPMSQDVLGNFDKGVTESQTSVRTGYRGIRRLRERSLLRRERLHRVLHVLGYLPPHYDCSIGWNRNELSTYGKYLNHSEPKLAWERQEDGSMRFIFMDSFHEMMADFAKRQPSLVSDGKRIPLDWTIYYLRKKALSQAIRKDELAWILLNFNQKRGYYQLRGEEDDTNSAKCEEYYELKVISVEADEEGKGGNTWYNVKLENGWIYRRQSKISLSDWVGKTREFIVTTEYEKDGVTLKRNKDGEIKRSFRSPSEDDWGLRKKRTEERLESSKMTVGAFVYEHLLSEPSDKIRGKFIRTIERKYYKEELYAILREQSKYHEELHSEGALKKCAEELYKNNQPHRDSLLKKDLIYLLLDDLIFYQRPLKTKKSLISECPYEAYSYVDKETGEIKRQGIKCIAKSNPYYQEFRLWQFISNLRFFDKVDDKDVTADYLSTRDDYVRLFAYLNDRKDINQETLLKDFLKLKKVIINSEKEFSVRWNYIEDKEKRYPCNETRHELLLALDRAGIDRSWLDEEGREYRLWHLLYSVESKEETEGALRKLKNDDEFIKSFLKIKPFKKEYGAYSEKAIKKLLAVMRIGSLWSEADICKTTKENITKMLKGDIDDKLKEKISSCLSSYNQVSDFQGLPVWLACYVVYGRHSEAAEIQHWRTPKDLLVYINGFKQHSLRNPIVEQCILETLRAVHDIWKEAGHIDEIHVELGRNMKSTADQRARMSGNILRNENTNLRIKSLLLELKNDPDIKDVRPYSPMQQEKLRIYEEGALQELTKDDKDFAEIIKISTMAQPSAKELLRYKLWLDQKYCSPYTGRSISLAKLFTSAYQIEHVIPQSRYFDDSFNNKVICESEVNALKDNMLGYEFIKECGGEIVHCTMLGDVKILSENEYKDFVNDHYAHNRRKRENLLLEDIPQEFLNRQMNDSRYISKVVKALLSNIVRAEGEEEATSKFVVSCSGGITDRLKKDWGLNDVWNKIVYPRFERLNKLTGTDSFGQWENKEGKKVFQTSVPLELQRGFNKKRIDHRHHAMDALVIACTSRSIVNYLNNESANNPKKREDLRQKLCDKNRIIRKPWDTFTQDATAALEDVVVSFKNYVRVINKATNYYEKYDKNGKKGIAEQKGQEMWAIRKPMHKETVFGRVNLRRKVTVKLKDALEDIPSICDKTLRDYVNGLVKKNFKTKELIAHFKSLNYRLNRQHIEKVEVWQFSDKKEQLVATRKPLDTSFDNKHIDSITDTGIQKILKNYLQSKGGDPNIAFTPEGIVELNQNISLYNDGKQHQPILKVRVFEPKGAKYCVGQNGNKSAKYVEAQKGTNLYFAIYEDEEGKRSYETIPLNEVVERLKQGLSPVPEKNKAQVPLKFYLSPNDLVYVPDTGDVNEIKKEQIYKFVDSSGTTANFIPHRASDLIYNVDKKFATSFCNREVIQNEYGVGSPQSKNQKAITGEMVKAICWKLVVDRLGNIIKIIK

SEQ ID NO: 19713 - protein, 1237 aa, unidentified
  REGION 1..1237: note = Cas Enzyme sequence
MEICNILFNFTRNNFFHMAKVLGLDLGTNSLGWALADEYEQGYALLDKGVEIFQEGVARDKNNEKPAVQDRTDARALRRHYFRRRLRKIDLLRVLVRYDLCPPLTEEQLSTWRQKKQYPLDEEFLRWQRTDDNEDRNPYHDRYVALTERLDLENRAQRWLLGRAFYHLAQRRGFLSNRKEAGNEKEDGTVKESIKNLSAEMEAAGCRYLGEYFYGLYQHKERIRGKYTSRNEHYLAEFNAICDRQQLPDKWRKELHRAIFFQRDLKSQRGSVGRCTFEPRKSRCPVSHPRFEEFRMWSFINNIRVTGPDDGTPRPLTPKEIETIRPLFFRKSKSYFDFEEIARRIAGKGKYACREERIEAPYRFNFARTTTVSGCPVTASLMDIFGKEWLREIRSLYLLGDGKTEEQVLNDIWHALFSFKDEERLRDWACEKLQLSEEQAKAFAAIKLPQDYAAMSLNAINKILPYLRCGYRYDEAVFLANLRAALPKEVYADENRRHNIEQEIASLLLDYKRNPYDKFDSKERRIADYFSDHGLDMSRLDRLYHPSKIETYPDAKPNAEGIMQLGSPRTSAIRNPMAMRALFRLRDLINTLLREGRIDRDTKIRIEFARGLNDANRRKAIEQYQREREAENRKFAEEIRRQYTAETGREMEPSDDEVLKYRLWEEQQHICPYTGRQIRISDFIGANPGFDIEHTLPRALGGDDSQINKTLCENRFNRETKRAKLPAELSNHAEIMERIESFGWREKVESLQKQIEAQVRRSKGAATKPEKDSAIQRRHYLQMQLDYWRGKYERFTMTEIPEGFSNRQGVDIGIIGKYARLYLKTVFDRIYTVKGSTTAAFRKMWGLQEEYIRKERVNHIHHCIDAITIACIGRREYDRWAQYAGDEERFNYGESDKPRFEKPWPTFTEDVKAVADELLVAHHTPDNMTKQTRKKLRVRGRVKLSADGKPIYQQGDTARCRLHQETFYGAIKREDEIRYVVRKSIKLLQPTDIDKIVDDAVRDRVRMAIDEVGFKTAINPDEYTIWMNREKGIPIRKVRIFTPGVTQPIALKKQRDLSDKEYKQDYHVANNGNYCMAVYEGKDKKGKLKRSFELVSNLEAAQYFKASADRETYPDMVPLADANGFPLKCILKTGTLVLFYENSPAELYECSRKELVKRLYKVTAMAAEGRVQFLFHQEARDQKTLTALYGAGTSQFCQSNPSPKLRLSVSNFNMLVEGYDFELTVTGEIKFKGDRPC

SEQ ID NO: 19714 - protein, 1509 aa, unidentified
  REGION 1..1509: note = Cas Enzyme sequence
MKNILGLDLGTNSIGWALVTEDDDNQKGILGIGSRIIPMSQDILGKFDSGNSISQTADRTGFRGVRRLRERHLLRRERLHRVLHIMGFLPVHYEKYIDFENHVGKFLSDTEPKIVWKKNENGSFDFIFKSSFNEMVEEFKIIQPQLFEDKKLIPYDWTIYYLRKKALSQKIEKEELAWLLLNFNQKRGYYQLRGEEEEENPNKLVEYHSLRVVDVTADEPQKDKTDIWYNVILENGWIYRRSSKIPLFDWKDKTKDFIVTTDLNNDGTIKEDKDGKEKRSFRAPSENDWTLLKKKTESDIEKSKETVGCYIYDTLLQNPSQKINGKLVRTIERKYYKQELKAILEKQKEFHAELNNAELYKACLKELYGNNEGHRNSNADRNFTYLFLDDIIFYQRPLKSKKSLISNCTYETRTFIDKESGEKKTSNIKCIAKSHPIYQEFRLWQFIQNIRIYEREKTVDDKLQTDIDVTLKYLKSEDDYVALFDWLNDRKDVDQKAFLKYPAFGLKKNAENYRWNYVEEKPYPANETRAQILNKLSKVNHINEGFLDKETEIALWHILYSVEDKLEIEKALKSFAIKKELGDDFVDVFKKFPPFKKEYGAYSEKAIKKLLPLMRMGKYWSESTIKADTKDRIESIKARLESIHYDASLIDTVSDSSIPKQVLKSFINCNNPYSGINTYQACYAVYGRHSESGDVKKWETPEDLEKFIKEFKQHSLRNPIVEQVITETLRVVKDIWKQYGSLTEIHIELGREMKNTADKRAQMTTQIAENENSNLRIKYLLAELNNHNNVENVRPYSPSQQEILRIYEEGVLNSGIEIPEDIAKIAKTNQPSKSDLIRYKLWLEQKYRSPYTGETIPLGKLFTSAYEIEHVIPQSRYFDDSLSNKVICEAEVNKEKDNALGYEFIKNNEGRIIDLSYGRKVKIFTIAQYEDFVKQYYSKSRSKMKKLLMEDIPDDFVQRQLNDTRYISKVVKGLLSNIVREEGELEATSKNVISCTGGITTALKQDWGLNDVWNGIVTPRFERMNELTKSNNFGQWTSKEGKQFFQTEMPLELQKGFNKKRIDHRHHAMDALVIACATRNHINYLNNESAKASAKVSRLDLKYKLCYKSRNDNKGNYKWQFYKPWDTFTQDAKTAFENITVSFKQNLRVINKTVNKYQCYENGKKIIKTQEKGDSWAIRKPLHKDTVAGIVNLRMKKTVNLSAGIDQWEVLVEKSLKTKIKQLINEGLDKKKIQKYFATQENKWLGKDISKVEIYYFTNDKDIQVASRVNLDASFYSKKIESITDSGIQQILLNHLSNYNEEKDGKTIEHPELAFSPEGIDEMNKNIVVLNKGKQHQPILKVRTYEPKGNKFNVGIVGNKINKYVESAKGTNLFFAIYVDEEGKRNYETIQLNIVIERLKQGLSEVPETNEKGEKLLFHLSPNDLVYVLSEEEILNGFKTNSVKDADRIYKMVSSSGSQCFFTPNNIASPIMQTTELGANNKSEKAWNGQMIKQTCIKLTMDRLGSISI

SEQ ID NO: 19715 - protein, 1419 aa, unidentified
  REGION 1..1419: note = Cas Enzyme sequence
RNYANLFQFFLYRTHVKLGVRVNPLTVDEQQNFEKGKSITTNADRTLKRSMRRNLQRYKQRRENLIDILKENGFISNDTILSENGNRTTFETYRLRSKAVTEKISLQELARVLLMINKKRGYKSSRKAKGTEDGELIDGMEVAKKLYHNNLTPGQLCLQLLNDGKKHLPDFYRSDLQTEFDRIFDKQMTFYPEHLSPELKEELRGKKRDAVWAICAKTFKEKGFELVGTKRQGNTAEQKHENYSWRAKGLSEKLELEQLVVILQQINIQLNNSSGYLGAISDRSKELFFNKQTVGQYQMAVLDKNPNASLRNMVFYRQDYLDEFNTIWEKQTLFHPILTDALKEEIRDVIIFYQRRLKSQKGLISFCEFESRKIEVEIAGQKKIKMVGSRVIPRSSPLFQEFKIWQILNNIEVFGKGKKSKKQEGQTLFDQTEDQLEFGGRRELYEEEKELLASELSIKKELKKADILKLLFDNPKELDLNFNVVQGNLTQATLFNAYKKIIELGGHEIDVEKDSASKILKSIEEIFKALGYSTEILHFDSDKSLNQQAMYKLWHLLYSFEGDNSNTGNENLINKISELYGFEKEYAKILANVTFQDDYGSLSAKAISKILPYLKEGHKYDVACDLAGYKHSASSLTREELENKIYKDRLEILPKNSLRNPVVEKILNQMINVINSIIDNYGKPDEIRIELARELKKSAKEREELTKSISETTKLHQQYKDILSKAPFNLTNISRNDIIRYKLYEELKDNGYKTLYSNTYISPAAVFSGDFDIEHIIPQSRLFDDSFSNKTLELRSINIEKGNKTAYDYIKGKYGETGEDNSLDKYLNRIETLYKNGVLKKSKYNKLKMQDKDIPDGFIERDIRDTQYIAKYAKTLLEDLVKFVVSTSGSVTDRLREDWQLVDVMKELNWEKYKQLGLTEEFTNEEGHRIRKIKDWTKRNDHRHHAMDALTVAFTKRQFIQYLNNLNARRISDEQGISNAEKDERNNVSITTNDMKLNTRDVLGIEKKELYRDNRGKLRFKAPIPLQEFREEAKKHLENTLISIKAKNKVTTLNINTIKKAGGVYKKTQLTPRGQLHNETIYGSQKQYVVKVETINAKFDVEKIATVTKPAYRDALLKRLEQNNNDPKKAFTGSNALTKKPIWLDEQQTEKVPEKVKTVSFETIYTIRKEISPDLKIEKVVDEKVRQILNNRLNEYNGNAKQAFSNLEENPIWINKEKGIALKRVTITGINNAQALHEKLDKEGKPILDGEGKKQPVDFVNTGNNHHVAVYRDADGNLQENVISFYEAVTRRNLGLPIIDKDYKKDEGWQFLFSMKQNEYFVFPNESTGFNPNEVDLLNPENYSLISPNLFRVQTMSKVIYGNNIIRDYKFRHHLETSVKDINELREISFKQYKTLNFMNNVCKVRVNHLGQIVYVGEY

SEQ ID NO: 19716 - protein, 1516 aa, unidentified
  REGION 1..1516: note = Cas Enzyme sequence
MRRILGLDLGTNSIGWALVNEAENESKEILGIGSRIIPMSQDILGKFDSGVTESQTAVRTRFRGIRRLRERHLLRRERLHRVLHVMNFLPKHYEKYIDFENKLGKFISDTEPKLVWEQNEEGSYDFIFKTSFNEMVEEFKLSQPQLFDEDKLIPYDWTIYYLRKKALQHKIEKEELAWLLLNFNQKRGYYQLRGEDDLSDRKNEYVVSLKVTQIEKGELDRKNNNRTWFNITLENGWIYTATFTSEPKWLNEEKEFLVTEELDENGNIKISKDRKTDTEGKEKRRITPLPSFEEIELMSQSDKNKIYKKIKAKTEATITKSGKTVGCYIYDTLLQNPTQKINGKLVRTIERKFYKQELKAILEKQKEFHSELNDAELYHTCLNELYGNNEAHRNSNANRDFTYLFLNDIIFYQRPLKSKKSLISNCKYEVRTFINKETGEKQKEAIKCISKSHPLYQELRLWKFIQDLKIIEREKDINGKLNTDVDVTTEFLKTEDDYVELFDWLNKTKEIKQDTLLSSYFKIKKKKGEEKLSHRWNYVEDKEYPCNETRAQFLNRLSKVSNVPENFLNKDTEIQLWHLLYSVEDKLEIEKALKSFALKNNLGDDFVEVFKKFPPFKKEYGAYSEKAIKKFLPLMRMGKYWELDNIDKKTKLRIDKILSGECDETIQNRVREKAYKLNSIADYKGLPEWLVSYIVYDRHSESGDISKWKTPEDLESYLRTFKQHSLRNPIVEQVITETLRTVKDIWKHYGVFTEIHVELGREMKNPADKRKTMTAQITDNENSNLRIKYLLAELINHSDVENVRPYSPSQQEILKIYEEGALNNPDFEVPEDIAKIAKQSQPSKSELIRYKLWLEQKYRSPYTGEMIPLSKLFTSAYEIEHVIPQSRYFDDSFSNKVICEAAVNKEKDNALGYEFIKNNEGRIIELSYGKSVKIFTISQYEDFVKQYYGKSRGKMKKLLMEDIPEAFVERQLNDTRYISKVVKGLLSNIVREDDEQESTSKHVISCTGGVTNTLKQDWGLNDVWNRIITPRFERMNELTKSSNFGQWTNKDGKKVFQTEMPLELQKGFNKKRIDHRHHAMDALVIACATRSHINYLNNESAKPSSKVSRYDLKSKLCYKSKTDDKGNYKWQFHKPWNSFTEDAQVALENIVVSFKQNLRVINKTVNKYQVIENGKKVIKTQEKGDSWAIRKPLHKDTVAGIVNLRLKKSVTLSAAIDQWEMLVDKGLKTKIKQLINEDFDKKKILKFFAEQENKWLGSDITKVEIYYFSNDKEVLVASRVSLDTSFSAKKIESITDTGIQKILLNHLANYNEQPELAFSPEGIEEMNKNIVALNNAKFHQPILKVRTFEPKGNKFNVGVAGNKKDKYVEAAKGTNLFFAIYVNEEGKRSYETIPLNIAVERLKQGLSEVPETNEKGDRLLLHLSPDDLVYVPTTGEIESPHLVDFSRLTNDQFEHIYKMVSCSSYQCFFIRSQIATSIVNKLEFSALNKMEKGIDGVMIKDCCIKLKIDRLGNISL

SEQ ID NO: 19717 - protein, 1541 aa, unidentified
  REGION 1..1541: note = Cas Enzyme sequence
MKKILGLDLGTNSIGWALISTDEDGKPCKINGIGSRIIPMSQEVLGKFDSGQTVSQTAERTKFRGIRRLRERHLLRRERLHRVLNILGYLPEHYSNSIDFENKLGQFIENTEPKLAWKKDQNGKYDFLFKSSFNEMVNEFKAVNQDFFALNPNGKQKKIPYDWTIYYLRKKALSTKIEKEELAWLLINFNQKRGYYQLREEDDDEIQNKLVEFHALKVTDVIAEEQQKGKTDIWYNVILENGWIYRRSSKTPLFEWKNKIKEFIVTTDLNDDGSIKLDKEGNQKRSFRAPSDDDWTLLKKKTEADIDKGHMTVGCYIYNSILQNPNQKINGKLVRTIERNHYKQELEAILDKQKEFHTELSDSKIYQLCLNELYKNNVAHRNSILTKDFTHLFINDIIFYQRPLKSKKTLISNCKYEIRYKDKGKSTEEKYPIKCIAKSHPLFQEMRLWKFVNDLRILEREKEVDGKLRMDVDVTAEFLKSEDDYVALFDWLNDKNDIQQDTLFSSYFKIRKKKGEERYLYRWNYVEGKNYLCNKTRAQILSSLSKVSNLTADFLTKEIELKLWHILYSIEDKFEIEKALKSFSSKHNLSNEFVDVFKKFPTFKKEYGSYSAKAIKKILSLMRKGKYWDENNIDKNTKDRIDKIISGEYDEKIRNRVREKAINLREIKHFKGLPEWLACYVIYDRHSESGDILNWKTPQDIENYLKYEFKQHSLRNPIVEQVITETLRVVKDIWKQYGDFSEIHIELGREMKNPADIRKSMTEQISQNENTNLRIKALLAELSNHDDIENVRPYSPSQQEILKIYEEGVLNSGIEIPDDILKISKTSQPSKSELIRYKLWLEQKYRSPYTGEMIPLNKLFTSAYQIEHIIPQSRYFDDSLSNKVICEAEVNLEKENALGYEFIKNNEGRIIELSFGKKVKIFTLQEYEDFVKLHYSKNRNKMKKLLMEDLTEDFIDRQLNDSRYISKVVKSLMSNIVRENDETEAISKNVIPCTGMITDTLKKDWGLNDVWNKIITPRFERMNELTKSKDFGHWTIKDGKRIFQTEVPLILQKGFQKKRIDHRHHAMDALVIACATRNHINYLNNEHAKQKNSDIRYDLRNKLRRIEEVEVDRIENGNKVRKKIKVAKEFHKPWDTFTQDAQNALENIVVSFKQNLRIINRTTNKYQHFENGKKVIAKQTKGDNWAIRKPLHKDTVSGIVNLRFKKGVNLLTAIDKWEMIVDKGLKSKIKQLIDEGLDKKKIQKYFAEQDYKWMGKELNKIELYYFSSEKESDVLVASRVNLDESFNAKKIESITDSGIRKILTNHLKNYESEGKEHPELAFSPEGIQAMNENISLLNDGKNHKPIYKVRTYKPKRNKFNVGTKGNKKFKFVEAAKGTNLFFAIYTDENGKRSYESIPLNIVIERLKQGQNPVNMEKIDEKGNVHKLLFYLNPNDIVYVPTFEQIENNWSLNVSDIQLDRLYRFTDSSDTTANFVPISTASLIFSMNKKDQEKIGIDFGIQNELGVGSAQSKNQKSITGEMIKEVCIKLKVDRLGNIELAK

SEQ ID NO: 19718 - protein, 1204 aa, unidentified
  REGION 1..1204: note = Cas Enzyme sequence
MDRILGIDTGTNSLGWAIIEKEDGVTKLIDKGTNIFSEGVKIEKGIESSKAAERTDHRSVRKHYWRRKVRKIRLLTILSDNHLCPPLDKSSLRQWRLKKVYPENELFMEWQRTEDKANVNPYKFRYICLTQKLDLTDITQRYILGRALYHINQRRGFLSNRKETTKESEGSVKEGISALTEEMAAAECKYLGEYFYQLYQKGEKIRNHYTARKEHYLKEFRAICSKQELDADLVSKLEKVIFDQRPLKSQKGQIGTCTFEKGKSRCPSSHPLYEDFRMYAFINNIKVQVHTLYENAERGLTDEEKRNIIPLFKRKSKRTFPFEDIAKKLAGKNNYCYYKSNEEKPYKFNYQMDTLVSGSVVNAQLEEIFGEDWLSNACEVYTLAKEKTRFQIMNDIWHVLFFYDDNEKLKEFAVNRLQLNDEQAERFSKISIPDDYAALSLKAIRKILPYMRDYGLIYSEAVFLANLIEVIPHHIWTIKEMREAVIENVIEVMQSYDKNRIDGLTLEQCVKAFLQERYNVDDSNLRKLYHPSMMELYPRQRPNNEGIYQLGSPRISSVKNPMAMHSLFRLRKVVNLLLAEGKVTPETKIHIEFSRDLNDANKRKALQTLQKQNEKDREECRKKIAEHISNPTDADILKYQLWEEQSHKCIYTGEEIRIADFLGDEPKYDIEHTIPRSAGGDSTKMNLTLCSNRFNRDIKKTRLPSQLANHDDILERISGWKDKYEDLERQIRKINTKGATSKEEKDKQIQRKHQLKEQCKYWKGKYERFIMTEVPEGFSRRQGTDISVISRYARLYLKSVFKHVYIVKGLATSKFREMWGLQDEYTKKERVNHVHHCIDAITIACIDKAAYDKLAEYYHKYDEYKYNKGERPSFELPWTSFVSDVKNIQDELLIAHYSKDSMPKQAKRYVKNSKGDKILTQGDTARASLHNDTYYGAIEVDGMVKYVVRKNLDGLDEKDVKNIVDGEVRSKVENAIHLHGSLKKALEEVIWMNEEKRIPIKKVRIFTGSVTRPINIRQQRDLSKHEYKRQYHVLNDRNYMMAIYVGLDKKGKEKREFELVNNITAAYFYRRSNDKIPTDNQLVPLRSKSGYELRYKLKIGTMVILYENNPEEVWELDKRNLQKRLYKVTGMSSMVLQDKYYFGTIELVHHQDARPSTEIKKKNGEFKANEEFRNGVKLLHTQFNALVQGIDFEINDLGEIRRLI

SEQ ID NO: 19719 - protein, 1204 aa, unidentified
  REGION 1..1204: note = Cas Enzyme sequence
MERILGIDTGTNSLGWAIIEKEDGVTKLIDKGTNIFSEGVKIEKGIESSKAAERTEHRSVRKHYWRRKVRKIRLLAILSDNHLCPPLDKSSLRQWRLKKVYPENELFMEWQRTEDKANVNPYKFRYICLTQKLDLTDITQRYILGRALYHINQRRGFLSNRKETTKESEGSVKEGINALTEEMAAADCKYLGEYFYQLYQKGEKIRNHYTARKEHYLKEFRAICSKQELDADLVSKLEKVIFDQRPLKSQKGHVGPCTFEKGKSRCPSSHPLYEDFRMYAFINNIKVQVHTLYENAERGLTDEEKRNIIPLFKRKSKRTFPFEDIAKKLAGKNNYCYYKSNEEKPYKFNYQMDTLVSGSVVNAQLEEIFGEDWLSNACEVYTLAKEKTRFQIMNDIWHVLFFYDDNEKLKEFAVNRLQLNDEQAERFSKISIPNDYAALSLKAIRKILPYMRDYGLIYSEAVFLANLIEVIPHHIWTIKEMREVVIENVIEVMQSYDKNRIDGLTLEQCVKAFLQERYNVDDSNLRKLYHPSMMELYPRQRPNNEGIYQLGSPRISSVKNPMAMHSLFRLRKVVNLLLAEGKVTPETKIHIEFSRDLNDANKRKALQTLQKQNEKDREECRKKIAEHISNPTDADILKYQLWEEQSHKCIYTGEEIRIADFLGDEPKYDIEHTIPRSAGGDSTKMNLTLCSNRFNRDIKKTRLPSQLANHDDILERISGWKDKYEDLERQIRKINTKGATSKEEKDKQIQRKHQLKEQCKYWKGKYERFIMTEVPEGFSRRQGTDISVISRYARLYLKSVFKHVYIVKGLATSKFREMWGLQDEYTKKERVNHVHHCIDAITIACIDKAAYDKLAEYYHKYDEYKYNKGERPSFELPWTSFVSDVKNIQDELLIAHYSKDSMPKQAKRYVKNSKGDKILTQGDTARASLHNDTYYGAIEVDGMVKYVVRKSLDGLDEKDVKNIVDGEVRSKVENAIHLHGSLKKALEEVIWMNEEKRIPIKKVRIFTGSVTRPINIRQQRDLSKHEYKRQYHVQNDRNYMMAIYVGLDKKGKEKREFELVNNITAAYFYRRSNDKIPTDNQLVPLRSKSGYELRYKLKIGTMVILYENNPEEVWELDKRNLQKRLYKVTGMSSMVLQDKYYFGTIELVHHQDARPSTEIKKKNGEFKANEEFRNGVKLLHTQFNALVQGIDFEINDLGEIRRLI

SEQ ID NO: 19720 - protein, 1204 aa, unidentified; identical to SEQ ID NO: 19718
  REGION 1..1204: note = Cas Enzyme sequence

SEQ ID NO: 19721 - protein, 1421 aa, unidentified
  REGION 1..1421: note = Cas Enzyme sequence
MKKILGLDLGPNSIGWALVNEAENENEKSSIIKIGSRVIHYGDNLVKVDKSGKISASMTPEEDFSSGKGLSPNAGRTKQRSARRNLQRYKQRRNNLIEILKAHSLIDNNFIFSEEGNETTFKTYKNRALAATNEISLEDFIKVLFMINKKRGYKSSRKAKGDEDGQLIDGMAIAIQLYEHNQTPGQFVYNLLKNGKKNIPDFYRSDLQTEFDRIWNFQKAFHQESLSDGICEKLVGQKKNVTSAILFKEFKIESLEIKGKWDEKRFFRYELRNKAVQQELKLNEIAECLVEINGEISNSSGYLGAISDRSKELVFQKITVGQYLYKQIAANPNTSLKKQIFYRQDYLDEFNTLWETQAKYHKELTDELKTQIRDVIIFYQRRLKSQKGLISFCEFESKQIEVFVDGKKSIKTRGMRVIPKSSPLFQEFKIWQILNNIEITDLKTKESRELTDDERQLLFEELNIRPKISKKEALKILTEKPAQYDLNYKDIEGNKTNAKFYEAYNKIIHLSGHDEIDFTDKTSDINEYLKQIFSLLGIKPEILDFDSSLKDEDFEKQLHFQLWHLLYSFEGDNTKTGDEKLLQKLNTKFGFPVEYAKVISNIALPDDYGSLSAKAIRKILPHLKDGFSYGGRKSRPDEPSACEYAGYRHSKASLTKDEKENKTYKDKLEILPKNSLRNPIVEKILNQTINVVNAVIGDYGKPDEIRLELARELKKSAEERQDATDSISKATAKHEKYRKVLQTEFGLKHISRNDLIRYKLYLELKNNGFKTLYSDTYIAPYEIFSKKFDIEHILPKAKLFDDSFSNKTLELKSVNLKKGDMTAYDFVKEEYGTEGLAKYEQRVQDLFLNKKRNEDLDQENESRITDEKISKTKRDKLLMPENKIPTGFIDRELRDSQYIAKKAKTMMEDICKDVVTTTGSVTDRLREDWQLIDIMQELNWPKYAALGLTEEFTNEEGNVIRKIKDWTKRNDHRHHAMDAITIAFTKRSHIQYLNNLSARSDKSSSIYGIEQKELYRDKNNKLRFAPPIPINEFRAEAKMQLENTLISIKAQNKVVTKNKNKISGQKKLQETLTPRGQLHLETIYGKINQYQTAEIKVGGTLDSELINKVANKKTREALLNRLAEFGNDPKKAFTVKNTIDKNPIYLDKHQSYKIPEKVKIVWQEPVYTIRKSITPDLKLDKIIDPKIKALLESRLKECNGDAKLAFSNLAENPIWLNKEKGIQIKRVTITGISNAASLHDKKDLNGKPILDEKGNKISVDFVNTGNNHHVAIYKDENGNLHDNVVTFFEAVERVNQNLPVVDKLFKQKEGWQFLFTMKQNEYFVFPNEITAFNPNEFDLLNPDNYYLISPNLFRVQTMSKVMYGNNTLRDYKFRHHLETTLQDIKELRDIVFKQFKSLSIFDKIVKVRINHLGKIVKTGEY

SEQ ID NO: 19722 - protein, 1105 aa, unidentified
  REGION 1..1105: note = Cas Enzyme sequence
LAAICQYLYKQIAANPNTSLKKQIFYRQDYLDEFNTLWETQAKYHKELTDELKTQIRDVIIFYQRRLKSQKGLISFCEFESKQIEVFVDGKKSIKTRGMRVIPKSSPLFQEFKIWQILNNIEITDLKTKESRELTDDERQLLFEELNIRPKISKKEALKILTEKPAQYDLNYKDIEGNKTNAKFYEAYNKIIHLSGHDEIDFTDKTSDINEYLKQIFSLLGIKPEILDFDSSLKDEDFEKQLHFQLWHLLYSFEGDNTKTGDEKLLQKLNTKFGFPVEYAKVISNIALPDDYGSLSAKAIRKILPHLKDGFSYGGRKSRPDEPSACEYAGYRHSKASLTKDEKENKTYKDKLEILPKNSLRNPIVEKILNQTINVVNAVIGDYGKPDEIRLELARELKKSAEERQDATDSISKATAKHEKYRKVLQTEFGLKHISRNDLIRYKLYLELKNNGFKTLYSDTYIAPYEIFSKKFDIEHILPKAKLFDDSFSNKTLELKSVNLKKGDMTAYDFVKEEYGTEGLAKYEQRVQDLFLNKKRNEDLDQENESRITDEKISKTKRDKLLMPENKIPTGFIDRELRDSQYIAKKAKTMMEDICKDVVTTTGSVTDRLREDWQLIDIMQELNWPKYAALGLTEEFTNEEGNVIRKIKDWTKRNDHRHHAMDAITIAFTKRSHIQYLNNLSARSDKSSSIYGIEQKELYRDKNNKLRFAPPIPINEFRAEAKMQLENTLISIKAQNKVVTKNKNKISGQKKLQETLTPRGQLHLETIYGKINQYQTAEIKVGGTLDSELINKVANKKTREALLNRLAEFGNDPKKAFTVKNTIDKNPIYLDKHQSYKIPEKVKIVWQEPVYTIRKSITPDLKLDKIIDPKIKALLESRLKECNGDAKLAFSNLAENPIWLNKEKGIQIKRVTITGISNAASLHDKKDLNGKPILDEKGNKISVDFVNTGNNHHVAIYKDENGNLHDNVVTFFEAVERVNQNLPVVDKLFKQKEGWQFLFTMKQNEYFVFPNEITAFNPNEFDLLNPDNYYLISPNLFRVQTMSKVMYGNNTLRDYKFRHHLETTLQDIKELRDIVFKQFKSLSIFDKIVKVRINHLGKIVKTGEY

SEQ ID NO: 19723 - protein, 1230 aa, unidentified
  REGION 1..1230: note = Cas Enzyme sequence
LFKQIFYCNFTEKFKTASKMTKILGIDTGTNSLGWAIVEKKAEQYCLLDKGVNIFQEGVNIDKDNESSKAAERTGYRAIRVRYYRIKLRKIRLLHILTQHHLCPPLTSWELRQWRLKSIYPTDELFMQWQRTDEEKGQNPYAYRHLCLHEKLDLTQVANRYILGRVFYHFAQRRGFLSNRKDQSGEDVGVVNDGISALSEEMREAGCEYLGDYFYQLYEKGKKIRKHYTARNEHYLKEFHAICEKQQLDASLVSELEKAIFTQRPLKSQKRQVGKCVFEKNKAKCPASHPLYEEFRMLSFINHIKIKTPKEDELRPLNHEEREKILPLFFRKTKKTFNFEDIAKKLAPKKLYGFYKKAADTEMPYLFNYPMDTSVSGCPVTAALQDIFGDDWLDSICEVYTLADGKSRLEILNDIWHALFFYSDQDKLAEFAKVRLQLDDEQAQAFSNINLPSAYASLSLKAICKILPYLRRGLVYSHAVFLGNLCEVMPAYEWGIEEMRQAAIDCVIKEINSYDPKTDGRTLETCIKEYLKERYHVSDENLKKLYHPSMLEIYPRVRPGQDGIYQLGSPRTDSVRNPMAMRSLFCLRKLVNRLLKEGKIDQETEIHIEFSRELNDANKRSALKRYGRDNQKAHDTARKHIVEDYKAETGKAIEPTPTDILKYELWEEQQHICLYTGQQIRISDFVGPNPKFDIEHTLPRSRGGDSTKMNLTLCDSRFNRDVKKTHLPTELANHDEIMARIAIWQEKYEELSQQIRKQKRKSQAATTKEQKDKAISYRHYLELQRDYWRGKHERFTMESVPEGFNRRQGVDIGIISKYARLYLKSVFKRVYPVKGLATSDFRKIWGLQDIYSAKERVNHVHHCIDAIVVACIGLDEYGKLAEYYHDEEKHEWYGASKATFAKPWPTFVEDVRRMQNELLVYHHTPDNMAKQGRRRIIINGKKVLAKGDAVRGSLHKETYYGAIEREGEVKYVKRVELSQLEEKNIKYIVDDTVRQIVQEAVDRLGFTEAMASTIWMNEEKQIPIKKVRCYTPQVTQPLHIRYQRDVSDKEHKRKYHVVNDKNYLLAIYIGADKKGKEKRDFELINNLQAAKYYRTSNDRTGSGDPIVPVKSSHDYPLAYTLKIGTMVLLYENSPAELYEASQAELNRRLYKVTGLSSKNVSGYKYGEIAMKYHTEARQSKDLKSKNGVYQTGEELRPVIRMLHTQIKAAVQGVHFRINELGEIKWLARYD

SEQ ID NO: 19724 - protein, 1307 aa, unidentified
  REGION 1..1307: note = Cas Enzyme sequence
LKYGAVGSLRSSIFGTPESGEPYLLLAQINKTALSASYKKRKLPPKREYRFYPSAIAGLIVIRCRKSYSGCKNTTLFLFKQIFYCNFTEKFKTASKMTKILGIDTGTNSLGWAIVEKKAEQYCLLDKGVNIFQEGVNIDKDNESSKAAERTGYRAIRVRYYRIKLRKIRLLHILTQHHLCPPLTSWELRQWRLKSIYPTDELFMQWQRTDEEKGQTPYAYRHLCLHEKLDLTQVTNRYILGRVFYHFAQRRGFLSNRKDQSSEDVGVVKDGISALSEEMREAGCEYLGDYFYQLYEKGKKIRKHYTARNEHYLKEFHAICEKQQLDASLVSELEKAIFTQRPLKSQKRQVGKCVFEKNKAKCPASHPLYEEFRMLSFINHIKIKTPKEDELRPLNHEEREKILPLFFRKTKKTFNFEDIAKKLAPKKLYGFYKKAADAEMPYLFNYPMDTSVSGCPVTAVLQDIFGADWLDSICEVYTLGDGKSRLEILNDIWHALFFYSDQDKLAEFAKVRLQLDDEQAQAFSNINLPSAYASLSLKAICKILPYLRRGLVYSHAVFLGNLCEVMPAYEWGIEEMRQAAIDCVIKEINSYDPKTDGRTLETCIKEYLKERYHVSDENLKKLYHPSMLETYPRVRPGQDGIYQLGSPRTDSVRNPMAMRSLFCLRKLINRLLKEGKIDQETEIHIEFSRELNDANKRSALKRYGRDNQKAHDTARKHIVEDYKAETGKAIEPTPTDILKYELWEEQQHICLYTGQQIRISDFVGPNPKFDIEHTLPRSRGGDSTKMNLTLCDSRFNRDVKKTHLPTELANHDEIMARIAIWQEKYEELSQQIRKQKRKSQAATTKEQKDKAISYRHYLELQRDYWRGKHERFTMESVPEGFNRRQGVDIGIISKYARLYLKSVFKRVYPVKGLATSDFRKIWGLQDIYSAKERVNHVHHCIDAIVVACIGLDEYGKLAEYYHDEEKHEWYGASKATFAKPWPTFVEDVRRMQNELLVYHHTPDNMAKQGRRRIIINGKKVLAKGDAVRGSLHKETYYGAIEREGEVKYVKRVELSQLEEKNIKYIVDDTVRQIVQEAVDRLGFTEAMASTIWMNEEKQIPIKKVRCYTPQVTQPLHIRYQRDVSAKEYKRKYHVVNDKNYLLAIYIGADKKGKEKRDFELVNNLQAAKYYRTSNDRTGSGDPIVPVKSSHDYPLAYTLKIGTMVLLYENSPAELYEASQAELNRRLYKVTGLSSMTVGTRSYGVIVMKYHTEARQSKDLKGKNGAYQTGEELRPVIRMLHTQIKAAVQGVHFRINELGEIKWLARYD

SEQ ID NO: 19725 - protein, 1211 aa, unidentified
  REGION 1..1211: note = Cas Enzyme sequence
MTKILGIDTGTNSLGWAIVEKKAEQYCLLDKGVNIFQEGVNIDKDNESSKAAERTGYRAIRVRYYRIKLRKIRLLHILTQHHLCPPLTSWELRQWRLKSIYPTDELFMQWQRTDEEKGQNPYAYRHLCLHEKLDLTQVANRYILGRVFYHFAQRRGFLSNRKDQSGEDVGVVNDGISALSEEMREAGCEYLGDYFYQLYEKGKKIRKHYTARNEHYLKEFHAICEKQQLDASLVSELEKAIFTQRPLKSQKRQVGKCVFEKNKAKCPASHPLYEEFRMLSFINHIKIKTPKEDELRPLNHEEREKILPLFFRKTKKTFNFEDIAKKLAPKKLYGFYKKAADTEMPYLFNYPMDTSVSGCPVTAALQDIFGDDWLDSICEVYTLADGKSRLEILNDIWHALFFYSDQDKLAEFAKVRLQLDDEQAQAFSNINLPSAYASLSLKAICKILPYLRRGLVYSHAVFLGNLCEVMPAYEWGIEEMRQAAIDCVIKEINSYDPKTDGRTLETCIKEYLKERYHVSDENLKKLYHPSMLETYPRVRPGQDGIYQLGSPRTDSVRNPMAMRSLFCLRKLVNRLLKEGKIDQETEIHIEFSRELNDANKRSALKRYGRDNQKAHDTARKHIVEDYKAETGKAIEPTPTDILKYELWEEQQHICLYTGQQIRISDFVGPNPKFDIEHTLPRSRGGDSTKMNLTLCDSRFNRDVKKTHLPTELANHDEIMARIAIWQEKYEELSQQIRKQKRKSQAATTKEQKDKAISYRHYLELQRDYWRGKHERFTMESVPEGFNRRQGVDIGIISKYARLYLKSVFKRVYPVKGLATSDFRKIWGLQDIYSAKERVSHVHHCIDAIVVACIGLDEYSKLAEYYHDEEKHEWYGVSKATFAKPWSTFVEDVRRMQNELLVYHHTPDNMAKQGRRRIIINGKKVLAKGDAVRGSLHKETYYGAIEREGEVKYVKRVELSQLEEKNIKYIVDDTVRQIVQEAVDRLGFTEAMASTIWMIEEKQIPIKKVRCYTPQVTQPLHIRYQRDVSAKEYKRKYHVVNDKNYLLAIYIGADKKGKEKRDFELVNNLQAAKYYRTSNDRMGSGDPIVPVKSSHDYPLAYTLKIGTMVLLYENSPAELYEASQAELNRRLYKVTGFSSLKRVTRSYGEIVMKYHAEARQSKDLKGKNGAYQTGEELRPVIRMLHTQIKAAVQGVHFRINELGEIKWLAQYD

SEQ ID NO: 19726 - protein, 1211 aa, unidentified
  REGION 1..1211: note = Cas Enzyme sequence
MTKILGIDTGTNSLGWAIVEKKAEQYCLLDKGVNIFQEGVNIDKDNESSKATERTGYRAIRVRYYRIKLRKIRLLHILTQHHLCPPLTSWELRQWRLKSIYPTDELFMQWQRTDEEKGQNPYAYRHLCLHEKLDLTQVANRYILGRVFYHFAQRRGFLSNRKDQSGEDVGVVKDGISALSEEMREAGCEYLGDYFYQLYEKGKKIRKHYTARNEHYLKEFHAICEKQQLDASLVSELEKAIFTQRPLKSQKRQVGKCVFEKNKAKCPASHPLYEEFRMLSFINHIKIKTPKEDELRPLSHKEREKILPLFFRKSKKTFNFEDIAKKLAPKKLYGFYKKAADAEMPYLFNYPMDTSVSGCPVTAALQDIFGDDWLDSICEVYTLADGKSRLEILNDIWHALFFYSDQDKLAEFAKVRLQLDDEQAQAFSNINLPSAYASLSLKAICKILPYLRRGLVYSHAVFLGNLCEVMPAYEWGIEEMRQAAIDCVIKEINSYDPKTDGRTLETCIKEYLKERYHVSDENLKKLYHPSMLETYPRVRPGQDGIYQLGSPRTDSVRNPMAMRSLFCLRKLVNRLLKEGKIDQETEIHIEFSRELNDANKRSALKRYGRDNQKAHDTARKHIVEDYKAETGKAIEPTPTDILKYELWEEQQHICLYTGQQIRISDFVGPNPKFDIEHTLPRSRGGDSTKMNLTLCDSRFNRDVKKTHLPTELANHDEIMARIAIWQEKYEELSQQIRKQKRKSQAATTKEQKDKAISYRHYLELQHDYWRGKHERFTMESVPEGFNRRQGVDIGIISKYARLYLKSVFKRVYPVKGLATSDFRKIWGLQDIYSAKERVNHVHHCIDAIVVACIGLDEYSKLAEYYHDEEKHEWYGASKATFAKPWPTFVEDVRRMQNELLVYHHTPDNMAKQGRRRIIINGKKVLAKGDAVRGSLHKETYYGAIEREGEVKYVKRVELSQLEEKNIKYIVDDTVRQIVQEAVDRLGFTEAMASTIWMNEEKQIPIKKVRCYTPQVTQPLHIRYQRDVSDKEYKRKYHVVNDKNYLLAIYIGADKKGKEKRDFELVNNLQAAKYYRTSNDRTGSGDPIVPVKSSHDYPLAYTLKIGTMLLLYENSPAELYEASQAELNRRLYKVTGLSSMTVGTRSYGVIVMKYHTEARQSKDLKGKNGAYQTGEELRPVIRMLHTQIKAAVQGVHFRVNELGEIKWLARYD

SEQ ID NO: 19727 - protein, 1527 aa, unidentified
  REGION 1..1527: note = Cas Enzyme sequence
MKILGLDLGTNSIGWAVVDNEDTKILDTGVRIFPEGVEAKTLGLGEKEQSNNATRRDKRQMRRQFYRKRLRKIKLLELLIDQQMCPLDKEELGKWKNWDKTKKTDGRIFPNSSDFVGWLRMNPYNLREKSLDEKITLYELGRILYHLIQRRGFLSDRKSKEDSTIYTKGKPDENILPIIETKEKIKDGTLGKYLSSISLKEGVPYKAITDDSGKEIRVRGRYTVRDMYVAEFEQIWATQSAYYDLNERIVKVKKIREFKGSLNGKRNSARIAYLKEKFGSDNVEIIASGKNGFSIIATCAKISLKELLGGEINTICDENGDKILQFKSKESILFWQRPLRSQKSLIANCRFENNIPVIKSDGEYLTNHKGEIQKRSKKPCPISHPEFELFRAYQFVNNIKYGKNINLIDSQRHTVLKLINRNDANFDFKKIPQELNLSYEKFNYEDDLKVAGNPTIKKIKPLFDPYVWDKHYEEIWHCFYFYDDNEMLFDKLKKDFGLAGDISKIKNIKIKEGYSNVSLKAIRNILPFLEKGFQYDRAVILGGVKNAFGKNWEYFKESHHKIESEIIKILNADNKEGEAIEKIKDHLSNPSFTYGFSQNDPRFSNLYHHSQQVNKSEDLEDYIPELENLRNPIVQQALHETRRLVNDLIDNYRMRFDQDFHFDRINIEMGRDLRNSKAQRQEMSLRIRENENKNDEARERLAEYGLQPSRENLQKYLMFKEIEDRANGPAMCPYTGKIIKLTDLLGRDNAIQIEHIVPYSISLDDSFGNKTLCEANFNREKGEKTPFQFYKENPDPSLWGINKYKNVEDGWTEISERAFRILPYNKAKRFTSRIEFKESDFIERQLNDSRYIAKKAVELISHVCKDVRVMPGQLTAELRHLWGLNNILQPVQEIEFKDLDLDEDTNLPVYLVLDETGRIISFQRKQNKKPVTGKNEILVSGFVDKERFNSKQFSIEIDTSELPDGKYWVKLKIHDTLKIFPKYVAKPLVSDNQIILKGIVAKGIFSSETTGRIKTSYVDGRYWAKFQVLNVKFEEPEKGKQPIANRNQILLYGNVENGYFKSFVYQCQTEIADGKYWIILDYNPENIEFIRSEIPKPETAKSQLVITATIDEEGTLFADIDKEFKISTISKPGKYFAVLTIESIYPELIQIENKMPEVEQGQTVLEGNIWVDKYTGEIKFDPKKNRDDHRHHAINAITIALTEQRFLQFLSTYNARRKEKQRQKLDNTEKFPEPWPGFNQDVKEAVNSILVSHKKSNKTLTKNKKGFSVRGQLHKENVFGKRQAPQQEEAFHRRTKITDLQNNKHVGKVVDLTIQKLIEKHLAEECGIVINNPKGYTIPKDAFVKEGKWRLYLPNKNGGPVPIKKVRIKEAIGNAAQLKSNINQWVNPRNNHHVLIYKDHEGNLKEDVVQFWTVVERVMQGMEIYQLPEDGKEIVTTLEINDMFLLGINNEDYESSFHNPQFLSEHLYKVEAISSKYYELRHHLESSQSKSSMPYYYIISSLGTGVKGWQTFNPIKVNIDVLGSVRK

SEQ ID NO: 19728 - protein, 1011 aa, unidentified
  REGION 1..1011: note = Cas Enzyme sequence
YFYRLYQDGKKIRNHYTARKEHYLKEFHAICDKQELDAELVKKLEKAIFDQRPLKSQKGQVGTCTFEKGKPRCPLSHPLYEDFRMYAFINNIKVQIHTLYENTERGLSEEEKKQVISLFKRKSKRTFPFEDIAKKLAGKNNYCYYKSDEDKPYRFNYQLDTQVSGSPVNAQLEEIFGEDWVTSVCEVYTLAKDKSRFQIENDIWHALFFYDDEDKLRVFAKNRLQLDDEQAEKFSKISMPNDYAALSLKAIRKILPYMRDYGLIYSEAVFLANLVEVLPQHIWGIKETREAAIENVIEVMHSYDKKNVDSVTLEQCVKGFLKDRYNISDDDLKRLYHPSMMELYPRQRPNDDGIYQLGSPRISSVKNPMAMHSLFRLRKVVNLLLKEGMITPETKIHIEFSRDLNDANKRKALQTLQRQNEKDREECRKKIAEHIDNPTDDDILKYQLWEEQNHKCIYTGEEIRITDFLGDNPKYDIEHTIPRSAGGDSTKMNLTLCSNRFNRDVKKTKLPSQLSNHDDILERIAGWKDKYEELDKQIRKINTKNVTSKEDKDRLIQRKHLLKEQCKYWKGKYDRFLMTEVPEGFSRRQGTDISVISRYARLYLKSVFKHVYIVKGIVTSEFRELWGLQNEYTKKKRDNHVHHCIDAITIACVDKAAYDKLAQYHHQQDEYKYDKGSRPDFEKPWPSFVNDVKHIQDELLIAHYSKDNMPKQAKRYVRDSKGNKVLTQGDTARASLHNDTYYGAIEVDGDVKYVVRKSLDTLEEKDIKNIVDAEVRSKVENAILLHGSLKKALEETIWMNEDKQIPIKKVRIFTGSVTRPINIRQQRDQSKHEYKRQYHVQNDRNYMMAIYVGRDKKGKEKREFELVNNITAANFYRRSNDRVPTDNQLVPLYSKNGYELRYKLKIGTLVLLYENSPEEIWELDRMNLQKRLYKITGMSSMVLREKDYYGTIEMVHHQNAKPSSEIKKVNGKYVSNEDFRSGIKMLHTQFKALVQGVDFELNDLGEIRRLI

SEQ ID NO: 19729 - protein, 1204 aa, unidentified
  REGION 1..1204: note = Cas Enzyme sequence
MERILGIDTGTNSLGWAIVDKEDGVTQLVAKGTNIFSEGVKIEKGIESSKAAERTEHRSVRKHYWRRKIRKIRLLTILSDNHLCPPLDKSSLRQWRLKKIYPDSELFMEWQRTEDKANVNPYKFRYVCLTQKLDLTDITQRYILGRALYHLNQRRGFLSNRKETTKESEGKVKEGISDLSDEMKSAGCEYLGEYFYRLYQDGKKIRNHYTARKEHYLKEFHAICDKQELDAELVKKLEKAIFDQRPLKSQKGQVGTCTFEKGKPRCPLSHPLYEDFRMYAFINNIKVQIHTLYENTERGLSEEEKKQVISLFKRKSKRTFPFEDIAKKLAGKNNYCYYKSDEDKPYRFNYQLDTQVSGSPVNAQLEEIFGEDWVTSVCEVYTLAKDKSRFQIENDIWHALFFYDDEDKLRVFAKNRLQLDDEQAEKFSKISMPNDYAALSLKAIRKILPYMRDYGLIYSEAVFLANLVEVLPQHIWGIKETREAAIENVIEVMHSYDKKNVDSVTLEQCVKGFLKDRYNISDDDLKRLYHPSMMELYPRQRPNDDGIYQLGSPRISSVKNPMAMHSLFRLRKVVNLLLKEGMITPETKIHIEFSRDLNDANKRKALQTLQRQNEKDREECRKKIAEHIDNPTDDDILKYQLWEEQNHKCIYTGEEIRITDFLGDNPKYDIEHTIPRSAGGDSTKMNLTLCSNRFNRDVKKTKLPSQLSNHDDILERIAGWKDKYEELDKQIRKINTKNVTSKEDKDRLIQRKHLLKEQCKYWKGKYDRFLMTEVPEGFSRRQGTDISVISRYARLYLKSVFKHVYIVKGIVTSEFRELWGLQNEYTKKKRDNHVHHCIDAITIACVDKAAYDKLAQYHHQQDEYKYDKGSRPDFEKPWPSFVNDVKHIQDELLIAHYSKDNMPKQAKRYVRDSKGNKVLTQGDTARASLHNDTYYGAIEVDGDVKYVVRKSLDTLEEKDIKNIVDAEVRSKVENAILLHGSLKKALEETIWMNEDKQIPIKKVRIFTGSVTRPINIRQQRDQSKHEYKRQYHVQNDRNYMMAIYVGRDKKGKEKREFELVNNITAANFYRRSNDRVPTDNQLVPLYSKNGYELRYKLKIGTLVLLYENSPEEIWELDRMNLQKRLYKITGMSSMVLREKDYYGTIEMVHHQNAKPSSEIKKVNGKYVSNEDFRSGIKMLHTQFKALVQGVDFELNDLGEIRRLI

SEQ ID NO: 19730 - protein, 1420 aa, unidentified
  REGION 1..1420: note = Cas Enzyme sequence
MKKVLGLDLGTNSIGWAVVNESENQNEKSSIIKLGVRVNPLTVDELSNFEKGKSITTNADRTLKRSMRRNLQRYKLRRENLVEVLKGNGFISDDSVLSENGNKTTFETYRLRSKAVKEEISLLELTRVLLMINKKRGYKSSRKARSTEEGQLIDGMEIAKKLYEEELTPGQLSFQLLQNGKRHLPDFYRSDLQTEFDQIWQKQKLYYPDLLTDQLKDELLGKNKTQTWAICAKPFQIEGIKRTKKGQELRIENYLWRVEALSKQLGLEELAIVLQEVNGQISNASGYLGDISDRSKALYFNHQTVGQYQMAQLEKNPNYSLKNQVFYRQDYLNEFETIWETQAKFHTELTPELKKEIRDIIIFYQRPLKSQKGLISFCEFESRQIEVDIEGKKNKKTIGLRVCPKSSPLFQEFKIWQVLNNVQVWNKTMPKRFLFQEEKEKLFAELNYIEKISKAEALKLLFGNQKDYDLNYKDLEGNQTQAKLLAAYKTIIEMTGHDDLDFAKLSTSKTIECVAEVFAGLGVNTEILKFDSGLEGHALEQQPMFQLWHLLYSFDGDKSELGNANLIQKLHDRFGFDKESASVLAGVVFPDGYGSLSSKAIRKILPHMKDGLEYSVACEYAGYRHSKSSLTKEEIENKVLKDKLELLPRNSLRNPVVEKILNQMINVVNAIIDEYGKPDEIRIELARELKKSAKEREEMTRSINETTRLHEGYVKILQGEPFLLEHVSRNDIVRYKLYEELKMNGYKTLYSNTYIPREKLFSKEFDIEHIIPQAKLFDDSFSNKTLELRRVNLEKGNATAMDYVNEKYGAQDAEEYVNRIENLYNKKVIGKTKRDKLLMKEADIPSGFINRDLRDSQYIAKKAREILEEIVHYVVPTTGSITDRLREDWQLVDVMQELNWDKYNKLGLTEIIEGRDGQRIRRIKDWTKRNDHRHHAMDALTIAFTKRSFIQYLNNLNARVPKGVDDYIDLDMVELSLLDKDQRSAAVYGIERKELHRDSHGKLRFNAPMPLDEFRVEAKRQLEAVLVSIKAKNKVVTQNVNVSKTKNGRSKKVQLTPRGQLHLETVFGSCKRYAAKEEKVNASFNVEKINTVANMRYRDALQARLQQYDSDAKKAFTGKNSLEKNPIWLDDAHTIQVPEKVKTVAFETIYTIRKEITPDLKIEKVVDAHIRQILKERLDAYGGDAKKAFSNLDDNPIWLNREKGIAVKRVAITGVSNAQPLHDKRDKGGQLILDENGHTQPVDYVNTGNNHHVAVYRKPKLDKNGQQLLDDDGEPQFEFDENIVSFYEATSRAMQGFPIIDKEYKKEEGWQFMFTMKQNEYFVFPRYDEKGNMVFNPLDYDETWYKNIDNYSTISQNLFRVQKFSFKNYVFRHHLETTIDNSGYNLRGITWTDFRSSKGLDLIVKVRVNHIGQIVSVGEY

SEQ ID NO: 19731 - protein, 1442 aa, unidentified
  REGION 1..1442: note = Cas Enzyme sequence
MKNILGLDLGTNSIGWAYVKQAQNDSEKSEIVELGVRVNPLTVDEKTNFEKGKPISTNADRTLKRGARRNLQRYKLRRQELIELLKEYQVISDKTILAEDGKGTTFETLRLRAKSAKEQVSLEELARILLMINKKRGYKSSRKAKNEDEGQLIDGMEIVRRLYDENLTTGQLSLQLLKEGKKSLPDYYRSDLQHELDKVWNFQKQFHPDILTDDFYTSIQGKGQKATRESFSSKYGIDTAENKGSREEKRLQAYQWRADATHKELTKEELAFVITEINNNINNSSGYLGAISDRSKELIFANETVGEYLWKQIQNDPHTSLKNQVFYRQDYFDEFERIWKTQSEFYPQILTESLKKELRDILIFYQRKLKSQKALVSICEFESKEIPLKDKQENPISKNGIPVTKLVGPKVAPKSSPLFQEFKIWQNLNNVLVRPKGSRKRKVTTNQQSTLLEGQEPVFELNLEQKELLFEELNLKGNLKTDYCLELIGYSAKEWEMNYPTLEGNKTNKSLYEAYLKIIDSEGYDAKKLLKVKTDKDDINLDDIKVSASEIKTMISDIFNELGINTKILDFDAELERKQFEAQASYRLWHLLYSYEGDDSKSGNELLYRLLEDKFGFKREHSKTLANVSLLSDYGNLSTKAIRTIYPYIKENKFSTACELAGYRHSKLSITKEENENRTLKDTLDVLKKNSLRQPVVEKILNQMINLINELIEKHSEKDEKGNIVKYFKFDEIHIELARELKKNAEERRELESKVRESKARNEKIMTILKSEFGLPYPTKNDIIRYRLYEELKDNGYKDLYTNTYIPREKLFSKEIDIEHIIPKSRLFNDSFSNKTICYRQDNLNKGERTAYDYVEGLGKTQLDEYLNRVENLYVNKIITKAKYRNLLKKESEIGDGFIERDLRETQYIAKKAKEMLLQITRHVVSTTGSITDRLRDDWELVNVMRELNLPKYKALGLTEIQERKNGQTVEVITDWTKRNDHRHHAMDALTVAFTKHSHIQYLNFLNARKDEKHKEYSNIMGIQQLETEKTTDKDGKDKRVFKAPIPNFRQVAKEHLELILISHKTKNKVVTRATNKIAGSKKQQETLSPRGQLHKETVYGKYRRYVQKEEKIGSKFDLQTIERVANPLYKRLLTKRLEENGGDPKKAFTGKNALAKTPIYLDEAQTQQLPEKVKLVWLETDFSIRKDITPDNFKDEKSIDKVLDEGIKRILKDRLKSFDGDAKRAFTDLEQNPIWLNKEKGIAIKRVTISGVSNAEPLHTKKDHLGNEIFDETGKPIPVDYVSTGNNHHIAIYRDENGDLHDEAVSFFEAVTRANQGLPIVDKTYNRHLGWQFLFTMKQNEMFVFPNKETGFDPQEIDLLDPKNKKLISPNLFRVQTISVVKYGNNVVRDFKFRHHLETTVEDKKELQQITYQQIKSLSPLNNIVKVRINHLGDIVHIGEY

SEQ ID NO: 19732 - protein, 1439 aa, unidentified
  REGION 1..1439: note = Cas Enzyme sequence
MKNILGLDLGTNSIGWAYVKQAQNDSEKSEIVELGVRVNPLTVDEKTNFEKGKPISTNADRTLKRGARRNLQRYKLRRQELIELLKDYQVISEKTILAEDGKGTTFETLRLRAKSAKEQVSLEELARILLMINKKRGYKSSRKAKNEDEGQLIDGMEIARRLYDENLTTGQLSLLLLKEGKKSLPDYYRSDLQHELDKVWNFQKQFHPDILTDEFYASIQGKGQKATRESFSSKYGIDTAENKGSREEKRLQAYQWRADATHKELTKEELAFVITEINNNINNSSGYLGAISDRSKELIFANETVGEYLWKQIQNDPHTSLKNQVFYRQDYFDEFERIWETQSGFYPQILTESLKNELRDILIFYQRKLKSQKALVSICEFESKEIPLKDKQGNPISKNGIPVTKLVGPKVAPKSSPLFQEFKIWQNLNNVLVRPKGSRKRKVTTDQQSTFLEGQEPVFELNLEQKELLFEELNLKGNLKTDYCLELIGYSAKEWEMNYPTLEGNKTNKALYEAYLKIIDSEGYDAKKLLKVKTDKDDINLDDIKVSASEIKTMISDIFNELGINTKILDFDAELERKQFEAQASYRLWHLLYSYEGDDSKSGNELLYRLLEDKFGFKREHSKIIANVSLLSDYGNLSTKAIRTIYPYIKENKFSTACELAGYRHSKLSITKEENENRTLKDTLDVLKKNSLRQPVVEKILNQMINLINELIEKHSEKDEKGNIVKYFKFDEIHIELARELKKNAEERRELNSKVRESKDRNEKIITILKSEFGLPYPTKNDITRYRLYEELKDNGYKDLYTNTYIPREKLFSKEIDIEHIIPKSRLFNDSFSNKTICYRQDNLNKGERTAYDYIEGLGKTQLDEYLNRIENLYTNKFITKAKYRNLLKKESEIGDGFIERDLRETQYIAKKAKEMLLQITRHVVSTTGSITDRLRDDWELVNVMRELNLPKYKALGLTEIQERKNGQTVEVITDWTKRNDHRHHAMDALTVAFTKHSHIQYLNFLNARKDEKHKEYSNIMGIQQLETEKTTDKDGKDKRVFKAPIPNFRQVAKEHLESILISHKTKNKVVTRATNKIAGSKKQQETLSPRGQLHKETVYGKYRRYVQKEEKIGSKFDLQTIERVANPLYKRLLTKRLKENEGDPKKAFTGKNALAKSPIYLDEAQTQQLPEKVKLVWLETYFSIRKDITPDNFKDEKSIDKVLDEGIKRILKDRLKSFDGDAKRAFTDLEQNPIWLNKEKGIAIKRVTISGVSNAEPLHTKKDHLGNEIFDDTGKPIPVDYVSTGNNHHIAIYRDENGDLHDEVVSFFEAVTRANQGLPIVDKTYNQHLGWQFLFTMKQNEMFVFPNKETGFDPQEIDLLDPKNKKLISPNLFRVQTISVVKYGNNVVRDFKFRHHLETTVEDKKELQQITYQQIKSLSPLNNIVKVRINHLGDIVHI

SEQ ID NO: 19733 - protein, 1434 aa, unidentified
  REGION 1..1434: note = Cas Enzyme sequence
MKKILGLDLGTNSIGWAYVKQAQNDSEKSEIVELGVRVNPLTVDEKTNFEKGKPISTNADRTLKRGARRNLQRYKLRRQELIALLKEYQVISDKTILAEDGKGTTFETLRLRAKSTKEQVSLEELARILLMINKKRGYKSSRKAKNEDEGQLIDGMEIARRLYDENLTTGQLSLQLLKEGKKSLPDYYRSDLQHELDKVWNFQKQFHPDILTDEFYTAIQGKGQKATRESFSSKYRIDTAENKGSREEKRLQAYQWRADAIHKELTKEELAFVITEINNNINNSSGYLGAISDRSKELIFANETVGEYLWKQIQNDPHTSLKNQVFYRQDYLDEFERIWKTQSEFYPQILTESLKNELRDILIFYQRKLKSQKALVSICEFESKEIPLKDKQGNPISKNGIPVTKLVGPKVAPKSSPLFQEFKIWQNLNNVLVRPKGSRKRKVTTDQQSTLLEGQEPVFELNLEQKELLFEELNLKGNLKTDYCLELIGYSAKEWEMNHPTLEGNKTNKALYEAYLKIIDSEGYDAKKLLKVKTDKDDINLDDIKVSASEIKTMISDIFNELGINTKILDFDAELERKQFEAQASYRLWHLLYSYEGDDSKSGNELLYRLLEDKFGFKREHSKTLANISLLSDYGNLSTKAIRTIYPYIKENKFSTACELAGYRHSKLSITKEENENRTLKDTLDVLKKNSLRQPIVEKILNQMINLINELIKKHSEKDEKGNIVKYFKFDEIHIELARELKKNAEERRELESKVRESKARNEKIITILKSEFGLPYPTKNDITRYRLYEELKYNEYKDLYTNTDIPREKLFSKEIDIEHIIPKSRLFNDSFLNKTICYRQDNLNKGERTAYDYIEGLGKTQLDEYLNRVENLYVNKIITKAKYRNLLKKESEIGDGFIERDLRETQYIAKKAKEMLLQITRHVVSTTGSITDRLRDDWELVNVMRELNLPKYKALGLTEIQERKNGQTVEVITDWTKRNDHRHHAMDALTVAFTKHSHIQYLNFLNARKDEKHKEYSNIMGIQQLETEKTTDKDGKDKRVFKAPIPNFRQVAKEHLEAILISHKTKNKVVTRATNKIAGSKKQQETLSPRGQLHKETVYGKYQRYVHKEEKIGSKFDLQTIERIANPLYKRLLTKRLEENGGDPKKAFTGKNALAKTPIYLDEAQTQQLPEKVKLVWLETYFSIRKDITPDNFKDEKSIDKVLDEGIKRILKDRLKSFDGDAKRAFTDLEQNPIWLNKEKGIAIKRVTISGVSNPEPLHTKKDHLGNEIFDETGKPIPVDYVSTGNNHHIAIYRDEKGNLQEKAVSFFEAVTRANQGLPIVDKTYNQHLGWQFLFTMKQNEMFVFPNKETGFDPQEVDLLDPKNKKLISPNLFRVQKISTKNYFFRHHLETSVETHNALNGVTYKSQLGLNGITDIIKVRINHLGYIVHIGEY

SEQ ID NO: 19734 - protein, 1462 aa, unidentified
  REGION 1..1462: note = Cas Enzyme sequence
MKKILGLDLGTNSIGWAVVNEAENAEEKSSIIKLGVRVNPLTVDELTNFEKGKSITTNADRTLKRSMRRNLQRYKLRRENLIEILKTHGFISDDTILSENGNRTTFETYRLRAKAATEEISLAEFARVLLQINKKRGYKSSRKAKNTEEGQLIDGMEVAKRLYNENLTPGQLAYELLLQGKKYIPDFYRSDLQFEFDKIFDFQRQFYSFLTDELKEELKGKNEKATWAICAPAKDKSASDGPFVWHWEEQETRWNEETAVNESVQVAKTLIGEKRTGTTVEQKLQNYEWRSRALTEKMSPEQLIVVFQKINGQISNASGYLGNISDRSKELYFNRQTVGQYQMAELDKNPNYSLRNQVFYRQDYLNEFETIWETQAKFHRELTPELKKEIRDVVIFYQRSLKSQKGLISFCEFESKQIEKEIDGKKKTITIGCRVCPKSSPLFQEFKIWQRLNDVEVSCANGKRRLLPEEKDMLFAELNNKEKLSKADVLKMLFPKQNGVDMNFKELDGNRTQFELLKAYQTIAERSGHDVVDLAKKSSADAVETITKVFSTLGIDSKVLTFDSSLDGKAFGQQPMYKLWHLLYSFEGDNSALGNEKLIEKLKNTFGFDKEYATILANVVFKDAGEYSSLSAKAIRKILPHLKDGNDYSVACEYAGYRHSKQSLTKEEIQNKVLKDKLELLPRNSLRNPVVEKILNQMVNVVNGIIDAYGKPDEIRIEMARELKKSAKEREELSKSINETTRLHEEYVKILQAEPFNLSHVSRNDIIRYKLYKELEATGYHTLYTNTYIPREKLFSKEFDIEHIIPQAKLFDDSFSNKTLEARQANLAKSNTTAFDFVATKYGDEFANGEYKTRIDKLLADKVISKTKHDKLLMKEADIPSGFINRDLRDSQYIAKKAREILEGLVRFVVPTTGSITDRLREDWQLVNVMQELNWDKYNQLGLTYYEQDNDGRQIPRIKDWTKRNDHRHHAMDALTIAFTKRSFIQYLNNLNARVQKSVDDWIDLDMVEISSLDKEQRKSAVYAIEKKELYRDKNGKLRFNPPMPLDEFRSEAKRQLENTLISIKAKSKVVTKNINISKKKSGANKKVQLTPRGQLHLETVYGSSKRYVTKEEKVNASFDAEKIQNVASKLFREALLARLNQFGGDAKKAFTGKNALDKNPIWLDAQHSDKVPEKVKMVGFETIYTIRKEVSPDLKLDKVVDANIRKILENRLKEFGGDAKKAFSNLAENPIWLNREKGIAVKRVTITGVSNAEALHDKRDKEGNLILDNEGKKQPVDYVNTGNNHHVAIYRKPKLDKNNQPVLDENGNIQYELDEKIVSFYEATSRAMQLLPVIDKTYKQSEGWQFLFTMKQNEYFVFPCYDADGKMIFNPKDYSEEWYKNPENYAAISPNLFRVQKMSKVASGNSFVRDYVFRHHLETTVTDNKALRDITYRQYKSLAFASGVVKVRVNHIGQIVSVGEY

SEQ ID NO: 19735 - protein, 1509 aa, unidentified
  REGION 1..1509: note = Cas Enzyme sequence
MKNIVGLDLGTNSIGWAVVNGSVNDDGSEQLVKIQASGSRIIPMDAAMIGDFNKGNSISQTAERTRLRGVRRLSERYLLRRERLHRILDILGFLPFHFAQDLDRHGKIVKGKEPKLAWRKNEAGQFEFIFQDSFKEMLEDFKLNHPNLITDDKKVPYDWTIYYLRKKGLTSKISKEELAWILLNFNQKRGYYQLRGEEEKKNDNVMIINSKVIDVVKAEKDKKYEKYWYNVLLENGLLYRAAFYNDISFWKGHTKEFVLKTIKLKSGGTKQELSFLPSFDEIEKMEKKQKDKMYFKIKLKTEADIDQAHKTVGTYIYDTLLGNPSQKIRGRLVRTIERKYYKEELKLILDKQKEFHPELQDRALYAACVEELYTINEAHRNNIGNRDFTYLFLEDILFYQRPLKSKKSLIDNCPYEENQGLDKETGEIKSFPVKCIAKSHPLFQEFRLWQFIINLRIYRKDLAQDVDVTNELLKTEEDYVALFDWLNGKKEIDQKAFLKYPVFGLKKEIENYRWNYVQDKPYPCNETRLLMLARLEKCDISIEFLTKENEEALWHILYSVEDKNEIVKALQKFADKHDLNASFVDVFRKFPPFKKEYGSYSAKAIKKLLPLMRMGKYWSEDSIDKGTRKRMDKIITGEYDEKIENRVREKVIHLADVSDFRGLPLWLVCYIVYGRHSEAKEITQWKSPADIDSYLKSFKQHSLRNPIVEQIIIETLRVVRDIWKQVGNIDEIHVELGREMKNPADKRKKMTQQMSENENTNLRIKYLLTEFLNPEYEVENVRPYSPSQQDILRIYEEGVLNSVSDLPEEISDILKKFTETDLKKRPSRSEILRYKLWLEQKYRSPYTGEVIPLGKLFTPAYEIEHVIPQSCYFDDSFSNKVICEAEVNKLKSNLLGHEFIVKHHGEIVELPFGKKVRIFTVDEYEQFVKDNYSRTRGKMKKLLMDDIPEEFVARQLNDSRYISKVVKSLLSNIVREKGEEEAISKNVIPCTGGVTDRLKKDWGINEVWNKIILPRFQRLNELTGTNKFTTKNVGIQEIPTMPLELQKGFNKKRIDHRHHAMDAIIIACANRNIINYLNNESATAKAELSRYDLQKLLCDKAKTDNNGNYKWVIRKPWASFTQDTYLALENIIVSFKQNLRVINKATNRFLHYNEEGKKIFVKQGKGDNCAIRKSMHKDTVFGEVNLRRIKTVALNEAMKNPQSIVVKDFKRKLLELWNLGFDAKRIKKYFEDNRETWSDINLSKIEVYYFSKDTKDRFFATRKPLDTSFDRKKIENNITDTGIQKILLRHLELKDNNPDIAFSPDGIDEMNRNIIQLNNGKYHQPIIKVRWYEQADKFAVGQTGNKSSKFVEAAKGTNLFFAVYESNILDKKTNTIIKKRNYATIPLNVAIERQKQGLPVAPEDENGNDPIFVLSPNDLVYLPTDDELANGIIAQPLDRGRIYKMVSSSGEQCFFIKHIVANVLVDKFEFSPLNKMERALTGEMIKMICIPIKVDRLGNVLESSSSHKK

SEQ ID NO: 19736 - protein, 1032 aa, unidentified
  REGION 1..1032: note = Cas Enzyme sequence
LKIEDDYVTLFDWLNRREKIEQKTLLKYPAFNIKKDVDNFRWNYVEDKTYPCNETRSLILSCLNKANLSEDFLSYQKEEALWHILYSVNDKQEIVKALQTFARKNGLDGTFVDAFKKIRPFNKEYGAYSAKAIKKLLPLMRTGKHWNVESIDGKTKERIDKIITGEYDEKISNRVREKAIYLSDISCFKGLPLWLACYVVYGRHSEQKEITKWETPDDIDAYLSTFKQHSLRNPIVEQIIMETLRVVRDIWKKAGSIDEIHIELGREMKNPADKRKRMTAQILENENANLRIKALLTEFMNPEYEIEDVRPYSPNQQEKLRIYEDGALNAAEQVPEDIETILKKFKENKQPTRSEFLRYKLWLEQKYRSPYTGELIPLGKLFTEAYQIEHIIPQKRYFDDSFSNKVICESAVNSLKGAQLGYEFIKEHHGEKVETGFGKVVTIFSVTAYEQFIKEHYAKSKAKMKKLLMDDIPEQFIERQLNDSRYISKVIKGLLSNIVREKDESGEYEQEAISKNVLVCNGSVTDRLKKDWGMNDVWNNIVYPRFERLNTLIGKECFGHWENKNGKRIFQTEVPLEYQKGFSKKRIDHRHHAMDAIVIACATRNHINYLNNASASKNAQISRYDLQHLLCDKTKTDDKGNYKWVIKKPWDTFTQDTKGILDNIIVSIKQNLRVINKTTNIYQHFDTDGKRTFYKQTKGDSWAIRKPMHKDTVFGIVNLRKTKEVRLSIALDIPYLIVDKKVKKKVFQLLKYKYEKKRIEKYFKENACLWKELNVAKVPVYYFTESSSERMVAVRKTIDTSFNAKKIQESVTDTGIQKILLKHLEQKDDKADLAFSAEGIEEMNRNIIALNDGKKHQLIYKVRMYEPLGNKFNVGTTGNKGKKFVEAAKGTNLFFAIYRTEDGKRIYDTIPLNIVIEREKQGLLPVPDKDEKGNTLLFWLSPNDLVYLPTEEEREFDRINEPIDKKRIYKMVSSSGNQCFFIPVNIANAIVPILELGANNKAEKSWEGNMIKSICIPIKVDRLGNIIKIKKV

SEQ ID NO: 19737 - protein, 1099 aa, unidentified
  REGION 1..1099: note = Cas Enzyme sequence
MDILDNNPNASLRNIVFYRQDYLDEFNVLWEKQAEFHKELTGELKKEIRDIIIFYQRRLKSQKGLISFCEFESRQIEVKIDGKRKIRTVGNRVIPRSSPLFQEFKIWQILNNIEVTAVGNKNKQRMQNGSNEPDDTEQLELNGRRYLYQEEKELLAKELFVRDKMTKLDVLRLLFDNPEELDLNFKTIDGNKTGYLFFQAYSKMIEMSGHEPVDFKKPIEKIVEQVKSVFVLLNWNTDILSFDSNKELDKQSYYKLWHLLYSFEGDNTPTGNGCLVQKIMDSYGLGKEFAKILANITFQEDYGSLSAKAIHKILPHLKEGNQYDVACEYAGYRHSKSSLTKEEIANKVLKDKLEVLPRNSLRNPVVEKILNQMVNVINAIIEAYGRPDEIRVELARELKKNAKEREKLTKSIAETTKTHEAHKKLLQEEFGLKNVGRSDILRYKLYKELESRGYKTLYSNTYIPREKLFSKEFDIEHIIPQARLFDDSFSNKTLEARNVNIEKGNRTAYDFVKEKFGESGTDNSLDCYLNNIEVLFVSGKISKTKYTKLKMTEQDIPGGFIERDLRNTQYIAKKALSMLNEISRCVVATSGSITDKLREDWQLVDVMKELNWEKYKALGLVEYFEDKDGKQIGRIKDWSKRNDHRHHAMDALTVAFTKEVFIQYFNNKNASLNPNTNEYAIKNKYFQNGRAIAPIPLNEFRAEAKKHLENTLISIKAKNKVITNNINKTKKRGGVNTKKQQTPRGQLHLETIYGCCRQYLTKEEKVNASFDVSKIATVSSSVYRDALLKRLQEHHNDPKKAFAGRNSLDKKPVWLDKEQIRKVPEKVKTVTFETIYTIRKEISPDLRVDKIIDSGVRKMLTGRLKEYGNDAKKAFSNLDEKPIWLNKEKGIPIKRVTISGISNAQSLHVKKDKDGKPVLDGNGRNIPVDFVNTGNNHHVAVYRRPVIDKNGQMVIDENGNLKYELEEVVVTFFDAVTRVNLGQPIIDKDYKASEGWQFLFSMKQNEYFVFPNKKTGFNPKEIDLLDADNYGLISPNLFRVQKFTHKNYVFRHHLETTIKDTSSILRGITWIDFRSSKGLDSIVKVRVNHIGQIVSVGEY

SEQ ID NO: 19738 - protein, 1509 aa, unidentified
  REGION 1..1509: note = Cas Enzyme sequence
MKTILGLDLGTNSVGWAVINSVIKEQAERIWIEMAGSRIIPMDAAVLGDFDKGNSISQTSERTRLRGARRLRERQLLRRERLHKVLNILGFLPNHYLEYIDFEKHPGKFLADAEPKLAWVKDEQGKYTFLFQAAFDEMLADFAIHQPSLVSGDKKIPYDWTIYYLRKKALTEMISKEELAWILLNFNQKRGYYQLRGEEEEDNAGKSVEFYALKVLTVEATDEKKGRDVWYNVHLENGWIYRRSSSVPLDWEGQVKEFIVTTDLNPDGTPKLDKYGEVKRSFRAPKEDDWMLIKKRTEADIANTHKTVGAYIYDTLLQKPQQKIIGKLVKTVERKLYRDELSLILQKQCAFHAELQDRALYARCVEALYPSNEVRRKNIANRDFVYLLMDDILFYQRPLKTKKSLIANCPYEENEYVDRETGEIKKAPLKCIAKSHPLFQEFRLWNFLSNIRIYQKEKEINGTLHLDVDVTAEFLKTEDDYVALFDWLNSRKEIEQKTFLKYPKFGLKKEISNYRWNYVEDKQYPCNETRHAILSSLEKANVCIDFLSNEKEVALWHILYSVSDKQEIEKALRTFAAKNGLDESFVEAFKKFPPFKSEYGAYSAKAIKKMLPLMRCGKYWDVSSIDDTTKERIKKIVTGEYDERISVKIRDKVMNLSDISCFRRLPLWLACYIVYNRHSEDKEAVKWESPADIDAYLASFKQHSLRNPIVEQVITETLRVVRDIWKQVGRIDEIHIELGREMKNPADKRKRMTAQILENENANLRIKALLAEFMNPEYEIENVRPYSPSQQEILRIYEDTVLHAEDQLPEEIDAILKKFNSSKVPTKSEFLRYKLWLEQKYRSPYTGELIPLGKLFTAAYEIEHVIPQSRYFDDSFSNKVICESAVNKLKDNQLGYEFIKNHHGQKVEVGFGKSVEIFSVDSYERFVKEQYAKSAVKMKKLLMDDIPEQFIERQLNDSRYISKVIKGLLSNIVREKNDSGEYEPEAVSKNIVVCTGSVTDRLKRDWGMNDVWNSIVYPRFERLNSLTDTQSFGHWENKSGKKVFQTELPLEYQKGFSKKRIDHRHHAMDAIVIACATRNHVNYLSNESASRNAKISRYDLQRLLCDKNRTDDNGNYKWVIKKPWDTFTQDAREVLSKIVVSLKQNLRIINKTTNVYRHFDATVNRVYQKQKTGDSWAIRKPMHKDTVFGAVNLRKVKVVRLSVALDTPAMIVDKRVKNKVFELLSYKYDKKRIEKYFKENAFLWKELDLAKVAVYYFTEATTEPLVAVRKPLDSTFNEKKIKESVTDTGIQKILLNHLCTKEGKPDLAFSAEGIEEMNRNLLQLNNGKSHQPIYKVRVYEPRGNKFSVGVLGNKGTKWVEAAKGTNLFFAIYITEDGKRTYETIPLNMVIEREKQGLVPVPDRNEKGDKLLFWLSPNDLVYLPTEEEREFGRINEPIDRGRIYKMVSCTGNEGHFIPANVANPIVPVIELGSNNKAQRAWTNEMIKDICIPIKVDRLGHIIEVKYRIDE

SEQ ID NO: 19739 - protein, 1306 aa, unidentified
  REGION 1..1306: note = Cas Enzyme sequence
LIFYNIRFKRGYKSSRKAKGEEDGSLIDGMEIAKKLYDEDLTPGQLCLQLLESGKKTFPDFYRSDLQDEFDRIWNFQKQFNPQSYCDTAKEEIKGKNKSQTWAILAKYFTWTKEVSVWNENEAKTENQEKEYRLVGLKRTVKGEELKKENYRWRVQALTERLDLEEIAVVLQEINGQISASSGYLGAISDRSKVLYFNHQTVGQYQMAELNKNSNISLRNMVFYRQDYLDEFNAIWEKQAEFHKELTPELKKEIRDIIIFYQRRLKSQKGLVSFCEFENREVFVEKDGKKQTKVIGCRVIPRSHPLFQEFKIWQTLNNIEVFVGEKRKKRKQTNVSSGLFDNTVDTLVTEGRRFLYQEEKEILAKELSCKKDLTKTEVLKLLFENPQELDMNFKQIDGNFTGFALFSAYSKMIEKYGYEPLDFKKPADEIIAQLKAVFMDLEWNTDLLSIDLDKEGKNLEMQPYFRLWHLLYSFEGDNTPTGNGKLIEKIMQLCRVEKEYAIELANISFQDDYGSLSAKAIKKILPYLKEGNQYDVACEYAGYRHSKSSLTKEEIENKALKDKLDILPKNSLRNPVVEKILNQMVNVINAVIDAYGRPDEIRVELARELKKSAKEREELTKAIAKKTREHDEIRKLLQSEFGMIHVSRNDIIRYKLYEELKENGYKTLYSNQYIPKEKLFSKEIDIEHIIPQARLFDDSLSNKTLEYRAINIEKGNKTAYDFVKDKYGEEGLQGYLNRCENICKDRKAKLRKLKMEQSDIPDGFIDRDLRNTQYIAKKALAMLNDICRRVVATTGSITDKLREDWQLVDVMKELNLTKYEALGLVEIFEDKDGRIIKRIKDWTKRNDHRHHAMDALTVAFTKDVFIQYFNNKNAAWESDCKEHMNIVGIKKRYFESGKAVPPMPLGQFRAEAKWHLENLLVSIKAKNKVVTTNVNCIRKKGGISKKHQQTPRGQLHLETIYGSHRQYVTKMEKVNASFDAAKIATVSRQNYRNALLKRLEAFGNDPKKAFTGKNSLEKNPIYLDRAQTMQMPDRVQIVELEMVYTIRKPIDPSLNVDKVVDTKVRAILEQRLKEYGGDAKKAFVNLDENPIWLNREKGISIKRVSIRGINNAQSLHMKKDKNGNPILDENGKQIPVDFVNTGNNHHVAIYRKPVLDKKGQVMFDEDGNLMYELDEVVVSFFEAVTRANLGLPIINKDYRRSEGWQFLFSMKQNEYFVFPNEKTGFNPMEIDLLDPNNYAVISPNLFRVQKIGSNDYTFRHHLETTILNSINELKFITWIRCGKSGIKDIIKVRINHIGQIVFVGEY

SEQ ID NO: 19740 - protein, 1213 aa, unidentified; identical to SEQ ID NO: 19420
  REGION 1..1213: note = Cas Enzyme sequence

SEQ ID NO: 19741 - protein, 1213 aa, unidentified
  REGION 1..1213: note = Cas Enzyme sequence
MEKRLGIDVGTNSLGWAIVEVDDEGCTLLDRGVDIFQEGVAREKNQEKPAVQDRTDARALRRHYFRRRLRKIALLRVLVRHDLCPALSEEQLNAWQSKGIYPLDDAFIRWQRTDDNADRNPYRDRFRCLTEELDLACREERYVLGRALYHLCQRRGFLSNRKDAGNEAEEGKVKQEIKTLSADMAAAGCEYLGEYFYRLYQRKEKIRKHYTARNEHYLAEFRAICRKQRLDEELRQALEKAIFYQRPLKSQKGLVGKCTFEKDKSRCPVSHPRFEEFRMLQFINNVRVTGPGDAEPRPLSPEEVEIVRPLFLRKSKPHFDFEDIAKKIAGKGNYACRGELLQAPYRFNCAGKSTVTGSPVSALFASVFGDDWQREICSLYTLGAGKNEEQILNDVWHVLFAFEDEERLQAWLQEKLQLSADDAKTLAAFRLPQGYASLSLNVINKILPYLRRGYRYDEAVFFANLGKVLPAEVYADPARRREVEQGISAQMDDLGDGEKTRKEERIRDYLRRYWGVEEKRLERLYHPSMIEAYPSASPNGQGLLQLGSPRIPAVRNPMAMRALFRLRVLLNELLREGKIDRGTKINIELARELNDANKRKAIERYQREREAENRKYAEEIRQQYVEATGHSIEPSEEDILKYRLWVEQGHCSLYTGKTIGISEFLGDGRRYDIEHTVPRSRGGEDAQYNKTLCEEEFNRDIKRDKLPSELANHTAILACVESCGWFERIEGLEHRVWGADRRAKSATTKSAKDFAIQDRHYWRMHLDYWRRKCEAFTMTEVPEGFSNRQGVDVGIIGRYARLYLQTVFDRVYTVKGATTAAFRRMWGLQEEYAAKERVNHVHHCIDAITIACIGSREYALWAQYVRQDELYRRGEADKPRCGKPWPTFTEDVRATADELLISHHTPDNMPKQSRKRLRVRGKVQRNDRGEVKYMQGDTARGALHQQTFYGAIERDGEIRYVVRKSLDQLLPTDVDKIVDETVKRKVQEAIEAFGFKEAMDPQKHTVWMNKDKNVPIRKVRILTGVKNPILLKPHRDVSVKEYKRYYHVVNDGNYCMAIYEGRDRQGRLKRTFEIVNKLEAARYFKRSADRESRPDLVPLSDVNGYSLKYLLKTGTMVLFYENSPDELYECSVGELAKRLYKVVGMAQDGRVQFLFHQEARDQKAVTAECGMGISVFDARHPAPKLRIRVSNFKMFVEGYDFELTVTGEVKFKR

SEQ ID NO: 19742 - protein, 1213 aa, unidentified
  REGION 1..1213: note = Cas Enzyme sequence
MEKRLGIDVGTNSLGWAIVEVDDEGCTLLDRGVDIFQEGVAREKNQEKPAVQDRTDARALRRHYFRRRLRKIALLRVLVRHDLCPALSEEQLNAWQGKGIYPLDDAFIRWQRTDDNADRNPYRDRFRCLTEELDLACREERYVLGRALYHLCQRRGFLSNRKDAGNEAEEGKVKQEIKTLSADMAAAGCEYLGEYFYRLYQRKEKIRKHYTARNEHYLAEFRAICRKQRLDEELRQALEKAIFYQRPLKSQKGLVGKCTFEKDKSRCPVSHPRFEEFRMLQFINNVRVTGPGDAEPRPLSPEEVEIVRPLFLRKSKPHFDFEDIAKKIAGKGNYACRGELLQAPYRFNCAGKSTVTGSPVSALFASVFGDDWQREICSLYTLGAGKNEEQILNDVWHVLFAFEDEERLQAWLQEKLQLSADDAKTLAAFRLPQGYASLSLNVINKILPYLRRGYRYDEAVFFANLGKVLPAEVYADPARRREVEQGISAQMDDLGDGEKTRKEERIRDYLRRYWGVEEKRLERLYHPSMIEAYPSASPNGQGLLQLGSPRIPAVRNPMAMRALFRLRVLLNELLREGKIDRGTKINIELARELNDANKRKAIERYQREREAENRKYAEEIRQQYVEATGHSIEPSEEDILKYRLWVEQGHCSLYTGKTIGISEFLGDGRRYDIEHTVPRSRGGEDAQYNKTLCEEEFNRDIKRDKLPSELANHTAILACVESCGWFERIEGLEHRVWGADRRAKSATTKSAKDFAIQDRHYWRMHLDYWRRKCEAFTMTEVPEGFSNRQGVDVGIIGRYARLYLQTVFDRVYTVKGATTAAFRRMWGLQEEYAAKERVNHVHHCIDAITIACIGSREYALWAQYVRQDELYRRGEADKPRCGKPWPTFTEDVRATADELLISHHTPDNMPKQSRKRLRVRGKVQRNDRGEVKYMQGDTARGALHQQTFYGAIERDGEIRYVVRKSLDQLLPTDVDKIVDETVKRKVQEAIEAFGFKEAMDPQKHTVWMNKDKNVPIRKVRILTGVKNPILLKPHRDVSVKEYKRYYHVVNDGNYCMAIYEGRDRQGRLKRTFEIVNKLEAARYFKRSADRESRPDLVPLSDVNGYSLKYLLKTGTMVLFYENSPDELYECSVGELAKRLYKVVGMAQDGRVQFLFHQEARDQKAVTAECGMGISVFDARHPAPKLRIRVSNFKMFVEGYDFELTVTGEVKFKR

SEQ ID NO: 19743 - protein, 1207 aa, unidentified
  REGION 1..1207: note = Cas Enzyme sequence
IDVGTNSLGWAIVEVDDEGCTLLDRGVDIFQEGVAREKNQEKPAVQDRTDARALRRHYFRRRLRKIALLRVLVRHDLCPALSEEQLNAWQGKGIYPLDDAFIRWQRTDDNADRNPYRDRFRCLTEELDLACREERYVLGRALYHLCQRRGFLSNRKDAGNEAEEGKVKQEIKTLSADMAAAGCEYLGEYFYRLYQRKEKIRKHYTARNEHYLAEFRAICRKQRLDEELRQALEKAIFYQRPLKSQKGLVGKCTFEKDKSRCPVSHPRFEEFRMLQFINNVRVTGPGDAEPRPLSPEEVEIVRPLFLRKSKPHFDFEDIAKKIAGKGNYACRGELLQAPYRFNCAGKSTVTGSPVSALFASVFGDDWQREICSLYTLGAGKNEEQILNDVWHVLFAFEDEERLQAWLQEKLQLSADDAKTLAAFRLPQGYASLSLNVINKILPYLRRGYRYDEAVFFANLGKVLPAEVYADPARRREVEQGISAQMDDLGDGEKTRKEERIRDYLRRYWGVEEKRLERLYHPSMIEAYPSASPNGQGLLQLGSPRIPAVRNPMAMRALFRLRVLLNELLREGKIDRGTKINIELARELNDANKRKAIERYQREREAENRKYAEEIRQQYVEATGHSIEPSEEDILKYRLWVEQGHCSLYTGKTIGISEFLGDGRRYDIEHTVPRSRGGEDAQYNKTLCEEEFNRDIKRDKLPSELANHTAILACVESCGWFERIEGLEHRVWGADRRAKSATTKSAKDFAIQDRHYWRMHLDYWRRKCEAFTMTEVPEGFSNRQGVDVGIIGRYARLYLQTVFDRVYTVKGATTAAFRRMWGLQEEYAAKERVNHVHHCIDAITIACIGSREYALWAQYVRQDELYRRGEADKPRCGKPWPTFTEDVRATADELLISHHTPDNMPKQSRKRLRVRGKVQRNDRGEVKYMQGDTARGALHRQTFYGAIERDGEIRYVVRKSLDQLLPTDVDKIVDETVKRKVQEAIEAFGFKEAMDPQKHTVWMNKDKNVPIRKVRILTGVKNPILLKPHRDVSVKEYKRYYHVVNDGNYCMAIYEGRDRQGRLKRTFEIVNKLEAARYFKRSADRESRPDLVPLSDVNGYSLKYLLKTGTMVLFYENSPDELYECSVGELAKRLYKVVGMAQDGRVQFLFHQEARDQKAVTAECGMGISVFDARHPAPKLRIRVSNFKMFVEGYDFELTVTGEVKFKR

SEQ ID NO: 19744 - protein, 935 aa, unidentified
  REGION 1..935: note = Cas Enzyme sequence
MLQFINNVRVTGPGDAEPRPLSPEEVEIVRPLFLRKSKPHFDFEDIAKKIAGKGNYACRGELLQAPYRFNCAGKSTVTGSPVSALFASVFGDDWQREICSLYTLGAGKNEEQILNDVWHVLFAFEDEERLQAWLQEKLQLSADDAKTLAAFRLPQGYASLSLNVINKILPYLRRGYRYDEAVFFANLGKVLPAEVYADPARRREVEQGISAQMDDLGDGEKTRKEERIRDYLRRYWGVEEKRLERLYHPSMIEAYPSASPNGQGLLQLGSPRIPAVRNPMAMRALFRLRVLLNELLREGKIDRGTKINIELARELNDANKRKAIERYQREREAENRKYAEEIRQQYVEATGHSIEPSEEDILKYRLWVEQGHCSLYTGKTIGISEFLGDGRRYDIEHTVPRSRGGEDAQYNKTLCEEEFNRDIKRDKLPSELANHTAILACVESCGWFERIEGLEHRVWGADRRAKSATTKSAKDFAIQDRHYWRMHLDYWRRKCEAFTMTEVPEGFSNRQGVDVGIIGRYARLYLQTVFDRVYTVKGATTAAFRRMWGLQEEYAAKERVNHVHHCIDAITIACIGSREYALWAQYVRQDELYRRGEADKPRCGKPWPTFTEDVRATADELLISHHTPDNMPKQSRKRLRVRGKVQRNDRGEVKYMQGDTARGALHQQTFYGAIERDGEIRYVVRKSLDQLLPADVEKIVDEAVRQKVREAVEAYGFKEATDPTKHTVWMNEEKQIPIRKVRILTGVKNPILLKPHRDVSVKEYKRYYHVVNDGNYCMAIYEGRDRQGRLKRTFEIVNKLEAARYFKRSADRESRPDLVPLSDVNGYSLKYLLKTGTMVLFYENSPDELYECSVGELAKRLYKVVGMAQDGRVQFLFHQEARDQKAVTAECGMGISVFDARHPAPKLRIRVSNFKMFVEGYDFELTVTGEVKFKR

SEQ ID NO: 19745 - protein, 1208 aa, unidentified
  REGION 1..1208: note = Cas Enzyme sequence
MSKKRILGLDTGTNSLGWAVVDHEENGQYTLIDKGVVIFQEGVKIEKGIESSKAAERTEHRALRRQYFRRRLRKIEVLKTLVKYNLCPALSEEDLNLWKLRKIYPKKDEFMVWQRTNDNEDVNPYHCRYICLNEALNLDRQKDRYTLGRAFYHMAQRRGFLSNRLDATEEQESGAVKSSIANLNKEIEESGCKYLGEYFYKLYKEKGNTVRIRTRYTDREQHYKKEFFAICEKQNLPKEMVEELTRALYFQRPLKSQRQNVGKCTFEKGKPRCSDSHPMYEEFRMLSFLNNVRIQGPWDNELRPLNEEELKKIEPLFYRKSKPNFDFEEIAKKIAGKNKYQWKGDTKTDLPYKFNYRMSQGVPGCPTIAQLREIFGEDWKEGIAETYTLGTKKDGTSKSVEEMVSDIWNVLFSFDSKDKVKEFGLKYLQLDEEHAEKFSKIRLSRDYASLSLKAIRNILPFLQMGMLYSDAVFLAKVPAIVGQSLWQERQSEILDELTYAIHMAMKEKRRIDETVKDYLQNNFDLKPGTAELLYHPSMIGTYPDAKPNKDGIVLLGSPRTNAVKNPMAMRSLHEVRRVVNTLIKEGKIDPDTEVHIEYARELNNANMRAAINDVQREKDKNHKLYAEEIRKLYKEATGKDIEPTETDILKYQLWEEQNHICLYTGEKIGIADFIGAGPKYDIEHTIPQSVGGDSTQENMTLCNNHYNRYVKKAKLPTELPEHEFIMTRIEAWKERIEDLTKQIDRQSTRGIGDKAARDAKIRKKNRLLIEKKYWQGKYNRFTMTEVPEGFALRQGAGIGLISKYAALYLKSYFHDTLHPEHRQVYSIKGTITKEFRTIWGIQDEYTKKSRDSHTHHCIDAIVIACIGKNEFNKMGQYYHAQEDFNAGKGNRPEFEKPWPTFTQDLKQITEELLVVHDTPDNMPKKASRVIEVSGGRKVVAKGDCARGSLHQDTYYGAIERDGNIKYVVRKPLSSFTSIKDLDNIVDDAVRQTILRAVEGKDFKKATAEPIYMNETKGILIKKVRCFAPTVTQPLDIRHHRDLSTKDYKQQYHVMNDENYMMAIYEGGKMQMITALKAAKFYKKSTDRDVYPTIVEEEYKGKKLKYLVRKGTQIIMLEKDEESISTAIPKELFNRLYTITKLEKDGRLTLRHNAEARPATDVNKYLNAEPFRLNADTRPLIHVSLSKFKFLVEGFDFIITPLGEIKLKH

SEQ ID NO: 19746 - protein, 1232 aa, unidentified
  REGION 1..1232: note = Cas Enzyme sequence
MTKTRILGLDTGTNSLGWAIVDRDEVSGQYELVDRGDLIFTEGVKIEKGIESSKASERTQHRALRKQYFRRRLRKIEVLRVLTFYHLCPPVSEEELHLWHVKKIYPVENQEFMIWQRTNDNEGKNPYYYRHICLHTKLNLTLMKDRYILGRALYHLSQRRGFLSNRLDQSQDEDDKGTVKTGISSLSRDMNDAGCTYLGDYFYKLYSENGNRVRIRNHYTARNEHYLAEFEAICQVQKLEPELVEALRRAIFFQRPLKSQRKGVGKCTFEPRKPRCADSHPDYEEFRKLCFVNNIKIQTPDDDTMRPLNKEERQRINSLFYRVSKANFYFEEIAKLLGGKNNYCYFKDEVQKDFKFNYRMSQSVSGCPTTAQLHNIFDEDWKTCIAETYQHSAKKDGSLKTVDEMADDIWNVLYSFSSKDRLYDFAVNKLQLEEDKAKKFSKIKLSRGFASISLNAIHKILPFLRMGMIYSHAVLFANIPTIVGMDVWSDESKRQHIMTELSDLVLNYDPKNREVEGTIEMCIKDFLLNNYDLPAGAVCRLYHPSMIDTYPDAKENKDGVLQLGSPATNAIRNPMAMRSLHELRHVVNLLLRKGKIDQNTEVHVEYARELNDANKRKAIADRQREMDKLHKKYHDDIITLYKEETGKDINPTQADILKFQLWEEQEHVCLYTGHQIGISKFLGPDPEFDIEHTVPRSVGGDSTQMNMTLCDRRFNRDVKKAMLPSQLPNYQEILPRIEKWKKKYEKLTKDIDHCITHSGMSKEAKDSIIQKRHRLTLERDYWRNKYLRFTMTEVPEGFSRRQGAGIGLVSKYAGLFLKSLFHDPADRRRSHVYVVKGTTTAEFRKMWGLQSEYEKKSRDNHVHHCVDAITIACIGKNEYNKMASFYHDEEAFERGECDKPHFDKPWPTFTQDVLGLEKSLMVVHSTQDNMPKHAKKYVRTPRGKFIAKGDCARGSLHLDTYYGAIKHKDDTEPRYVLRRELSSFDSVSDLDIIVDDAVREKIREAVKGKSGKAFKEALANVYMNKEKGIRIKKVRCYVPSVKRPIDIRHQRDISRFDYKRQFHVANDGNYMMAIYEGVVKGKQKRDFELVKNIEAASYFKVSQDKESFSSIVPEKSSNGFPLKAALKIGTHVLLYENTASEIDFSDPVDLTRRLYKVVGLSSKTVSGYNYGDITLRFHQEARQAKEITSTRGLFKNTDQYRGEIHLLHTQLNALVEGYDFDINILGEITSKQ

SEQ ID NO: 19747 - protein, 1232 aa, unidentified
  REGION 1..1232: note = Cas Enzyme sequence
MTKTRILGLDTGTNSLGWAIVDRDEVSGQYELVDRGDLIFTEGVKIEKGIESSKASERTQHRALRKQYFRRRLRKIEVLRVLTFYHLCPPVSEEELHLWHVKKIYPVENQEFMIWQRTNDNEGKNPYYYRHICLHTKLNLTLMKDRYILGRALYHLSQRRGFLSNRLDQSQDEDDKGTVKTGISSLSRDMNDAGCTYLGDYFYKLYSENGNRVRIRNHYTARNEHYLAEFEAICQVQKLEPELVEALRRAIFFQRPLKSQRKGVGKCTFEPRKPRCADSHPDYEEFRKLCFVNNIKIQTPDDDTMRPLNKEERQRINSLFYRVSKANFYFEEIAKLLGGKNNYCYFKDEVQKDFKFNYRMSQSVSGCPTTAQLHNIFDEDWKTCIAETYQHSAKKDGSLKTVDEMADDIWNVLYSFSSKDCLYDFAVNKLQLEEDKAKKFSKIKLSRGFASISLNAIHKILPFLRMGMIYSHAVLFANIPTIVGMDVWSDESKRQHIMTELSDLVLNYDPKNREVEGTIEMCIKDFLLNNYDLPAGAVCRLYHPSMIDTYPDAKENKDGVLQLGSPATNAIRNPMAMRSLHELRHVVNLLLRKGKIDQNTEVHVEYARELNDANKRKAIADRQREMDKLHKKYHDDIITLYKEETGKDINPTQADILKFQLWEEQEHVCLYTGHQIGISKFLGPDPEFDIEHTVPRSVGGDSTQMNMTLCDRRFNRDVKKAMLPSQLPNYQEILPRIEKWKKKYEKLTKDIDHCITHSGMSKEAKDSIIQKRHRLTLERDYWRNKYLRFTMTEVPEGFSRRQGAGIGLVSKYAGLFLKSLFHDPADRRRSHVYVVKGTTTAEFRKMWGLQSEYEKKSRDNHVHHCVDAITIACIGKNEYNKMASFYHDEEAFERGECGKPHFDKPWPTFTQDVLGLEKSLMVVHSTQDNMPKHAKKYVRTPRGKFIAKGDCARGSLHLDTYYGAIKHKDDTEPRYVLRRELSSFDSVSDLDIIVDDAVREKIREAVKGKSGKAFKEALANVYMNKEKGIRIKKVRCYVPSVKRPIDIRHQRDISRFDYKRQFHVANDGNYMMAIYEGVVKGKQKRDFELVKNIEAASYFKVSQDKESFSSIVPEKSSNGFPLKAALKIGTHVLLYENTASEIDFSDPVDLTRRLYKVVGLSSKTVSGYNYGDITLRFHQEARQAKEITSTRGLFKNTDQYRGEIHLLHTQLNALVEGYDFDINILGEITSKQ

SEQ ID NO: 19748 - protein, 1232 aa, unidentified
  REGION 1..1232: note = Cas Enzyme sequence
MTKTRILGLDTGTNSLGWAIVDRDEVSGQYELVDRGDLIFTEGVKIEKGIESSKASERTQHRALRKQYFRRRLRKIEVLRVLTFYHLCLPVSEEELHLWHVKKIYPVENQEFMIWQRTNDNEGKNPYYYRHICLHTKLNLTLMKDRYILGRALYHLSQRRGFLSNRLDQSQDEDDKGTVKTGISSLSRDMNDAGCTYLGDYFYKLYSENGNRVRIRNHYTARNEHYLAEFEAICQVQKLEPELVEALRRAIFFQRPLKSQRKGVGKCTFEPRKPRCADSHPDYEEFRKLCFVNNIKIQTPDDDTMRPLNKEERQRINSLFYRVSKANFYFEEIAKLLGGKNNYCYFKDEVQKDFKFNYRMSQSVSGCPTTAQLHNIFDEDWKTCIAETYQHSAKKDGSLKTVDEMADDIWNVLYSFSSKDCLYDFAVNKLQLEEDKAKKFSKIKLSRGFASISLNAIHKILPFLRMGMIYSHAVLFANIPTIVGMDVWSDESKRQHIMTELSDLVFNYDPKNREVEGTIEMCIKDFLLNNYDLPAGAVCRLYHPSMIDTYPDAKANKDGVLQLGSPATNAIRNPMAMRSLHELRHVVNLLLRKGKIDQNTEVHVEYARELNDANKRKAIADRQREMDKLHKKYHDDIITLYKEETGKDINPTQADILKFQLWEEQEHVCLYTGHQIGISKFLGPDPEFDIEHTVPRSVGGDSTQMNMTLCDRRFNRDVKKAMLPSQLPNYQEILPRIEKWKKKYEKLTKDIDHCITHSGMSKETKDSIIQKRHRLTLERDYWRNKYLRFTMTEVPEGFSRRQGAGIGLVSKYAGLFLKSLFHDPADRRRSHVYVVKGTTTAEFRKMWGLQSEYEKKSRDNHVHHCVDAITIACIGKNEYNKMASFYHDEEAFERGECDKPHFDKPWPTFTQDVLGLEKSLMVVHSTQDNMPKHAKKYVRTPRGKFIAKGDCARGSLHLDTYYGAIKHKDDTEPRYVLRRELSSFDSVSDLDIIVDDAVREKIREAVKGKSGKAFKEALANVYMNKEKGIRIKKVRCYVPSVKRPIDIRHQRDISRFDYKRQFHVANDGNYMMAIYEGVVKGKQKRDFELVKNIEAASYFKVSQDKESFSSIVPEKSSNGFPLKAALKIGTHVLLYENTASEIDFSDPVDLTRRLYKVVGLSSKTVSGYNYGDITLRFHQEARQAKEITSTRGLFKNTDQYRGEIHLLHTQLNALVEGYDFDMNILGEITSKQ

SEQ ID NO: 19749 - protein, 1209 aa, unidentified
  REGION 1..1209: note = Cas Enzyme sequence
MNKNKVLGLDLGTNSIGWAIVEERPDGCALREHGVDIFQEGVKIEKGIESSKAAERTKYRAARRRLMRRKLRKIRTLEVLSEQGLCPRIVPERLKAWKQEGQYPLDDEFILWQRTDGDKNPYHDRNEALTRKLDLSVQRDRYILGRAMYHLAQRRGFLSNRLEKTKESDGAVKTGIDELSQDIEKSGCRFLGEYFYRCYCEGEKIRTRYTSRKEHYNAEFDEICRVQQLDENLKKELEKAIFFQRKLRSQKGLVGKCTLEKSKSRCPVSHPRFEEYRMLQLINNIKIQTPIDEALRPLSREEKEQIIPLFLRKSKKQFDFEDIANKLAGKNNYAYYKDNSGKPYLFNYKMNTSVSGSPVTVSLQDIFGEQWDAVLAERYTAKNGKTQQQIVNDVWHVLFFFDDDEKLKEFAMNKLQCSEEEAKKFSEIHLPQDYAALSLNAIEKILPFLREGMLYSHSVFLANMGKALPAEVWNDPESQRVIIRHVADIIDDFPKEGRLPIGDTIESRIASFIEAHFNVLPCRVKDRLYHPTMMETYPEAKSDEFGRLRLGSPRTSSVRNPMAMRALFRLRKLVNTLLDENKIDKSTKIRIEFARGLNDANRRKAIEDYQRERETERKKYYEEIKKLYLEESGREIEPNETDVLKFQLWREQNKICPYTGRTISICQFIGANPEFDIEHTIPRSAGGDDSQMNKTLCESAFNRNEKGSKLPSKLARHAEVLVRIAHWKERCDELRKQIERTKGSFSTKEIKDAMIRKRHKLKLELDYWSGKYRRFEMTEVPEGFSNRQGIDIGIISKYARLYLQSVFPKTYVVKGLTTDAFRKMWGLQEQYEKKERGNHAHHCMDAITIACIGPNEYARMAEYFRNQEQYRWYRNREKPQFPKPWPTFTEDVIAIEQKLLVSHHTPDNMSRQTKKKWRKHGQVQRDDNGKDLYVAGDSARGSLHQDTFYGAIMRDGELKHVVRKSLGSLKEGDVDKIVDEVVREKVRQAVEEKGFKQAMAGPIWMSEEKGVEIKKVRCFTPSVTSPIRLKEHRDLSRHEHKQHLRVVTGGSYLMAVYEVVDAKGKSKRDFEIVNNLDAAKYFKASSDHAAFTDIVPLTSEKGYPLKWTLKSGTMVLFYENSPEEVYEADNTELKKRLYKITIMKKNGQITFIFHQEARSKGELNEKDGEYKSGEEHRPLIRMYSTRLRALVEGHDFELSVTGEVKFKNG

SEQ ID NO: 19750 - protein, 1445 aa, unidentified
  REGION 1..1445: note = Cas Enzyme sequence
MKRILGLDLGSNSIGWGLIEQDFGQREGKIIAAGSRIIPMDQGLLGDFEKGNTVSQTAERTFYRSARKLRQRHLLRRERLHRVLHILGFLPTHYDKQIDFSKRYGKFIGNIEPKIAYNDGKFLFMDSFQEMLSDFKSHQPDLFYTKRNGEESKIPYDWTIYYLRKKALSQKISKEELAWIILNFNQKRGYYQLRGEEEAENPNKEVAYYSLMVTDVTAEAPNKKEEIWYSIQLENGWVYRRTSKIPLDNWKGKVRDFIVTTELEEDGSVKRDKEGKEKRSFRAPDENDWNLLKKKTEQDINTSQKTVGSYIYDHLLQNPNEKIKGKLVRTIERKYYKEELKAILEKQIALQPELFTDQLFADCIRELYSKNATQQRNLAARDFVHLFVEDIIFYQRPLRSQKSTIANCSLESRSYIDKDSHTRKEAPLKVCSKSNPYYQEFRVLQWLQNLKIYEIESDREVTHQFIKTLENKQQLFDFLMAQKEIDCEELLKYFLNQTYPNAKEKALKSELKKWKDTYRWNYVYDIGEKSSKKYPMNETRYELKRYLEKVANLPDDFLSSEVEYLLWHLIYSVTDKVAYEKGLKKFAQKHHLDENSFVESFKKFKPYPSEYGSFSEKAIRKLLPLMRFGSYWDFNHIDKNTQKRIEDLITGVENEEIRTILREKAEKYQLEKETDFQNLPLWLAQYIAYNRHTEASSLEKWTSVNDLETYLNEFKQHSLRNPIVEQVVTETLRVVRDIWQQYGQGKADFFDEIHIELGRGLKKTAKEREELSKQNQKNEDTNLRIKALLAELGEDSTIENVRPYSLMQQELLKLYEEGVFSSSMEIEDDIEKIHKKATPNKAELQRYKLWLEQKYKSPYTGQIISLKRLFTEDYEIEHIIPQSRYYDDSLSNKVICESAVNKLKGNQLGLEFIKNHYGEKVHAAGKEVSIFTEEQYKEFVKNHYANNSGKMKKLLLEDIPEKMVARQMNDTRYISKYISEILSKIVRADERDEGVNSKNVILCTGKITTALKQDWGINDVWNDLILPRFERMNDLTQSSLFTSYNEKYQKYLPTVPMEYSNGFQKKRIDHRHHAMDAIIIACATREHINYINNQHALEKGKNKEEKQKSRIDLRTILSEKKYNWVFKKPWDTFTQEVRAALEGIVVSFKQNLRVINKATNYYEHWVEENGKLIKKMVKQEGTNWAIRKPLHKETVSGKITLEREKVSKGKILTATRKAIDSTFTEKVIEGITDTGIQKILLNYLKFKKSPEIAFSPEGIEELNKNISLYNDGKPHKPIRKVRIFEQGSKFPLGEVGNKSQKYVEAAKGTNLYFGVYQGKDKRSFATIPLNEVIERQKQGLSSVPEYNEKGDPLLFSLSPNDLVYVSIEGEIIEDIDFRNLSKEQKERIYKIVSFTKGRVYGIPNRVAISIVNKVEYTQLNKIEFIKEKEICIKLKVDRLGNISKP

SEQ ID NO: 19751 - protein, 1318 aa, unidentified
  REGION 1..1318: note = Cas Enzyme sequence
QPDLFYTKRNGEESKIPYDWTIYYLRKKALSRKISKEELAWIILNFNQKRGYYQLREEEENKENDFEIISSKIISVIKKDKDKKYNKYWYDIILENGLVYQAAFYNDFVYNWINQDREFIIERTSLKNGTEKVKLSYLPTFDEIDKMDKKEQDKYYKKIKIKTENSIGNKTVGCYIYDHILQNPNEKIKGKLVRTIERKYYKEELKAILEKQIALQPELFTDQLLADCIRELYSKNETQQRNLAARDFVHLFVEDIIFYQRPLRSQKSTIANCSLESRFYIDKDSHTRKEAPLKVCPKSNPYYQEFRVLQWLQNLKIYEIDTDQEVTHEFIKTLEDKQQLFDFLMDQKEIDCEELLKYFLNQTYPNAKEKALKSELKKWKDTYRWNYVYDIGEKSSKKYPMNETRYELKRYLEKVANLPDDFLSSEVEYLLWHLIYSVTDKIAYEKGLKKFAQRHHLDEDCFVENFKKFKPYPSEYGSFSEKAIRKLLPLMRFGYHWNFDSIDKDTQKRIEDLITGVENDEIRTIIREKAEKYQLEKETDFQGLPLWLAQYIVYNRHAEASSLEKWTSVNDLETYLNNFKQHSLRNPIVEQVVTETLRVVRDIWQQYGQGKADFFDEIHIELGRELKKTAKEREELSKQNQKNEDTNLRIKALLAELKEDNSIENVRPYSPLQQELLKIYEEGVFSSSMEIEDDIEKIHKKASPSKTELQRYKLWLEQKYKSPYTGQIISLKRLFTEDYEIEHIIPQSRYYDDSLSNKVICESAVNKLKGNQLGLEFIKNHYGEKVRIADKEVSIFTEEQYKEFVKNHYANNSGKLKKLLLEDIPEKMVARQMNDTRYISKYISEILSKIVRSSERDEGVNSKNVILCTGKITSALKQDWGVNDVWNDLILPRFERMNALTQSTLFTTYNERYQKYLPTVPMEYSNGFQKKRIDHRHHAMDAIIIACATREHINYINNQHALEKGKNKEEKQESRIDLRTILCEKKYNDNAEENYNWIFKKTWDTFTQEVRAALEGIVVSFKQNLRVINKATNYYERWVEENGKLIKKIVKQEGTNWAIRKPLHKETVSGKITLEREKVSKGKILTATRKAIDSTFTEKVIEGITDTGIQKILLNYLKFKKNRELAFSPEGLEELNKNIMLYNDGKPHKPIYKVRIFEQGSKFPLGEVGNKATKYVEAAKGTNLYFGIYQGKDKRSFATIPLNEVIERQKQGLSSVPEYNEKGDPLLFNLSPNDLVYVPIEGEIIEDIDFRNLSKEQKERIYKIVSFTKGRVYGIPNRVAISIVNKMEYTQLNKIEFIKEKEVCIKLKVDRLGNISKA

SEQ ID NO: 19752 - protein, 1435 aa, unidentified
  REGION 1..1435: note = Cas Enzyme sequence
MKKRKHILGLDLGTTSIGFAHVVEDENKEKSEIKELGVRIVSLTTDEQSDFEKGKSITTNANRTLKHGARLNLDRYQQRRKYLIDLLQKANLITSSSILAENGKNTTHSTWQLRAKAVTERVEKEEFARILLAINKKRGYKSSRKVKTEDEGQAIDGMAIAKRLYDENLTPGQLSLQLLQQNKKLLPDFYRSDLQKEFDLVWNFQKQFYPDILTDSFYKELQGKGKDATSKAFSKRYHFDTAENKGSKESVRLQAYQWRAEAISKQLSKEEVAYVLTEINNNLNNASGYLGAISDRSKELYFNRQTVGQYLYAQLQENKHNSLKNKVFYRQDYLDEFERIWETQASFHKELTEELKKQIRDVVIFYQRKLKSQKGLISFCEFESKEIEIEKDGKTITKSIGARVVPKSSPLFQEFKIWQILNNVTCKRKGIRKKKSSAKTTQLDLLNESSQTIFSLDMECKQLLFEELNLKGDLKSDKVLKLLGYSPQEWEINYNQLEGNRTQKALYEAYLKIVEMEAHDVKDILQIKSTKDDWSLDESPLSASEIRERVKAIFQALGICTKILYFDPLLPVKEFEEQDSYQLWHLLYSYESDDSTSGNETLYRILEKKYAFKREHATILANIALQDDYGNLSTKAIRKLYPYIKENQYSTACKKAGYKHSKLSLTTEELEARELKNIIPLLKKNALRNPVVEKILNQMINVVNTLIEKNSERDAEGKITKYFHFDEIRIELARELKKNAQKRYEMTQNINKAKLEHQKISEILQKKFGIKNPTKSDIIRYRLYQELEHNGYKELYTNAPIARDMLFSKNIEIEHIVPKARVFDDSFSNKTLAFREFNIKKGESTAFDYITSLNSEEELNQYLTRVENAYKTKSISPTKYKNLLKKASEIGDDFINRDLRDTQYIAKKAKEILFQVTKNVLSTSGSITDRLREDWGLVDVMKELNMPKYQSLGLTEVEERKEGNKVTVIKNWTKRNDHRHHAMDALTVAFTKPSYIQYLNHLNARKDENNKNYSVILAIEEKETIKVPTNNGKNKRVFIEPIPNFRQVAKKHLEEIFISHKAKNKVVTKNINKPAGTDKQQITLTPRGQLHKETIYGKYQYYINKEEKIGVKFDERTITKVSNPLYREALLKRLQANDNDPKKAFTGKNALSKKPIYLDEAKTKTLPEKVNLTYLEEDFSVRKKIVPKNPTSKEFVPNLKSIEKVVDEGVRNILIERLRVYNSDPEKAFVDLEKNPIWLNKEKGIAIKRVTISGVSNAQPLHIGKDHLGKTTLNKEGNEIPVDYVSTGNNHHVAIYRDKEGNLQEQIVSFFDAVVRAQQGLPIIDKTYKQAEGWLFLFTMKQNEMFVFPNATTGFNPAEIDLLDPKNKKLISPNLFRVQKIATKDYFFRHHLETNVETDNVLKNTTWKREGLSGLKDIVKVRINHLGDIVSIGEY

SEQ ID NO: 19753 - protein, 1274 aa, unidentified
  REGION 1..1274: note = Cas Enzyme sequence
KRLYDENLTPGQLSLQLLQQNKKLLPDFYRSDLQKEFDLVWNFQKQFYPDILTDSFYKELQGKGKDATSKAFSKRYHFDTAENKGSKESVRLQAYQWRAEAISKQLSKEEVAYVLTEINNNLNNASGYLGAISDRSKELYFNRQTVGQYLYAQLQENKHNSLKNKVFYRQDYLDEFERIWETQASFHKELTEELKKQIRDVVIFYQRKLKSQKGLISFCEFESKEIEIEKDGKTITKSIGARVVPKSSPLFQEFKIWQILNNVTCKRKGIRKKKSSAKTTQLDLLNESSQTIFSLDMECKQLLFEELNLKGDLKSDKVLKLLGYSPQEWEINYNQLEGNRTQKALYEAYLKIVEMEAHDVKDILQIKSTKDDWSLDESPLSASEIRERVKAIFQALGICTKILYFDPLLPVKEFEEQDSYQLWHLLYSYESDDSTSGNETLYRILEKKYAFKREHATILANIALQDDYGNLSTKAIRKLYPYIKENQYSTACKKAGYKHSKLSLTTEELEARELKNIIPLLKKNALRNPVVEKILNQMINVVNTLIEKNSERDAEGKITKYFHFDEIRIELARELKKNAQKRYEMTQNINKAKLEHQKISEILQKKFGIKNPTKSDIIRYRLYQELEHNGYKELYTNAPIARDMLFSKNIEIEHIVPKARVFDDSFSNKTLAFREFNIKKGESTAFDYITSLNSEEELNQYLTRVENAYKTKSISPTKYKNLLKKASEIGDDFINRDLRDTQYIAKKAKEILFQVTKNVLSTSGSITDRLREDWGLVDVMKELNMPKYQSLGLTEVEERKEGNKVTVIKNWTKRNDHRHHAMDALTVAFTKPSYIQYLNHLNARKDENNKNYSVILAIEEKETIKVPTNNGKNKRVFIEPIPNFRQVAKKHLEEIFISHKAKNKVVTKNINKPAGTDKQQITLTPRGQLHKETIYGKYQYYINKEEKIGVKFDERTITKVSNPLYREALLKRLQANDNDPKKAFTGKNALSKKPIYLDEAKTKTLPEKVNLTYLEEDFSVRKKIVPKNPTSKEFVPNLKSIEKVVDEGVRNILIERLRVYNNDPEKAFVDLEKNPIWLNKEKGIAIKRVTISGVSNAQPLHIGKDHLGKTTLNKEGNEIPVDYVSTGNNHHVAIYRDKEGNLQEQIVSFFDAVVRAQQGLPIIDKTYKQAEGWLFLFTMKQNEMFVFPNATTGFNPAEIDLLDPKNKKLISPNLFRVQKIATKDYFFRHHLETNVETDNVLKNTTWKREGLSGLKDIVKVRINHLGDIVSIGEY

SEQ ID NO: 19754 - protein, 1435 aa, unidentified
  REGION 1..1435: note = Cas Enzyme sequence
MKYIKHILGLDIGSNSIGWALIQLDLLQKTKRIIAAGSRIIPMDQKVLSDFGKGITISPTAQRTSYRNARHCRERHLLRRERLHRVLHILGFLPPHYDKQIDFSKRYGKFLDNTEPKIAYNEGKFLFMDSFQEMLSDFKSHQPDLFYTKKNGEESKIPYDWTIYYLRKKALSRKISKEELAWIILNFNQKRGYYQLREEEGNKENDFEIISSKIISVIKKDKDKKYNKYWYDIILENGLVYQAAFYNDFVYNWINQDREFIIERTSLKNGAEKVKLSYLPTFDEIDKMDKKEQDKYYKKIKIKTENSIGNKTVGCYIYDHILQNPNEKIKGKLVRTIERKYYKEELKAILEKQIALQPELFTDQLLADCIRELYSKNEAQQRNLAARDFVHLFVEDIIFYQRPLRRQKSTIANCSLESRSYIDKDSHTRKGAPLKVCSKSNPYYQEFRVLQWLQNLKIYEIESDQEVTHEFIKTLEDKQQLFDFLMAQKEIDCEELLKYFLSLTYPNAKEKALKSELKKWKDTYRWNYVYDIGEKSSKKYPMNETRYELKRYLEKVANLPDDFLSSEVEYLLWHLIYSVTDKVAYEKGLKKFAQKHHLDEDSFVESFKKFKPYPSEYGSFSEKAIRKLLPLMRFGSYWNFNHIDKNTQKRIDDLITGVENEEIRTILREKAEKYQLEKETDFQDLPLWLAQYIVYNRHAEASSLEKWTSVNDLETYLNEFKQHSLRNPIVEQVVTETLRVVRDIWQQYGQGQADFFDEIHIELGRELKKTAKEREELSKQNQKNEDTNLSIKEKLKELEKYNTRAYSITHQEKYKLWLEQKHISPYTGQIISLENLFTDNYEIEHIIPQSRFFDDSLSNKVVCESIVNKAPYKDRQLGLEFIKNQGGRIVKELSKENKTIKIFTEEQYRTFIKEHYSNNPEKTKKLLLEEIPEKMVARQMNDTRYISKFISEILSKIVRSDEQDEGVHSKNVILCTGKITSILRQDWGLNDIWDNLILPRFERMNNLLQKEKFTIYSVEKQKKIPVVPINDQFKSFQKKRIDHRHHALDAIIIACVTGEHINYINNQHALEKGKDKKEKQKEHDKLREKLCFKKYNKGSEENYSWIFKKPWAHFTQEVRTALEGIVVSFKQNLRVINKATNYYERWVEENGKYIKKIVKQEGTNWAIRKPLHEETISGKIYLDREKITKNDILTATRKTVDSSFDDKRIKKITDTGIQKILLNYLKYKGSPEIAFSPEGLEELNKNLSIYNDGKPHKPIYKVRIYEKGSGRFALGEKGRKYKKYVQGAPNLYFGIYQGAKRSFATIPLNEVIERQKQGLPSVPEYNEKGDLLLFSLSPNDLVYVPVEGEIIEDIDFRNLSNEQKERIYKAASFTRNECFFIKSSIASLIKNYDAKTKIGELGSQNKLEVTICKGIRIKEVCIKLKVDRLGNISKA

SEQ ID NO: 19755 - protein, 1464 aa, unidentified
  REGION 1..1464: note = Cas Enzyme sequence
MKRILGLDLGSNSIGWGLIEQDLQQKEGKIIASGSRIIPMDQGILGDFEKGNTVSQTAERTFYRSTRKLRQRHLLRRERLHRVLHILGFLPTHYDKQIDFSKRYGKFIGDIEPKIAYNEGKFLFMDSFQEMLSDFKSHQPDLFYTKKNGEESKIPYDWTIYYLRKKALSQKISKEELAWIILNFNQKRGYYQLRGEEEIENPNKEVTYYSLMVTEVTAEAPNKKGEIWYSIQLENGWVYRRTSKIPLDDWKGKVRDFIVTTELEVDGSIKRDKEGKEKRSFRAPSEDDWNLLKKKTEQDINTSKKTVGTYIYDHLLQNPNEKIKGKLVRTIERKYYKEELKAILEKQIALQPELFTDQLFADCIRELYSKNEAQQRNLLARDFIHLFVEDIIFYQRPLRSQKTTIANCSLESRSYIDKDSHTRKEAPLKVCPKSNPYYQEFRVLQWLQNLKIYEIESDQEVTHQFIKTLEDKQQLFEFLMNQKEIDCEESLKYFLNQTYPNAKEKALKSELKKWKDTYRWNYVYDIGEKSSKKYPMNETRYELKRHLEKVANLPDDFLSSEVEYLLWHLIYSVKDKVAYEKGLKKFAQKHHLDEDSFVESFKKFKPYPSEYGSFSEKAIRKLLPLMRFGSYWDFNHIDKNTQKRIDDLITGVENEEIRTILREKAEKYQLEKKTDFQDLPLWLAQYVVYNRHAEASSLEKWTSVNDLETYLNEFKQHSLRNPIVEQVVTETLRVVRDIWQQYGQGQADFFDEIHIELGRELKKTAKEREELSKQNQKNEDTNLRIKALLAELGEDSAIENVRPYSLMQQELLKLYEEGVFSSSMEIEDDIKKIHKKATPSKAELQRYKLWLEQKYKSPYTGQIISLKRLFTEDYEIEHIIPQSRYYDDSLSNKVICESAVNKLKDNQLGLEFIKNHYGEKVHAAGKEVSIFTEEQYKEFVKNHYANNSGKMKKLLLEDIPEKMVARQMNDTRYISKYISEILSKIVRADERDEGVNSKNVILCTGKITTALKQDWGVNDVWNDLILPRFERMNDLTQTSLFTSYNEKYQKYLPTVPMEYSNGFQKKRIDHRHHAMDAIIIACATREHINYINNQHALEKGKDKKEKQEKRDTLRERLCIKKYNNKSEGNYNWVFKKPWDTFTQEVRAALEGIVVSFKQNLRVINKATNYYERWVEENGKYIKKMVKQEGTNWAIRKPLHEETVSGKITLEREKVSKGKILTATRKAIDSTFTEKVIEGITDTGIQKILLNYLKFKKSPEIAFSPEGLEELNKNISLYNDGKPHKPIRKVRIFEQGSKFPLGEVGNKSQKYVEAAKSTNLYFGVYQGKDKRSFATIPLNEVIERQKQGLSSVPEYNEKGDPLLFSLSPNDLVYVSIEGEIIEDIDFRNLSNEQKERIYKAASFTRNECFFIKSSIASLIKNYDAKTKIGELGSQNKLEVTICKGIRIKEVCIKLKVDRLGNISKA

SEQ ID NO: 19756 - protein, 1457 aa, unidentified
  REGION 1..1457: note = Cas Enzyme sequence
MKRILGLDLGSNSIGWGLIEQDFGQREGKIIAAGSRIIPMDQGLLGDFEKGNTVSQTAERTFYRSTRKLRQRHLLRRERLHRVLHILGFLPPHYDKQIDFSKRYGKFVDNTEPKLAYEEGRFLFMDSFQEMLSDFKSHQPTLFYSKKKGEESKIPYDWTIYYLRKKALSQKISKEELAWIILNFNQKRGYYQLRGEEEVENPNKEVTYYSLIVTEVTAEAPNKKGEIWYSIQLENGWVYRRTSKIPLDDWKGKVRDFIVTTELEEDGSIKRDKEGKEKRSFRAPSEDDWNLLKKKTEQDINTSKKTVGTYIYDHLLQNPNEKIKGKLVRTIERKYYKEELKAILEKQIALQPELFTDQLFADSIRELYSKNEAQQRNLVARDFIHLFVEDIIFYQRPLRSQKTTIANCSLESRSYIDKDSHTRKEAPLKVCPKSNPYYQEFRVLQWLQNLKIYEIDSDQEVTHQFIKTLENKQQLFEFLMAQKEIDCEELLKYFLNQTYPNAKEKALKSELKKWKDTYRWNYVYDIGEKSSKKYPMNETRYELKRYLEKVANLPDDFLSSEVEYLLWHLIYSVTDKVSYEKGLKKFAQKHHLDEDSFVESFKKFKPYPSEYGSFSEKAIRKLLPLMRFGSYWDFNHIDKNTQKRIDDLITGVENEEIRTILREKAEKYQLEKETDFQDLPLWLAQYIVYNRHAEASSLEKWTSVNDLETYLNEFKQHSLRNPIVEQIVTETLRVVRDIWQQYGQGEADFFDEIHIELGRELKKTAKEREELSKQNQKNEDTNLRIRALLAELGEDSTIENVRPYSPLQQELLKLYEEGVFSSSMEIEDDIEKIHKKATPSKAELQRYKLWLEQKYKSPYTGQIISLKRLFTEDYEIEHIIPQSRYYDDSLSNKVICESAVNKLKGNQLGLEFIKNHYGEKVHAAGKEVSIFTEEQYKEFVKNHYANNSGKMKKLLLEDIPEKMVARQMNDTRYISKYISEILSKIVRSGERDEGVNSKNVILCTGKITSALKQDWGVNDVWNDLILPRFERMNDLTQSTLFTTYNEKYQKYLPTVPMEYSNGFLKKRIDHRHHAMDAIIIACATREHINYINNQHTLEKGKNKEEKQKSRIDLRTILCEKKYSDNAEENYSWIFKKPWDTFTQEVRSALEGIVVSFKQNLRVINKATNYYEHWVEENGKFIKKMVKQEGTNWAIRKPLHKETVSGKITLEREKVSKGKILTATRKAIDSTFTEKVIEGITDTGIQKILLNYLKFKKSPEIAFSPEGIEELNKNIALYNDGKPHKPIRKVRIFEQGSKFPLGEVGNKSQKYVEAAKGTNLYFGVYQGKDKRSFATIPLNEVIERQKQGLSSVPEYNEKGDPLLFSLSPNDLVYVPVEGEIIEDIHFRNLSNEQKERIYKTVSFSGYQCFFVKQTVSTPIVNKMEYSPLNKMEKSIIGIMIKEVCVKLKVDRLGNISKA

SEQ ID NO: 19757 - protein, 1438 aa, unidentified
  REGION 1..1438: note = Cas Enzyme sequence
MKYIKYILGLDIGSNSIGWALIQLDLLQKTKRIIATGSRIIPMDQKVLSDFGKGITISPTAQRTSYRNARHCRERHLLRRERLHRVLHILGFLPTHYDKQIDFSKRYGKFVDNTEPKIAYNERKFLFMDSFQEMLADFKIHQPDLFYTKKNGEESKIPYDWTIYYLRKKALSRKISKEELAWIILNFNQKRGYYQLREEEEENKENDFEIISSKIISVIKKDKDKKYNKYWYDIILENGLVYQAAFYNDFVYNWINQDREFIIERISLKNGTEKVKLSYLPTFDEIDKMDKKEQDKYYKKIKIKTENSIGNKTVGCYIYDHILQNPNEKIKGKLVRTIERKYYKEELKAILEKQVALQPELFTDQLFADCIRELYNKNEAQQRNLAARDFVHLFVEDIIFYQRPLRSQKSTLANCSLESRSYIDKDSHTRKEVPLKVCPKSNPYYQEFRVLQWLQNLKIYEIDTDQEVTHEFIKTLEDKQQLFDFLMDQKEIDCEELLKYFLNQTYPNAKEKALKSELKKWKDTYRWNYVYDIGEKSSKKYPMNETRYELKRHLEKVANLPDDFLSSEVEYLLWHLIYSVKDKVAYEKGLKTFAQKHHLDKDSFVESFKKFKPYPSEYGNFSEKAIRKLLPLMRFGAYWDFNHIDKNTQKRIEDLITGAENEEIRTILREKAEKYQLEKETDFQDLPLWLAQYIVYNRHAEASSLEKWTSVNDLETYLNEFKQHSLRNPIVEQVVMETLRVVRDIWQQYGQGQASFFDEIHIELGRELKKTAKEREKLSKQNQKNEDINLSIKEKLKELKKYNTRAYSITHQEKYKLWLEQKHISPYTGQIISPENLFTDNYEIEHIIPQSRFFDDSLSNKVVCESIVNKAPYKDRQLGLEFIKNQGGRIVKELSKENKTIKIFTEKQYRTFIKEHYSNNPAKTKKLLLEEISEKMVARQMNDTRYISKFISEILSKIVRSDKQDEGVHSKNVILCTGKITSILRQDWGLNDVWDNLILPRFERMNNLLQKEKFTIYSIEKQKKIPVVPINDQFKSFQKKRIDHRHHALDAIIIACVTGEHINYINNQHALEKGKDKKEKQKEHDKLREKLCIKKYNKGSEENYSWIFKKPWNTFTQEVRAVLEGIVVSFKQNLRVINKATNYYERWVEENGKYIKKMVKQEGTNWAIRKPLHEETISGKIYLDREKITKNDILTATRKTVDSSFNEERIKKITDTGIQKILLNYLEYKGSPEIAFSPEGLEELNKNLSIYNDGKPHKPIYKVRIYEKGSGRFALGEKGRKYKKYVQGAPNLYFGIYQGANKRSFVTIPLNEVIERQKQGRPSIPEYNEKGDPLLFSLSPNDLVYVPIKGEIIEDIDFQNLSNEQKERIYNVNDFSSTCYFTPNRIAKAIFPKEVDLQRKGDKLSGSYDTKTASLEGIQIKEVCIKLKVDRLGNLSKA

SEQ ID NO: 19758 - protein, 1457 aa, unidentified
  REGION 1..1457: note = Cas Enzyme sequence
MKRILGLDLGSNSIGWGLIEQDFGQREGKIIAAGSRIIPMDQGLLGDFEKGNTVSQTAERTFYRSARKLRARHLLRRERLHRVLHILGFLPTHYDKQIDFSKRYGKFIGDIEPKIAYNDGKFLFMDSFQEMLSDFRSHQPDLFYTKRNGEESKIPYDWTIYYLRKKALSQKISKEELAWIILNFNQKRGYYQLRGEEEVENPNKEVTYYSLMVTEVTAEAPNKKGEIWYSIQLENGWVYRRTSKIPLDNWRGKSRDFIVTTELEEDGSVKRDKEGKEKRSFRAPDENDWNLLKKKTEQDINTSQKTVGTYIYDHLLQNPNEKIKGKLVRTIERKYYKEELKAILEKQVALQPELFTDQLFADCIRELYSKNEAQQRNLAARDFVHLFVEDIIFYQRPLRSQKSTIANCSLESRSYIDKDSHTRKEVSLKVCPKSNPYYQEFRVLQWLQNLKIYEIESDREVTHELIKTLEDKQQLFDFLMAQKEIDCEELLKYFLSLTYPNAKEKALKSELKKWKDTYRWNYVYDIGEKSSKKYPMNETRYDLKRYLERVANLPDDFLSSEVEYMLWHLIYSVTDKVAYEKGLKKFAQKHHLDEDSFVESFKKFKPYPSEYGSFSEKAIRKLLPLMRFGSYWDFNHIDKNTQKRIEDLITGVENEEIRTILREKAEKYQLEKETDFQNLPLWLAQYIAYNRHAEASSLEKWTSVNDLETYLNEFKQHSLRNPIVEQVITETLRVVRDIWQQYGQGKADFFDEIHIELGRELKKTAKEREELSKQNQKNEDTNLRIKALLAELGEDSTIENVRPYSLMQQELLKLYEEGVFSSSMEIEDDIEKIHKKATPNKAELQRYKLWLEQKYKSPYTGQIISLKRLFTEDYEIEHIIPQSRYYDDSLSNKVICESAVNKLKGNQLGLEFIKNHYGEKVHAAGKEVSIFTEEQYKEFVKNHYANNSGKMKKLLLENIPEKMVARQMNDTRYISKYISEILSKIVRADERDEGVNSKNVILCTGKITTALKQDWGINDVWNDLILPRFERMNDLTQTSLFTSYNEKYQKYLPTVPMEYSNGFQKKRIDHRHHAMDAIIIACATREHINYINNQHALEKGKNKEEKQKSRIDLRTILCEKKYNDNAEENYNWVFKKPWDTFTQEVQVALEGIVVSFKQNLRVINKATNYYEHWVEESGKLIKKMVKQEGTNWAIRKPLHKETVSGKITLEREKVSKGKILTATRKAIDSTFTEKVIQGITDTGIQKILLNYLKFKKSPEIAFSPEGLEELNKNITLYNDGKPHKPIYKVRIFEQGSKFPLGEVGNKSQKYVEAAKGTNLYFGVYQGKDKRSFATIPLNEVIERQKQGLSSVPEYNEKGDPLLFSLSPNDLVYVPIVGEIIEDIDFQNLSKEQKERIYKTVSFTGYQCFFIRETVAIPIVNKIEYSPLNKMERSITGIMIKEVCIKLKVNRLGNISKA

SEQ ID NO: 19759 - protein, 952 aa, unidentified
  REGION 1..952: note = Cas Enzyme sequence
KWKDTYRWNYVYDIGEKSSKKYPMNETRYDLKRHLEKVANLPDDFLSSEVEYMLWHLIYSVTDKVAYEKGLKKFAQKHHLDEDSFVESFKKFKPYPSEYGSFSEKAIRKLLPLMRFGSYWDFNHIDKNTQKRIEDLITGVENEEIRTILREKAEKYQLEKETDFQNLPLWLAQYIAYNRHAEASSLEKWTSMNDLETYLNEFKQHSLRNPIVEQVVTETLRVVRDIWQQYGQGKADFFDEIHIELGRELKKTTKEREELSKQNQKNEDTNLRIKALLAELGEDSTIENVRPYSLMQQELLKLYEEGVFSSSMEIEDDIEKIHKKATPSKAELQRYKLWLEQKYKSPYTGQIISLKRLFTEDYEIEHIIPQSRYYDDSLSNKVICESAVNKLKGNQLGLEFIKNHYGEKVHAAGKEVSIFTEEQYKEFVKNHYTNNSGKMKKLLLEDIPEKMVARQMNDTRYISKYISEILSKIVRANERDEGVNSKNVILCTGKITTALKQDWGINDVWNDLILPRFERMNDLTQTSLFTSYNEKYQKYLPTVPMEYSNGFQKKRIDHRHHAMDAIIIACATREHINYINNQHALEKGKNKEEKQKSRIDLRTILCEKKYNDNAEENYNWIFKKPWDTFTQEVRAALEGIVVSFKQNLRVINKATNYYERWVEENGKLIKKMVKQEGTNWAIRKPLHKETVSGKITLEREKVSKGKILTATRKAIDSTFTEKVIQGITDTGIQKILLNYLKFKKSPEIAFSPEGLEELNKNISLYNDGKPHKPIRKVRIFEQGSKFPLGEVGNKATKYVEAAKGTNLYFGVYQGKDKRSFATIPLNEVIERQKQGLSSVPEYNEKGDPLLFSLSPNDLVYIPIEGEIIEDIDFQNLSNEQKERIYKAASFTRNECFFIKSSIAFLIKNYDAKTKIGELGSQNKLEVTICKGIRIKEVCIKLKVDRLGNISKA

SEQ ID NO: 19760 - protein, 1452 aa, unidentified
  REGION 1..1452: note = Cas Enzyme sequence
GLDLGSNSIGWGLIEQDFGQREGKIIAAGSRIIPMDQGLLGDFEKGNTVSQTAERTFYRSARKLRARHLLRRERLHRVLHILGFLPTHYDKQIDFSKRYGKFIGDIEPKIAYNDGKFLFMDSFQEMLSDFRSHQPDLFYTKRNGEESKIPYDWTIYYLRKKALSQKISKEELAWIILNFNQKRGYYQLRGEEEVENPNKEVTYYSLMVTEVTAEAPNKKGEIWYSIQLENGWVYRRTSKIPLDNWRGKSRDFIVTTELEEDGSVKRDKEGKEKRSFRAPDENDWNLLKKKTEQDINTSQKTVGTYIYDHLLQNPNEKIKGKLVRTIERKYYKEELKAILEKQVALQPELFTDQLFADCIRELYSKNEAQQRNLAARDFVHLFVEDIIFYQRPLRSQKSTIANCSLESRSYIDKDSHTRKEVSLKVCPKSNPYYQEFRVLQWLQNLKIYEIDSDQEVTHQFIKTLEDKQQLFEFLMNQKEIDCEELLKYFLNQTYPNAKEKALKSELKKWKDTYRWNYVYDIGEKSSKKYPMNETRYDLKRYLEKVANLSDDFLSSEVEYLLWHLIYSVTDKVSYEKGLKKFAQKHHLDEDSFVESFKKFKPYPSEYGSFSEKAIRKLLPLMRFGSYWDFNHIDKNTQKRIDDLITGVENEEIRTILREKAEKYQLEKETDFQDLPLWLAQYIVYNRHAEASSLEKWTSANDLETYLNEFKQHSLRNPIVEQVVTETLRVVRDIWQQYGQGQANFFDEIHIELGRELKKTAKEREELSKQNQKNEDTNLRIKALLAELGEDSTIENVRPYSPLQQELLKLYEEGVFSSSMEIEEEIEKIHKKASPSKTELQRYKLWLEQKYKSPYTGQIISLKRLFTEDYEIEHIIPQSRYYDDSLSNKVICESAVNKLKGNQLGLEFIKNHYGEKVHAAGKEVSILTEEQYKEFVKNHYANNSGKMKKLLLEDIPEKMVARQMNDTRYISKYISEILSKIVRSGERDEGVNSKNVILCTGKITSALKQDWGVNDVWNDLILPRFERMNDLTQSTLFTTYNEKYQKYLPTVPMEYSNGFQKKRIDHRHHAMDAIIIACATREHINYINNQHALEKGKNKEEKQKSRIDLRTILCEKKYSDNAEENYSWIFKKPWDTFTQEVRSALEGIVVSFKQNLRVINKATNYYEHWVEENGKFIKKMVKQEGTNWAIRKPLHKETVSGKITLEREKVSKGKILTATRKAIDSTFTEKVIEGITDTGIQKILLNYLKFKKSPEIAFSPEGIEELNKNIALYNDGKPHKPIRKVRIFEQGSKFPLGEVGNKATKYVEAAKGTNLYFGVYQGKDKRSFATIPLNEVIERQKQGYSSVPEYNEKGDPLLFSLSPNDLVYVPVEGEIIEDIDFRNLSNEQKERIYKTVSFSGYQCFFVKQTVSTPIVNKMEYSPLNKMEKSIIGIMIKEVCVKLKVDRLGNISKA

SEQ ID NO: 19761 - protein, 1464 aa, unidentified
  REGION 1..1464: note = Cas Enzyme sequence
MKRILGLDLGSNSIGWGLIEQDFGQREGKIIAAGSRIIPMDQGLLGDFEKGNTVSQTAERTFYRSVRKLRQRHLLRRERLHRVLHILGFLPTHYDKQIDFSKRYGKFIGDIEPKIAYNDGKFLFMDSFQEMLSDFKSHQPDLFYTKRNGEESKIPYDWTIYYLRKKALSQKISKEELAWIILNFNQKRGYYQLRGEEEVENPNKEVTYYSLMVTEVTAEAPNKKGEIWYSIQLENGWVYRRTSKIPLDNWRGKSHDFIVTTELEEDGSVKRDKEGKEKRSFRAPDENDWNLLKKKTEQDINTSQKTVGTYIYDHLLQNPNEKIKGKLVRTIERKYYKEELKAILEKQIALQPELFTDQLFADCIRELYSKNEAQQRNLAARDFVHLLAEDIIFYQRPLRSQKSTIANCSLESRSYIDKDSHTRKEAPLKVCPKSNPYYQEFRVLQWLQNLKIYEIDTDQEVTHEFIKTLEDKQQLFDFLMAQKEIDCEELLKYFLSLTYPNAKEKALKSELKKWKDTYRWNYVYDIGEKSSKKYPMNETRYDLKRYLERVANLPDDFLSSEVEYMLWHLIYSVTDKVAYEKGLKKFAQKHHLDEDSFVESFKKFKPYPSEYGSFSEKAIRKLLPLMRFGSYWDFNHIDKNTQKRIEDLITGVENEEIRTILREKAEKYQLEKETDFQNLPLWLAQYIAYNRHAEASSLEKWTSVNDLETYLNEFKQHSLRNPIVEQVVTETLRVVRDIWQQYGQGQADFFDEIHIELGRELKKTAKEREELSKQNQKNEDTNLRIKALLAELGEDSTIENVRPYSLMQQELLKLYEEGVFSSSMEIEDDIEKIHKKATPNKAELQRYKLWLEQKYKSPYTGQIISLKRLFTEDYEIEHIIPQSRYYDDSLSNKVICESAVNKLKDNQLGLEFIKNHYGEKVYAAGKEVSIFTEEQYKEFVKNHYTNNSGKMKKLLLEDIPEKMVARQMNDTRYISKYISEILSKIVRSGERDEGVNSKNVILCTGKITTALKQDWGVNDVWNDLILPRFERMNDLTQTSLFTTYNERYQKYLPTVPMEYSNGFQKKRIDHRHHAMDAIIIACATREHINYINNQHALEKGKNKEEKQKSRIDLRTILCEKKYNDNAEENYNWVFKKPWDTFTQEVRVALESIVVSFKQNLRVINKATNYYEHWVEENGKLIKKMVKQEGTNWAIRKPLHKETVSGKITLERKKVSKGKILTATRKAIDSTFTEKVIQGITDTGIQKILLNYLKLKKSPEIAFSSEGLEELNKNISLYNDGKPHKPIRKVRIFEQGSKFPLGEVGNKATKYVEAAKSTNLYFGVYQGKDKRSFATIPLNEVIERQKQGLSSVPEYNEKGAPLLFSLSPNDLVYVPIVGEIIEDIDFRNLSNEQKGRIYKAASFTRNECFFIKSSIASLIKNYDAKTKIGELGSQNKLEVTICKGIRIKEVCIKLKVDRLGNISKA

SEQ ID NO: 19762 - protein, 1457 aa, unidentified
  REGION 1..1457: note = Cas Enzyme sequence
MKRILGLDLGSNSIGWGLIEQDFGQREGKIIAAGSRIIPMDQGLLGDFEKGNTVSQTAERTFYRSARKLRQRHLLRRERLHRVLHILGFLPTHYDKQIDFSKRYGKFIGNIEPKIAYNDGKFLFMDSFQEMLSDFKSHQPDLFYTKRNGEESKIPYDWTIYYLRKKALSQKISKEELAWIILNFNQKRGYYQLRGEEEAENPNKEVAYYSLMVTDVTAEAPNKKEEIWYSIQLENGWVYRRTSKIPLDNWKGKVRDFIVTTELEEDGSVKRDKEGKEKRSFRAPDENDWNLLKKKTEQDINTSQKTVGSYIYDHLLQNPNEKIKGKLVRTIERKYYKEELKAILEKQIALQPELFTDQLFADCIRELYSKNATQQRNLAARDFVHLFVEDIIFYQRPLRSQKSTIANCSLESRSYIDKDSHTRKEAPLKVCSKSNPYYQEFRVLQWLQNLKIYEIESDREVTHQFIKTLENKQQLFDFLMAQKEIDCEELLKYFLNQTYPNAKEKALKSELKKWKDTYRWNYVYDIGEKSSKKYPMNETRYELKRYLEKVANLPDDFLSSEVEYLLWHLIYSVTDKVAYEKGLKKFAQKHHLDENSFVESFKKFKPYPCEYGSFSEKAIRKLLPLMRFGSYWDFNHIDKNTQKRIEDLITGVENEEIRTILREKAEKYQLEKETDFQNLPLWLAQYIAYNRHTEASSLEKWTSVNDLETYLNEFKQHSLRNPIVEQVVTETLRVVRDIWQQYGQGKADFFDEIHIELGRGLKKTAKEREELSKQNQKNEDTNLRIKALLAELGEDSTIENVRPYSLMQQELLKLYEEGVFSSSMEIEDDIEKIHKKATPNKAELQRYKLWLEQKYKSPYTGQIISLKRLFTEDYEIEHIIPQSRYYDDSLSNKVICESAVNKLKGNQLGLEFIKNHYGEKVHAAGKEVSIFTEEQYKEFVKNHYANNSGKMKKLLLEDIPEKMVARQMNDTRYISKYISEILSKIVRADERDEGVNSKNVILCTGKITTALKQDWGINDVWNDLILPRFERMNDLTQSSLFTSYNEKYQKYLPTVPMEYSNGFQKKRIDHRHHAMDAIIIACATREHINYINNQHALEKGKNKEEKQKSRIDLRTILSEKKYSDNAEENYSWIFKKPWDTFTQEVRSALEGIVVSFKQNLRVINKATNYYEHWVEENGKFIKKMVKQEGTNWAIRKPLHKETVSGKITLEREKVSKGKILTATRKAIDSTFTEKVIEGITDTGIQKILLNYLKFKKSPEIAFSPEGIEELNKNIALYNDGKPHKPIRKVRIFEQGSKFPLGEVGNKATKYVEAAKGTNLYFGVYQGKDKRSFATIPLNEVIERQKQGYSSVPEYNEKGDPLLFSLSPNDLVYVPVEGEIIEDIDFRNLSNEQKERIYKTVSFSGYQCFFVKQTVSTPIVNKMEYSPLNKMEKSIIGIMIKEVCVKLKVDRLGNISKA

SEQ ID NO: 19763 - protein, 1099 aa, unidentified
  REGION 1..1099: note = Cas Enzyme sequence
LFADCIRELYSKNEAQQRNLAARDFVHLFVEDIIFYQRPLRSQKSTIANCSLESRSYIDKDSHTRKEVSLKVCPKSNPYYQEFRVLQWLQNLKIYEIESDREVTHELIKTLEDKQQLFDFLMAQKEIDCEELLKYFLSLTYPNAKEKALKSELKKWKDTYRWNYVYDIGEKSSKKYPMNETRYDLKRYLERVANLPDDFLSSEVEYMLWHLIYSVTDKVAYEKGLKKFAQKHHLDEDSFVESFKKFKPYPSEYGSFSEKAIRKLLPLMRFGSYWDFNHIDKNTQKRIEDLITGVENEEIRTILREKAEKYQLEKETDFQNLPLWLAQYIAYNRHAEASSLEKWTSVNDLETYLNEFKQHSLRNPIVEQVITETLRVVRDIWQQYGQGKADFFDEIHIELGRELKKTAKEREELSKQNQKNEDTNLRIKALLAELGEDSTIENVRPYSLMQQELLKLYEEGVFSSSMEIEDDIEKIHKKATPNKAELQRYKLWLEQKYKSPYTGQIISLKRLFTEDYEIEHIIPQSRYYDDSLSNKVICESAVNKLKGNQLGLEFIKNHYGEKVHAAGKEVSIFTEEQYKEFVKNHYANNSGKMKKLLLENIPEKMVARQMNDTRYISKYISEILSKIVRADERDEGVNSKNVILCTGKITTALKQDWGINDVWNDLILPRFERMNDLTQTSLFTSYNEKYQKYLPTVPMEYSNGFQKKRIDHRHHAMDAIIIACATREHINYINNQHALEKGKNKEEKQKSRIDLRTILCEKKYNDNAEENYNWVFKKPWDTFTQEVQVALEGIVVSFKQNLRVINKATNYYEHWVEESGKLIKKMVKQEGTNWAIRKPLHKETVSGKITLEREKVSKGKILTATRKAIDSTFTEKVIQGITDTGIQKILLNYLKFKKSPEIAFSPEGLEELNKNITLYNDGKPHKPIYKVRIFEQGSKFPLGEVGNKSQKYVEAAKGTNLYFGVYQGKDKRSFATIPLNEVIERQKQGLSSVPEYNEKGDPLLFSLSPNDLVYVPIVGEIIEDIDFQNLSKEQKERIYKTVSFTGYQCFFIRETVAIPIVNKIEYSPLNKMERSITGIMIKEVCIKLKVNRLGNISKA

SEQ ID NO: 19764 - protein, 1537 aa, unidentified
  REGION 1..1537: note = Cas Enzyme sequence
MKNILGLDLGTNSVGWALVSVDENGKLVKKIRLGSRIIPMSQDVLGKFDSGVTVSQTAERTEYRSHRRLLERALLRRERLHRVLHLLGFLPEHYAACIGWDRNDNATYGKFLPETEPKLAWRKADDGEYRFIFMQSFDEMLEDFKESQPSLLANGKRIPLDWTLYYLRNKALTKPIAKEELAWILLNFNQKRGYYQLRGEEDEEIPSKRVEYHELKVVKVEATDEGKGGNIWYNVLLENGWVYRRQSKYSLDKWLGLTLPFIVTTNLEADGVTPKRDKDGNEKRSISLPKEDDWTLLKKRTEDHLEKSGLTVGAFIYRHLLANPSDKVRGQLVRTIDRKYYKRELQAIIAKQMEFHPELRDDELLKACAEELYRNNGEHRAQLMAKDFKHLLVEDVLFYQRPLKSKKSLISNCPYETRQYINKETGEIKDVNVKCIAKSNPYFQEFRLWQWISNLRLLRQIDGQDVTADYIKGNDDKERLFDLLNSQGEIKQEHILRDFLKLKKPKGGEFPLRWNYVDDKVYPANETRHVINKAIKGMAVDKEEKEMLGQLFVQSAVEYMLWNLLYSITDRNELVSALRRFALAHGISSVDAFVEAFLKVKPFKKEYGAYSEKATKKLLQVMRLGKYWCGDELPEPAKRTKGNKQAVYDEMANRGICKQTLQNISNIIEENIDERLIGALINPQRPLTALSHFQGLSVSDACYVVYGRHSEVAEIVKWKDAGELNTFINNFKQHSMRNPIVEQCVLETLRTVRDVWEQEGQIDEIHVELGRNMKRTAEQRARDTQAIQRNENTNMRISLLLTELKNDPSISDVRPYSPSQRELLKIYEEGALETLTDKDEDIAKISRLAQPSSSELRRYKLWLDQKYVSPYTGRPIPLAKLFTPAYEIEHIIPQSRYFDNSFSNKVICEAEVNTLKSNLLGMEFIKKFGGKTKGILDEDAYKLHVMTNYAHNPAKRSKLLMEDLPTDFNSRQLNDTRYISKTVMALLSNVVREEGERETRSKHVVVCTGGVTDTLKKDWGLHDVWHNLVYPRFIRLNNLTGTQNFGYWRTLDEENKKQGEDSKKVFQITLPPESQRGFVKKRIDHRHHAMDALVIACASANIVNYLNNQSAASPNAHQDLRRLLCDVKRRIRKPWPTFTQDAQAALEDLVVSFKNTVRVVNKASNTYLRYDKDGKKKRFKQEGEGLKAIRKPMHKETYYGEVNLIRKEMLPLKRALEDVNAIVDKELRANIKALLRDGFNLQQVLANFKAKDFKFNKRDIKKVEVYVSSAKSTPMVATRKSLDTSFNAKRIADITDTGIQKILLNYLKANDNSPEQAFTPEGIAYLNEHIAEYNNGKPHQPILKVRVSEVMGAKFAVGQTGSKKNKFVEAQSGTNLYFAIYEDKDGKRNFETIALNVAAERLKKGRTPVCEKKGEGLSLKFYLSPNDLVYVPTDEDRTAEHPSIDKRRIYKMVSATDKECHFLPVSVASIIADKVEFEAMNKVGRVIDTSEYEEKEGRNKEEDKEVNKPSGISKIMIKDVCWKLEVDRLGNITKIVR

SEQ ID NO: 19765 - protein, 1537 aa, unidentified
  REGION 1..1537: note = Cas Enzyme sequence
MKNILGLDLGTNSVGWALISVDENGKLVKKIRLGSRIIPMSQDVLGKFDSGVTVSQTAERTEYRSHRRLLERALLRRERLHRVLHLLGFLPEHYAACIGWDRNDNATYGKFLPETEPKLAWRKADDGEYRFIFMQSFDEMLEDFKESQPSLLANGKRIPLDWTLYYLRNKALTKPIAKEELAWILLNFNQKRGYYQLRGEEEEETPSKRVEYHELKVVKVEATDEGKGGNIWYNVLLENGWVYRRQSKYSLDKWLGQTLPFIVTTDLEADGVTPKRDKDGNEKRSFRSPKEDDWTLVKKRTEDHLEKSGLTVGAFIYQHLLANPSDKVRGQLVRTIDRKYYKRELQAIIAKQMECHPELRDAKLLKACAEELYRNNGEHRAQLMAKDFKHLLVEDVLFYQRPLKSKKSLISNCPYETRQYINKETGEIKDVNVKCIAKSNPYFQEFRLWQWISNLRLLRQIDGQDVTADYIKGNDDKERLFDLLNNQGEIKQEHILRDFLKLKKPKGGEFPLRWNYVDDKIYPANETRHAMNKAIKAMIAAKEEKEAIGQLLVQPAEEYMLWNLLYSITDRNELTSALRRFALAHGISSVDAFVEAFLKVKPFKKEYGAYSEKATKKLLQVMRVGKYWCGDELADPAKRTKGNKQAVYDEMANRGICKQTLQNIGNIIEENIDERLKGTLINPQRPLTALSHFQGLSVSDACYVVYGRHSEVAEITKWKDAGELNTFINNFKQHSMRNPIVEQCVLETLRTVRDVWEQEGQIDEIHVELGRNMKRTAEQRARDTQAIQRNENTNMRISLLLTELKNDPSISDVRPYSPSQRELLKIYEEGALENLTNQDEDIAKISRLAQPSSSELRRYKLWLDQKYVSPYTGRPIPLAKLFTPAYEIEHIIPQSRYFDNSFSNKVICEAEVNKLKDNLLGMEFIKQFGGKQKGILDEDAYKLHVMTNYAHNPAKRSKLLMEDLPTDFNSRQLNDTRYISKTVMALLSNVVREEGERETRSKHVVVCTGGVTDTLKKDWGLHDVWHNLVYPRFIRLNNLTGTQNFGYWRALDEEKRKQGEDSKKVFQITLPPECQRGFVKKRIDHRHHAMDALVIACASADIVNYLNNQSAANPNSREDLRRLVCDVKRRIRKPWPTFTQDAQAALEDLVVSFKNTVRVVNKASNTYLRYDKDGKKKRFKQEGEGLKAIRKPMHKETYYGEVNLIRKEMLPLKRALEDVNAIVDKELRANIKALLRDGFNLQQVLANFKAKDFKFNKRDIKKVEVYVSSAKSTPMVATRKSLGTSFNAKRIADITDTGIQKILLNYLKANDNSPEQAFTPEGIAYLNEHIAEYNNGKPHQPILKVRVSEVMGAKFAVGQTGSKKNKFVEAQSGTNLYFAIYEDKDGKRNFETIALNVAAERLKKGRTPVCEKKGEGLSLKFYLSPNDLVYVPTDEDRTAEHPSIDKRRIYKMVSATDKECHFLPVSVASIIADKVEFEAMNKVGRVIDTSEYEEKEGRNKEEDKEVNKPSGISKIMIKDVCWKLEVDRLGNITKIVR

SEQ ID NO: 19766 - protein, 1525 aa, unidentified
  REGION 1..1525: note = Cas Enzyme sequence
MKNILGLDLGTNSVGWALISVDENGNLMKNIRLGSRIIPMSQDVLGKFDSGITVSQTAERTEYRGHRRLLERALLRRERLHRVLHLLGFLPDHYAACIGWDRNDNATYGKFLPETEPKLAWRKADDGVYRFVFMQSFEEMLHDFNARQPSLVANGKRIPLDWTLYYLRTKALTQSITKEELAWILLNFNQKRGYYQLRGEEEEETPSKFVEYQELKVVKVEATNERKGENVWYNVLLENGWVYRRQSKYSLDKWLGQTLPFIVTTELEADGTPKYDKEGNVKRSFRSPKEDDWTLVKKRTEDHLEKSGLTVGAFIYQNLLSNPSDKVRGQLVRTIDRKYYKRELQAIIAKQMEFHPELRDAQLLKACAEELYRNNEAHRAQLLAKDFKHLLVEDVLFYQRPLKSKKSLIANCPYETRQYVDKQTGEIKDVNVKCIAKSNPYFQEFRLWQWINNLRLLRQTDGQDVTADYIKGNEDKERLFDMLNSQGEIKQEHILRDFLKLKKPKGGEFPLRWNYVDDKIYPANETRHAINKAIKGMAVDKEEKETLGQLFVQPAVEYVFWNLLYSITDRNELASALRRFALTHSVASVDAFVQAFLKVKPFKKEYGAYSEKATKKLLQVMRLGKYWCANELPEPANRTKGNKQAVYDEMVHRGICKQTLQNISNIIAEDIDERLMGALLNPERPLTELSHFQGLSISDACYVVYGRHSEVAEIVKWKDAGELNTFINNFKQHAMRNPIVEQCVLETLRTVRDVWEKEGRIDEIHVELGRNMKQTAEQRARDTQAIQRNENTNMRINLLLAELGNDPTISNVRPYSPSQRELLKIYEEGALEKLTNADVDIAKISRLAQPSASELRRYKLWLDQKYVSPYTGQPISLAKLFTPAYEIEHIIPQSRYFDNSFSNKVICEAEVNSLKDNLLGMEFIKKFGGKTKGILDEEAYKLHVTTNYAHNPAKRSKLLMEDLPTDFNSRQLNDTRYISKTVMALLSNVVRENDERETRSKHVVVCTGGVTDVLKKDWGLHDVWNNLVYPRFIRLNNLTGTQNFGYWRALDEENKKQGEDGKKVFQITLPPECQRGFVKKRIDHRHHAMDALVIACASANMVNYLNNQSAANPHARKDLQRLLCDKKRVIRKPWPTFTQDAQTALENLVVSFKNTVRVVNKASNTYLRYDNDGKKKRFKQEGEGLKAIRKPMHKETYYGEVNLIRKEMMPFKRALEDVNAIVDKELRACIKALQRDGFKPQQVLASFKAKDFKFNKRNVKTVEVFVSSAKTTPMVATRKSLDTSFTAKRIADITDTGIQKILLNYLRANDNSPEQAFTPEGIAYLNEHIADYNNGKPHQPILKVRVSEVMGAKFAVGQTGSKKTKFVEAQAGTNLFFAIYEDKEGKRHFETIALKIAAERLKDKQMPVPEINDAGLPLKFYLSPNDLVYVPTDEDRATAHPSIDKKRIYKMVSATDRQCFFLPFTVASVISNKVEFEALNKMERVLDASEYSSAYDSSHVNKVMVKNVCWKLEVDRLGNITKIVR

SEQ ID NO: 19767 - protein, 1480 aa, unidentified
  REGION 1..1480: note = Cas Enzyme sequence
MKTILGLDLGTNSIGWAKVCVDDNGNYTREIKLGSRIIPMSQDTLSNFDKGVTESPTAARTGFRGIRRIRERALQRRERLHRVLHVMGFLPLHYENAIGWNREEATTYGKFLDNGEPKLAWERQEDGSMRFLFMDSFYEMMADFAKYQPGMVADGRKIPLDWTLYYLRKKALTQAIRKEELAWILLNFNQKRGYYQLRGEEEEENPTKREEYYELKVVSVEAAEEGKGGNTWYNVTLENGWIYRRQSKIELNDWVGKVRPFIVTTEYEIDGVTIKKDKNGEVKRSFRAPSENDWGLRKKRTESLLEESGKTVGAFIYNHILSEPADKIRGNFIRTIERKFYKKELEAILREQSKHHKELKDIDTLIACIKELYPNNKPHQDSLIKKDMTYLLITDLIFYQRPLKSKKSLIADCPYEYYEYVIKETGEIKRQSIKCIAKSNPYYQEFRLWQFIINLRLFDRNNDKEVTSEYLSSMEDYTRLFTYLNDRKDINQETLLKDFFKQKKVKRGMEKEFPIRWNYIEDKEKKYPCNETRHELLAALSKAGIDHSWLDDKELFYRLWHLLYSVESKEEAEGALRKLNDNDDFVNAFLKVKPFKKEYGAYSEKAIKKLLAVMCMGDLWTETEICKQTRDRIQNIIKGVIDEKIKERMGRTFSQLSDFQGLPEWLACYVVYGRHSEATDIQRWTKPEDLMAYINGFKQHSLRNPIVEQCILETLRTVHDIWKEAGHIDEIHIELGRSMKSTADQRARMSKSIMQNENTNLRIKSLLMELKNTKEFENVRPYSPMQQEILRIYEEGALQELTKEDAQYNEISKISQMAQPSANELLKYRLWLEQKYCSPYTGKPISLSKLFTSAYQIEHIIPQSRYFDDSFTNKVICEAEVNQLKSNMLGYEFIKKHGGEIVHCTMVGDVKLLDAKEYYNFVTEHYANNRRKKEKLLMEDIPQEFLNRQMNDSRYISKKVMAILSNIVREEDEQEAKSKFVIACSGGITDRLKQDWGLNDVWNSIVYPRFERLNKLTNTENFGRWENKEGKQVFQTSVPLELQKGFSKKRIDHRHHAMDALVIACASNNIINYLNNESAKSQEKREDLRKKLCDKNRIIRKPWDTFTQDAHTALENVVVSFKNYIRVINKATNYYEKYDKNGKKEIAEQKGQDMWAIRKPMHKETVFGQVNLRRKVTIKLKDALEKIPAICDKELRDYINILVAKQFNKKQILAHFKSINYRLNMKSVDKVDVWQFSNEKEPMVATRKSVDTSFDTKRIATITDTGIQKILLNYLKAKNNDPNIAFTPEGIAEMNKHITEYNNGKQHQPILKVRVSEPKGAKYQVGETGNKTSKFVEAQKGTNLYFAIYEDKEGNRSYNTIPLNEVIERLKQGLSPAEDLNKQGEKLKFYLSPNDLVYVPTEEEKLSSECKLNKEQIYKIVSSTGSECYFIPYTVSNVIFNKVEFESLNKMGRALTGEMIKSVCWKLELDRLGNILKVIK

SEQ ID NO: 19768 - protein, 1504 aa, unidentified
  REGION 1..1504: note = Cas Enzyme sequence
MKNILGLDLGTNSIGWAVVNGSVNDNGSEQLVKIQASGSRIIPMDAAMIGDFNKGNSISQTAERTRLRGIRRLSERYLLRRERLHRILDILGFLPSHFAQDLDRHGKIVKGKEPKLAWRKNEAGQFEFIFQDSFKEMLEDFKLNHPNLITDDKKVPYDWTIYYLRKKGLTSKISKEELAWILLNFNQKRGYYQLRGEEEEENNNKLVEFYALKVVAVEDSGEKKGKDIWYNVHLENGWVYRRTSNMPLDWVGKTKEFIVTTDLEKDGTPKKDKEGNVKRSFRAPKEDDWSLVKKKTEADIDQTHKTVGTYIYDTLLGNPSQKIRGRLVRTIERKYYKEELKLILDKQKEFHPELQDRALYAACVEELYTINEAHRNNIGNRDFTYLFLEDILFYQRPLKSKKSLIDNCPYEENHCLDKETGEIKSFPVKCIAKSHPLFQEFRLWQFIVNLRIYRKGLAQDVDVTNELLKTEEDYVALFDWLNGKKEIDQKAFLKYPLFGLKKEVENYRWNYVQDKPYPCNETRSSMLARLEKCDISIEFLTKENEEALWHILYSVEDKNEIVKALQKFADKHDLNASFVDVFRKFPPFKKEYGSYSAKAIKKLLPLMRMGKYWSENSIDKGTRERIDKIITGEYDEKIENRVREKAIHLADVSDFRGLPLWLVCYIVYGRHSEAKEITQWKSPADIDSYLKSFKQHSLRNPIVEQIIIETLRVVRDIWKQVGNIDEIHVELGREMKNPADKRKKMTQQMSENENTNLRIKYLLTEFLNPEYEVENVRPYSPSQQDILRIYEEGVLNSVSDLPEEISDILKKFTETDLKKRPSRSEVLRYKLWLEQKYRSPYTGEVIPLGKLFTPAYEIEHVIPQSCYFDDSFSNKVICEAEVNKLKSNLLGHEFIVKHHGEIVELPFGKKVRIFTVDEYEQFVKDNYSRTRGKMKKLLMDDIPEEFVTRQLNDSRYISKVVKSLLSNIVREKGEEEAISKNVIPCTGGVTDRLKKDWGINEVWNKIILPRFQRLNELTGTNKFTTKNVGIQEIPTMPLELQKGFNKKRIDHRHHAMDAIIIACANRNIINYLNNESATAKAELSRYDLQKMLCDKAKTDNNGNYKWVIRKPWASFTQDTYLALENIIVSFKQNLRVINKATNHFLHYNEEGKKIFVKQGKGDNWAIRKSMHKDTVFGEVNLRRIKTVALNEAMKNPQSIVVKDFKRKLLELWNLGFDAKRIKKYFEDNRETWSDINLSKIEVYYFSKDTKDRFFATRKPLDTSFDRKKIENNITDTGIQKILLRHLELKDNNPDIAFSPDGIDEMNRNIIQLNNGKYHQPIIKVRWYEQADKFAVGQTGNKSSKFVEAAKGTNLFFAVYESNILDKKTNTIIKKRNYATIPLNVAIERQKQGLSVAPEDENGNDPIFVLSPNDLVYLPTDDELANGIIAQPLDRGRIYKMVSCTGNEGHFIPARIANPILQTIELGSNNKAQKAWTDEMIKEICMPIKVDRLGNVLESSSSYKK

SEQ ID NO: 19769 - protein, 1504 aa, unidentified; identical to SEQ ID NO: 19768
  REGION 1..1504: note = Cas Enzyme sequence

SEQ ID NO: 19770 - protein, 1509 aa, unidentified
  REGION 1..1509: note = Cas Enzyme sequence
MKNILGLDLGTNSIGWAVVNGSINDNGSEQLVKIQASGSRIIPMDAAMIGDFNKGNSISQTAERTRLRGIRRLSERYLLRRERLHRILDILGFLPSHFAQDLDRHGKIVKGKEPKLAWRKNEAGQFEFIFQDSFKEMLEDFKLNHPNLITDDKKVPYDWTIYYLRKKGLTSKISKEELAWILLNFNQKRGYYQLRGEEEKKNDNVMIINSKVIDVVKAEKDKKYEKYWYNVLLENGLLYRAAFYNDISFWKGHTKEFVLKTIKLKSGGTKQELSFLPSFDEIEKMEKKQKDKMYFKIKLKTGADIDQTHKTVGTYIYDTLLGNPSQKIRGRLVRTIERKYYKEELKQILDKQKEFHPELQDRALYAACVEELYTINEAHRNNIGNRDFTYLFLEDILFYQRPLKSKKSLIDNCPYEENHCLDKETGEIKSFPVKCIAKSHPLFQEFRLWQFIVNLRIYRKGLAQDVDVTNELLKTEEDYVALFDWLNGKKEIDQKAFLKYPLFGLKKEVENYRWNYVQDKPYPCNETRSSMLARLEKCDISIEFLTKENEEALWHILYSVEDKNEIVKALQKFADKHDLNASFVDVFRKFPPFKKEYGSYSAKAIKKLLPLMRMGKYWSENSIDKGTRERIDKIITGEYDEKIENRVREKAIHLADVSDFRGLPLWLVCYIVYGRHSEAKEITQWKSPADIDSYLKSFKQHSLRNPIVEQIIIETLRVVRDIWKQVGNIDEIHVELGREMKNPADKRKKMTQQMSENENTNLRIKYLLTEFLNPEYEVENVRPYSPSQQDILRIYEEGVLNSVSDLPEEISDILKKFTETDLKKRPSRSEVLRYKLWLEQKYRSPYTGEVIPLGKLFTSAYEIEHVIPQSCYFDDSFSNKVICEAEVNKLKSNLLGHEFIVKHHGEIVELPFGKKVRIFAVDEYEQFVKDNYLRTRGKMKKLLMDDIPEEFVTRQLNDSRYISKVVKSLLSNIVREKGEEEAISKNVIPCTGGVTDRLKKDWGINEVWNKIILPRFQRLNELTGTNKFTTKNVGIQEIPTMPLELQKGFNKKRIDHRHHAMDAIIIACANRNIINYLNNESATAKAELSRYDLQKLLCDKAKTDNNGNYKWVIRKPWASFTQDTYLALENIIVSFKQNLRVINKATNHFLHYNEEGKKIFVKQGKGDNWAIRKSMHKDTVFGEVNLRRIKTVALNEAMKNPQSIVVKDFKRKLLELWNLGFDAKRIKKYFEDNRETWSDINLSKIEVYYFSKDTKDRFFATRKPLDTSFDRKKIENNITDTGIQKILLRHLELKDNNPDIAFSPDGIDEMNRNIIQLNNGKYHQPIIKVRWYEQADKFAVGQTGNKSSKFVEAAKGTNLFFAVYESNILDKKTNTIIKKRNYATIPLNVAIERQKQGLPVAPEDENGNDPIFVLSPNDLVYLPTAADLANGIIAQPLDRGRIYKMVSCTGNEGHFIPARIANPILQTIELGSNNKAQKAWTDEMIKEICMPIKVDRLGNVLESSSSYKK

SEQ ID NO: 19771 - protein, 1322 aa, unidentified
  REGION 1..1322: note = Cas Enzyme sequence
LNFNQKRGYYQLRGEEEEENNNKLVEFYALKVVAVEDSGEKKGKDIWYNVHLENGWVYRRTSNMPLDWVGKTKEFIVTTDLEKDGTPKKDKEGNVKRSFRAPKEDDWLLVKKKTEADIDQTHKTVGTYIYDTLLGNPSQKIRGRLVRTIERKYYKEELKQILDKQKEFHPELQDRALYAACVEELYTINEAHRNNIGNRDFTYLFLEDILFYQRPLKSKKSLIDNCPYEENHCLDKETGEIKSFPVKCIAKSHPLFQEFRLWQFIVNLRIYRKGLAQDVDVTNELLKTEEDYVALFDWLNGKKEIDQKAFLKYPLFGLKKEVENYRWNYVQDKPYPCNETRSSMLARLEKCDISIEFLTKENEEALWHILYSVEDKNEIVKALQKFADKHDLNASFVDVFRKFPPFKKEYGSYSAKAIKKLLPLMRMGKYWSENSIDKGTRERIDKIITGEYDEKIENRVREKAIHLADVSDFRGLPLWLVCYIVYGRHSEAKEITQWKSPADIDSYLKSFKQHSLRNPIVEQIIIETLRVVRDIWKQVGNIDEIHVELGCEMKNPADKRKKMTQQMSENENTNLRIKYLLTEFLNPEYEVENVRPYSPSQQDILRIYEEGVLNSVSDLPEEISDILKKFTETDLKKRPSRSEVLRYKLWLEQKYRSPYTGEVIPLGKLFTSAYEIEHVIPQSCYFDDSFSNKVICEAEVNKLKSNLLGHEFIVKHHGEIVELPFGKKVRIFTVDEYEQFVKDNYSRTRGKMKKLLMDDIPEEFVTRQLNDSRYISKVVKSLLSNIVREKGEEEAISKNIIPCTGGVTDRLKKDWGINEVWNKIILPRFQRLNELTGTNKFTTKNVGIQEIPTMPLELQKGFNKKRIDHRHHAMDAIIIACANRNIINYLNNESATAKAELSRYDLQKLLCDKAKTDNNGNYKWVIRKPWASFTQDTYLALENIIVSFKQNLRVINKATNHFLHYNEEGKKIFVKQGKGDNWAIRKSMHKDTVFGKVNLRRIKTVALNEAMKNPQSIVVKDFKRKLLELWNLGFDAKRIKKYFEDNRETWSDINLSKIEVYYFSKDTKDRFFATRKPLDTSFDRKKIENNITDTGIQKILLRHLELKDNNPDIAFSPDGIDEMNRNIIQLNNGKYHQPIIKVRWYEQADKFAVGQTGNKSSKFVEAAKGTNLFFAVYESNILDKKTNTIIKKRNYATIPLNVAIERQKQGLPVAPEDENGNDPIFVLSPNDLVYLPTAADLANGIIAQPLDRGRIYKMVSCTGNEGHFIPARIANPILQTIELGSNNKAQKAWTDEMIKEICMPIKVDRLGNVLESSSSHKK

SEQ ID NO: 19772 - protein, 1231 aa, unidentified
  REGION 1..1231: note = Cas Enzyme sequence
FDEIEKMEKKQKDKMYFKIKLKTGADIDQTHKTVGAYIYDTLLGNPSQKIRGRLVRTIERKYYKEELKQILDKQKEFHPELQDRALYAACVEELYTINEAHRNNIGNRDFTYLFLEDILFYQRPLKSKKSLIDNCPYEENHCLDKETGEIKSFPVKCIAKSHPLFQEFRLWQFIVNLRIYRKGLAQDVDVTNELLKTEEDYVALFDWLNGKKEIDQKAFLKYPLFGLKKEVENYRWNYVQDKPYPCNETRSSMLARLEKCDISIEFLTKENEEALWHILYSVEDKNEIVKALQKFADKHDLNASFVDVFRKFPPFKKEYGSYSAKAIKKLLPLMRMGKYWSENSIDKGTRERIDKIITGEYDEKIENRVREKAIHLADVSDFRGLPLWLVCYIVYGRHSEAKEITQWKSPADIDSYLKSFKQHSLRNPIVEQIIIETLRVVRDIWKQVGNIDEIHVELGREMKNPADKRKKMTQQMSENENTNLRIKYLLTEFLNPEYEVENVRPYSPSQQDILRIYEEGVLNSVSDLPEEISDILKKFTETDLKKRPSRSEVLRYKLWLEQKYRSPYTGEVIPLGKLFTSAYEIEHVIPQSCYFDDSFSNKVICEAEVNKLKSNLLGHEFIVKHHGEIVELPFGKKVRIFTVDEYEQFVKDNYSRTRGKMKKLLMDDIPEEFVTRQLNDSRYISKVVKSLLSNIVREKGEEEAISKNIIPCTGGVTDRLKKDWGINEVWNKIILPRFQRLNELTGTNKFTTKNVGIQEIPTMPLELQKGFNKKRIDHRHHAMDAIIIACANRNIINYLNNESATAKAELSRYDLQKLLCDKAKTDNNGNYKWVIRKPWASFTQDTYLALENIIVSFKQNLRVINKATNHFLHYNEEGKKIFVKQGKGDNWAIRKSMHKDTVFGEVNLRRIKTVALNEAMKNPQSIVVKDFKRKLLELWNLGFDAKRIKKYFEDNRETWSDINLSKIEVYYFSKDTKDRFFATRKPLDTSFDRKKIENNITDTGIQKILLRHLELKDNNPDIAFSPDGIDEMNRNIIQLNNGKYHQPIIKVRWYEQADKFAVGQTGNKSSKFVEAAKGTNLFFAVYESNILDKKTNTIIKKRNYATIPLNVAIERQKQGLPVAPEDENGNDPIFVLSPNDLVYLPTAADLANGIIAQPLDRGRIYKMVSCTGNEGHFIPARIANPILQTIELGSNNKAQKAWTDEMIKEICMPIKVDRLGNVLESSSSYKK

SEQ ID NO: 19773 - protein, 1520 aa, unidentified
  REGION 1..1520: note = Cas Enzyme sequence
MKPKHILGLDLGTNSIGWAVINASKNEEDKEQLDGINCDGVRIIPMDASVLGDFDKGNSKSQTADRTKSRSVRRLYERNKLRRERLHRILDLLGFLPSHYSQQLDRYGKFITGTEPKLPWYKNEQGHWSFIFQDSFDEMLADFYQKHPDFISKGQKVPYDWTIYYLRKKALTQKVNKEELAWILLNFNQKRGYYQLREEEQQERPSKTRLYFDSQIVTDIIDTNQTYKGMKVFSVILEDGTRGKIFKKEIPDWIGQKKDIIVTIDLDKDGKDKYDETGELSCRFKIPSEQEWEEQWELIKTKTQKDLDDSGKTVGAYIYDTLLQMPKQKIRGKLVRTIERKYYKEELRRILEKQKEFHPEFQDRTLYEACLEELYPQNDAHRNLISNRDLVYLLVEDILFYQRPLKSKKSLISDCPFEEYTHVNKETGEVCYYHPKCIAKSHPLFQEFRLWQFLSNLRIYQKEKMVNGKLCLDVDVTSDFLKNEEDYTDLFDWLNRQKSIKQDSFFKCPLFGLKKKDITNYRWNYVEDKTYPGNETRALILGRLEKAGITADFLTLEIEKALWHILYSISDKRELEKALNSFARQHSLGEKFVKEFLGIPPFEKEYGSYSAKAIKKLLPLMRTGKYWNETCIDEQTCDRIDKIISGEYDEGIQARVREKAIHLNDMSSFKGLPLWLACYVVYNRHSEAKDIQKWEKPSDIDAYLKSFKQHSLHNPIVEQIILETLRTVRDIWKQVGHIDEIHVELGREMKNPSEKRKKMAQQIQENENTNLRIKALLTEFMNPEFEIENVHPYSPGQQDLLRIYEEGVWNSVDEVPDEIATIIKKFNESDIKKRPTTSEVLRYKLWLEQKYRSPYTGEMIPLSKLFTPAYEIEHIIPQARYFDDSFSNKVICESEVNKLKSNMLGYEFINKHHGEKVQLTGGKSVEIFSVGSYEQFIKDNYSRNAAKMKRLLMDDIPEQFIARQLNDSRYISKLVKSLLSNIVREAGEQEEMSKNVIVCTGSITDRLKKDWGINDVWNRIILPRFLRLNELTESNRFTSVTASGNVIPAMPLELQKGFNKKRIDHRHHAMDAIVIACANRNIVNYLNNESASKNAQTSRYDLQRLLCDKQKTDDKGNYRWFIKKPWDTFTQDVYTALQEIIVSFKQNLRIINKTTNHYQHYEAGKKAIISQKKGDNWAIRKPMHKDTVYGEVNLRRIKTVSLKEALINLNAVVEKDLKKKLKELLSHNQNEKQIKKYFEENKDVWSEVNLKKIDVYYFSKETKDRFFATRFGNDLVSVFKDCKDMDKAKDKIKKITDTGIQKILLRHLEANENNPEWAFSPEGVETMNKNIIELNDGKWHQPIYKVRVYEKADKFAVGQNGNKSTKYVEAAKGTNLFFAIYETEVEDKNTSEIIKKRSYATIPLNVVIDRQKCGLPSAPEDENGNLPKFVLSPNDLVYVPTKEEIQNGNTIPLDKTRIYKMVSCTGNQCFFIQFHVANVIVDKYEYSAMNKMERAITGEMIKEICIPIQIDRLGNIIKKI

SEQ ID NO: 19774 - protein, 1392 aa, unidentified
  REGION 1..1392: note = Cas Enzyme sequence
VGTFYFPGKLKEFIMGRILGLDLGTNSVGWAIVDVNNTNEYALRHQGVRIFQEGVKIEKGIESSKASERTKHRSARRLYFRRRLRKIRTLEMLIKYDMCPLPPEQLELWRKNKSKYPVSKEFREWLRTIEPNDDNHEGYNPYLLRAKAVKEKLSLYDIGRALYHLAQRRGFKSNRLDQNNDDDSIVEQYIPEIQNIIEDSSSITELSIGLETFCSSIETEDKKLKALINKLNRFNKYLISRQDLSIVEEKEKLTNILNKKENLGAVKGGIKELSEEIEESGYEYLGEYFYHILYKNNIQIRNKYTSREEHYEKEFNKICKIQEFTDKQKEDFWKAIFYQRPLKSQKGLVGKCVFEKDKPRCPISHPLFEKYRMLCFLNSIKIKTPSDDRLRPLSGDERAKCIPLFYRKSKPNFDFDEIRKKLAPSGVTCAYSKSRESSTAEYIFNFHFKTSVSGCPTSANLKSVFGGDWEYELFRLYSNKALKNREKTVDEVVHDVWHVLFSFDSKDKLEEWCIKRLKRTNEIALKFSKIIIKQDYASLSLKAIKKILPYLEIGYLYSHSVFLANLPSVVGELWNDNEIKNNIEKSINDILDNQVEQNIAIDIVNGLIKDYRENNVDIVMLPKLVAQYKEDLHVQLEKRYGKDVWGSFSDEQKKYYKDFILESFEEYALKNMGKGTFYKKLRTDERIIKYLREVHNIDQNKLQEIFHPSDIDVYKKAIRASDEKFYLGSPRTDSIKNPVAMRSLYQVKLVVNELIKQDYIDEKTKIHIELAKELNDANMRIAIKRWQKNNENQNMKYCEEIKKIYEAECNEVIEPSKDDILKYKLWEEQHHICLYTGASVGIFDFLGNNPKYDIEHTIPRSLSCDNSQENLTLCEKRYNRDIKRNKIPSELSEYQTIMQRLEPWRKDIENIDKLIYSAKRQIKGASTKEMKDKAIQKKNQLILEKNYWQNKYKRFEMQEVPDGFKNSQLVDTRIITKYARMYLQTVFNKVYTVQGKVVSDFRKTWGIQNEYEKKSRINHIHHCIDAVTIACITLDNYNALAHYYYHLEQMENKKGEYKPDNFSKPWETFTQDVKALEHNVLVTHDTPDKLLIQSKKKLRRRGKIQYNDEGKIKYQIGNTVRGSLHKDTYYGCIKSLNNKTGEYELKYVIRKSLKELKESDIKNIVDKGVKEKIKSVIDKKGFKKTMSEIIWMNQKKGIPINKVRLKANVTSPISLKKHRDISEYQHKQNVYVVNDGNYVMGIYEIKSRGGKLLRDFQVVSNLDAIKNKESLDFFGFPLVKKRNKYELPLKYYIKKGLMILLYEKEKDEIWELNQQEKCKRLFEIIKFDARPRIICRYHQEARVAKEINEEFNVNYDSIQSQVSLSLNNFNALIEGCDFKIDVLGNIIKLNYD

SEQ ID NO: 19775 - protein, 1348 aa, unidentified
  REGION 1..1348: note = Cas Enzyme sequence
MEKNYYLGLDLGSNSVGWAATDEDYNFLRLKGKTAWGARIFSEAKDCKERRTYRSNKRRLARRKYRLVLLKQLFAEEMTKVDKTFFLRLANSTYWEEDKAKDSDGNEIGKNLIFKTHDEEKQYYTKYPTIWHLRKALIENDEEALSNLRYVYLAIHHIVKYRGNFLTEGEMGNDIPPISTIEEINQTLSLLEVDSSEDATDKTTYIKPESYNELFTILENNNLNKVKKQQEIDKLFISSKERSENIKNYINLFKTIIVGGSFSLKKINEDTEDISVDFTKDFENSEADISKALGDAFNLVLIAKKYYDYIILKELLGKNKEISEAMVQIYEEHKDDLKSLKTILKDLDNKLGNDGKDRIYYSVFKQEPTEKFKETNYLSFVQGGKLEELNKYIKKILENNEKDIDDKETYNALYEKACKGDLFKKQANACTSLIPHQFHLRELKKILENAGRKYSFLNDISDKIIKIFKFRVPYYYGPLNNESDAHSWVVKKEGQEKAKITPWNINEIIDTPKTRDNFFKKLTNSCTYLVGETVLPKTSLYYEKYLVLDRLNKMQVNGDYLSASEKNDVLKFILSRKTTTIEQIRTYLSKNKSTKANDISISNIKATDPFNAVSHAFYGKHPDLNINLCEELIKFATIYADDKKELKKFVSSNFNLTDEFIKEYLNTPTNKWGRLSKKFLCGGDQLEMYYVDDNGILHSILNILEETNENLQEILNNEKYGFNQKIADFNNTLTADKTTEEQIEDILDSTPALMRRSIIQTLAVVDDVIKAAGKAPQKIMMEVTRTDGKKEETKSRYVQLKKQITNDKVLTSDEKKELLTNLENKKIQLKGKHIYLYFMQMGIDFYTGKIMDINDVINGKYDIDHIIPQSMIKDDSLDNMVLVSKDYNQKVKKDIYPICDEIRNNMLDKWKGYYARKIISEEKYNRLKRTKELNADEINAFINRQINVVNYSNIQIKRIFEIKYPETKIIFSKASFPSLLRKEYEIAKMRDLNDAHHAVDAYLNIVCGNILTTLYTDIFYMFKEKKEDHKNISFNMEKRLINYIDKNNLKDKIKTSCLRHDALITYKPDYDSGKFYKETIFKKYGDKETGLIPLHTKGPMSDTKKYGGYSSFSQSYIIAVEYKLKNKTVKKLCRVPTLYLKQYKNDLNTIAKIMINDEKATDIKVLRKIYLNQKIRYNGCYYLIYTSNEKQNKYKMAYQNYLDNDYLIYLNKCLKKIDELDDGELTSQEFIVNKDGDKFLIDKNHNLEIFKSIKEQYNKTIYDYTPYIVQSREMKEEDFNNLSLKKQIDTLLNMIKILSRSNEQAKFETAFFENFTKVFLKTMTITNEKIYIVNESPSGLFKGKEELI

SEQ ID NO: 19776 - protein, 1352 aa, unidentified
  REGION 1..1352: note = Cas Enzyme sequence
MEKNYYLGLDLGSNSVGWAATDEDYNFLRLKGKTAWGARIFSEAKDCKERRTYRSNKRRLARRKYRLVLLKQLFAEEMTKVDKTFFLRLANSTYWEEDKAKDSDGNEIGKNLIFKTHDEEKQYYTKYPTIWHLRKALIENDEEALSNLRYVYLAIHHIVKYRGNFLTEGKMGNDIPPISTIEEINQTLSLLEVDSSEDATDKTTYIKPESYNELFTILENNNLNKVKKQQEIDKLFISSKERSENIKNYINLFKTIIVGGSFSLKKINEDTEDISVDFTKDFENSEADISKALGDAFNLVLIAKKYYDYIILKELLGKNKEISEAMVQIYEEHKEELKSLKTILKDLDNNLGNDGKDRIYYSVFKQEPTEKFKETNYLSFVQGGKLEELNKYIKKILENNEKDIDDKETYNALYEKACKGDLFKKQANACTSLIPHQFHLRELKKILENAGRKYSFLNDISDKIIKIFKFRVPYYYGPLNNESDAHSWVVKKEGQEKAKITPWNINEIIDTPKTRDNFFKKLTNSCTYLVGETVLPKTSLYYEKYLALDRLNKMQVNGDYLSASEKNDVLKFILSRKTTTIEQIRTYFSKTRSTKANDISISNIKATDPFNAVSHAFYGKHLDLNNSKNINLCEELIKFATIYADDKKELKKFVSSNFNLTDEFIKEYLNTPTNKWGRLSKKFLCGSDQLEMYYVDDNGILHSILNILEETNENLQEILNNEKYGFNQKIADFNNTLTADKTTEEQIEDILDSTPALMRRSIIQTLAVVDDVIKAAGKAPQKIMMEVTRTDGKKEETKSRYVQLKKQITNDKVLTSDEKKELLTNLENKKIQLKGKHIYLYFMQMGIDFYTGKIMDINDVINGKYDIDHIIPQSMIKDDSLDNMVLVSKDYNQKVKKDIYPICDEIRNNMLDKWKGYYARKIISEEKYNRLKRTKELNADEINAFINRQINVVNYSNIQIKRIFEIKYPETKIIFSKASFPSLLRKEYEIAKMRDLNDAHHAVDAYLNIVCGNILTTLYTDIFYMFKEKKEDHKNISFNMEKRLINYIDKNNLKDKIKTSCLRHDALITYKPDYDSGKFYKETIFKKSGDKETGLIPLHTKGPMSDTKKYGGYSSFSQSYIIAVEYKLKNKTVKKLCRVPTLYLKQYNNDLNTIAKIMIDDEKATDIKVLRKIYLNQKIKYNGCYYLIYTANENKNKYKVAYQNYLDNNYLIYLNKCLKKIDELDDEQLSSKELTINKDGDKFLVDKNHNLEIFKAIKEKYNNPIYDYTPYIVKSREMKEEDFNNLSLKKQIDTLLNMIKILSRSNEQAKFETAFFENFTKVFLKTMTITNEKVYIVNESPSGLFKGKEELI

SEQ ID NO: 19777 - protein, 1320 aa, unidentified
  REGION 1..1320: note = Cas Enzyme sequence
LRLKGKTAWGARIFSEAKDCKERRTYRSNKRRLARRKYRLVLLKQLFAEEMTKVDKTFFLRLANSTYWEEDKTKDSDGNEIGKNLIFKTHDEEKQYYTKYPTIWHLRKALIENDEEALSNLRYVYLAIHHIVKYRGNFLTEGEMGNDIPPISTIEEINQTLSLLEVDSSEDATDKPTYIKPESYNELFTILENNNLNKVKKQQEIDKLFISSKERSENIKNYINLFKTIIVGGSFSLKKINEDTEDISVDFTKDFENSEADISKALGDAFNLVLIAKKYYDYIILKELLGKNKEISEAMVQIYEEHKDDLKSLKTILKDLDNKLGNDGKDRIYYSVFKQEPTEKFKETNYLSFVQGGKLEELNKYIKKILENNEKDIDDKETYNALYEKACKGDLFKKQANACTSLIPHQFHLRELKKILENAGKKYPFLNDISDKIIKIFKFRVPYYYGPLNNESDAHSWVVKKEGQEKAKITPWNINEIIDTPKTRDNFFKKLTNSCTYLVGETVLPKTSLYYEKYLVLDRLNKMQVNGDYLSASEKNDVLKFILSRKTTTIEQIRTYLSKNKSTKANDISISNIKATDPFNAVSHAFYGKHPDLNINLCEELIKFATIYADDKKELKKFVSSNFNLTDEFIKEYLNTPTNKWGRLSKKFLCGGDQLEMYYVDDNGILHSILNILEETNENLQEILNNEKYGFNQKIADFNNTLTADKTTEEQIEDILDSTPALMRRSIIQTLAVVDDVIKVAGKAPQKIMMEVTRTDGKKEETKSRYVQLKKQITNDKVLTSDEKKELLTNLENKKIQLKGKHIYLYFMQMGIDFYTGKIMDINDVINGKYDIDHIIPQSMIKDDSLDNMVLVSKDYNQKVKKDIYPICDEIRNNMLDKWKGYYARKIISEEKYNRLKRTKELNADEINAFINRQINVVNYSNIQIKRIFEIKYPETKIIFSKASFPSLLRKEYEIAKMRDLNDAHHAVDAYLNIVCGNILTTLYTDIFYMFKEKKEDHKNISFNMEKRLINYIDKNNLKDKIKTSCLRHDALITYKPDYDSGKFYKETIFKKSGDKETGLIPLHTKGPMSDTKKYGGYSQLSQSYIIAVEYKLKNKTVKKLCRVPTLYLKQYKNDLNTIAKIMIDDEKATDIKVLRKIYLNQKNRYNGCYYLIYTSKEKQNKYKMAYQNYLDNDYLIYLNKCLKKIDELDDGELTSQEFIVNKDGDKFLIDKNHNLEIFKSIKEQYNKTIYDYTPYIVQSREMKEEDFNNLSLKKQIDTLLNMIKILSRSNEQAKFETAFFENFTKVFLKTMTITNEKVYIVNESPSGLFKGKEEL

SEQ ID NO: 19778 - protein, 1381 aa, unidentified
  REGION 1..1381: note = Cas Enzyme sequence
MSIYFGGFFMNSDKREDYYVGLDMGTGSLGGAVTDTQYHLLKVKGKDFWFVREYETAKSQLDRRTHRIAKRRLQRHKARIGLIRSYFAEDILKHDPLFYIRQDNSKYYQEDKDARLTTKDSLFADPGYGDKEYHDVKEYPTIFHLRQALLRDQIKDEERYSRFLYLAIINMFEHRGHFLLNTESSDLNAYMIKDVGELVMNAICGVSEYGSVTYKEIIEILEDKNISRTAKKDQIASKIDIKKSEKAQMERIKCLCGMEADARVMFEIEADEKIKIAFQQAAFEDEKEEIEAAIGEERYLIIENMKQLYDYSQLQSVLNGFDYLSDARVQMYEKHKEDLHLLKKVYRKNLDREMYNRMFRSGEEGSYCAYSNSTNSVDSLAEAKKYRRNMKKRSQKDLYDRIKKDLKEVHDADVDAIRKEMELERFLPKQITGANGIIPNQVHRKELKKILENAEHHLDFLKEKDESGYTVSERILMLFSSNIPYYVGPVGSGSKTGWAKIKESGQVLPWNMEQKIDIEQTSERFITNLIRECTYLSGEKVLPKQSLLYESYCVLNEINNLRIHGKRIVPELKQDIYKEVFQGFRLGKKVTKKNICTYLINRGLITEESEVSGIDKEINAYLPSYGKMYSVFGERLRKEAVQEIAEKIIYYGTIYGDAKSMFRKKLNQYVSDGWMTEYQVKRISGYKFKDWARLSRSMLCLSGCDKSTGEKISLIRAMWEYNLNFMELIYSEDFTFQKELEERRKALGKTLQEFQFEDLDEYYYSAPVKRMIWQAVQALKEITQIMGHNPKRIFIEMTRTEEEKGEQGRKNSREKRLLKLYESIRDERNWAAEIKNANASGKLNSKKLYLYYLQMGRDVYTGEPIDIEDLFDDSRYDIDHIYPRSLTNDNNIENNLVLVSKTINQNEKKNDYPVPEKVRTNKKIRDLWHTLHKMGFMNDEKYNRLTSTERLSEEQLAGFIARQLVETAQGAKGIAELMKAMLPGTDIVYAKARNVSDFRKEYKMLKSRLVNDYHHAQDAYLNIVVGNVYFTKFTRNPMNFIKKEARRDGRNYDYNLYKMYSKDIIRNGEKAWIATSEQGPGTIRLVKETMGKNTPIITRQTFEQRGELFNLQPVGKYSAKKDNYVPLKINDEKMQDVSKYGGYTSLNPSYFIFIEHGLEKKRKKCFEVIHSYYAAQIKTEKDLIDFLLQKGYKNPRVINARIKKNALIKYNGYFLYIIGMDARKNIEFSNATAMCLKNKYIQYVCKLEKMNKAILLSEKQKTNLHWDEKITCKSNLELYRELTEKHLHSIYQRHPRSIGKCLADGEEAFKLLDIEEQVKIICDIVQYTSFQRGVFSLKVLGGPKEVGRIRISGNMTEAKECKLVNYSITGMYKTEMDLLKK

SEQ ID NO: 19779 - protein, 1372 aa, unidentified
  REGION 1..1372: note = Cas Enzyme sequence
MNSDKREDYYVGLDMGTGSLGGAVTDTQYHLLKVKGKDFWFVREYETAKSQLDRRTHRIAKRRLQRHKARIGLIRSYFAEDILKHDPLFYIRQDNSKYYQEDKDARLTTKDSLFADPGYGDKEYHDVKEYPTIFHLRQALLRDQIKDEERYSRFLYLAIINMFEHRGHFLLNTESSDLNAYMIKDVGELVMNAICGVSEYGSVTYKEIIEILEDKNISRTAKKDQIASKIDIKKSEKAQMERIKCLCGMEADARVMFEIEADEKIKIAFQQAAFEDEKEEIEVAIGEERYLIIENMKQLYDYSQLQSVLNGFDYLSDARVQMYEKHKEDLHLLKKVYRKNLDREMYNRMFRSGEEGSYCAYSNSTNSVDSLAEAKKYRRNMKKRSQKDLYDRIKKDLKEVHDADVDAIRKEMELERFLPKQITGANGIIPNQVHRKELKKILENAEHHLDFLKEKDESGYTVSERILMLFSSNIPYYVGPVGSGSKTGWAKIKESGQVLPWNMEQKIDIEQTSERFITNLIRECTYLSGEKVLPKQSLLYESYCVLNEINNLRIHGKRIVPELKQDIYKEVFQGSRLGKKVTKKNICTYLINRGLITEESEVSGIDKEINAYLPSYGKMYSVFGERLRKEAVQEIAEKIIYYGTIYGDAKAMFRKKLNQYVSDGWMTEYQVKRISGYKFKDWARLSRSMLCLSGCDKSTGEKISLIRAMWEYNLNFMELIYSEDFTFQKELEKRRKALGKTLQEFQFEDLDEYYYSAPVKRMIWQAVQALKEITQIMGHNPKRIFIEMTRTEEEKGEQGRKNSREKRLLKLYESIRDERNWAAEIKNANASGKLNSKKLYLYYLQMGRDVYTGEPIDIEDLFDDSRYDIDHIYPRSLTNDNNIENNLVLVSKTINQNEKKNDYPVPEKVRTNKKIRDLWHTLHKMGFMNDEKYNRLTSTERLSEEQLAGFIARQLVETAQGAKGIAELMKAMLPGTDIVYAKARNVSDFRKEYKMLKSRLVNDYHHAQDAYLNIVVGNVYFTKFTRNPMNFIKKEARRDGRNYDYNLYKMYSKDIIRNGEKAWIATSEQGPGTIRLVKETMGKNTPIITRQTFEQRGELFNLQPVGKYSAKKDNYVPLKINDEKMQDVSKYGGYTSLNPSYFIFIEHGLEKKRKKCFEVIHSYYAAQIKTEKDLIDFLLQKGYKNPRVINARIKKNALIKYNGYFLYIIGMDARKNIEFSNATAMCLKNKYIQYVCKLEKMNKAILLSEKQKTNLHWDEKITCKSNLELYRELTEKHLHSIYQRHPRSIGKCLADGEEAFKLLDIEEQVKIICDIVQYTSFQRGVFSLKVLGGPKEVGRIRISGNMTEAKECKLVNYSITGMYKTEMDLLKK

SEQ ID NO: 19780 - protein, 1369 aa, unidentified
  REGION 1..1369: note = Cas Enzyme sequence
MNSDKREDYYVGLDMGTGSLGGAVTDTQYHLLKVKGKDFWFVREYETAKSQLDRRTHRIAKRRLQRHKARIGLIRSYFAEDILKHDPLFYIRQDNSKYYQEDKDARLTTKDSLFADPGYGDKEYHDVKEYPTIFHLRQALLRDQIKDEERYSRFLYLAIINMFEHRGHFLLNTESSDLNAYMIKDVGELVMNAICGVSEYGSVTYKEIIEILEDKNISRTAKKDQIASKIDIKKSEKAQMERIKCLCGMEADARVMFEIEADEKIKIAFQQAAFEDEKEEIEVAIGEERYLIIENMKQLYDYSQLQSVLNGFDYLSDARVQMYEKHKEDLHLLKKVYRKNLDREMYNRMFRSGEEGSYCAYSNSTNSVDSLAEAKKYRRNMKKRSQKDLYDRIKKDLKEVHDADVDAIRKEMELERFLPKQITGANGIIPNQVHRKELKKILENAEHHLDFLKEKDESGYTVSERILMLFSSNIPYYVGPVGSGSKTGWAKIKESGQVLPWNMEQKIDIEQTSERFITNLIRECTYLSGEKVLPKQSLLYESYCVLNEINNLRIHGKRIVPELKQDIYKEVFQGSRLGKKVTKKNICTYLINRGLITEESEVSGIDKEINAYLPSYGKMYSVFGERLRKEAVQEIAEKIIYYGTIYGDAKAMFRKKLNQYVSDGWMTEYQVKRISGYKFKDWARLSRSMLCLSGCDKSTGEKISLIRAMWEYNLNFMELIYSEDFTFQKELEKRRKALGKTLQEFQFEDLDEYYYSAPVKRMIWQAVQSLKEITQIMGHNPKRIFIEMTRTEEEKGEQGRKNSREKRLLKLYESIRDERNWAAEIKNANASGKLNSKKMYLYYLQMGRDVYTGEPIDIEDLFDDSRYDIDHIYPRSLTNDNNIENNLVLVSKTINQNEKKNDYPVPEKVRTNKKIRDLWHKMGFMNDEKYNRLTSTERLSEEQLAGFIARQLVETAQGAKGIAELMKAMLPGTDIVYAKARNVSDFRKEYKMLKSRLVNDYHHAQDAYLNIVVGNVYFTKFTRNPMNFIKKEARRDGRNYDYNLYKMYSKDIIRNGEKAWIATSEQGPGTIRLVKETMGKNTPIITRQTFEQRGELFNLQPVGKYSAKKDNYVPLKINDEKMQDVSKYGGYTSLNPSYFIFIEHGLEKKRKKCFEVIHSYYAAQIKTEKDLIDFLLQKGYKNPRVINARIKKNALIKYNGYFLYIIGMDARKNIEFSNATAMCLKNKYIQYVCKLEKMNKAILLSEKQKTNLHWDEKITCKSNLELYRELTEKHLHSIYQRHPRSIGKCLADGEEAFKLLDIEEQVKIICDIVQYTSFQRGVFSLKVLGGPKEVGRIRISGNMTEAKECKLVNYSITGMYKTEMDLLKK

SEQ ID NO: 19781 - protein, 1114 aa, unidentified
  REGION 1..1114: note = Cas Enzyme sequence
IEADEKIKIAFQQAAFEDEKEEIEAAIGEERYLIIENMKQLYDYSQLQSVLNGFDYLSDARVQMYEKHKEDLHLLKKVYRKNLDREMYNRMFRSGEEGSYCAYSNSTNSVDSLAEAKKYRRNMKKRSQKDLYDRIKKDLKEVHDADVDAIRKEMELERFLPKQITGANGIIPNQVHRKELKKILENAEHHLDFLKEKDESGYTVSERILMLFSSNIPYYVGPVGSGSKTGWAKIKESGQVLPWNMEQKIDIEQTSERFITNLIRECTYLSGEKVLPKQSLLYESYCVLNEINNLRIHGKRIVPELKQDIYKEVFQGSRLGKKVTKKNICTYLINRGLITEESEVSGIDKEINAYLPSYGKMYSVFGERLRKEAVQEIAEKIIYYGTIYGDAKSMFRKKLNQYVSDGWMTEYQVKRISGYKFKDWARLSRSMLCLSGCDKSTGEKISLIRAMWEYNLNFMELIYSEDFTFQKELEERRKALGKTLQEFQFEDLDEYYYSAPVKRMIWQAVQALKEITQIMGHNPKRIFIEMTRTEEEKGEQGRKNSREKRLLKLYESIRDERNWAAEIKNANASGKLNSKKLYLYYLQMGRDVYTGEPIDIEDLFDDSRYDIDHIYPRSLTNDNNIENNLVLVSKTINQNEKKNDYPVPEKVRTNKKIRDLWHTLHKMGFMNDEKYNRLTSTERLSEEQLAGFIARQLVETAQGAKGIAELMKAMLPGTDIVYAKARNVSDFRKEYKMLKSRLVNDYHHAQDAYLNIVVGNVYFTKFTRNPMNFIKKEARRDGRNYDYNLYKMYSKDIIRNGEKAWIATSEQGPGTIRLVKETMGKNTPIITRQTFEQRGELFNLQPVGKYSAKKDNYVPLKINDEKMQDVSKYGGYTSLNPSYFIFIEHGPEKKRKKCFEVIHSYYAAQIKTEKDLIDFLLQKGYKNPRVINARIKKNALIKYNGYFLYIIGMDARKNIEFSNATAMCLKNKYIQYVCKLEKMNKAILLSEKQKTNLHWDEKITCKSNLELYRELTEKHLHSIYQRHPRSIGKCLADGEEAFKLLDIEEQVKIICDIVQYTSFQRGVFSLKVLGGPKEVGRIRISGNMTEAKECKLVNYSITGMYKTEMDLLKK

SEQ ID NO: 19782 - protein, 1372 aa, unidentified
  REGION 1..1372: note = Cas Enzyme sequence
MNSDKREDYYVGLDMGTGSLGGAVTDTQYHLLKVKGKDFWFVREYETAKSQLDRRTHRIAKRRLQRHKARIGLIRSYFAEDILKHDPLFYIRQDNSKYYQEDKDARLTTKDSLFADPGYGDKEYHDVKEYPTIFHLRQALLRDQIKDEERYSRFLYLAIINMFEHRGHFLLNTESSDLNAYMIKDVGELVMNAICGVSEYGSVTYKEIIEILEDKNISRTAKKDQIASKIDIKKSEKAQMERIKCLCGMEADARVMFEIEADEKIKIAFQQAAFEDEKEEIEAAIGEERYLIIENMKQLYDYSQLQSVLNGFDYLSDARVQMYEKHKEDLHLLKKVYRKNLDREMYNRMFRSGEEGSYCAYSNSTNSVDSLAEAKKYRRNMKKRSQKDLYDRIKKDLKEVHDADVDAIRKEMELERFLPKQITGANGIIPNQVHRKELKKILENAEHHLDFLKEKDESGYTVSERILMLFSSNIPYYVGPVGNGSKTGWAKIQESGQVLPWNMEQKIDIEQTSERFITNLIRECTYLSGEKVLPKQSLLYESYCVLNEINNLRIHGKRIVPELKQDIYKEVFQGSRLGKKVTKKNICTYLINRGLITEESEVSGIDKEINAYLPSYGKMYSVFGERLRKEAVQEIAEKIIYYGTIYGDAKSMFRKKLNQYVSDGWMTEYQVKRISGYKFKDWARLSRSMLCLSGCDKSTGEKISLIRAMWEYNLNFMELIYSEDFTFQKELEERRKALGKTLQEFQFEDLDEYYYSAPVKRMIWQAVQALKEITQIMGHNPKRIFIEMTRTEEEKGEQGRKNSREKRLLKLYESIRDERNWAAEIKNANASGKLNSKKLYLYYLQMGRDVYTGEPIDIEDLFDDSRYDIDHIYPRSLTNDNNIENNLVLVSKTINQNEKKNDYPVPEKVRTNKKIRDLWHTLHKMGFMNDEKYNRLTSTERLSEEQLAGFIARQLVETAQGAKGIAELMKAMLPGTDIVYAKARNVSDFRKEYKMLKSRLVNDYHHAQDAYLNIVVGNVYFTKFTRNPMNFIKKEARRDGRNYDYNLYKMYSKDIIRNGEKAWIATSEQGPGTIRLVKETMGKNTPIITRQTFEQRGELFNLQPVGKYSAKKDNYVPLKINDEKMQDVSKYGGYTSLNPSYFIFIEHGLEKKRKKCFEVIHSYYAAQIKTEKDLIDFLLQKGYKNPRVINARIKKNALIKYNGYFLYIIGMDARKNIEFSNATAMCLKNKYIQYVCKLEKMNKAILLSEKQKTNLHWDEKITCKSNLELYRELTEKHLHSIYQRHPRSIGKCLADGEGAFKLLDIEEQVKIICDIVQYTSFQRGVFSLKVLGGPKEVGRIRISGNMTEAKECKLVNYSITGMYKTEMDLLKK

SEQ ID NO: 19783 - protein, 1286 aa, unidentified
  REGION 1..1286: note = Cas Enzyme sequence
PLFYIRQDNSKYYQEDKDARLTTKDSLFADPGYGDKEYHDVKEYPTIFHLRQALLRDQIKDEERYSRFLYLAIINMFEHRGHFLLNTESSDLNAYMIKDVGELVMNAICGVSEYGSVTYKEIIEILEDKNISRTAKKDQIASKIDIKKSEKAQMERIKCLCGMEADARVMFEIEADEKIKIAFQQAAFEDEKEEIEAAIGEERYLIIENMKQLYDYSQLQSVLNGFDYLSDARVQMYEKHKEDLHLLKKVYRKNLDREMYNRMFRSGEEGSYCAYSNSTNSVDSLAEAKKYRRNMKKRSQKDLYDRIKKDLKEVHDADVDAIRKEMELERFLPKQITGANGIIPNQVHRKELKKILENAEHHLDFLKEKDESGYTVSERILMLFSSNIPYYVGPVGSGSKTGWAKIKESGQVLPWNMEQKIDIEQTSERFITNLIRECTYLSGEKVLPKQSLLYESYCVLNEINNLRIHGKRIVPELKQDIYKEVFQGSRLGKKVTKKNICTYLINRGLITEESEVSGIDKEINAYLPSYGKMYSVFGERLRKEAVQEIAEKIIYYGTIYGDAKSMFRKKLNQYVSDGWMTEYQVKRISGYKFKDWARLSRSMLCLSGCDKSTGEKISLIRAMWEYNLNFMELIYSEDFTFQKELEERRKALGKTLQEFQFEDLDEYYYSAPVKRMIWQAVQALKEITQIMGHNPKRIFIEMTRTEEEKGEQGRKNSREKRLLKLYESIRDERNWAAEIKNANASGKLNSKKLYLYYLQMGRDVYTGEPIDIEDLFDDSRYDIDHIYPRSLTNDNNIENNLVLVSKTINQNEKKNDYPVPEKVRTNKKIRDLWHTLHKMGFMNDEKYNRLTSTERLSEEQLAGFIARQLVETAQGAKGIAELMKAMLPGTDIVYAKARNVSDFRKEYKMLKSRLVNDYHHAQDAYLNIVVGNVYFTKFTRNPMNFIKKEARRDGRNYDYNLYKMYSKDIIRNGEKAWIATSEQGPGTIRLVKETMGKNTPIITRQTFEQRGELFNLQPVGKYSAKKDNYVPLKINDEKMQDVSKYGGYTSLNPSYFIFIEHGLEKKRKKCFEVIHSYYAAQIKTEKDLIDFLLQKGYKNPRVINARIKKNALIKYNGYFLYIIGMDARKNIEFSNATAMCLKNKYIQYVCKLEKMNKAILLSEKQKTNLHWDEKITCKSNLELYRELTEKHLHSIYQRHPRSIGKCLADGEEAFKLLDIEEQVKIICDIVQYTSFQRGVFSLKVLGGPKEVGRIRISGNMTEAKECKLVNYSITGMYKTEMDLLKK

SEQ ID NO: 19784 - protein, 1339 aa, unidentified
  REGION 1..1339: note = Cas Enzyme sequence
MKKFEDYYLGIDLGTSSIGWAVTNEKYDILRFNKKFMWGTHLFDTGNTAAERRIFRTSRRRLKRKKKRIELLQTLFSEEISKKDFGFFQRLKESQYFIEDKTIKNKNILFMDKNYTDQDYHMEYPTIYHLRKALIDNEESAFEIRKLYLAISHILSHRGHFLFEGGLSDNLDFDDIFNEFVKYLNEELNIDFKIKSDVSLRAIKEILTDKMLNKKKKKEKLSELLEEEKNKIYQEIWKLLVGNEAKMSTIFDDKEYEEAKIAFSKGNYDEKEEEYESILGEKILFVQKAKAIYDWMLLQNILKEDKYLSYSKVKLYDEHKNDLRILKEVLKRLDKKVYKEIFSENGLYENYVKKNGKEELYKKIKSYFNDENSDEIVKNILNKIELDSFLPKQKIKDNGVIPRQVHQKELEIILKNAEKYFSWLTKKDETGLSVSEKIMKIFKFKIPYYVGPLNSKSPFAWIERKEYGKILPWNFENMVDISKTAEKFIKRMTNKCTYLPEKDVIPKNSLLYTKYMVLNELNNLKIRGEKIKVELKQKIYTELFQKNKKIGMKTLIEFLKSQNIVVTKAEITGIDGTFNTSLGSYIDMRKIFGEEKIVKDSYKKMIEDIILWITLYGEEKKLIKSKIEEKYPEKVTPEEMKLILKLKYKDWSRLSKEFLTEIETIDEETGEFVNIIEMLWRKNENIMELLSYKYDFSDRIKEYNGINEEEKNITYEDLIKDLQVSPSVKKMIWRALVIVKEIKKVTKKSPKKVFIEMARDHQTEKKRTDKRKDKLLELYKNIKNDDSIKELEKNLKEKTNDELKSKKLYLYYLQLGRCMYSGEVIRLEDLMNDNLYDIDHIYPQSKIKDDSFDNTVLVKKQINADKTDEYPIDKNIQNKCKAFWTSLKERGLMSNTKYERLTRTEGFSDDELAGFISRQLVETRQATKILANLLKVIFGSDTRIIYVKAGLTSDFRQKFGIYKFRELNDYHHAHDGYLNIITGNIYNTLFTDNPYNFIKDRKKINRSYNLNKVFERENDVWNPNSMILKVERYIYKIRPLFTRASYEQKGGFSDQNISSKKDKLRPLKLSGVLSNTKYGGYDKIKNSYFFIVEYTEKKKRIRSIETLPIYIKNFIKTKNDLEKYCKENLKLQEPKILISKLNYKSLIYSNGHKYYINSKTLNNITIQNGIQLILTKENYETYRKIYKNLEYLKLIYKDEKIREKKFLEKLSKILKKNKFSKDLSENEISEKINELYKEIFEKIERGIFSKFKSTLPIYIKDCNDLKDFSVLNNYNKSRFIQEILKCLNSQQGEFDTKYTHNYSKKYNMKLSKSKILENDFYIINQSPTGLFEKKVFLDK

SEQ ID NO: 19785 - protein, 1375 aa, unidentified
  REGION 1..1375: note = Cas Enzyme sequence
MHTDKKADYYVGLDMGTGSLGGAVIDSQYHLMKVKGKDFWFVREYESAQPQLKRRTHRISRRKLQRHQVRIRLLRSYFAEDVLRHDPLFYIRQDNSKYYREDKDSRLRTKDSLFADPGYGDKEYYKEYPTIFHLQQALLKDEVASEERYSRLLYLALIHLFEHRGHFLLNTDSGDLNADMVKDAGETVMNYICESTEEANGDVSYKQIIEKLADKEISRSTKKDKIASLLGIKRSDKKQMELVKCLCGMDADARVMFQLEADEKIKVAFQQASFEEEKEEIEAAVGEEYFFIIESMKQLYDYSQLQAVLKGFDYLSDARVAMYNKHKEDLRLLKKVYKRDLGQEAYDRMFRSSEKGSYSAYCNSLNSTDSLAAEQKYRRNMKNVKERGKGDLHDRIKKDLKNLANEETTVILKEIELEQFLPKQMTGANGVIPNQVHQKEMKKILENAEKHLDFLKETDDSGYTVSERILMLFSRNIPYYVGPVGNGSKTGWAVRREQGQVLPWNMEQKIDMNATSERFITNLIRECTYLSGEKVLPKQSLLYEAYCVLNEINNLRINGKRIVPEVKQDIYKELFQGVRLGKKVTRKTLCSYLMNRGILKDESELSGIDKEANAYLSSYGKMYAVFGERMREEAIQKAVEEIIYYGTIYGDSKLMFRKKLDQYISSGILTESQAKRISGYKFKDWARISKSMLCLSGRDNRTGEILSLIRAMWEYNLNFMELLHSEEFTFKEELEKRKQTIQKTLSDFQFEDLDEYYYSVLVKRMIWQTVQALKEITQIMGHYPKRIFIEMTRTDEEKGEQGRKNSREKRLLKLYENIKDGRNWETEIKNASASGKLNSKKLYLYYLQMGKDAYTGNDIDIEDLFKDNRYDIDHIYPRSLTNDNNMENNLVLVSKKINEEDKQNDSLVPKKVRENPKVRELWAVLHKMGFMNDEKYNRLTSNEKLTDDQLAGFIERQLVETAQGAKGIADLLKSLMPGTEIVYVKARNVSDFRKEYKMLKSRLINDYHHAQDAYLNIVVGNVYFTKFTRNPLNYVKKEARRDGKNYNYNLYKMYGKDVVRNGEIAWVASKNQEPGTIRLVKEVMEKNTPMITRQTFEQKGELFNLQPVGKYSAKAENYVPLKAKDEKLQDVTKYGGYTSLKPSYFVFFEHGSEKKRKKCFEVVHSYYASQIKNKADLTKFLEEKGYKNPRVIAEKIKKNALIKYNGYFLYIVGMDARKNVEFSNAMAMCLKYPYVQYICKLERLRAAMLLPEKQKMSLRWDEKITGEKNLELYQELTTKHLHAIYANHPKCIGTCLENGESSFKLLGIEQQVMLLCDIVAYTSFQKGTFSLQAIGGPKDVGRIRISGNMTDATELKLIHYSITGMYKKEEDLLHM

SEQ ID NO: 19786 - protein, 1339 aa, unidentified
  REGION 1..1339: note = Cas Enzyme sequence
KDFWFVREYESAQPQLKRRTHRISRRKLQRHQVRIRLLRSYFAEDVLRHDPLFYIRQDNSKYYREDKDSRLRTKDSLFADPGYGDKEYYKEYPTIFHLQQALLKDEVASEERYSRLLYLALIHLFEHRGHFLLNTDSGDLNADMVKDAGETVMNYICESTEEANGDVSYKQIIEKLADKEISRSTKKDKIASLLGIKRSDKKQMELVKCLCGMDADARVMFQLEADEKIKVAFQQASFEEEKEEIEAAVGEEYFFIIESMKQLYDYSQLQAVLKGFDYLSDARVAMYNKHKEDLRLLKKVYKRDLGQEAYDRMFRSSEKGSYSAYCNSLNSTDSLAAEQKYRRNMKNVKERGKGDLHDRIKKDLKNLANEETTVILKEIELEQFLPKQMTGANGVIPNQVHQKEMKKILENAEKHLDFLKETDDSGYTVSERILMLFSRNIPYYVGPVGNGSKTGWAVRREQGQVLPWNMEQKIDMNATSERFITNLIRECTYLSGEKVLPKQSLLYEAYCVLNEINNLRINGKRIVPEVKQDIYKELFQGVRLGKKVTRKTLCSYLMNRGILKDESELSGIDKEANAYLSSYGKMYAVFGERMREEAIQKAVEEIIYYGTIYGDSKLMFRKKLDQYISSGILTESQAKRISGYKFKDWARISKSMLCLSGRDNRTGEILSLIRAMWEYNLNFMELLHSEEFTFKEELEKRKQTIQKTLSDFQFEDLDEYYYSVLVKRMIWQTVQALKEITQIMGHYPKRIFIEMTRTDEEKGEQGRKNSREKRLLKLYENIKDGRNWETEIKNASASGKLNSKKLYLYYLQMGKDAYTGNDIDIEDLFKDNRYDIDHIYPRSLTNDNNMENNLVLVSKKINEEDKQNDSLVPKKVRENPKVRELWAVLHKMGFMNDEKYNRLTSNEKLTDDQLAGFIERQLVETAQGAKGIADLLKSLMPGTEIVYVKARNVSDFRKEYKMLKSRLINDYHHAQDAYLNIVVGNVYFTKFTRNPLNYVKKEARRDGKNYNYNLYKMYGKDVVRNGEIAWVASKNQEPGTIRLVKEVMEKNTPMITRQTFEQKGELFNLQPVGKYSAKAENYVPLKAKDEKLQDVTKYGGYTSLKPSYFVFFEHGSEKKRKKCFEVVHSYYASQIKNKADLTKFLEEKGYKNPRVIAEKIKKNALIKYNGYFLYIVGMDARKNVEFSNAMAMCLKYPYVQYICKLERLRAAMLLPEKQKMSLRWDEKITGEKNLELYQELTTKHLHAIYANHPKCIGTCLENGESSFKLLGIEQQVMLLCDIVAYTSFQKGTFSLQAIGGPKDVGRIRISGNMTDATELKLIHYSITGMYKKEEDLLHM

SEQ ID NO: 19787 - protein, 1365 aa, unidentified
  REGION 1..1365: note = Cas Enzyme sequence
MNTAKMNKQPYYIGLDIGTASVGWAVTDASYNVVKKHGKALWGVRLFEEAQTAADRRLHRTARRRIQRRKQRLALLQELFAKEICKVDPGFFIRLHESRLWQEDKSIDQPNTLFNDEDFDDKAYHKAYPTIYHLRYALMTENKSFDVRLVYLAIHHIIKHRGHFLLENYDLSNQETSGFDESYIALTNAIKELLQKEIPVGHVEKIQIILKDKSLSKREKTEKILQVWDVIKDKQLKEVVQLICGGTANLSTLFMDESLKEALKVFEIKDSKISFSTAVYEEKESDLQSVLEQRFDLVYAAKMLYDWSLLAELMGDRKTLSEAKIAIYETHKKDLEVLKRLTRQDKSLYRKLFRGTDKDSYSAYVGSCMIHGEKLVIEKRGSTEEFYKFLKKEISKLPDCEDKIYVLSKIEAENFLPKAVSTINGIIPYQLQEQELDIILKKAEQYLPFLMEKDAYGTISEKIKQLLTFRIPFYVGPLNRHSDKSWAVHTDKEGRILPWNFNERINEEKSAEKFITRMTNKCTYLLGKDVLPKNSLLYTECMLFNELNNVKIGKAGTYLTEEQKEKLWKELFLTTKKVTLSKFSKFLIKEGIDKEEAVEIKGLDGGFKSSLAPWIDLKNILGEDFTRDKAEEIIKAITLFSMDKKILKKYLMRIVSEPVAKQLSKLRYTGWGRFSKEFLTEITPRVTDDVQVLVDTSTGEIMNIITALKKTSLNLMEILSSTYGYSAAISEANKELVGNTVLSYETVKELTVSPAVKRPIWQTLKIIKEITHIMGAEPARIFIEMARDKQPDKGRTDSRKKQLIELYKKCKEDVRSWSNRESKDWVEEIESKSDSQLRSNKLFLYYTQMGKCMYTGKPIDLGALLKGQLYDRDHIYPQSQTKDDSLDNLVIVDNRENRDKSNTYPLSKNIRERQIGFWKLLRDKGFISKEKYFRLTRNTPFSDAEKAEFIARQLVETRQSTKAVAEILKRVLPKSIIVYVKAGLTSRFRQYGEFIKVRDLNDYHHAKDAYLNIVTGNVHYTKFTSNPIRFVKDCQIYSLNEHALYKYTVERNGVVAWAPNEEGMMPSVTRWMNKNNILVTRMSYVGQGELFDQLPLKKGKGQVSLKKEGAISDISKYGGYNSASTAYFMYVEGEDNKGKPVYVIETMPLHLAARLTTLEEKQKYCEELWMSTGGKLKNPKVLIEQIPIQSLFSVDGFRVTIAGKTGKQYGCRLAEELVLNNGYAMTLKAVLKFVNRRKMNKEALITSYDHLEESQLLALYDVFLDKLEHSCFSKRFSTQRDVLKNGRESYIALSLEDKCQILSEILHLFQCNATLSNLNLLGSSKQSGRLYMSKNLSDKDSWYIIHQSVTGFYEQHIPLAPYKKS

SEQ ID NO: 19788 - protein, 1357 aa, unidentified
  REGION 1..1357: note = Cas Enzyme sequence
VRGCVKEMAKNNQRFKEYHIGLDVGTNSVGWAVADNQYRVLRFNRKSMKGVRRFNEAKTAESTRLSRTDRRRLDRREDRLDFLKNVFQKSIETIDPNFFVRMDESAYYLEDKSIDTKYSLFDDNNYTDIEYHQDYPTIYHLRKELIDNPNVHDPRLVYLALHHILKYRGHFLFEGDLQKDSNFIDLLTTFDDWVYNIFEINMFNFNSLDVSEFEKTLKDRELTGSDKQKYIYSVINTEVDKDQKKIFKQLSRLIAGLKITDITMIFTDKEIEGTSSLEIAKDDFEEKLEGMSILSEEEKELIYKGKALYDWSILEEILNGEDSISYAKVATYEEHGRDLTLLKQVIKNIGQKEYKKMFNSTQEIKNYVAYIGQFEKKKNKSTTTVDEFYDQVKKVLEKAPKSDEKQVILNKIDTGTFMPKQRISSNGVIPHQIHGWELSNILNNAEHYLLFLRDTDETGLSNSQKIEEMFKFRIPYYVGPVNDAHKDEDGYAWVVRKESGKVYPWNFNQKIDVKASAEEFILRMTKKCTYIFEEPVLPKHSMLYQKFTVLNEINKIKIDGVSIPVTWKQELYKELFVQNKTTITKKRLVEWLKIKGYIAQEAAPVISGVDLPLKSKLSTLQDMKDIFGEEIPSMHVVDDIVRYITLFSNDKGMLVEKLTDEFEQLTDDQIHQLKTKNYAGWGRLSRQFLEEISDTSQFKEPLSIIHALYSTNYNLMELLSDKFTFSEQIKSINAKNIPSINKLTYDLVDDLYVSPSVKRAIWQTLRLIDEITFIAKRDPSKIHIEMARGNEGGGRTTSRKDRLIDLYKDIKDDQILKKGLLEQLENEDEARLKSKKLYLYYTQMGKCMYSGEDIELSHLYDRNLYDIDHIYPRSKTKDDSFNNLVLVKRTLNDKKSDSYPLHDKLNINNQTKALWKMLEKKDLITKVKYTRLKRQEPLTDVELSGFIERQIVETRQSTKSIALILKQLYPQTDIVFVKSRHVSELRQYLSQVYNDRSFYKVRMMNDHHHAKDAYLNIVAGNVYHTKFTTNPMNYLNNSTHRGYNLAKMYDRDVKRNGKTAWIAGEDGSIKVVAKEFKKDNILTTWLQIDGKGELFDQTLMKKGHGQVPIKKGMDIDKYGGYNKPSIAYHAIVEHTNRKKREQWIVSIPVYIANQIHSEEDLKEFLMTTHDPQLKEVEILISHIHASNQLIAFDGKKARITGKSGKKYVLRNEIQPIFSDEFKVRLKEIEKLKIQDNLDEESIDINLVHEDLLSMYQEINQKIQLPIYREKNSSFIELVEDGYSLFEQLTLLEQIELVIELLKLVKSTRELSDLRKINGSKQSGVYTRGRNISNCEYFKLIHQSITGLFENEVDVIER

SEQ ID NO: 19789 - protein, 1334 aa, unidentified
  REGION 1..1334: note = Cas Enzyme sequence
MKKFYIGADIGTNSVGVACTDESYRLIRAKSKDCWAVRLFDEGETAFDRRTKRTARRRLARRKQRINWLQELFEPFIDDKTFFIRLNNSQYLPEDKDSLLCGNKNNLFENEGEESKFYKKYPTIYHLRKALMDGGNFDIRLYYLALHHIIKYRGHFLYEGSIEDIRDFSNLMKGLDCAIADSYDGGLNLFDSVDSAKVRDILIDKKSGLRDKQVELEKLLCAKSKREKEILKGITGQKISPYVLFGDEFKEEKSFSLNDMSDEEFESKRSSYGESFTLLDLMHSVCNYVKFEKIFEGHSDISSAMISVYEKHKADLVLLKKVVRKQSKEDYNKIFRSVNEEKNYVNYIGYTSKDGRKIKVKKCKDEDFFKYLKKYLNGILNEDNFDIVSKIIKEIDDRIFLPKILHSDNGLFPKQVNEFELKKIIENMVRNYAETEEMASAVLSLFNYKIPYYVGPLTGCNSWVVRTDEKVTPWNFDRVVDLAKSNEAFMRRMTNKCAYIKGEDVLPKASIIYQKYDTLNQLNKLRINDRVISIELKQTIYNELFLKYPKVTDKKIKELLVREGLCSSSETKDITISGKDGDFKSSMSSYIRLKNILGDFVDDDLKSGGKVCENIILWHTLNTDKKIVEDLIEKNYGFIPEIKANIKQLKGLTFNDFGRLSAKLLIGIEGVDKTTGQILTILDVLYQTNQNLNEVLNNESYNFSEIIDEENGIETEIISYETVEELYVSPAVRRGIWQTLLMIDEYVNAVGRQPDKIFIEVTRNDGKKGDNGRTQPRKRQLQEKFKNIGSAYSDIIEELSEEKYTDLKLRQERLYLYFRQLGRCMYTGERIILDELNGNRYDVDHILPRTYVKDDSLDNKVLVCRGANATKADTYPLPTEFSRKEVRAHWKMLLDKDLISKTTYDRLTRIEPLKDDDYNDFINRQKTITDQTAKAVIELLKRKYPNAKLIFSRAKNVNDFKNRFNLFKCRETNDLHHARDAYLNVVVGNVFDSVFSTPLGQSRKDGDVWRIYNLKKLFTRDVIGAWSKDSIKIVKDTYSKPSMSVTRYATCNKGKFYDETVCRKNDSAITAPRKGKGPLSDVTKYGGYTTQKTAYFAIVTSVDKKGKSIKTIEAIPVLVTYKLKTDTNAIQKYLESYLREPIIVIPKVKVKQLVSYNGSLCYLAGITNNQITVHNASQLYTDNTTDEYVNQLIKIIGMGDNGIITGNESQYITKTNKDGVIRIVVNKENNEKLYETLKNKLDSKIYKGLSAFASFKKNMERGKDKFCELSVLEQAKVLLQILKVFRCNAEISDIQAIGGTAHSGKKLFAKNITDVDFKLVNLSPAGLTVRIRKV

SEQ ID NO: 19790 - protein, 1358 aa, unidentified
  REGION 1..1358: note = Cas Enzyme sequence
MQNGYYLGLDIGTDSVGYAVTDQEYNLKKYKGEPMWGVHLFEGGKDAAERRAHRTYRRRIDRVQQRVDLVGELFAEEIGKIDPDFFIRRKESALFAEDTKHGVKIFRGNGITDKEYHLRYPTIHHLILDLMTSDQPHDIRLVYMACAWLVAHRGHFLFDFAPDQTEKLLDFDKTFEEFLDYFSQDVARPWSAEIKAGDLLSILSMQTGVSKKKDAFKQKIYGGKKVSKEATEEFPYSCDAIMTLLCGGKVKPEALFTDPSMADIDSVSLLMGDEDFDRIVSELGDNGELLCKMRAMQNCARLITTMSNKRPQDPTCISSSKIAIYEQHKKDLEALKRFVRKYCKNQYAKIFRLVESGNYVAYSKNLKSVADPKKFKSANKEVFSDFLLKIVKNIKVRKEDAAMYTDMVERLEARTFLPKQKDGDNRVIPQQLYRQEMAAILAKAEKYIPMLSKPDADGMTVTQKLLSIFDFRIPYYVGPLVRHPQGTAWIERKQGRILPWNFEEMVDLDASEQGFIKKMTNDCTYLPGQKVLPVNSLLYGKFTVLNELNNLKVDGVSIPVKVKQELYESLFMQKPRVTVKQIRDHLLTHGYMTVGSELTGIDTTFKAGLKSYHVFRNLLESGVLNEAEVESIIEHAAYTEDKSRMRHWLKQTFPQIPEGDVAYILKQDLKQFGRLSPMLLAGLYGSAKNSDGEAFTIIEALWNTNENLMQLLSDRYTFSEQIREYTKEYYAEHPASLTRRLEDMYISGPVKRPIFRTLDIISDVVKATGKAPEKIFIEMARGGTEDQKGKRTKSRKDQLLDLYKLIKTEDARIFEKELKNMGETADNRLQERKLFLYYLQMGKCAYTGEPIDVNKLGSGDYNLDHIYPQSYVKDDSLFNNLVLVKSEANGIKGDSYPVPEQFRNTMYQTWQYWKDKGLMTDEKFSRLTRKVPFSDHEKQGFINRQLVETRQSTKAIATLLKERFPDTAIVYVKAGMVSEFRQEFDLPKSRTVNDLHHAKDAYLNVVVGNVYHERFSDRWFRIDEHYNVQLKKIFDRAQRHGSTIYWNGEADIAKVKKTAGKNAIHMTRYAFLRKGGLFDQQPVRKAKGLVSLKHGMATEKYGGYNKPSVCGYVLAKYTAEGKTEIMFVPVDLRMKDQATQNIEALATYTIHEIGKITNQEPEKVELLLDGRMLKINTAIMADGVRMALAGKDSGGANVLLSPVMALTLSKKWEAYIKALESFDKKRTVNRNIVLNQDHDGISAPDNLELYRLLIQKMKAWPFCNYPGNQVEVIETGEKIFTKAAIADQVTCLLNILQLMGPGSGGIDLSVCGGKKSVGSKRRSAKLSNWKKYYKEVRIVDVSASGLYEKISENLLEML

SEQ ID NO: 19791 - protein, 1336 aa, unidentified
  REGION 1..1336: note = Cas Enzyme sequence
MEKFYIGADIGTNSVGIACTDENYNLLRIKGKDCWTVRLFDECKTAEERRGFRTSRRRTARRKQRINFLQSLFAPYMNDKTFFIRLNNSQFLPEDKSELLHGDKNTLFSGDYDDKKFHAEFPTIYHLRDKLMSGGIYDLRLYYLALHHIIKYRGHFLFEGSMEDVRDLGKLLNALNDAMVGVYGDELSLFDKSVAEEAKSVLLDDKLKIRDKQIELEKVFRVDDKIRKEIIKGLCGGKISPSILFGDEYKDEKNFSFKEISDEIFESMRDTYGDDFGLLCAIRSVYGFVTFEKLLEGHSSLSAAMIAVYEKHKNDLKRLKSFIKSERPEDYNKIFKSTEEKCNYVNYVGYTKKGGDKKKVKKCKDDEFYAYLKKYLSGLDDVKDAETRNAIIEEIEDGKFLPKILHSDNGLFPRQINESELNKIVGNMVKAYPETAAVEEKILTLFRFRIPYYVGPLSGENSWAVRKSDDKITPWNFYDVIDAAKSNEEFMRRMTNKCAYLQGEDVLPKASVLYQKFDTLNQLNKLRVNDEIISVELKKKIYNELFLVYPKVSDKKIKELLVREGRISPSDVNDTVLSGKDGEFKASMSSYIRLKKILGDFVDKDLSENGGVIENIILWHTLNTDKSIVENLIKSNYGKIPEIKNALPQLKGLTFNDFGRLSAKLLSGIYTIIAETGELRNIIDTLYETNENLNEILNDERYEFGRIINEENGQADEEVTYETVKKLYVSPAVRRGIWQAMSVTDEYVRAIGRAPDKIFIEVTRTDGKKGDAGRTQPRKRRLQEKFKALCNDGAFDDIIAELDDEKYTDMRLRQERLYLYFRQLGRCMYTGQRISLDDINDTNLYDVDHILPRTFIKDDSLDNKVLVLRSKNAQKSDTYPLPAGFSDQRGFWKLLLDKGLIEKVTYDRLTRTEPLREDEYRDFINRQKVITDQTVKAVAELMRRKYPTAKIVYSKAKNVSDFRKKFKLFKCRETNDLHHARDAYLNVVVGNVYDTVFSTPMAMFRKDGDVWRNYNLKKLFTREVKFAWNESSIAIVKKTYARPSMTVTRYAMCAKGGFYDQTIYGKGERGITAPRKANGPLSDMSKYGGYKSQSTAYFAIVSSTDKKGNKIKTIEAVPVLTAYQVNADEKSLLIYFSTYLTNPEILIPKIKSQQLVSFNGTPCYLTGVTGNQIKVKNAVQLFTDNKTDDYVNSLLNLEDMKSKKAVNVGDDKFLMKTDHTGAEKLVIDKATNIALYRDLMRRLGLKIYSGISAFATFAKNMKSGEDKFISLTVCDQATVLLQILKFFKCNAEISDITLIGGSGKSGTVLLNKNITDVDFEIIDLSPAGLIERVRKV

SEQ ID NO: 19792 - protein, 1336 aa, unidentified
  REGION 1..1336: note = Cas Enzyme sequence
MEKFYIGADIGTNSVGIACTDENYNLLRIKGKDCWTVRLFDECKTAEERRGFRTSRRRTARRKQRINFLQSLFAPYMNDKTFFIRLNNSQFLPEDKSELLHGDKNTLFSGDYDDKKFHAEFPTIYHLRDKLMSGGIYDLRLYYLALHHIIKYRGHFLFEGSMEDVRDLGKLLNALNDAMVGVYGDELSLFDKSVAEEAKSVLLDDKLKIRDKQIGLEKVFRVDDKIRKEIIKGLCGGKISPSILFGDEYKDEKNFSFKEISDEIFESMRDTYGDDFGLLCAIRSVYGFVTFEKLLEGHSSLSAAMIAVYEKHKNDLKRLKSFIKSERPEDYNKIFKSTEEKCNYVNYVGYTKKGGDKKKVKKCKDDEFYAYLKKYLSGLDDVKDAETRNAIIEEIEDGKFLPKILHSDNGLFPRQINESELNKIVGNMVKAYPETAAVEEKILTLFRFRIPYYVGPLSGENSWAVRKSDDKITPWNFYDVIDAAKSNEEFMRRMTNKCAYLQGEDVLPKASVLYQKFDTLNQLNKLRVNDEIISVELKKKIYNELFLVYPKVSDKKIKELLVREGCISPSDVNDTVLSGKDGEFKASMSSYIRLKKILGDFVDKDLSENGGVIENIILWHTLNTDKSIVENLIKSNYGKIPEIKNALPQLKGLTFNDFGRLSAKLLSGIYTVIAETGELRNIIDTLYETNENLNEILNDERYEFGRIINEENGQADEEVTYETVKKLYVSPAVRRGIWQAMSVTDEYVRAIGRAPDKIFIEVTRTDGKKGDTGRTQPRKRRLQEKFKALCNDGAFDDIIAELDDEKYTDMRLRQERLYLYFRQLGRCMYTGQRISLDDINDTNLYDVDHILPRTFIKDDSLDNKVLVLRSKNAQKSDTYPLPAGFSDQRGFWKLLLDKGLIEKVTYDRLTRTEPLREDEYRDFINRQKVITDQTVKAVAELMRRKYPTAKIVYSKAKNVSDFRKKFKLFKCRETNDLHHARDAYLNVVVGNVYDTVFSTPMAMFRKDGDVWRNYNLKKLFTREVKFAWNESSIAIVKKTYARPSMTVTRYAVCAKGGFYDQTIYGKGERGITAPRKANGPLSDMSKYGGYKSQSTAYFAIVSSTDKKGNKIKTIEAVPVLTAYQVNADEKSLLIYFSTYLTNPEILIPKIKSQQLVSFNGTPCYLTGVTGNQIKVKNAVQLFTDNKTDDYVNSLLNLEDMKSKKAVNVGDDKFVMKTDHTGAEKLVIDKATNIALYRDLMRRLGLKIYSGISAFATFAKNMKSGEDKFISLTVCDQATVLLQILKFFKCNAEISDITLIGGSGKSGTVLLNKNITDVDFEIINLSPAGLIERVRKV

SEQ ID NO: 19793 - protein, 1362 aa, unidentified
  REGION 1..1362: note = Cas Enzyme sequence
MKKREAYYLGLDIGTDSVGYAVTNQNYDLLKFKGEPMWGTHLFEGGQAAADRRLHRSSRRRIDRRQQRVSLINELFAGEIAKVDPYFFQRRKESSLYGDDSHYGVRMFGADTGLTDREYHEKYPTIHHLILELMISDEPHDIRLVYIACAWLVAHRGHFLFDIAPDRMDKLLDFDAVYSDFCQYLLDQNCTLPWESSVTADDILNILKMDAGVTRKKDAFKTRIYNGKKISKEYAEDFPYSREAMVTLLSGGSVKPGLLFDNETYGEIESVSLQMGDEDFDRIISELGDDGELLLKLRSMHNCVQLIATMSQKREQDPVCVSSSKVAIYEQHREDLKLLKRIVKRYCPQNYDEIFRSAQAGNYVSYTRNTKSCPEPNKVKGANKDVFCDYLKKKLKNLKVKAADKKAYENMMERLETRSFLPKQKDTDNRVIPQQLYRQELNEILRRAENYLPMLSDKDDTGLSVSEKILSVFDFRIPYYVGPLVKRSGSTAWIVRKQEKILPWNFSEVVDLDASEQQFIRNMINYCTYLPGKEVLPANSLLYEKFTVLNALNNLQVDGIQIPVAVKQALFTDLFLQQPRVTFRQIRNYLLSRGLITNGSLISGLDVTFKAGLKSYHIFKRMLCAGVLREADVEEIIRHAAFTEDKGRMKKWLKKEFPQLPEEDVAYILRQKLKEFGRLSGELLVDLYGTEVDSDGEAFTIMEALWNTNQNLMQLLSGKYTFADQISAYSREYYSDKPRNMDDFLSEMYVSNAGKRAIYRTWDIVQDVVKAKGGAPARIFVEMARGGTQDQKGKRTQSRKDQLLALYKTVKTEDSRKLENELQAMGTAADNRLQDRKLFLYYLQLGKCLYTGHPIDLTKLSDGTYNLDHIYPQSQVKDDSLLNNLVLVESNANGQKSDVYPVAKEIQEKMGAYWTMLRTNGLMTEEKHRRLIRTKPFTQDEKMGFINRQLVETRQSTKAITALLKEKFPDTQIVYVKAGLVSEFRQEFGLLKCRSVNDLHHAKDAYLNIVVGNVYDQRFTKNWFRVDQPYNVQAKKLFTASHRHGDLVYWDGEKDLAKVRKTVGKNAVHLTRYAFCRKGGLFDQQPVKKAPGLIPLKNGLPTERYGGYNKPTASCYVLARFMLDGKSEIMLVPVELHVRDAVLSDGNRLLKYVETTIESILEKCPQDTQLLLKGRILKINTVISLDGTMMTLAGKSSGGKNILLSPVAPLILSAEWERYAKCLESFRKKTEISKNLEPDEIHDGIFREKNVAFYRLLTEKLNAWPFVNYPGNQGQTLAQGIDKFAAEQTKVQITCLLNILTMMGPGAAAVDLTACGGTSKAGAKVINAKLSNWKKRYREVRIVDVSASGLFRKAGCNLLELL

SEQ ID NO: 19794 - protein, 1339 aa, unidentified
  REGION 1..1339: note = Cas Enzyme sequence
MVQDYYLGLDIGTGSLGWAVTDSNYQILKKHGKMLWGVRLFESAKTAEERRTFRTARRCLDRKNWRIKILQELFAEEISNTDTGFYLRMKESKYYPEDKLDSEGKCPELPYALFVDSDYTDKDFHKQFPTIYHLRKWLMETEETPDIRLVYLAIHHMMKHRGHFLLAGDISQIKEFDNTFKQFVKNLQIEELDWSIELDGEKIKRVENILKNRHITRTDKKTRLIKVLFAKSSCEKAILTLISGGTAKLSDIFGDKELDKAERPKVCFSDNGYDDYVTELESELGEQYYIIESAKSVYDWSMLVEILGDSSSISEAKVKIYEKHKKDLMYLKHVVREYLTPEEYQEIFVISDGKVSNYCSYIGMTKKNGKKIDLQGKKCSRQDFYDFLKKNVLKKISDSATVEYIEKEMACDTFLPKQVDSGNCVIPYQIHSYELKIILQNLSKKIPFIKEKAEKIIELFEFRVPYYVGPLNNIDAGKDSKFTWAVRKSREKIYPWNFEQVIDIEASAERFIRRMTNKCTYLAGEDVLPKDSLLYSKFMVLNELNNLKLNGIGIDLKLKQKLYEDLFCRYRKVTQKKLKKYLVTEGITDKNVEITGIDNDFKASLTAYHDFKEKLTDVHLSQNDKENIVLNIVLFGEDKKLLKRRLKKLYPDFTENQLKGLCSLNYSGWGRLSKTFLENIIIPAPETGEVWNIITALWETNENLNQLLSNKYTFMEEVNRYNEGEKKTDISYKTVEELYVSPAVKRQIWQTLKVVREICKVMGCEPKRVFIEMAREKQESKRTESRKSRLIDLYKSCKNEERNWISELESWSDQQYRSDKLYLYYTQKGKCMYSGEEIHIEDLWDNTKYDIDHIYPQSKTIDDSLDNRVLVKKIENETKSDIYPVKQDIYEKRKDFWNSLLQGGFISKEKYNRLIRRDKFTEDELAGFIERQIVETRQSTKAVAEILKQALNDSKIIYVKAATVTRFRQDFEFIKVREMNDLHHAKDAYLNVIVGNTYFVKFTQNAVAYIKNDHERSYNLKKLFKSKYDIKRNGETAWKAGENGTIVTVKKVMDKNNILVTRKAYEVNGGLFDRQIMKKGKGQIPIKGSDGRLADIEKYGGYNKATGAYFMLIKSKDKKGKEIRTLEFIPVYLKKDLQIEDNAIQYLIQEKGLKEPEILLKKVKIDTLFKVDGFKMWLSGRTGGQVIFKGAIQLILEKNDVETLKKVLKFVQRKKENKNINLVSADKVTEENLLHLYDAFLDKLKNSIYNKRLSAQLKTLGEKRGNFIKLCIEDKCIVLGEILHLFQCQSGSANLKSIGGPGNAGILLMNNNITGCNRISIINQSVTGIFEKEIDLLAL

SEQ ID NO: 19795 - protein, 1361 aa, unidentified
  REGION 1..1361: note = Cas Enzyme sequence
MEKKKYYLGLDIGTDSVGYAVSWEDYSLCKFHGEPMWGTTLFESANQCDDRRSFRTARRRLDRRQQRIHLLKEIFAQEIDQIDPNFFVRIKESALFAEDKTNIQDRNSIFNDPGYQDKQYHAEYPTIHHLICDLMHSDKPHDVRLVYIACAWLVAHRGHFLSDISMENINTILSFDEIYDAFLGYYTEHEYPVPWSCDINTFADVLKTKTGITAKTNLFKKLLNNGKAFKDPLSEHPCDRDSLIKLLSGGTVAPKIIFLKDQYAELESITLGKDEEKLEEILSSLDEEDTELIRILQKMADWAALVDILKDSSSISEGKVHVYDQHKSDLKLLKSFVNKYCPEKYKEIFNDTKGDLKNYAAYSYHYKTVATVNSEPPKRKATKEEFSKYLLSIVKKVTPKAKDKTFYDDMINRLELCTFLPKQVDSDNRVIPYQLYLYELQTLLNRAAGYLPWLTQKDRDNLSPKEKIISVFSFRVPYYVGPLRNDGNNKNAWMKKLSEKSGKIYPWNFDDIVDADACEQAFIDRMTNSCTYLPNETVLPKYSLLYCRFTVLNEINNIKINGIPITVEQKQLIYEECMKKHQRVSKKRVEDFCKSNGIMGKGDVLEGIDIQLTSTLKPYLDFMSLMQRGILSEEQIEDIILRSAYMEDTVRFSAWIQKKYPHIQENDVRYIVRKRYKDFGRLSAAFLNELEGSFKDTGETGTIMYFLWNTNNNLMQLLSDKFTFRDQIQQIRSDYYCDHPMTVQEHLEEMYVPNAVKRPIFRTLDIVKEVVHAQGYAPERIFVEMARGPEEKKRTKSRKDQLLELYKSAEEDTQELEKQLADMGDMAENNLQSEALYLYYLQLGRCMYTNTPLDLTKLKSDLYNIDHIYPQHYVKDDSIHNNKVLVLSTANADKGDIYPIAPAVREKMLPFWKKLHDNGLINDEKFKRLTRKTGFTDDEKLGFINRQLVETRQSTKAVATLLKELYPDTEIVYVKAGLVADFRHEFKLVKCRCVNDLHHAKDAYLNIVAGNVYHCRFTKNFRIEQKYSLKTKEIFTHNVVVNGDTVWKAGESLELVKRMCAKNSVHLTQYAFCRKGGLFDQMPLKAAEGLVPRKKGMDTAKYGGYNKKSASFFIPVKYTCGKNAYEITIMPVDLMVAEQFRNDGKFAAEYASQNLKEILGKAVSDVSFPLGMRILKINTVFSLDGLRVCLSGKANGGVKIILTSHTSLVLKNEQMMYVKKLESYAEKIKEKKSIRLSEKYDGINREQNVELYTVLGEKSENKILHKLPGNQSSIIKDGMRKFEKASLDEQVVCLLQLVALYKTGRSGGCDITCIGGAKNAGVVSLSSHISNWKKYFNDVHIIDQSASGLYESKSCNLLELL

SEQ ID NO: 19796 - protein, 1325 aa, unidentified
  REGION 1..1325: note = Cas Enzyme sequence
MKNFNDDYYTGFDIGTDSVGYAVADTDYNLCKFKGNAMWGVDLFEESNSAAERRTLRSARRRGLRKRNRIEWLQMLFDEEISKVDNAFYQRLKESCLYLDDKSSNVPYAVFADGNYTDKEFHTDYPTIYHLRKELIKSSQPHDIRLVYLALHHIIKHRGHFLFDNMGSDFESESSFEALFDDLKLYLKEECEIEFECNDSLRFSEILKDKTLKKTAKSSESYKLFGYSKRNNPYETALIDLMCGRKVKFSDMFGDKSFDSEEVNGITFESGYDDNENTYRDLLQEKFELIEKAKAVYDWAILADILNGEKYISFAKVKTYEEHSSDLKMLKDFVKERCKSLYGEIFRITKDKLDNYTAYCGKYKENGRNGVIQYRTNQADFCKYLKKKFEKLDKTGYEEMFDKIENGTFMPKIVVKDNGVIPMQVNRSELKAILKNASTYLEYLNKKDENGISVSDKIVKIFEFRIPYYVGPLNNHSLKSWLVRSDEKIYPWNFDSVVDIEQSAENFINNLTSKCTYLPTKDVIPKNSILYSAFTVLNELNNLRLDGKKPDVSLKQAIFNDLFMTHKKVRRKDLLNYLKSEKGVAFDITGIDGDFKSSMRSAIEMSQFNLTDSEKEDAIKAITVFGDDKKLLRKRLKRQLGSKLSDEDIMRISKLKYKDWGRLSKEFLTEVYNVDKNTGELQFNIIHALWQTNDNLMELLGSKYGFEQSRQNYLDGIQTGQSLEKMVENLYISPAVKRPVYQSLKIMHEINKIQGHAPKKIFVEMTRKDGVKGDKGRKESRKTKLVDLYKKCGEDSGELWESLEKTPDDEFKRDRLYFYYTQFGKCMYTGEPINLSELYNQNIYDVDHIFPRSKVKDDSLDNRALVKKQVNAHKDNTYPLDSSIREKMKGFWHLLMDKGLISKKKYERLTRVTPLSDSELSDFIARQIVETSQSTKAVASLFKELYPDTEIVYVKASTVSEFRHEYDFLKCREVNDFHHAKDAYLNIVVGNVYNERCTHNKSIFIEGLKTKAYSLNKMFSFNTPNAWSIDDNKSIKIVRKTMNKNNIRFTRYALTRNGGLFKMNPLKKGSGQVSLKQNSPLSDISKYGGYDKPTSSYFSFVKYEGKKGKEMRQLVAIDSYIKAQYEANPEKYLSETLGLKNPVVLIPVVKYNACIEIDGFRMHISAKTGKQIIYKPAMQLTVSYDTEKYIRNVVKLNSKPENYNITELDKVSTDENIELFDILTYKMTDTVLKVKFGDMGAKIISHRDAFEKLDIRKQCFVLTEILKIIHCNAVLGNLTYIGEGSSSGRVGLNSVLSEVKGVKSIYLVHQSVTGLFEKKIDLLHM

SEQ ID NO: 19797 - protein, 1325 aa, unidentified
  REGION 1..1325: note = Cas Enzyme sequence
MKNFNDDYYTGFDIGTDSVGYAVADTDYNLCKFKGNAMWGVDLFEESNSAAERRTLRSARRRGLRKRNRIEWLQMLFDEEISKVDNAFYQRLKESCLYLDDKSSNVPYAVFADGNYTDKEFHTDYPTIYHLRKELIKSSQPHDIRLVYLALHHIIKHRGHFLFDNMGSDFESESSFEALFDDLKLYLKEECEIEFECNDSLRFSEILKDKTLKKTAKSSESYKLFGYSKRNNPYETALIDLMCGRKVKFSDMFGDKSFDSEEVNGITFESGYDDNENTYRDLLQEKFELIEKAKAVYDWAILADILNGEKYISFAKVKTYEEHSSDLKMLKDFVKERCKSLYGEIFRITKDKLDNYTAYCGKYKENGRNGVIQYRTNQADFCKYLKKKFEKLDKTGYEEMFDKIENGTFMPKIVVKDNGVIPMQVNRSELKAILKNASTYLEFLNKKDENGISVSDKIVKIFEFRIPYYVGPLNNHSLKSWLVRSDEKIYPWNFDSVVDIEQSAENFINNLTSKCTYLPTKDVIPKNSILYSAFTVLNELNNLRLDGKKPDVSLKQAIFNDLFMTHKKVRRKDLLNYLKSEKGVAFDITGIDGDFKSSMRSAIEMSQFNLTDSEKEDAIKAITVFGDDKKLLRKRLKRQLGSKLSDEDIMRISKLKYKDWGRLSKEFLTEVYNVDKNTGELQFNIIHALWQTNDNLMELLGSKYGFEQSRQNYLDGIQTGQSLEKMVENLYISPAVKRPVYQSLKIMHEINKIQGHAPKKIFVEMTRKDGVKGDKGRKESRKTKLVDLYKKCGEDSGELWESLEKTPDDEFKRDRLYFYYTQFGKCMYTGEPINLSELYNQNIYDVDHIFPRSKVKDDSLDNRALVKKQVNAHKDNTYPLDSSIREKMKGFWHLLMDKGLISKKKYERLTRVTPLSDSELSDFIARQIVETSQSTKAVASLFKELYPDTEIVYVKASTVSEFRHEYDFLKCREVNDFHHAKDAYLNIVVGNVYNERCTHNKSIFIKGLQTKTYSLNKMFSFNTPNAWSIDDNKSIKIVRKTMNKNNIRFTRYALTRNGGLFKMNPLKKGSGQVSLKQNSPLSDISKYGGYDKPASSYFSFVKYEGKKGKEMRQLVAIDSYIKARYEANPEKYLSETLGLKNPVVLIPVVKYNACIEIDGFRMHISAKTGKQIIYKPAMQLTVSYDTEKYIRNVVKLNSKPENYNITELDKVSADENLKLFDILTYKMTDTVLKVKFGDMGVKIASHRDAFEKLDIRKQCFVLTEILKIIHCNAVLGNLTYIGEGSSSGRVGLNSVLSEIKGVKSIYLVHQSVTGLFEKKIDLLHM

SEQ ID NO: 19798 - protein, 1327 aa, unidentified
  REGION 1..1327: note = Cas Enzyme sequence
MKNFNDDYYTGFDIGTDSVGYAVADTDYNLCKFKGNAMWGVDLFEESNSAAERRTLRSARRRGLRKRNRIEWLQMLFDEEISKVDNAFYQRLKESCLYLDDKSSNVPYAVFADGNYTDKEFHTDYPTIYHLRKELIKSSQPHDIRLVYLALHHIIKHRGHFLFDNMGSDFESESSFEALFDDLKLYLKEEYEIEFECNDSLRFSEILKDKTLKKTAKSSESYKLFGYSKRNNPYETALIDLMCGRKVKFSDMFGDKSFDSEEVNGITFESGYDDNENTYRDLLQEKFELIEKAKAVYDWAILADILNGEKYISFAKVKTYEEHNSDLKTLKKFVKERCKPLYGEIFRITKDKLDNYTAYCGKYKENGRNGVIQYRTNQADFCKYLKKKFEKLDKTGYEEMFDKIENGTFMPKIVVKDNGVIPMQVNRSELKAILKNASTYLEFLNKKDENGISVSDKIVKIFEFRIPYYVGPLNNHSLKFWLVRSDEKIYPWNFDSVVDIEQSAENFINNLTSKCTYLPTKDVIPKNSILYSAFTVLNELNNLRLDGKKPDVSLKQAIFNDLFMTHKKVRRKDLLNYLKSEKGITPDITGIDGDFKSSMRSAIEMSQFNLTDSEKEDAIKAITVFGDDKKLLKKRLKRQLGSKLSDEDIMRISKLKYKDWGRLSKEFLTEVYNVDKNTGELQFNIIHALWQTNDNLMELLGSKYGFEQSRQNYLDGIQTGQSLEKMVENLYISPAVKRPVYQSLKIMHEINKIQGHAPKKIFVEMTRKDGVKGDKGRKESRKTKLVDLYKKCGEDSGELWESLEKTPDDEFKRDRLYFYYTQFGKCMYTGEPINLSELYNQNIYDVDHIFPRSKVKDDSLDNRVLVKKQVNAHKDNTYPLDSSIREKMKGFWHLLMDKGLISKKKYERLTRATELTDSELSDFIARQIVETSQSTKAVASLFKELYPDTEIVYVKASTVSEFRHEYDFLKCREVNDFHHAKDAYLNIVVGNVYNERCTHNKSIFIKGLQTKTYSLNKMFSFNTPNAWSIDDNKSIKIVRKTMNKNNIRFTRYALTRNGGLFKMNPLKKGSGQVSLKQNSPLSDISKYGGYDKPASSYFSFVKYEGKKGKEMRQLVAIDSYIKARYEANPEKYLSENLGLKNPVVLIPVVKYNACIEIDGFRMHISSKSSGGKQIVYKPAMQLTVSYDTEKYIRNIVKLNSMPENYNIKELDKVSTDENLKLFDILTSKMTDTILKVKFGDMGVKIASHRDAFEKLDVRKQCFVLAEILKIIHSNVVTGDLSFIGESKKSGVVSTNSVLSEVKGVKSIYLVHQSVTGLFEKKIDLLNI

SEQ ID NO: 19799 - protein, 1327 aa, unidentified
  REGION 1..1327: note = Cas Enzyme sequence
MKNFNDDYYVGFDIGTDSVGHAVADTDYNLCKFKGNAMWGVDLFEESNSAAERRTLRSARRRGLRKRNRIEWLQMLFDEEISKVDNAFYQRLKESCLYLDDKSSNVPYAVFADGNYTDKEFHTDYPTIYHLRKELIKSSQPHDIRLVYLALHHIIKHRGHFLFDNMGSDFESESSFEALFDDLKLYLKEEYEIEFECNDSLRFSEILKDKTLKKTAKSSESYKLFGYSKRNNPYETALIDLMCGRKVKFSDMFGDKSFDSEEVNGITFESGYDDNENTYRDLLQEKFELIEKAKAVYDWAILADILNGEKYISFAKVKTYEEHSSDLKMLKDFVKERCKLLYGEIFRITKDKLDNYTAYCGKYKENGRNGVIQYRTNQADFCKYLKKKFEKLDKTGYEEMFDKIENGTFMPKIVVKDNGVIPMQVNRSELKAILKNASTYLEFLNNKDENGISVSDKIVKIFEFRIPYYVGPLNNHSLKFWLVRSNEKIYPWNFDSVVDIEQSAENFINNLTSKCTYLPTKDVIPKNSILYSAFTVLNELNNLRLDGKKPDVSLKQAIFNDLFMTHKKVRRKDLLNYLKSEKGVAFDITGIDGNFKSSMRSAIEMSQFNLTDSEKEDAIKAITVFGDDKKLLRKRLKRQLGSKLSDEDIMRISKLKYKDWGRLSKEFLTEVYNVDKNTGELQFNIIHALWQTNDNLMELLGSKYGFEQSRQNYLDGIQTGQSLEKMVENLYISPAVKRPVYQSLKIMHEINKIQGHAPKKIFVEMTRKDGVKGDKGRKESRKTKLVDLYKKCGEDSGELWESLEKTPDDEFKRDRLYFYYTQFGKCMYTGEPINLSELYNQNIYDVDHIFPRSKVKDDSLDNRVLVKKQVNAHKDNTYPLDSSIREKMKGFWHLLMDKGLISKKKHERLTRATTLSDSELSDFIARQIVETSQSTKAVASLFKELYPDTEIVYVKASTVSEFRHEYDFLKCREVNDFHHAKDAYLNIVVGNVYNERCTHNKSIFIEGLKNKAYSLNKMFSFNTPNAWSIDDNKSIKIVRKTMNKNNIRFTRYALTRNGGLFKMNPLKKGSGQVSLKQNSPLSDISKYGGYDKPASSYFSFVKYEGKKGKEMRQLVAIDSYIKARYEANPEKYLSETLGLKNPVVLIPVVKYNACIEIDGFRMHISSKSNGGKKIVYKPAMQLTVSYDTEKYIRNVVKLNSKPENYNITELDKVSAEENVELFDILIFKMTDTILKVKFGDMGVKIASHRDTFEKLDVRKQCFVLAEILKIIHSNVVTGDLTLIDEAKKAGVVSTNSVLSEIKSVKSIYLVHQSVTGLFEKKIDLLNM

SEQ ID NO: 19800 - protein, 1327 aa, unidentified
  REGION 1..1327: note = Cas Enzyme sequence
MKNFNNDYYAGFDIGTDSVGYVVADTDYNLCKFKGNAMWGVDLFEESNSAAERRTLRSARRRGLRKRNRIEWLQMLFDQEISKVDNAFFQRLKESCLYIDDKSSNVPYAVFADGNYTDKEFHTDYPTIYHLRKELIKSSQPHDIRLVYLALHHIIKHRGHFLFDNMGSDFESESSFEALFDDLKFYLKEEYEIEFECNDSLRFSEILKDKTLKKTAKSSESYKLFGYSKRNNPYETALIDLMCGRKVKFSDMFGDKSFDSEEVNGITFESGYDDNENTYRDLLQEKFELIEKAKAVYDWAILADILNGEKYISFAKVKIYEEHNSDLKMLKDFVKERCKSLYGEIFRITKDKLDNYTAYCGKYKENGRNGVIQYRTNQADFCKYLKKKCEKLDKTGYEEMFDKIENGTFMPKIVVKDNGVIPMQVNRSELKAILKNASTYLEFLNKKDENGISVSDKIVKIFEFRIPYYVGPLNNHSLKSWLVRSDEKIYPWNFDSVVDIEQSAENFINNLTSKCTYLPTKDVIPKNSILYSAFTVLNELNNLRLDGKKPDVSLKQAIFNDLFMTHKKVRRKDLLNYLKSEKGITPDITGIDGDFKSSMRSAIEMSQFNLTDSEKEDAIKAITVFGDDKKLLRKRLKRQLGSKLSDEDIMRISKLKYKDWGRLSKEFLTEVYNVDKNTGELQFNIIHALWQTNDNLMELLGSKYGFEQSRQNYLDGIQTGQSLEKMVENLYISPAVKRPVYQSLKIMHEINKIQGHAPKKIFVEMTRKDGVKGDKGRKESRKTKLVDLYKKCGEDSGELWESLEKTPDDEFKRDRLYFYYTQFGKCMYTGEPINLSQLYNQNIYDVDHIFPRSKVKDDSLDNRVLVKKQVNAHKDNTYPLDSSIREKTKGFWHLLMDKGLISKKKYERLTRATELTDSELSDFIARQIVETSQSTKAVASLFKELYPDTEIVYVKASTVSEFRHEYDFLKCREVNDFHHAKDAYLNIVVGNVYNERCTHNKSIFIKGLQTKTYSLNKMFSFNTPNAWSIDDNKSIKIVRKTMNKNNIRFTRYALTRNGGLFKMNPLKKGSGQVSLKQNSPLSDISKYGGYDKPTSSYFSFVKYEGKKGKEMRRLVAIDSYIKARYEANPEKYLSETLGLKNPVVLIPVVKYNACIEIDGFRMHISSKSSGGKQIVYKPAMQLTVSYDTEKYIRNIVKLNSMPENYNITERDKVSADENLKLFDILTSKMTDTILKVKFGDMGVKIASHRDAFEKLDVRKQCFVLAEILKIIHCNILEGDLTFVGGAKQSGSIKMSSVISGIKGVKSIYLVHQSVTGLFEKKIDLLNM

SEQ ID NO: 19801 - protein, 1328 aa, unidentified
  REGION 1..1328: note = Cas Enzyme sequence
MKNFNDDYYAGFDIGTDSVGYAVADTDYNLCKFKGNAMWGVDLFEESNSAAERRTLRSARRRGLRKRNRIEWLQMLFDEEISKVDNAFFQRLKESCLYLDDKSSNVPYAVFADGNYTDKEFHTDYPTIYHLRKELIESSQPHDVRLVYLALHHIIKHRGHFLFDNMGSDFESESSFEALFDDLKLYLKEEYDIEFECNDSLRFSEILKDKTLKKTAKSSESYKLFGYSKRNNPYETALIDLMCGRKVKFSDMFGDKSFDSEEVNGITFESGYDDNENTYRDLLQEKFELIEKAKAVYDWAILADILNGEKYISFAKVKTYEEHNSDLKMLKDFVKERCKSLYGEIFRITKDKLDNYTAYCGKYKENGRNGVIQYRTNQADFCKYLKKKFEKLDKTGYEEMFDKIENGTFMPKIVVKDNGVIPMQVNRSELKAILKNASTYLEFLNKKDENGISVSDKIVKIFEFRIPYYVGPLNNHSLKFWLVRSDEKIYPWNFDSVVDIEQSAENFINNLTSKCTYLPTKDVIPKNSILYSAFTVLNELNNLRLDGKKPDVSLKQSIFNDLFMTHKKVRRKDLLNYLKSEKGITPDITGIDGDFKSSMRSAIEMSQFNLTDSEKEDAIKAITVFGDDKKLLRKRLKRQLGSKLSDEDIMRISKFKYKDWGRLSKEFLTEVYNVDKNTGELQFNIIHALWQTNDNLMELLGSKYGFEQSRQNYLDGIQTGQSLEKMVENLYISPAVKRPVYQSLKIMHEINKIQGHAPKKIFVEMTRKDGVKGDNGRKESRKTKLVDLYKKCGEDSGELWESLEKTPDDEFKRDRLYFYYTQFGKCMYTGEPINLSELYNQNIYDVDHIFPRSKVKDDSLDNRVLVKKQVNAHKDNTYPIDSSIREKMKGFWHFLMDKGLISKKKYERLTRATELTDSELSDFIARQIVETSQSTKAVASLFKELYPDTEIVYVKASLVSEFRDESRGFGFLKCREVNDFHHAKDAYLNIVVGNVYNERCTHNKSIFIKGLQTKKYSLNKMFSFNTPNAWSIDDNKSIKIVRKTMNKNNIRFTRYALTRNGGLFKMNPLKKGSGQVSLKQNSPLSDISKYGGYDKPTSSYFSFVKYEGKKDKEMRQLVAIDSYIKARYEANPEKYLSETLGLKNPVVLIPVVKYNACIEIDGFRMHISAKTGKQIIYKPAMQLTVSYDTEKYIRNVVKLNSKPENYNITERDKVSIDENLKLFDILTSKMTDTILKVKFGDMGVKIASHRDDFEKLDVRKQCFVLTEILKIIHCNAVLGNLTYIGEGSSSGRVGLNSVLSEVKGVKSIYLVHQSVTGLFEKKIDLLHM

SEQ ID NO: 19802 - protein, 1116 aa, unidentified
  REGION 1..1116: note = Cas Enzyme sequence
LKKTAKSSESYKLFGYSKRNNPYETALIDLMCGRKVKFSDMFGDKSFDSEEVNGITFESGYDDNENTYRDLLQEKFELIEKAKAVYDWAILADILNGEKYISFAKVKTYEEHNSDLKMLKDFVKERCKSLYGEIFRITKDKLDNYTAYCGKYKENGRNGVIQYRTNQADFCKYLKKKFEKLDKTGYEEMFDKIENGTFMPKIVVKDNGVIPMQVNRSELKAILKNASTYLEFLNKKDENGISVSDKIVKIFEFRIPYYVGPLNNHSLKSWLVRSDEKIYPWNFDSVVDIEQSAENFINNLTSKCTYLPTKDVIPKNSILYSAFTVLNELNNLRLDGKKPDVSLKQAIFNDLFMTHKKVRRKDLLNYLKSEKGITPDITGIDGDFKSSMRSAIEMSQFNLTDSEKEDAIKAITVFGDDKKLLRKRLKRQLGSKLSDEDIMRISKLKYKDWGRLSKEFLTEVYNVDKNTGELQFNIIHALWQTNDNLMELLGSKYGFEQSRQNYLDGIQTGQSLEKMVENLYISPAVKRPVYQSLKIMHEINKIQGHAPKKIFVEMTRKDGVKGDKGRKDSRKTKLVDLYKKCGEDSGELWESLEKTPDDEFKRDRLYFYYTQFGKCMYTGEPINLSELYNQNIYDVDHIFPRSKVKDDSLDNRVLVKKQVNAHKDNTYPLDSSIHEKMKGFWHLLMDKGLISKKKYERLTRATPLSDSELSDFIARQIVETSQSTKAVASLFKELYPDTEIVYVKASTVSEFRHEYDFLKCREVNDFHHAKDAYLNIVVGNVYNERCTHNKSIFIEGLKTKDYSLNKMFSFNTPNAWSIDDNKSIKIVRKTMNKNNIRFTRYALTRNGGLFKMNPLKKGSGQVSLKQNSPLSDISKYGGYDKPASSYFSFVKYEGKKGKEMRRLVAIDSYIKARYEANPEKYLSETLGLKNPVVLIPVVKYNACIEIDGFRMHISSKSNGGKKIVYKPAMQLTVSYDTEKYIRNVVKLNSMPENYNITERDKVSTDGNIELFDILIFKMTDTILKVKFGDMGVKIAAHRDAFEKLDVRKQCFVLAEILKIIHSNVVTGDLTLIDEAKKAGVVSTNSVLSEIKGVKSIYLVHQSVTGLFEKKIDLLHM

SEQ ID NO: 19803 - protein, 1325 aa, unidentified
  REGION 1..1325: note = Cas Enzyme sequence
MKNFNNDYYAGFDIGTDSVGYAVSDTDYNLCKFKGNAMWGVDLFEESNSAAERRTLRSARRRGLRKRNRIEWLQMLFDQEISKVDNAFFQRLKESCLYLDDKSSNVPYAVFADGNYTDKEFHTDYPTIYHLRKELIKSSQPHDIRLVYLTLHHIIKHRGHFLFDNMGSDFESESSFETLFDDLKLYLKEEYEIEFECNDSLRFSEILKDKTLKKTAKSSESYKLFGYSKRNNPYETTLIDLMCGRKVKFSDMFGDKSFDSEEVNGITFESGYDDNENTYRDLLQEKFELIEKAKAVYDWAILADILNGEKYISFAKVKTYEEHNSDLKMLKDFVKERCKSLYGEIFRITKDKLDNYTAYCGKYKENGRNGVIQYRTNQADFCKYLKKKFEKLDKTGYEEMFDKIENGTFMPKIVVKDNGVIPMQVNRSELKAILKNASTYLEFLNKKDENGISVSDKIVKIFEFRIPYYVGPLNNHSLKSWLVRSDEKIYPWNFDSVVDIEQSAENFINNLTSKCTYLPTKDVIPKNSILYSAFTVLNELNNLRLDGKKPDVSLKQAIFNDLFMTHKKVRRKDLLNYLKSEKGITPDITGIDGDFKSSMRSAIEMSQFNLTDSEKEDAIKAITVFGDDKKLLRKRLKRQLGSKLSDEDIMRISKLKYKDWGRFSKEFLTEVYNVDKNTGELQFNIIHALWQTNDNLMELLGSKYGFEQSRQNYLDGIQTGQSLEKMVENLYISPAVKRPVYQSLKIMHEINKIQGHAPKKIFVEMTRKDGVKGDKGRKESRKTKLVDLYKKCGEDSGELWESLEKTPDDEFKRDRLYFYYTQFGKCMYTGEPITLSELYNKNIYEVDHIFPRSKVKDDSLDNRVLVKKQVNAHKDNTYPLDSSIREKMKGFWHLLMDKGLISKKKYERLTRATPLSESELSDFIARQIVETSQSTKAVASLFKELYPDTEIVYVKASTVSEFRHEYDFLKCREVNDFHHTKDAYLNIVVGNVYNERCTHNKSIFIEGLKTKAYSLNKMFSFNTPNAWSIDDNKSIKIVRKTMNKNNIRFTRYALTRNGGLFKMNPLKKGSGQVSLKQNSPLSDISKYGGYDKPASSYFSFVKYEGKKGKEMRQLVAIDSYIKAQYEANPEKYLSETLGLKNPVVLIPVVKYNACIEIDGFRMHISAKTGKQIIYKPAMQLTVSYDTEKYIRNVVKLNSKPENYNITELDKVSADENLRLFDILTSKMTDTILKVKFGDMGVKIASHRDAFEKLDIRKQCFVLTEILKIIHCNAVLGNLTYIGEGSSSGRVGLNSVLSEVKDVNSIYLVHQSVTGLFEKKIDLLHM

SEQ ID NO: 19804 - protein, 1325 aa, unidentified
  REGION 1..1325: note = Cas Enzyme sequence
MKNFNNDYYAGFDIGTDSVGYAVSDTDYNLCKFKGNAMWGVDLFEESNSAAERRTLRSARRRGLRKRNRIEWLQMLFDQEISKVDNAFFQRLKESCLYLDDKSSNVPYAVFADGNYTDKEFHTDYPTIYHLRKELIKSSQPHDIRLVYLTLHHIIKHRGHFLFDNMGSDFESESSFETLFDDLKLYLKEEYEIEFECNDSLRFSEILKDKTLKKTAKSSESYKLFGYSKRNNPYETTLIDLMCGRKVKFSDMFGDKSFDSEEVNGITFESGYDDNENTYRDLLQEKFELIEKAKAVYDWAILADILNGEKYISFAKVKTYEEHNSDLKMLKDFVKERCKSLYGEIFRITKDKLDNYTAYCGKYKENGRNGVIQYRTNQADFCKYLKKKFEKLDKTGYEEMFDKIENGTFMPKIVVKDNGVIPMQVNRSELKAILKNASTYLEFLNKKDENGISVSDKIVKIFEFRIPYYVGPLNNHSLKSWLVRSDEKIYPWNFDSVVDIEQSAENFINNLTSKCTYLPTKDVIPKNSILYSAFTVLNELNNLRLDGKKPDVSLKQAIFNDLFMTHKKVRRKDLLNYLKSEKGITPDITGIDGDFKSSMRSAIEMSQFNLTDSEKEDAIKAITVFGDDKKLLRKRLKRQLGSKLSDEDIMRISKLKYKDWGRFSKEFLTEVYNVDKNTGELQFNIIHALWQTNDNLMELLGSKYGFEQSRQNYLDGIQTGQSLEKMVENLYISPAVKRPVYQSLKIMHEINKIQGHAPKKIFVEMTRKDGVKGDKGRKESRKTKLVDLYKKCGEDSGELWESLEKTPDDEFKRDRLYFYYTQFGKCMYTGEPITLSELYNKNIYEVDHIFPRSKVKDDSLDNRVLVKKQVNAHKDNTYPLDSSIREKMKGFWHLLMDKGLISKKKYERLTRATPLSDSELSDFIARQIVETSQSTKAVASLFKELYPDTEIVYVKASTVSEFRHEYDFLKCREVNDFHHTKDAYLNIVVGNVYNERCTHNKSIFIEGLKTKAYSLNKMFSFNTPNAWSIDDNKSIKIVRKTMNKNNIRFTRYALTRNGGLFKMNPLKKGSGQVSLKQNSPLSDISKYGGYDKPASSYFSFVKYEGKKGKEMRQLVAIDSYIKAQYEANPEKYLSETLGLKNPVVLIPVVKYNACIEIDGFRMHISAKTGKQIIYKPAMQLTVSYDTEKYIRNVVKLNSKPENYNITELDKVSADENLRLFDILTSKMTDTILKVKFGDMGVKIASHRDAFEKLDIRKQCFVLTEILKIIHCNAVLGNLTYIGEGSSSGRVGLNSVLSEVKDVNSIYLVHQSVTGLFEKKIDLLHM

SEQ ID NO: 19805 - protein, 1325 aa, unidentified
  REGION 1..1325: note = Cas Enzyme sequence
MKNFNDDYYVGFDIGTDSVGHAVADTDYNLCKFKGNAMWGVDLFEESNSAAERRTLRSARRRGLRKRNRIEWLQMLFDEEISKVDNAFYQRLKESCLYLDDKSSNVPYAVFADGNYTDKEFHTDYPTIYHLRKELIKSSQPHDIRLVYLALHHIIKHRGHFLFDNMGSDFESESSFEALFDDLKLYLKEEYEIEFECNDSLRFSEILKDKTLKKTAKSSESYKLFGYSKRNNPYETALIDLMCGRKVKFSDMFGDKSFDSEEVNGITFESGYDDNENTYRDLLQEKFELIEKAKAVYDWAILADILNGEKYISFAKVKTYEEHSSDLKMLKDFVKERCKLLYGEIFRITKDKLDNYTAYCGKYKENGRNGVIQYRTNQADFCKYLKKKFEKLDKTGYEEMFDKIENGTFMPKIVVKDNGVIPMQVNRSELKAILKNASTYLEFLNNKDENGISVSDKIVKIFEFRIPYYVGPLNNHSLKFWLVRSNEKIYPWNFDSVVDIEQSAENFINNLTSKCTYLPTKDVIPKNSILYSAFTVLNELNNLRLDGKKPDVSLKQAIFNDLFMTHKKVRRKDLLNYLKSEKGVAFDITGIDGNFKSSMRSAIEMSQFNLTDSEKEDAIKAITVFGDDKKLLRKRLKRQLGSKLSDEDIMRISKLKYKDWGRLSKEFLTEVYNVDKNTGELQFNIIHALWQTNDNLMELLGSKYGFEQSRQNYLDGIQTGQSLEKMVENLYISPAVKRPVYQSLKIMHEINKIQGHAPKKIFVEMTRKDGVKGDKGRKESRKTKLVDLYKKCGEDSGELWKSIEKTPDDEFKRDRLYFYYTQFGKCMYTGEPINLSELYNQNIYDVDHIFPRSKVKDDSLDNRVLVKKQVNAHKDNTYPLDSSIREKMKGFWHLLMDKGLISKKKYERLTRATPLSDSELSDFIARQIVETSQSTKAVASLFKELYPDTEIVYVKASTVSEFRHEYDFLKCREVNDFHHAKDAYLNIVVGNVYNERCTHNKSIFIKGLQTKTYSLNKMFSFNTPNAWSIDDNKSIKIVRKTMNKNNIRFTRYALTRNGGLFKMNPLKKGSGQVSLKQNSPFSDISKYGGYDKPASSYFSFVKYEGKKGKEMRQLVAIDSYIKARYEANPEKYLSETLGLKNPVVLIPVVKYNACIEIDGFRMHISAKTGKQIIYKPAMQLTVSYDTEKYIRNVVKLNSKPENYNITELDKVSADENLKLFDILTYKMTDTVLKVKFGDMGVKIASHRDAFEKLDIRKQCFVLTEILKIIHCNAVLGNLTYIGEGSSSGRVGLNSVLSEIKGVKSIYLVHQSVTGLFEKKIDLLHM

SEQ ID NO: 19806 - protein, 1387 aa, unidentified
  REGION 1..1387: note = Cas Enzyme sequence
MNLRDADSYNVGLDLGTGSVGWAVTDEDGELLHFKGRPTWGSRVFPSGKPAAQTRLARGQRRRYERRRWRLNLLQDMFREEMAGIDDEFFIRLNQSRLHPEDRMDGHADYRWPFFNATDFTERDYYAKFPTIYHLRAWLMQTNDQADLRLIYLAFHNIVKTRGNFLHQDNRKLSASNADMTSSIETLCLTLTDWCDAHDIETSCCDHIEDMCKTLEDPTTNRGEKQSAIQDQLCFDKENRKTLGAQISKAIIGYKAEFASIFFEEADESKFSLSNDDAVEAYLSHIPDDGMALFDAIRGVYSAFILSGILSFGGDRPIKSGILKGSTGKTISYCKVREYEQYNSDLTLLKALTRKFAPDKFNEFFRGEFYPGTHNYDPSKAKGYTKYNLLRAGASYDDFKKNVIKLFEGTQAAADPQYKKMMASFGEERFLRRLKTSDNGSIPYQLHLEEMNAIITNQGHFYPFLLAQRDKIESLVSFRIPYYVGPLTQKNAARDQDGKLRFAWSVHRQGKENEPVYPWNWDQVIDKNRSAQKFIERMTSDCTYLVDEPVLPKCSLLYEEYCVLNELNGTHYSADGDKQRRFDCADRQGIIDDLFKQKHLVTYKSVEDWMRENRKWTSIHVSGGQGETKFESNLSSYRFFCKDVFHVDELPESLVPKVEQIILWNTLFEDRSILKEELKRNFGDILSAEQVKTICHRRFRGWGRLSRKFLIGLKTDTDHGPKSIMDIMREGCPTSGESYRQSMVLMEIIHDSNLDFMQLIEQENQKKLAAKGKFEVNDLPGSPANRRTVNQATRIVEEIARIAGKAPTHIFIETTRDEDPKNKGKRTKRRWEKLNDTLKAFKDENSELIKEFEERNAKEFDDDRLMLYFMQGGKSLYSGKPIDIERLSEYQIDHIIPQSYIKDDSLENKALVLSKENQSKTNSLLISPSIRQRMAGYWRELHRLGLIGDKKFNNLLCSNISDRKIKGFISRQLVETSQSTKLTKIMLENRFPETRVLGIRAGLSHELREVKHYPKCREINDFHHAHDALLAAEIGRFLLKRHSEMYDNPVGYAHVVRNFIHAEALEASRTGHMPSSAGFIISSFLHSGFDKGTGEVFKDSWDAEYECERIGKFFNYKQVFISRMPEETNGAFWDATVYSPRDKSKKISSSSLPVKQGLDPAKYGAFSNEQFAYFFIYKEKDKKGKCQLVFSSVPVRISAQIELGGIKALENYAKKEAAEHGAEFVGVIRNKIYKYQQIEIGSDRFFITGKKEVRNARQFAFTQDETELFTQIKRGFFTDEMDLESLFGTLQDKFIKLSPKLAQILKISSIGDSFSKLDKSAQAKVLCSLVSIAAAKTNMIDMTLVGGSKTAGCIRIAKKKYLNNEEGITFVDQSVTGMFERRTHIGL

SEQ ID NO: 19807 - protein, 1380 aa, unidentified
  REGION 1..1380: note = Cas Enzyme sequence
MENKELRLGLDLGTNSVGWALLNEKNQLVKKNGFTFWGVRMFDEANTAAERRGYRTARRRLNRRKYRLDLLKEIFTEPLNAIDPTFFQRLEDSFYKIEDKTNPNYYNLFTDHYTDQEYFRLYPTIYHLRAHLIHATEQEDIRLIYLAIHHIMKYRGNFLLSGDEFKISDFSQIKDAFSTLRETINELKYSFEEEEDFKEQYFDVPQEELDESFFNELQRILELKDLKERKNQLRLLWKVDKKSIISEAIIPLLAGAEKIDMAALSVVKGRKYEKCEISLLNEDLDGAIDNCKACIPELSPLSAYFLELKKVVDYFYISKILKDPNTTYSEAMVKRYEDHQKDLKRLKKFIKKYASEKYSDLFRKTQKHNYPNYVGFNSVEGKPITRGSHCTRLEFYAYLKEKILEGITVEEAQEEKNYFITKMENNELLLRQNSNQNGAFPMQLHLTELKMILDRQKKYYPFLNKKKDGLTNEEKIIALFKFKIPYYVGPLDPNSPYSWLCKKSNEKITPWNFNQVVDLDETAGRFIKRMQNKCTYLKGPEDYCLPKKSIIFSEFNCLSYLNKINLNGKVIPIDIKQELFNQIFLKKKDPTKKNIIDYLKANYGEQSVSSSVAKELPDVNCNMASYIKFKEIFGDDLKENMDMVENIIRDITIFEDKNILEQRLRLKYGLSEDRIKKIKDLNYNGYSRLSKNLLVSLPVSNAETGEVIGSVLEVMRQTNMNLQEILYKEEYQFTKTIDAYNEPFIHSSDGVASILDEQPFLSPGFKRPVIQAFAIIDEIEEIFKRKIDKFYIECSRTNKAKKQVTTSRYHKIKDLYKACQNLAADYNINLKALNHTLDNHKDQLKSDLIYLYFTQLGLSLYTLEPIDIDDLSKNNSRYDIDHIYPQALIKDDSLSNRVLTEKGKNEDKKSHFLFELPGFLPKKANLFYHKLLELDLISKEKYKRLTEKELTSELDGFVNRQLVSTNQAVKALAESLKIYKGIGSANIIYSKAENISDFRNDFHLVKSRLANNFHHAHDAYLNVIVGGTLSEYYNQFIYSKANYERLKSENRTLNPQKIMKKDTIRIKQKLIWDKASMIKQIKYDLYERYDIHETVRTFHSHEMFKKVTISKAGLSQNIIPTKTTSPRADTSKYGGITSNAYSKYLIVEYSEKNKQKVKLTAIPKIFENNIGNYLQTNLKTTNYKIVHPDIKTNVVVEKNALKFCITGVSGDKFLLQNLRDRFFGYSYLNTIKKIEKFYRQKKKSEPMLIEQNRIVISAAKNDRCEEIALERLEVEALLLYLKTMYQKPIYQYSVIQKIFREININHSEAFKTLDFEKLIELIYQLLSLLKTNERKTADLEYFGGKKKTGKLYFNSILENGTKFIAESPTGYYRKVLFEVK

SEQ ID NO: 19808 - protein, 943 aa, unidentified
  REGION 1..943: note = Cas Enzyme sequence
FKRVWEGAGLAIPDTSVLTKEFTDDGDFIHTSCLLRLLLFEGQSLEPFQIYKALSNIIQRRGYDSNIPWKASHDDADDEESSDMVNDYIKLIDESIKNKKYRYPCYLSALRMGLWDEKRGIISTRVSRHALNSNKHVIPRSLIVAECRELYLNAQKQLPQLKIDVDEFLYGKSKKAYQSYSSWEGVLAQKYPRFNNRIISKCGLFPKRNVCSIKPYINEPSVQFSILSQLKNLRFLDEKGNKRALNKTQFNEVYQFVMMNMHDKHGELKRKKALKSDLNKILKKDNIKIHKDEKITGIIIKPSGRSRFCRPALRLLVDILGACKNASEIDPSDYVTAKNNDYKTGITIEEVEALLKRVGRTWELFHISDDRHEQLKESKRNPQRAIKKLLNGITNPLVKHRVGLFDTELVRLQKEHGTPDVVNIELVRDNKDNSLESTEKIKGALALNRKNKKDKDESIDALEGVGIEPSPQNILKYRLLKELNFMDLITGAPISVDDLDRYEIDYIVPRSANISSDGQFNKTLLSQSLNLEKDNRTPHEWLKNDKRWGQYINRVASLKLGNKKTSLLLSESARDLIESYNPLADSAYISKLAHNVVCIRFGWGMSVLGEKKHVYLSNGTITHKIRQKYKLNQLLYQNPDTDMPPKNWKNNKGHALDALCISYIHEYSYLKTWKPRLDHEEVRPLLAGVVPRQYTRDKSELKLKETIYGKRGMGENHVIFTVKKSIIDLLSPIKEGKPRGRDKIQENINKIIDGPVRDDLTELLENCEDATEGWIKLISNYKHPGQNTRIDSIRIIASKPQEWDESMGADFIGRYAEIGKEKEGQYKKTKQHKGQIIYFDKKGAARVATVYAHMPTDRVISRLDKAGHDLYLDGHVFYSSMWVSMPDGFNRIKSDESLYPAGQYQIKSIRSDGSVMIADSDGVLIATNIAQLTKSNMCIKTNT

SEQ ID NO: 19809 - protein, 1359 aa, unidentified
  REGION 1..1359: note = Cas Enzyme sequence
MKNSEAYYLGLDIGTDSIGYAVTDHHYALKKFGGEPMWGTTLFNAASTSADRRLYRTGRRRVDRRQQRMRLLEDLFAAEIVKIDPHFFIRRKSSALFREDTLYGVQLFSGTGLSDTEYHKRYPTIHHLIVDLMSSDTAHDIRLVYIACAWLLANRGHSLFDIAPENIHEIINFAKVYEEFCTFLQEQDYVLPWSSDIVPTRIEDVLRTECGIKKKSELLKSEIFGRKKISKEPTDTFPFNTEAVVSLLAGSKVKPAVVFCNKAYSEIDAVSLTMNDDVFSCIVSELGDDGEFLEQLRKIVNCAQLNAAMRGFDSISEAKVRIYEQHRCDLRYLKQFVKKYCKEKYNEIFRDAVQDNYLCYSHNIKSLRGADSSKLKFSGKDEFCDFLTKRLKGISVSDTDKPAYEDMMLRLQLRTFLPKQKDADNRVIPQQLYRYELKAILDNAQTYLPMLREKDADGIAIYDKILSIFDFRVPYFVGPLKAGGKNAWIARKAEGTILPWNFADKVDLDKSEKAFIARMTNRCTYLPNEDVLPEASLLYSRFCVLNELNNLKINGTPIPVNVKQGLYTELFEQRARVTVHQIQAYLVRRGCMDDKDTLSGLDESVKSSLKPYHVFRRLLADGVLSEDDVESIIQHMAYSEDKTRMRKWLCAHYLTLQDSDISYILHQNFKGFGRLSRRFLTGIYGTAQDSDGEAYSIMELLWCTNENLMQLLSSRYTFSDTICEISRAYYAAHPKSLDERLNEMYVSNAVKRPIFRTLDIVQDVVKATGRPPEKIFIEMARGGTAEQKGKRTESRKNQLLALYKKIKTDDARRFTEELESMGAMADNRLQDRRLFLYYLQMGKCAYTGRTIELSRLSDGTYNLDHIYPQCYVKDDSLLNNLVLVDSKENGRKTDTYPVSADIRSKMQSYWLYLKNNGLMTDEKYRRLTRKTPFSNDEKLRFINRQLVETRQSTKTVAALLQERFPDAKIIYVKAGIVSEFRQEFDLPKCRSVNDLHHAKDAYLNIVVGNVYHERFTSKWFSLESGYNVQIKKLFGKRQEYARNCYWRGGEDLALVRKMVSKNAVHLTKYAFCRKGGLFDQQPVKKKAGLIPLKAGLPTEKYGGYNKPTASFFVLARFAVKKGHEVMFVPINLMDTGQFATDAGYAKRRTAETIERITGTQPQEMEILLGGRKLKIDTVFSFDGIRMTLASKYDEDYNVFNSLSPLVLNKDQERHVKALEVLQRKRKNGSTIVPDEKHDGISVEKNLTLYEELLKKLERSPYCKLPKNPSRLLAEKEARDKFESATILDQIDCLLSLIAWMNGKSYSCDLSSIGKSKTAERMIISNKLSALAKKYSNIRIIDYSPAGLFSTQSDNLLELL

SEQ ID NO: 19810 - protein, 933 aa, unidentified
  REGION 1..933: note = Cas Enzyme sequence
VIPQQLYRYELKAILDNAQTYLPMLREKDADGIAIYDKILSIFDFRVPYFVGPLKAGGKNAWIARKAEGTILPWNFADKVDLDKSEKAFIARMTNRCTYLPNEDVLPEASLLYSRFCVLNELNNLKINGTPIPVNVKQGLYTELFEQRARVTVHQIQAYLVRRGCMDDKDTLSGLDESVKSSLKPYHVFRRLLADGVLSEDDVESIIQHMAYSEDKTRMRKWLCAHYLTLQDSDISYILHQNFKGFGRLSRRFLTGIYGTAQDSDGEAYSIMELLWCTNENLMQLLSSRYTFSDTICEISRAYYAAHPKSLDERLNEMYVSNAVKRPIFRTLDIVQDVVKATGRPPEKIFIEMARGGTAEQKGKRTESRKNQLLALYKKIKTDDARRFTEELESMGAMADNRLQDRRLFLYYLQMGKCAYTGRTIELSRLSDGTYNLDHIYPQCYVKDDSLLNNLVLVDSKENGRKTDTYPVSADIRSKMQSYWLYLKNNGLMTDEKYRRLTRKTPFSNDEKLRFINRQLVETRQSTKTVAALLQERFPDAKIIYVKAGIVSEFRQEFDLPKCRSVNDLHHAKDAYLNIVVGNVYHERFTSKWFSLESGYNVQIKKLFGKRQEYARNCYWRGGEDLALVRKMVSKNAVHLTKYAFCRKGGLFDQQPVKKKAGLIPLKAGLPTEKYGGYNKPTASFFVLARFAVKKGHEVMFVPINLMDTGQFATDAGYAKRRTAETIERITGTQPQEMEILLGGRKLKIDTVFSFDGIRMTLASKYDEDYNVFNSLSPLVLNKDQERHVKALEVLQRKRKNGSTIVPDEKHDGISVEKNLTLYEELLKKLERSPYCKLPKNPSRLLAEKEARDKFESATILDQIDCLLSLIAWMNGKSYSCDLSSIGKSKTAERMIISNKLSALAKKYSNIRIIDYSPAGLFSTQSDNLLELL

SEQ ID NO: 19811 - protein, 1288 aa, unidentified
  REGION 1..1288: note = Cas Enzyme sequence
MISLGLDIGSNSVGSAWADTDKREVHLAVSVFPAGVDEQESKRGAPKNQARREKRSQRRSLARRSARKRRVRQVLTQAGLLPQDVEELQRLFDTNPWELRRAGLTRTLTPHEFGRVLVHLNQRRGALGIETNPEDPEEGKVKEGIDRLNAEMLARKAETVGQLFADLMDERRAAGKCASNTAVSRRVQQIRRKREGRGEATEFQFHGPVRNRQYRMDERQQLYADRRRVREEFLLLWERQKSFGGPLAELLTDDLKRQLDDPTGNDVWRHQGALFGQRRTFWDTGALGRCVLEPTERCVPLADRHASYFRVVETVNNIRIIQGGHSPRPLTVEERERVMRVLRGPLFRKSKGKLIPKSTASVTDIKQALGINPRDKLVRLNIEADEEREINTDWFHREIVHGAFTEERWNELDERQKESVNRAVLRFDPDDEQDQKTLREKAGRWWGLEAEAVERFIEAWKTRPKLEKRLNLSRKAILNLLPYMERFDEEHQRWPTQQEARKAYARTLREKYEQTGVEADRIAADRYDTGALGLTARDRYFMKLDKHRIAEGVPELPPAPMLSNPVVRKAIHEVRRHLMAYLRKFHKTPDQIVIELARITKQSERQRNTALARNRNREKIRKAIIAGTENEPGVLVCAFGAEGARRLSLNQQRAAVDRVILAIQQRETCPYCGRNGLTPVVAAKGDDLEVDHIVPYSRCGDDSLNNKVLVHRTCNRGKANLTPREWWGTEFETRIQVAEKLFNGVKPAKGDYFEERDYKRKWENFTREVREADEWKNSQLTDTAYAARQVAAYLADALFNGRGLPERGDGGNEQKIFFTMGRFTAMLRRDWQLFETLKPPQREGRHGELTADEEARIAEKDRGDHRQHAIDAAVIALTDPKIKHHLANWAAYAAEYKEKRGEWPRREPIEPPWGDVPSFRREILSQVYARFDSSEFESGRQDEAGASDLLVVSHRPVKRRLVGAFHEETAYGPVISPLPPHRREKPETLFTNRIQVAGLTPNHLRVPEGWDELSARLEDPALTEGEKKAVRRQLAALTDPPPGKSGIVRDRALRDWIRKCLRANGLNPDGFSKAQMRDFAASGKLVMRSGVPIKSVILLRTNTDPVIISRKRWDPAANRMIVDEDPRSARVYIGGNNHHIEIRERQVTRQGATVTEWTGRVVTTFEAARRVRLEGRPAVDRSDNEDGRFVMSLAEGEMVFMRHPKTGTPGYFVVFKLDKPNTIHFIHHWDARPSMPRKDENGNEIPGSAREDIAVVASKLRFLGVEDGQPPYKVRVAPLRRPKPVMGD

SEQ ID NO: 19812 - protein, 1393 aa, unidentified
  REGION 1..1393: note = Cas Enzyme sequence
MTNKAWYLGLDIGTASVGWAATDNEYKIIRKNKKRLWGVRLFEEATTAEERRGYRSGRRRLARRKWRLNLLEELFTQEIAKIDANFFLRLKESQYHYEDKTHQVPYEIFNDKDYTDKDYYKEYPTIYHLRTKLMTEENPDIRKVFLAIHHILKNRGHFLLQGQSFKAGNLNNLIKELLELDILHVGFEVTEKVVDKIADISLEKKTSKDKLNDIKELYPKEKQLLEVFRLIFGGKPSLDKLFAIDEYKELDAAIKSVSFKEKIYEEVRHDYEQVLSNYIELLDLAKLVYDSIILSDIKKEGKTLSESKVDLYNKHRDDLTKLKNLVKNDSKLSEDKKVELYAAIFKEDKDKGSNYVNYIRKSDEGKGCNYEDFKNFLVKELAKLEESAAKEEILRDLELELFLPLQRTKDNSVVPYQIHKEELIIILDNAAKYHKFLNEKDDSGYSIIEKVIQLLEFRIPYYVGPLNSSKKAKEDGFAWSVRNKGYEKTPVTPWNYEKVIDESASAEKFIINLTSKCTYLKGEDVLPKSSLLYSEFALLNELNALKYDGNRISLEARNVIIEKLFKEQGKKVTKTSIKNLLKAEGHIDGKGEITGIDITVKNDLKSYRDFKKILGDKFNTEHVENIILWITLYGESRKLIKDKIEAVYGDIYSKEEIAKMSRLVYKDWGRFSRKLLTELVSKKLYNEETGECLNIIGAMRQNNILFMELLADRFDYSQQIIDYNKELQIEVTEITPEILDDLYVSPSVKRSIWQTVRIVEELKKIIGCAPKKIFIETTRTNQGKKEPTDSRKKQLELAYKAVKKDVKELEKEIDELKFDTLNNRLSSEEPSKLKAKKLYLYYTQLGRCMYSGESIIINELFDNNKYDIDHIYPQAKIKDDSFTNTVLVKRDRNAKKEDRYPLSSDIQTPRNRKFWKFLKEKKLITDEKYNRLVRTEEFSDEELSGFIARQLVETSQSVKAVASILGELNPETSICYSKAENVSSFRQNFGKIKEGNRDSKNGDQLIKVREINDLHHAKDAYLNVVVGNVYDTKFTRNVFNFIKDKKEGRKYSLNKVFYENVSDSKTVAWEMDKTIYQIEKVMNNNNILVTRRTSEQKGGLFEATIYKSKLAKKAKEGVYYPLKTSNSVMKDVTKYGGYTSIGIAYYSIFEYTLVNKKGEEKITRIIPIPIYISQNIKDDNMLIDFAKTQFNIKDTESIVNLKLLYRKLCKDSYITLDYYPYYLGGKFNDYIYIDSAIQLILEEKIEKYIKLISKYQIWKKENKDCELWKDITEEYNLDLYYKLVNRMNYDIFKNKKKNKYLEFISESAVNNFKNLDIEKQIIVLIEVLNVITNRRKPNLDKKLIGFTVSRGYTGLNLSNITQFSITEQSVTGFYEKEITIIGEKENDMENNNS

SEQ ID NO: 19813 - protein, 967 aa, unidentified
  REGION 1..967: note = Cas Enzyme sequence
ILDNAAKYHNFLDEKDESGYSIREKVIQLLEFRIPYYVGPLNSSKKAKEGGFAWSVRNKGYEDTPVTPWNYSKVIDESASAEKFITNLTNKCTYLKGEDVLPKSSLLYSEFALLNELNALKYDGNRISLEARNTIIEKLFKQQGKKVTKTSIKNLLKAEGYIDGKGEITGIDITVKNDLKSYRDFKKILGNKFNSEHVENIILWITLYGESRKLIKAKIESVYGEVYSKDEITKMSRLVYKDWGRFSRKLLTELVSKKLYNEETGECLNIIGAMRQNNILFMELLADRFDYSKQIAEFNKELQEDVTDITPEILDDLYVSPAVKRSIWQTVRIVEELKKIIGCAPAKIFVETTRSNQGKKEPTSSREKQLDLAYKAVKKDVKDLEKEIGAINFDVLNDRLSSVEPSKLKAKKLYLYYTQLGRCMYSEEPIKISELFDNNKYDIDHIYPQSKIKDDSFTNTVLVKRESNAAKTDRYPLGSDIQTPSNRRFWKFLKEKGLITDEKYNRLVRTEEFSDEELSGFIARQLVETSQSVKAVASILGELNPETSICYSKAENVSSFRQNFGKIKDGNSKSKNNEQLVKVREINDYHHAKDAYLNIVVGNVYDTKFTRNVFNFIKDKKDGRKYSLNKVFYENVKDSKTVAWEMDKTIHQVEKVMNNNNILVTRRTSEKKGGLFNATVYKAKVAAKAKEGVYYPLKTSDRFIKDVKKYGGYTSIGIAYYSIFEYALVNKKCEGKITRIIPIPIYISQNIKDDNTLLEFGRSQISTKSGEEIKDLKLKYRKLCIGDKISLEGYPYFVGGKTSDYFLYDSAVQVIIDKENERYIKELVKFTNWKKDNKDGELSKNITRKKNTDLYNALLQKMKTQELINKKPNKYQELEKEKTIHKFNDLNEEEQSKVLLEMLNLLTDMKTVYDLKLINITATRGKQNFDLTSLKEFTIIEQSITGFYEKEITIIGDKGNDMENNNS

SEQ ID NO: 19814 - protein, 1028 aa, unidentified
  REGION 1..1028: note = Cas Enzyme sequence
MTNKTWYLGLDIGTASVGWAATDNEYKIIRKNKKRLWGVRLFEEATTAEERRGYRSSRRRLARRKWRLNLLEELFTQEIVKIDANFFLRLKESQYHYEDKTHQVPYAIFNDKDYTDKDYYKEYPTIYHLRTKLMTEENPDIRKVFLAIHHILKNRGHFLLQGQSFKEGNLNNLIKELLNLDILHISIEITEENINKITEIALEKKTLTDKVNDLKKLYPKEKQLLEAFRLIFGGKTSLDKLFAIDEYKELDASVKSVSFKEKIYEEVRHDYEQVLSNYIELLDLAKLVYDSIILSDIKKEGKTLSESKVELYHKHREDLTKLKTLVKNDSKLSEDKKVELYSAIFKEDKDKGTNYVNYIRKSEEGKGCNYEDFKKFLVKELAKLEESSAKEEILRDLELELFLPLQRTKDNSVVPYQIHKEELVKILDNAAKYHKFLNEKDDSGYSIIEKVIQLLEFRIPYYVGPLNSSKKAKVDGFAWSVRNKGYENTPVTPWNYEKVIDESASAEKFITNLTNKCTYLKGEDVLPKSSLLYSEFALLNELNALKYDGNRISLEARNVIIEKLFKEQGKKVTKTSIKNLLKAEGYIDGKGEITGIDITVKNDLKSYRDFKKILGDKFNTEHVENIILWITLYGESRKLIKAKIEAVYGDIYSKEEIAKMSRLVYKDWGRFSRKLLTELVSKKLYNEETGECLNIIGAMRQNNILFMELLADRFDYSQQIIDYNKELQKEVTEITPEILDDLYVSPSVKRSIWQTVRIVEELKKIIGCAPAKIFVETTRSNQEKKKPTDSRKKQLELFYKAVKKDVKDLEKEIGSLNFDKLNERLSLVEPSKLKAKKLYLYYTQLGRCMYSGETIDITQLNTTAYDIDHIYPQSKVKDDSFTNTVLVKREYNAAKTDRYPLGSDIQTPSNRRFWKFLKEKGLITDEKYNRLVRTEEFSDEELTGFIARQLVETSQSVKAVAGILRELNPKTLICYSKAENVSSFRQNFGKIKEGNRKSDNTEQLIKVREINDYHHAKVFIDIQKALLN

SEQ ID NO: 19815 - protein, 1383 aa, unidentified
  REGION 1..1383: note = Cas Enzyme sequence
GLDIGTASVGWAATDNEYKIIRKNKKRLWGVRLFEEATTAEERRGYRSGRRRLARRKWRLNLLEELFTQEIAKIDANFFLRLKESQYHYEDKTHQVPYAIFNDKDYTDKDYYKEYPTIYHLRTKLMTEENPDIRKVFLAIHHILKNRGHFLLQGQSFKEGNLNNLIKELLNLDILHISIEITEENINKITEIALEKKTLTDKVNDLKKIYPKEKQLLEAFRLIFGGKTSLDKLFAIDEYKELDASVKSVSFKEKIYEEVRHDYEQVLSNYIELLDLAKLVYDSIILSDIKKEGKTLSESKVELYHKHREDLTKLKTLVKNDSKLSEDKKVELYSAIFKEDKDKGTNYVNYIRKSEEGKGCNYEDFKKFLVKELAKLEESSAKEEILRDLELELFLPLQRTKDNSVVPYQIHKEELVKILDNAAKYHKFLNEKDDSGYSIIEKVIQLLEFRIPYYVGPLNSSKKAKVDGFAWSVRNKGYENTPVTPWNYEKVIDESASAEKFITNLTNKCTYLKGEDVLPKSSLLYSEFALLNELNALKYDGNRISLEARNVIIEKLFKEQGKKVTKTSIKNLLKAEGYIDGKGEITGIDITVKNDLKSYRDFKKILGDKFNTEHVENIILWITLYGESRKLIKAKIEAVYGDIYSKEEIAKMSRLVYKDWGRFSRKLLTELVSKKLYNEETGECLNIIGAMRQNNILFMELLADRFDYSQQIIDYNKELQKEVTEITPEILDDLYVSPSVKRSIWQTVRIVEELKKIIGCAPAKIFVETTRSNQEKKKPTDSRKKQLELFYKAVKKDVKDLEKEIGSLNFDKLNERLSSVEPSKLKAKKLYLYYTQLGRCMYSGETIDITQLNTTAYDIDHIYPQSKVKDDSFTNTVLVKREYNAAKTDRYPLGSDIQTPSNRRFWKFLKEKGLITDEKYNRLVRTEEFSDEELTGFIARQLVETSQSVKAVAGILGELNPKTSICYSKAENVSSFRQNFGKIKDGNSKSNNNEQLVKVREINNFHHAKDSYLNVVVGNVYDTKFTRNVYNFIKDKKDGRKYSLNKVFYENVSDSKTVAWEMDKTIHQVEKVMNNNNILVTRRTSEQKGGLFDATVYKAKVAAKAKEGVYYPLKTSNSVVKNVIKYGGFTKIKIAYYSIFEYILVNKKGEEKITRIIPIPIYISQNIKDDSTLLEFGKTQINLKSGEKIKDLKLKYRKLCIGDKICLEGYPYFVGGKTSDYFVYDSAVQVLMDKENEKYIKELVKFTNWKKDNKDGELSKNITRKKNTDLYNALLQKMKTQELINKKPNKFQELEKEETIHKFNDLNEEEQSKVLLEMLNLLTDMKTVYDLKLINITATRGKQNFDLTSLKEFTIIEQSVTGFYEKEITIIGDKENDMENNNC

SEQ ID NO: 19816 - protein, 1391 aa, unidentified
  REGION 1..1391: note = Cas Enzyme sequence
MTNKTWYLGLDIGTASVGWAATDNEYKIIRKNKKRLWGVRLFEEATTAEERRGYRSGRRRLARRKWRLNLLEELFTQEIAKIDANFFLRLKESQYHYEDKTHQVPYAIFNDKDYTDKDYYKEYPTIYHLRTKLMTEENPDIRKVFLAIHHILKNRGHFLLQGQSFKEGNLNNLIKELLNLDILHISIEITEENINKITEIALEKKTLTDKVNDLKKIYPKEKQLLEAFRLIFGGKTSLDKLFAIDEYKELDASVKSVSFKEKIYEEVRHDYEQVLSNYIELLDLAKLVYDSIILSDIKKEGKTLSESKVELYHKHREDLTKLKTLVKNDSKLSEDKKVELYSAIFKEDKDKGTNYVNYIRKSEEGKGCNYEDFKKFLVKELAKLEESSAKEEILRDLELELFLPLQRTKDNSVVPYQIHKEELVKILDNAAKYHKFLNEKDDSGYSIIEKVIQLLEFRIPYYVGPLNSSKKAKVDGFAWSVRNKGYENTPVTPWNYEKVIDESASAEKFITNLTNKCTYLKGEDVLPKSSLLYSEFALLNELNALKYDGNRISLEARNVIIEKLFKEQGKKVTKTSIKNLLKAEGYIDGKGEITGIDITVKNDLKSYRDFKKILGDKFNTEHVENIILWITLYGESRKLIKAKIEAVYGDIYSKEEIAKMSRLVYKDWGRFSRKLLTELVSKKLYNEETGECLNIIGAMRQNNILFMELLADRFDYSQQIIDYNKELQKEVTEITPEILDDLYVSPSVKRSIWQTVRIVEELKKIIGCAPAKIFVETTRSNQDKKKPTDSRKKQLELFYKAVKKDVKDLEKEIGSLNFDKLNERLSSVEPSKLKAKKLYLYYTQLGRCMYSGETIDITQLNTTAYDIDHIYPQSKVKDDSFTNTVLVKRESNAAKTDRYPLGSDIQTPSNRRFWKFLKEKGLITNEKYNRLVRTEEFSDEELTGFIARQLVETSQSVKAVAGILGELNPKTSICYSKAENVSSFRQNFGKIKDGNSKSNNNEQLVKVREINNFHHAKDSYLNVVVGNVYDTKFTRNVYNFIKDKKDGRKYSLNKVFYENVSDSKTVAWEMDKTIHQVEKVMNNNNILVTRRTSEQKGGLFDATVYKAKVAAKAKEGVYYPLKTSNSVVKNVIKYGGFTKIKIAYYSIFEYILVNKKGEEKITRIIPIPIYISQNIKDDSTLLEFGKTQINLKSGEKIKDLKLKYRKLCIGDKICLEGYPYFVGGKTSDYFVYDSAVQVLMDKENEKYIKELVKFTNWKKDNKDGELSKNITRKKNTDLYNALLQKMKTQELINKKPNKFQELEKEETIHKFNDLNEEEQSKVLLEMLNLLTDMKTVYDLKLINITATRGKQNFDLTSLKEFTIIEQSVTGFYEKEITIIGDKENDMENNNC

SEQ ID NO: 19817 - protein, 1064 aa, unidentified
  REGION 1..1064: note = Cas Enzyme sequence
MDIIEDANGKSVSYSMVAKYNKYGEDLKTLKDLVKEYCSTKYSEFFRGERYEAPYQKDYDKSKVKGYTKYNEVRGAKYDDFKKEVENLFKGTAATSDSRYQDMMTKFANGKFLRRLKTSDNGSIPFQLHLEEMNAIVDAQEKFYPFLSEIRHKLNSLVTFRIPYYVGPLTQKSAALDASGKPRFAWSKRQEGKEGEKIYPWNWEEIIDKSGSAVKFIERMTGTCTYLYGEPVLPKCSLLYEKFCVLNELNGAKWSQDNDKWYRFDADDRLSIYEELFERYKSVSFKKLEDWLKQRGEAFPHVKGGQGEGKFESKLSSHHFFKELLGTDEWSDQTRQMIEELILWNTLFEDKKILKEETTKKYGDVLTAEQIKKFCGHRFMGWGRLSKKLLTGIKTEVDFRKMSVMDLLVEGDPYGEHVGSSLILMEILHNKNFEFNKEIEAHNEKYFSKDQSVEDLPGSPAVRRSVNQALRIVEEIAKIAGKPAVHIYIESTRDEDEKKRGKRTTKRNENIKKMLSELKDEYKNADIFTQLAKHSDEQLSKRLSLYFMQNGKSMYSGKAIEINRIADNAYCQIDHVLPQSYIKDDSFENTVLVLSEENQRKGDSLLLDADIRRKMAGLWHELHRVKLIGDKKYKNLTRSVVTDRQMEGFINRQLVETSQIVKFVRMLLKSHYPDTEICSIKASLSHEIREKYDLPKIREVNDYHHAHDAFLACEMGRFLSIRYKEAFTNPVGLTKLMRKFVKKESEEAQKQHRMPGTTPFFVASFSKPGFDLETGEVTRDEWNPIEEVEKIKRTFGFKQCFVSRMPEMTSGAFWKETVYTPKDKTMTLALPVKGNLLPEKYGSYSSVQPSFLAICRGKKKNKSQYYVVDIPRTKSVELYKNSTKTSDYLSKVLESSGVEFEELIYPALLKNQVIEYDGQRFYVVSSAELRNGVAPSFSYEDYVMISNYFDGNQNEDANALVIYDLLWNIISTRMPVLADRLKLDSKRAVFATLNLEDEKKVIISLLNAINGSTVPSDTKKIGGSTRTERLFISISTQLNRSSVEFYVIEQSVTGMFERRRRIGL

SEQ ID NO: 19818 - protein, 1364 aa, unidentified
  REGION 1..1364: note = Cas Enzyme sequence
MNLRNISSYDVGLDFGTGSVGWAVTDENGNLCHFKKRPTWGSRIFQSANTAAETRRKRGQRRRYDRRRQRLDLLQSLFDEEMAKVDPEFFIRLRQSKLRVEDREEGHRNYRFPFFNSSDFTERMYYKSYPTIYHLRKHLIESDQQEDLRLIYLAFHNIVKTRGNFLYQDNPSLSAKDASMSEAIKELLKALVLWADASYDFEINEIDPEKLEKVFEDTSLTRAEKKDEALKILTLEEKKIAEELIKAVLGYEANFNTIFKIEAEKFKFSFDNDEQKEAFISSVPDEGMALYEALQKAYSAYILMNIIEDANGKSISYSMVAKYNRYKEDLRTLKDLVKEFCSDEYSQFFKGKKYEVPYQKDYDKSEAKGYTKYNVARDAKYDDFKKEVENLFKGTAATSDSRYQEMMIKFANGKFLRRLKTTDNGSIPFQLHLEEMNAIIDAQEKFYPFLSEIRYKLNSLVTFRIPYYVGPLTKKGAALDAFGKPRFAWSERQEGKEGEKIYPWNWEEIIDKSGSAAKFIKRMTGTCTYLYGEPVLPKCSLLYEKFCVLNELNGARWSQDNDKWYPFDAEDRLSIYEELFERCKSVSFKKVEDWLKQRGETFPHVKGGQGEGKFESKLSSYHFFKKLLGTDEWSDQTKQMIEELILWNTLFEDKKILKEETTKNYGDVLTAAQIKKFCDHKFAGWGRLSKKLLTGIKTEVDFRKMSVMDLLVEGDPYGEHVGSSLILMQILHNKNFEFNKEIEAHNEKYFSKDQSVEDLPGSPAVRRSVNQALRIVEEIAKIAGKPAAHIYIESTRDEDEKKRGKRTTKRNENIKKMLSELKEEYKNTDIFTQLDKHSDEQLSKRLSLYFMQNGKSMYSGKAIDINLIADNTYCQIDHVLPQSYIKDDSFENTVLVLSDENQRKGDSLLLDADVRRKMAGLWHELHRVKLIGDKKYKNLTRPVVTDRQMEGFINRQLVETSQIVKFVRMLLKSQYPDTEICSIKASLSHEIREKYNLPKIREANDYHHAHDAFLACEMGRFLSIRYEEAFTNPVGLTKLMRKFVKQESEEAQKQHRIPGTTPFFVDSFSKPGFDFETGEVEWDPIEEVEKIKRTFGFKECFVSRMPEMTSGAFWKETVYSPKDKKTTLALPVKGNLLPEKYGSYSSAQASFSAICRGKKKNKTQYYVVDIPRTKSVELYKNHSKTSGYLTKVLESSGVEFEELIYPALLKNQAIEYGGQRFYVVSSTELRNGVSPSFSYDEYVFISNYFDKNQDDTSASLVIYDLLWKIVSSRMPILAEKLKLDSKRKVFAALNLEDSKKVLVSLLNTINGSTVHSDTKKIGGSTRTERICISISAQLNKNPAEFYVIEQSVTGMFERRRRIGL

SEQ ID NO: 19819 - protein, 1183 aa, unidentified
  REGION 1..1183: note = Cas Enzyme sequence
MGKVLGLDLGTNSIGWALINKVENKLIDAGSRVFPEGVNREKGREVSKNEDRRLARQRRRLYFRKSLRKQKLVQVLMPLGMFPQSAHFLSDVQQLVLEEELLYFFRMNPYELRAKAAEGHKLSLLELGRIFYQFSQRRGYKENLQSPLDEKSDLNTGDVESGKIGIEETIAGIGGSTLGSYLSKLNPHIQRIRNRYTTRKMYLDEFELIWSKQASHYPNVLTGDLKTNLGDPVIGVLFFQRPLRSQAHLRGKCSLEPSKDRIADSAPIFELYRMFSFINNIKSAERDLNFDERSRIIELFISHGPPKKFDVIRKKIVKGDSNIKLNFDDDVKIPQCKTISLISDALGKIERKQIISQLSNQSVKDVFDILPRFEQIWKLKREARNPEWLQSKLYSDFGIEPEEAKKLVKSRFSNDFASLSHKAILNILPYTIQGHTLSDAVILGGVRNVFGSKWESIAPEQRTIIEDNVLSVAYTDKNELALDKVKFILSSEFKAPMNRLRKLYHASDYRQRGGIVKRQEVGAAILKIKNPIVQSVLFEVKALVEDIIKHYGEIDEIKIEMARDLKKSKKLREKEQIQIYKNERENDECRALLNENNLKPSGANLLKMKLWRECNRTCPYSGETIGLYELFETNKYQVEHIIPYSISLDDSLANKTLCKLELNQEKGNRTPFEAFGKTGQWEAMKDRAFKLMPYIKAKRFVDPTRKDLEDFIERQINDTRYISRECSQLLNAYAKTSITQGGLTAILRRSWGLNDILNPRQLLLDEYKPGRCCAAFDEKDQIIEDTLTAWVKDFKLRKKIEDDLAKKGKVAWGMVRKQFFYPEKSRLDHRHHAVDAITIAFSSTSLLQEISKLSGQGAEVADIDIELPWNSFHSDCRRMIDSILVSHKNRRRVISNWRRKLFDKTNGKLIIKNDKQWYGSGIASRDQLHKDTYYGLYTQKDGTQYLHNRVALESRKKKKLIEEVVDPGVRQAIYDRLKAIGVDTDQKDFDVPTESADNPVFFSTDADGKKVSLVFMPNKNAEPIPIKKVRIRGISKTKIQLHGINRYVEPGNNHHVLIYRDHNTNLNSSIITFWEAVERTKQKTPLFQLPADGAESIAVLMKNHLFILGYEGEIDWNDQRKLKDYLYRVQKLSDGDWNFRKHNASTLDFEVEEVRVQSLKAWNKLSAKKVILNRLGKIIQIID

SEQ ID NO: 19820 - protein, 1183 aa, unidentified
  REGION 1..1183: note = Cas Enzyme sequence
MGKVLGLDLGTNSIGWALINKVENKLIDAGSRVFPEGVNREKGREVSKNEDRRLARQRRRLYFRKSLRKQKLVQVLMPLGMFPQSAHFLSDVQQLVLEEELLYFFRMNPYELRAKAAEGHKLSLLELGRIFYQFSQRRGYKENLQSPLDEKSDLNTGEVESGKIGIEETIAGIGGSTLGSYLSKLNPHIQRIRNRYTTRKMYLDEFELIWSKQASHYPNVLTGDLKTNLGDPVIGVLFFQRPLRSQAHLRGKCSLEPSKDRIADSAPIFELYRMFSFINNIKSAERDLNFDERSRIIELFISHGPPKKFDVIRKKIVKGDSNIKLNFDDDVKIPQCKTISLISDALGKIERKQIISQLSNQSVKDVFDILPRFEQIWKLKREARNPEWLQSKLYSDFGIEPEEAKKLVKSRFSNDFASLSHKAILNILPYTIQGHTLSDAVILGGVRNVFGSKWESIAPEQRTIIEDNVLSVAYTDKNELALDKVKSILSSEFKAPMNRLRKLYHASDYRQRGGIVKRQEVGAAILKIKNPIVQSVLFEVKALVEDIIKHYGEIDEIKIEMARDLKKSKKLREKEQIQIYKNERENDECRALLNENNLKPSGANLLKMKLWRECNRTCPYSGETIGLYELFETNKYQVEHIIPYSISLDDSLANKTLCKLELNQEKGNRTPFEAFGKTGQWEAMKDRAFKLMPYIKAKRFVDPTRKDLEDFIERQINDTRYISRECSQLLNAYAKTSITQGGLTAILRRSWGLNDILNPRQLLLDEYKPGRCCAAFDEKDQIIEDTLTAWVKDFKLRKKIEDDLAKKGKVAWGMVRKQFFYPEKSRLDHRHHAVDAITIAFSSTSLLQEISKLSGQGAEVADIDIELPWNSFHSDCRRMIDSILVSHKNRRRVISNWRRKLFDKTNGKLIIKNDKQWYGSGIASRDQLHKDTYYGLYTQKDGTQYLHNRVALESRKKKKLIEEVVDPGVRQAIYDRLKAIGVDTDQKDFDVPTESADNPVFFSTDADGKKVSLVFMPNKNAEPIPIKKVRIRGISKTKIQLHGINRYVEPGNNHHVLIYRDHNTNLNSSIITFWEAVERTKQKTPLFQLPADGAESIAVLMKNHLFILGYEGEIDWNDQRKLKDYLYRVQKLSDGDWYFRKHNASTLDFEVEEVRVQSLKAWNKLSAKKVILNRLGKIIQIID

SEQ ID NO: 19821 - protein, 1371 aa, unidentified
  REGION 1..1371: note = Cas Enzyme sequence
MELKKSNKIYGDYYIGLDIGTNSVGIAATDQNYNLIKYKGEPVWCSHLFEEGHQCADRRGFRTARRRLDRRQQRVQLIDELFASEVGKVDKNFYIRKKESALWREDKTDSSTGNMYFNDEDYKDVDYHKEYPTIHHLIVALMEQDKAFDIRLVNIAIDWLVAHRGHFLSEISVKNVDKITDFETVYNKFIDFFNMEGLQDSYNAWIEADCKELEKIIKSKSGITTKKRELKQVIYGGKVPKEESVPYKYESMINFLAGGKIKAKDLFQQSEYESDFSFSISDDMEEILPQLGDDAEFVSKMTAIYEWSVLTDVLNGEKYISKAKVEVYDQHKKDLEQLKKFVRKYAPKEYYKIFKESGKELKNYTAYSYNLKSVDTTKDKVELPKQKANQKEFNDFLKKTLKLDKIEEQIEEEDLDFYEDMVSRIENAGFMPKQVNSDNRVIPHQLYQIELERILDKAENYLPFLKEKDVDGLTITEKIKSVFTFRVPYYVGPLRRDNSENAWIKRKAEGKILPWNFDQMVDKDASEKEFIRRMTNTCTYLPSESVLPKWSLLYSSFMVLNEINNIKVNGQSISVEAKQRIYHELFEKKAKVTVKMIRGFLESNNYMQKEDVLEGLDVTIKSSLKAHYEFRNLLAAGTLDKKDVERIIEHNTYVEDRGRYRNWINREFPNLSAEDKKYIGKLKYNDFGRISKKMLNDLRGDDKTTGEMGSIMHFLWTTNDNFMQLLSNDRYTFAERIEEERKKYYESKEFSVEDQLDEMYVSNAVKRPILRTLDVVDDVVSTLGHAPKKFFVEMARGADPDQKGRTTTRKQQLLELYKNVEEDTRILEKELEDMGDMANNRLQSEAIFLYYLQLGRCAYSGQAIDLSQIKSGKYNIDHIYPQCYVKDDSIVNNKVLVLSGINGDKKDIYPISEEIRTSQKAFWSKLRKANLMSDEKYKRLTRNTPFSDEEKQGFINRQLVETRQSMKAVTQILKQKYKDTEIVYVKARLASQFRQEFLTPKSRLINDLHHAKDAYLNAVVGNVYHERFTRKWFNISDKYTVNPKSLFKRTVQHGEEVIWDPDVHMDKVKSIYKKNNIKMTRYSFCQKGGLFDQMPLKKKADLVPLKKGMDPVKYGGYNKSGATFFIVAAYDKGTKKEVSFVPIELMFSEQFLKDEDFAKQYVQEQLQKLSAKTVSNVWFPLGMRKIKFKTVLSLDGYEVWVNGKSGGGKQLLLSSAESLIVSKEIETYIKKLENYKRKKDERKDVLLDEAYDGISKSENIKLYDCFINKLQTSIFSQMPGCQKEVISDGKQKFMDIAIEEQVDALISIITLLKSGRAGGIDLTAINGKSKSGAMYLGANLSSSPYDDIRIVDYSPAGLHRKESVNLKDFLK

SEQ ID NO: 19822 - protein, 940 aa, unidentified
  REGION 1..940: note = Cas Enzyme sequence
MITLGIDWGAVNVGVALVRNTESGNEPLFAGTIIINASMIKEKVEARANIRGLRRSRKTKKSRLRELRVGLQTLGVDPVTVGHIVTFCERRGYSHQDKDEKESQEESQYKVHRNKFFQSLGEELERRFQSQELREQVCKICEQVLNAKCDPQQEPRPARFDNRGVSRCAWEGCDKVTPRRENATGDAVAQQLVTYFQGALKETPSMKENVIKVSTQLNLLAKELRAAIEDEAGDQKKAIKKRARQSLEQLRDDLTESQPVTDETKKAWKYVKDGIISLLENTGGRNSYCREHSKAYIDTILKGKQPPFKKTISESDIISRREQITFGKFWRYIEARVLPLAPEGIDRIVLERTAFDMLAGSRKIINKTSDKRVEDIYQQGPMYGCINRKDMLQKEFGGLCAYCGKSSSTLIECEHILPRSQFFFDSYLNILPACPSCNAEKGSRLPGKASLRISEEAYVKYNEYLNELKAKRPLHFLHTEKKGILNLMKEPERAWEVEQYLGLIANNFAAITQSQRGPRPLARLLFSKLSPRQNNPPAICFRSGRHTSLYRTIAYPKFQKAEEKSDGGTVNHALDAILLACQLPDPTPLEARGVNVHTVGTWRRAVLSLAPKAGKEGVPIVPTYPWRVEGFEAVDNSGYIQVELATMNWNQKDSAKHKQDPYGWSDKAKKPTKRKSALALYDELVKEKEKEEVERIIQTIHHPTLRDAMLSVIDQDPVGPTVAEAMKKWLQQSVRNSIKGSTFSNHPADQARKIQLENFANNNISPVPKIIGIKCFDIGVQGKIDLERLDSHTGKTGHRYMAAPANQAMILAYPRLKNGELDFTKPYTAGVRQNSALKTEDKKFLSKPPELENGLIWGFKAPSNQVWKKKLEAYLLDCGFHSYAMLTPCCVIRYKDGKEKFIRNFDKSKDFKKRILTNVVGVRRSPFSDRLTLLKQLTPN

SEQ ID NO: 19823 - protein, 946 aa, unidentified
  REGION 1..946: note = Cas Enzyme sequence
MVTLGVDYGASSVGLALVRSDEKGHNIPLFAGTIRLDARWLKEKVEVRAGIRRLRRTKKTKRHRLRQLEQSLTQIGLGAEQIQSIVRFSNRRGYKSLFDAGVADDDHDEAELTYRFTREEFFKALGTELQSIIPDTSQRQKALSTCETILNRQGDRSLEIRQIKIDNRGASRCAWEGCNRVTPRSDNALGEVLSQQIYTVFQSALKVNPVLCQKVETATHELHELAKRLRNASGEAASNEKKILRKRARTILRALKELLYTPAEGVGDAEKAWKYIETGIMNIMESRLGRNRYCREHSREYVQTICSGKLVPFKQTISESDIISRREQIAYAKLWRYIEARILPLTPGGIDRIVVERTAFDLLAGSRKTIQKATDQFKEEMYQHGPMYGFESVPDMLKEEFGGLCAYCGQSSSTLIDVDHILPHADFLFDSYLNILPACPKCNSDLKGDRSVSDASLTIHPDAYRAYSDYLKKKFSTRPMHYFHSIKKGVLNLMQDASRLWEAERYLSLIARQFGQIVQSQRGPRPFARYLSTKLSRRQGQAPAIRFRNGRHTALYRRVAYPDFQKQAEKAEGNVLNHALDAILLASELPDLYPVEALNLPLWQLKNWADTVRARAPKSGDEGVPICPDGPQYVDGFETVHPGGYVEVDLRSMRWNQKDSMTHKQDPYGFSEKTGMPTKRGSAFDLYTKLKKEKNPSKVKSRIALIHHPALRKALSESLQSDTTGSSAAENLKTWLRISVKNSLAHSRFSNHPGDQARRSELEKFITQEDCPIPSVIGVKMFDMGVRGKIDMKRLDRQTGGIGHRYMTQPPNKGVIVAYPKREDGKPDLTKPCCVYHKQDLSMTPENISIFKPPPPILSDGVILGKKPYDKGDRRKALEKYLSDCGFHSYVYLTPGCTIRYKDGNEWFVRNFDSSEDFKKGRLREIIGTRRTPFVDSLIPLKVLSQ

SEQ ID NO: 19824 - protein, 947 aa, unidentified
  REGION 1..947: note = Cas Enzyme sequence
MVTLGVDYGASSVGLALVRSDEKGHNIPLFAGTIRLDARWLKEKVETRAGIRRLRRTKKTKIHRLRQLEQSLAQIGLGAEQIHSIVRFSNRRGYKSLFDDGVTDSDHDEAELTYRFTREEFFKALSIELQSLIPDLIQRQKALSACEVILNRQGLPSREIRQIKIDNRGASRCAWEGCSRVTPRSDNALGEVLSQQLYTLFQSTLKGNPDLCQKVETATHELHELAKRLRHASGESASSEKKILRKKARTILRALKELLYTPADGVGDAEKAWKYIETGMMNIMETRLGRNRYCREHSREYIQTICSGKPIPFKQTISDSDIISRREQIAYAKLWRYIEARILPLAPAEGIDRVVVERTAFDLLAGSWKTIQGTTDQFKEEMYQHGPMYGFESVPDMLKEEFGGLCAYCGQSSNTLIDVDHILPHADFLFDSYLNILPACPKCNSDLKRDRSISDLSLAIHPDAYKAYSDYLKKKFSTRPMHFFHSIKKGVLNLMQDVNRLWEAERYLSLIARQFAQIVQSQRGPRPFARYLSTKLAVKQGEAPEIRFRNGRHTALYRRVAYPDFQKQAEKKEGNVLNHALDAILLASELPDLYPVESLNLPLWQLKNWVAKVRSRAPKAGDEGIPVCPGGPQYVDGFETVHLGGYVEVELRSMLWNQKDSMTHKQDPYGFSEKTGMPTKRTSAVDLHAELKKEKNLSKVKSRIALIHHPALRNALQESLSSDTPGPSAAEALKAWLRISVRNSLAHSRFSNHPGDQARRSELEKFATQEDCPIPTVIGAKMSSMGVRGKIDLRRLDRQTGGIGHRYMTQPPNKGVIVAYPKREDGKPDLTRPCLVYHKQDLSVSSENMRIFKPLPPILSDGVILGKKIVDKGDRRRALEKYLSDCGFHSYIYLTPGCTIRYKDGTEWFVRNFDTDEDFKKGRLKEIIGTRRTPFIDSLTQLKTLSQ

SEQ ID NO: 19825 - protein, 942 aa, unidentified; identical to SEQ ID NO: 17930
  REGION 1..942: note = Cas Enzyme sequence

SEQ ID NO: 19826 - protein, 944 aa, unidentified; identical to SEQ ID NO: 17864
  REGION 1..944: note = Cas Enzyme sequence

SEQ ID NO: 19827 - protein, 933 aa, unidentified
  REGION 1..933: note = Cas Enzyme sequence
MITLGIDYGASYIGVALVENTGTGNIPLFAGTITINARDLKNMVETRAAIRRLRKLRESLLACGIGADQVNLIVRFCRRRGYKSLFDEDESETREKESDLAYRFSREKIFESLERELGLILPDNHLKPQALSVCERVLNRKGDPFQEIRLIRIDNRGASRCAWEGCSRVTPRRENALTDPIAQQIYTTCQEKIREGGERAREKVDDTVTQLATLGKRIRNASGEGANKEKKALRKKARMLLREIKELYYQPARETLDDEKAWKYIETGVLNIMEKSKGRNRYCREHSPAYVKTVLANEAIPFKQTISESDIISRREQITYQKLWRYIEARVLPLAPSGIDRIVVERTAIDLLAGSRKKILKASDQTKEEIYQHGPMHGFTSVSEMLRKEFNGLCAYCGKQSDSLMETEHILPRAEFFFDSYLNLVPACPQCNQRKGARTPSAASLNINGEAYEAYTNYLQSNIRTRPLHFFHTIKKGVLNLMRDPERQWEAERYLSLIASQFAQVVQTQRGPRPFARYLCSRLSLRQDMKPEIAFKSGRHTALYRNIAYPDFSKVAEKEEGGIINHAVDATLLASDLPDPNPLEALGLSPADMRRFCSAVRQKAPLAGDSGVPEPPARDFFVEGFESVGSGYVKVKLDSMCWNKRDSMTHKQDPYGWSEKYMLPTKRTSALDLWSELEKMKDEKEVKKKIQLIHHPALRNAFSAAISPANPGKSAAGTLRAWLSESVKKSIQTSTFSNNPGDQQRKKELEQFSLSDESPIPAIIGVKMFDMGVRGKIDLQRIDLQTGRTGHRYMTQPANRAVILAYPKKKTGGTDLSKPCIARVRQNYALLPEEKGIFKGLPERLKEGMILGKKNTIMTGWDREVDHYLSDCGFSSYVMLTAGCVVCYGDGKQWFLKNFDKGKEFRKGKRLRNVVGILRTPFSGRMMLLKPLT

SEQ ID NO: 19828 - protein, 1453 aa, unidentified
  REGION 1..1453: note = Cas Enzyme sequence
MEQKTLGLDLGTNSIGISLRNPALGENLKEQLEYFSSDIFEAGVGTDKSGEFSYAAQRTTFRSARRLKLHRRRRLQATLRLLMDHKLCPLSEDSYKQWSVYDKTQNLKREYPIGDEGFNRWIKLDFNADGKPDYTSPYQLRCELATTQLDFSSPENKFKLGRALYHIAQRRGFKSSKGETIAEQEKNEKFSANSDDLEQEMKKSEMKRSKGLRELLETQGLNTIGQAFAYLESQGTRIRNNEDIQATRDLYEKEITYIFNFQKELSIESELYKRLISTKKGEGTIFYKNPLRSQKGLVGKCTLEPKKGRCPIGHPEFEKFRAWAFINNIRYRRTIDSEWQEPTIEMKERLYRDVFTARVKADFLFSEIRKWLEKELEVQLHWDNNKSLSTINYADKQNVAGCPVTARLVKLLGTDWERFQQEGRKEHKTHSKQHPTKHTVCYSALDIWHVCFQADELEDVQSFAKDSLQWDDEKCKLLLRVWTSIPQGYAMLSLKAIRNINRMLCRGLKYSDAVMLAKVPEIAGMNESDIDTLIETFSKDLKTEVDRTKDIYIITNSLIADYKSLSFEDRFAEHDTSYCLQESDKEDIVQHIIKHFGEITWGLMDAEEQETLMNEVEQLYQNFFSKTKRNFYDIPTYASTLRAFLCEKFLHVDEQAWAKLYHPSQIASYHPERDKNCPDSWRLGTPNIGAIRNPVALRTLNILRRKINALLDANMIDPLETRVVVETTRTLNDANMRWAINRFQKEREEQNKTIRSILEKEYTTRAISETDIDTARYILEQREEHIYRTEKTGELQHGFSFNIDAKRYKLWLEQGGICFYTGKVINLTNLFDDNAFDIEHTLPRSKSFDNSDANLTICDAHYNRYIKKNILPAHLPNFEHDQTINGTLYTAIKPRLEMWRKRVERLKVNVDFWKNRTRRAQDKDTRDYCIRQRHLWQMELNYWHEKLSHFEMEEIKEGFRNSQLVDTGIITRHAALFLKSLFKNVEVQKGSVTADFRKILGIQSVDEAKNRDKHSHHAIDATILTTIPIAAKRDRMLEIFYEIEEKKHLMTSENAERIKQELEGLKESLKREIRECHIGYNIKDVPNFIETEILINHHSKDQTLTTAHRRVRIRGKKVYTTNSQGEIVEKWSSGDCIRGQLHNESYYGAIRLPQEIETENGRKPQTKDGHFVYDEKNENITMVIRVPLNSFTAMKDVDKIIDASLREEIRTTLTKRLEEGITFKDAIVQDFWRIDKAGQEIRKDKKGRPICPIRHVRCKVATGRGFMTYESSLSIRRHALTSQKALVHLPNRNYKQNVYAQNNTNYLFLLYEGIKQGKLVRQSRILNLYQVSEMLKAGCSRNLEQSLWHEPFYASFIEKKIEYKLSAIIKTGTRVLMWNETPDELRELSKQDLLKRLFVVKNFNKTGANLLYITHHLNATGAIDLKLVSNSLNCLIEHRDFEIDLLGNITLKD

SEQ ID NO: 19829 - protein, 1020 aa, unidentified
  REGION 1..1020: note = Cas Enzyme sequence
MKDAPGHPAPFYLASEALQEHRVLSPLELWQVLRWYAHNRGYDNNASWSNSSSAVENKEDTEKLRNGHELMKKHGTCSMAETICRELKLEEGKQDAPMSFSTPAYKTLNTAFPRSHVQKEVRQILELSAPQIPGLTPEIIELIVQQELFTTEQRERLLQFGIKLARRYQGGLLFGQLIPRFDNRIIRRCPITWAQIYEAELSLGSSEKQAREKAEKLSKVPSADCQEFYEYRMARILCNLRADDQPLPASLRRQLMKEALKEGKLTKSSLKKIISSQALTENTNIDNYFNLHPDSEEALYLDPAVEVLQRTGIHDVLSPSVKRMALTRLRRGKTCTPRYLLKLMRSHGEPVDQLEAKIEKRRIQQGERKKGKEHVPAGKDWAEEPLLPKCATGRAPYARPVLRKVVEEVLAGEDPSRPARDENHPDGEVKTHHGCLYCLLDPKSKVNEYQRNRSIDSLTNNHLVRHRMMIVERLLKDLIQDFAAGRKERVEKVCIEVARELSSFSGMDSKKIQAELNLRQKSHAMAVERLEKDLPGLALSANLIRKCRIAEDMNWTCPFTLQKYGPHDLDRLELEHIVPYAFRQSNALSSLVLTWKEVNKMKNRRTGYDFVEQCEGSPVPGSNLSICSINNYKTFVNGLDERKWHADDQKRKKKRKALLMVRGLSSKNQAQANIGMTEGMMTQSSHLMKLAARVVSRILPDVSIDMIPGAVTAAVRKSWDVSGCFKELCPELSGKINKQDLRSCTHLHHALDACVLGLIPYIVPAHRNGLLRRVLAMRRLPEELMREVRQIADKRHYILNDDGRIMLKDLPNSVKENIREKLMEQRVIKHIPANMSGASLKETMQRVISIEGNGEDAMVCLRKSSFMVGEDGKRTTVKANKLVGIFPEGSSKLKPLKAAIEIDGNYGVALDPSPVVIRHVRVFKQILALKKKNGGKPVRILKNGMLIRLTSPQDTKREGIWRIASIKDNKVGIALDLQRPHYAGSGSKKHESNWINIRLVTLRTKYHLEIHPTSYTGNPR

SEQ ID NO: 19830 - protein, 1101 aa, unidentified
  REGION 1..1101: note = Cas Enzyme sequence
MSRSLTFSFDIGYASIGWAVIASASHDDADPSVCGCGTVLFPKDDCQAFKRREYRRLRRNIRSRRVRIERIGRLLVQAQIITPEMKETSGHPAPFYLASEALKGHRTLAPIELWHVLRWYAHNRGYDNNASWSNSLSEDGGNGEDTERVKHAQDLMDKHGTATMAETICRELKLEEGKADAPMEVSTPAYKNLNTAFPRLIVEKEVRRILELSAPLIPGLTAEIIELIAQHHPLTTEQRGVLLQYGIKLARRYRGSLLFGQLIPRFDNRIISRCPVTWAQVYEAELNKGNSEQSARERAEKLSKVPTANCPEFYEYRMARILCNIRADGEPLSAEIRRELMNQARQEGKLTKASLEKAISSRLGKETETNVSNYFTLHPDSEEALYLNPAVEVLQRSGIGQILSPSVYRIAANRLRRGKSVTPNYLLNLLKSRGESGEALEKKIEKESKKKEADYADTPLKPKYATGRAPYARTVLKKVVEEILDGEDPTRPARGEAHPDGELKAHDGCLYCLLDMDSSVNQHQKERRLDTMTNNHLVRHRMLILDRLLKDLIQDFADGQKDRISRVCVEVGKELTTFSAMDSKKIQRELTLRQKSHTDAVNRLKRKLPGKALSANLIRKCRIAMDMNWTCPFTGATYGDHELENLELEHIVPHSFRQSNALSSLVLTWPGVNRMKGQRTGYDFVEQEQENPVPDKPNLHICSLNNYRELVEKLDDKKGHEDDRRRKKKRKALLMVRGLSHKHQSQNHEAMKEIGMTEGMMTQSSHLMKLACKSIKTSLPDAHIDMIPGAVTAEVRKAWDVFGVFKELCPEAADPDSGKILKENLRSLTHLHHALDACVLGLIPYIIPAHHNGLLRRVLAMRRIPEKLIPQVRPVANQRHYVLNDDGRMMLRDLSASLKENIREQLMEQRVIQHVPADMGGALLKETMQRVLSVDGSGEDAMVSLSKKKDGKKEKNQVKASKLVGVFPEGPSKLKALKAAIEIDGNYGVALDPKPVVIRHIKVFKRIMALKEQNGGKPVRILKKGMLIHLTSSKDPKHAGVWRIESIQDSKGGVKLDLQRAHCAVPKNKTHECNWREVDLISLLKKYQMKRYPTSYTGTPR

SEQ ID NO: 19831 - protein, 1113 aa, unidentified
  REGION 1..1113: note = Cas Enzyme sequence
MSRSLTFSFDIGYASIGWAVIASASHDDADPSVCGCGTVLFPKDDCQAFKRREYRRLRRNIRSRRVRIDRIGRLLVQAQIITPEMKETSGHPAPFYLASEALKGHRTLAPIELWHVLRWYAHNRGYDNNASWSNSLSEDGGNGEDTERVKHAQDLMDKHGTATMAETICRELKLEEGKADAPMEVSTPAYKNLNTAFPRLIVEKEVRRILELSAPLIPGLTAEIIELIAQHHPLTTEQRGVLLQYGIKLARRYRGSLLFGQLIPRFDNRIISRCPVTWAQVYEAELKKGNSEQSARERAEKLSKVPTANCPEFYEYRMARILCNIRADGEPLSAEIRRELMNQARQEGKLTKASLEKAISSRLGKETETNVSNYFTLHPDSEEALYLNPAVEVLQRSGIGQILSPSVYRIAANRLRRGKSVTPNYLLNLLKSRGESGEALEKKIEKERHQQANRKKAKKTDLDYAATPLKPKYATGRAPYARTVLKKVVEEILDGEDPTRPARREAHPDGELKAHDGCLYCLLDTDSSVNQHQKERRLDTMTNNHLVRHRMLILDRLLKDLIQDFAGGQKDRISRVCVEVGKELTTFSAMDSKKIQRELTLRQKSHTDAVNRLKRELPGKALSANLIRKCRIAMDMNWTCPFTGATYGTHELENLELEHIVPHSFRQSNALSSLVLTWPGVNRMKGQRTGYDFVEQEQENPVPDKPNLHIRSLNKYRELVEKLDDKKGHEDDRRRKKKRKALLMVRGLSHKHQSQNHEAMKEIGMTEGMMTQSSHLMKLACKSIKTSLPDAHIDMIPGAVTAEVRKAWDVFGVFKELCPEAADPVNGRIIKEDLRSLTHLHHALDACVLGLISEIIPADRKNVLRRAIIKRRLDQKMKQDFLELRKKRYYKLREKDGQTGASLVDLPSGIKENIREKLMEQRVIQHVPADMGGALLKETIQRVLSVDGSGEDAMVSLSKKKDGKKEKNQVKASKLVGVFPEGPSKLKALKAAIEIDGNYGVALDPKPVVIRHIKVFKRIMALKEQNGGKPVRILKKGMLIHLTSSKDPKRTGVWRIASIKDNERGIAIDLQIPHSAVPGAKTHEFNWINVKLDTLLTKYRLEIYPTSYTGTPR

SEQ ID NO: 19832 - protein, 1105 aa, unidentified
  REGION 1..1105: note = Cas Enzyme sequence
MSRSLTFSFDIGYASIGWAVIASVSHDDADPSVCGCGTVLFPKDDCQAFKRREYRRLRRNIRSRRVRIERIGRLLVQAQIITPEMKETSGHPAPFYLASEALKGHRTLAPIELWHVLRWYAHNRGYDNNASWSNSLSEDGGNGEDTERVKHAQDLMDKHGTATMAETICRELKLEEGKADAPMEVSTPAYKNLNTAFPRLIVEKEVRRILELSAPLIPGLTAEIIELIAQHHPLTTEQRGVLLQYGIKLARRYRGSLLFGQLIPRFDNRIISCCPVTWAQVYEAELKKGNSEQSARERAEKLSKVPTANCPEFYEYRMARILCNIRADGEPLSAEIRRELMNQARQEGKLTKASLEKAISSRLGKETETNVSNYFTLHPDSEEALYLNPAVEVLQRSGIGQILSPSVYRIAANRLRRGKSVTPNYLLNLLKSRGESGEALEKKIEKESKKKAKKKEADYADTPLKPKYATGRAPYARTVLKKVVEEILDGEDPTRPARGEAHPDGELKAHDGCLYCLLDTDSSVNQYQKERRLDTMTNNHLVRHRMLILDRLLKDLIQDFADGQKDRISRICVEVGKELTTFSAMDSKKIQRELTLRQKSHTDAVNRLKRDLPGKALSANLIRKCRIAMDMNWACPFTGATYGTHELENLELEHIVPHSFRQSNALSSLVLTWPGVNRMKGQRTGYDFVEQEQENPVPDKPNLHICSLNNYRELVEKLDDKKGHEDDRRRKKKRKALLMVRGLSHKHQSQNHEAMKEIGMTEGMMTQSSHLMKLACKSIKTSLPDAHIDMIPGAVTAEVRKAWDVFGVFKELCPEAADPDSGKILKENLRSLTHLHHALDACVLGLIPDIIPAHHNGLLRRVLAMRRIPEKLIPQVRPVANQRHYVLNDDGRMMLRDLSASLKENIREQLMEQRVIQHVPADMGGALLKETMQRVLSVDGSGEDAMVSLSKKKDGKKEKNQVKASKLVGVFPEGPSKLKALKAAIEIDGNYGVALDPKPVVIRHIKVFKRIMALKEQNGGKPVRILKKGMLIHLTSSKDPKHAGVWRIESIQDSKGGVKLDLQRAHCAVPKNKTHECNWREVDLISLLKKYQMKRYPTSYTGTPR

SEQ ID NO: 19833 - protein, 1113 aa, unidentified
  REGION 1..1113: note = Cas Enzyme sequence
MSRSLTFSFDIGYASIGWAVIASASHDDADPSVCGCGTVLFPKDDCQAFKRREYRRLRRNIRSRRVRIDRIGRLLVQAQIITPEMKETSGHPAPFYLASEALKGHRTLAPIELWHVLRWYAHNRGYDNNASWSNSLSEDGGNGEDTERVKHAQDLMDKHGTATMAETICRELKLEEGKADAPMEVSTPAYKNLNTAFPRLIVEKEVRRILELSAPLIPGLTAEIIELIAQHHPLTTEQRGVLLQYGIKLARRYRGSLLFGQLIPRFDNRIISRCPVTWAQVYEAELKKGNSEQSARERAEKLSKVPTANCPEFYEYRMARILCNIRADGEPLSAEIRRELMNQARQEGKLTKASLEKAISSRLGKETETNVSNYFTLHPDSEEALYLNPAVEVLQRSGIGQILSPSVYRIAANRLRRGKSVTPNYLLNLLKSRGESGEALEKKIEKERHQQANRKKAKKTDLDYAATPLKPKYATGRAPYARTVLKKVVEEILDGEDPTRPARREAHPDGELKAHDGCLYCLLDTDSSVNQHQKERRLDTMTNNHLVRHRMLILDRLLKDLIQDFAGGQKDRISRVCVEVGKELTTFSAMDSKKIQRELTLRQKSHTDAVNRLKRELPGKALSANLIRKCRIAMDMNWTCPFTGATYGTHELENLELEHIVPHSFRQSNALSSLVLTWPGVNRMKGQRTGYDFVEQEQENPVPDKPNLHIRSLNKYRELVEKLDDKKGHEDDRRRKKKRKALLMVRGLSHKHQSQNHEAMKEIGMTEGMMTQSSHLMKLACKSIKTSLPDAHIDMIPGAVTAEVRKAWDVFGVFKELCPEAADPVNGRIIKEDLRSLTHLHHALDACVLGLISEIIPADRKNVLRRAIIKRRLDQKMKQDFLELRKKRYYKLREKDGQTGASLVDLPSGIKENIREKLMEQRVIQHVPADMGGALLKETIQRVLSVDGSGEDAMVSLSKKKDGKKEKNQVKASKLVGVFPEGPSKLKALKAAIEIEGNYGVALDPKPVVIRHIKVFKQIMSLKEQNGGKPVRILKNGMLVHLISSKDPRRTGVWRIASIKDGKVGVKLDLQRAHCAAPTNKKHECNWREVDLISLLKKYQMKIYPTSYTGTPR

SEQ ID NO: 19834 - protein, 1006 aa, unidentified
  REGION 1..1006: note = Cas Enzyme sequence
MPQVLGIDLGPNSIGWALINEEKNQIIDTGVRIFQEGVNPPQGKEESKNKARRDARGARRRNFRYKMRRNTLIKALKKLGMFPDDPYAVQDYFKMDPYLLRKRGLDEKLTLVELGRALYHLDQRRGFLSNRKAGGNEDSAIFKGDQVKAGINEVKIILEENKYRTFGEYLASLDPHDKRRRNRYTLRLWYKEEFEKLWTKQQEFYPEQLNDQEKAFIYKLIFMQRPLRSQKHLVGFCTFEKDKRCAPKSSPVFQYFRVLEQVNRLRIGTTERKNEPLNDEERKTLIDYLNVNSKLEFKKMLKLLHLPEDTIINLDTEKLLGNHTYSELVKIFGIDRFTQMTDEKRYEIWHTIHFATHNEWLEKYGREQWGLDDEGIKSLLGNTIENKPNDGYARLSRKAIMKIIPNLEKGARYDEAALAAGYHHSIVDEVKPVEFLPDPNNIRNPIVQQALYQLKKLINAILLNYERPDIIRVELARELKASKDQRTEIRIQNIQRQKEAENIRARLIRDNYVQDPKRDDVIKYLLWQECGETDPYSGKKISLTDLYKDPKFEIEHILPYSRSLDDSFANKTLCSIEYNRQKGNRTPWEAFGHSNDYELMLERVRKFKSEKAFSKLRKFQVKDLAAELEDEFINRQLNDTAYISREARKYLQQITPRVDIVKGGATAKLRTLWGMNSILSGDENVKTRADHRHHAVDALVVAQTTLGMLHKLSSYHKYNNPNYAKKDLFAKPWDSFREEAETAVNSILVSYHFRNRARGKLHEETNYGQITDPESGEKVYVVRKSIESITAKMIGNIVNPETRKLVYQRLRQCGVNTQQKKWDIPKQAFAEPLLHPKTGHPIKSVRVKIPAGNMIPLYGEKRKLFVEPGGNHHIEIFANSDYSKKTGYVISLYEAVKRKKAGLPVIDKRPRDTEYPNFVMSLAINEMFLVDVKEEDIDWNNPDQKMLAQNLYRVQKLEIQKHITLRHHTVSLSGSTDPGVISKMPNTINGIKVVINYLGKLGKADA

SEQ ID NO: 19835 - protein, 1168 aa, unidentified
  REGION 1..1168: note = Cas Enzyme sequence
KRCGVKDKEKAFKDELFKNNSNKKTSEGTEENDILGTNAVITLLSGGTVTADKLFVQAEFQDKISISFKKNEDEFEQILTELDEYAEYLLKIRAVYDWAVLYEASQGQVYISKAKIEVYEQHKKDLAGLKAFIRKYCTDKYNEIFRDAGDNNYVAYSYNFNSLNLDEGEKRPKRKASQEDFCTYIRKIVKDIKCEMEDKEFYEDMGKRLELGTFMPKQVNTDNRVIPYQLYYFELARLLEKVSSYLPFINEKDSEGYITKEKLLSIMEFRIPYYVGPLHRDHKENNSFAWIKRKAQGRIYPWNYEEKIDLDASEQAFIDKMTNQCSYLPGEDVLPKYSLLYCKYEVLNEINNIKINGQRITVDCKKEIFGLFKRNKKVTVKRIRDFLVSNNYMSDSDEITGLDISVKSSLKSYHDFRRMLENKTVNEEDVEEIIKRLTYTEDKKRINKYLEENYPNISEEDRRYISKLKYKDFGRLSEKFLTGIKGVVKETGEILSVIHIMWETNDNLMQIIFSDHYTIRDVLEREREDYYSEHPASVEQILSDMYVSNAVKRPIYRTLDIIGDVTKACQNAPRKIFVEMARGGGEKGKRTVSRRDKIKELYKHMDKQEVREISKEISELLGELDKKTDNELQSEVLFLYFMQLGICMYSGDPIDITKLKSDAYVNVDHIYPQAYVKDDSLNNKVLVKSKLNGEKSDNYPINKDIRDKMSSIWKHYRKEGLISEEKYNRLTRKTPFTDEEKQGFVNRQLVETRQSTKAVAEILKTMFPKTEVVYVKAGLASEFRHAFGIIKSRQINDLHHAKDAYLNVVCGNVYHSTFTKKFFQNNLKYSIKTETVYKRKIEVDGKPIWNGQESLSFVIKMLGKNNIHYTRYAFCRKGGFFDQMPVTAKEGLVSRKKNLPSEKYGGYNKPTASYFIMAKYTEKVKKEKQDIMIVPVELMVGEKVLNDKNFAVGYIQQQIAQISNRKVEEIVNVSFPLGLRPLKVNTRFSFDGFEACVTGKDSGGKQISMSSLTSLKVSQANEKYIKKVERFAEKKEVNNKITLDEKYDEINENLNFEIYRMLQQKITKSCFGVAFGNLSNVFEKGENKFVALKTDMQCEVLLNIINVFKTGRSGTCNLKSIGGVEKAASYRISAKVSNWKKNYTCVKIIDESASGIFRKESENILEWL

SEQ ID NO: 19836 - protein, 1476 aa, unidentified
  REGION 1..1476: note = Cas Enzyme sequence
LKKEKYTIGLDIGTTSVGWAVIDDDFNLVQDKKKITEIDADGNVARRKSRVNLWGVRLFEAGQVAADRRIKRGGRRRLARRKKRLNYLREIFEPEILLFDDSFFIRMDESFYQNDDKSNKTIEAKYPFFNGIEGSGETYSNEIDYYEKYPTIYHLRERLIENPEQADLRLVYLAMHHILKFRGHFVNQGQDFNMKNIDVVASLSQLLERYADEDVTSFDFEFEKYDKTNDILTNRGGSKSEKASELTKLYNVLTDENYAKCDIDMTKSQAKKFLESKNAQQRALFTAVVGNGIDLAKIFDNPGYNQKENAEMPKAGEFKYSLDADKFEEKLTVIEAYITPEEFEIILLGKNVYESIVLCNILTANSLSASMVEKFNLHKKQLEALKVFTKSISYDFYATFFKEEGIYTKFIQGSGNPSKRTSREDFYKEVKKEFENEFKGLKFPDAGKDFDFSKAENITEEQQKELAEMAVAMEFETYLPKQRMSDNGAIPYQIHEDELIKIIENQSVYYPFLGEQVIVGENDNTKSEFKIQTLMKFRIPYYIGPLTPATLGNPGNKTSDISRFAWMQKRTDEKITPWNFDRVVDKEASAVEFIERMTSFCTFLPDKKVLPKNSLLYQEYTIYNELIIGGYYLNGKRCYFPSALRQKIVDKLFKHNKKVSAKMMLDFLNKEESLNLESPKELFGIDTFVKSPSYNTTFSTFIDLVKALKDDETTAEMAEQLIEDNRKKFEEIIKWQTIFEDNKVLKKRIKTANAEWNNLLTPAQVNKLSKKHYTGWGRLSKELLDGIKASNGKTIIANLKEEKYNNFMRLIDNDEQIIEQIRKAQVGDIDVNELNYDMVKNLAGSPAIKKGIWQSLKIIAELEQYLGKDKIGKIVVEMAREDGQGRSTKRIKQIENFYKNFKEKTGEDLSVELKRDFDMQAEESFNNEKLFLYFMQNGKCMYSGRSLNISELSSYEVDHIIPQTFIKDDSFDNKVLVLRTENQNKGGDVPAKGIVWKMRDFWETLAKNGQVSPKKLANLTKGSLSEKDKDGFINRQLVETRQITKHVANILASHFKEDEVEILTPKSSLTNQFREGVVYVPAKEFNAEEAVNNGMTYEVGGMKYFPNLESVESRYSNSSFVRVHFHEGFKKNRDINDYHHAHDAYLNAVVATYIYHIRPDLRKMWVYGEYQRKANIETGKWGSQRKNFGKQLLTGMADLTWEGWDLETGEVLELWKRDEVLEKIQKNLGLRGMNIVKKTEVQIGKFGDESVKKKNKSAIPVKSKLDPERYGGATAPISAFTVLVKNNKDEIKPLSIPSAVAKAYLNSDTKVEFMKPLYPKAKIEEIVIEKVPKYTHYILPNGGHRLVASFQEAKPAIQLPMMVIVNAKSNESELLEVFDSFSSFIQKNKLFSEGKLPLLDTEIKEYFENTSSDEKSNIINEMMRVTKGSNQGLNALKKSGLGAIKQQLTGSENIITNNTTLIYQSTTGLYETRKKL

SEQ ID NO: 19837 - protein, 950 aa, unidentified
  REGION 1..950: note = Cas Enzyme sequence
LQTGRTYTLGIDYGASNVGIALVCNEPTGENLPLFAATLRLDARDLKEKVETRAGIRSLRRTKKTKKHRLHDLADALKSIGLPERQVQSVIRFSKRRGYKSLFDEDLHDETEEQQDTDFVYRFSREVFFQSLSSELENIIADPVLRLNTLAQCERILNKQGNPDHEIRRIRIDNRGASRCAWAGCNRVTPRSDNAIRDVLAQQLYNYFQALLRDNPSQSAKVEDVIQELVVIAKRIRAASGDHIKEEKKALRKRARGALRGLNKLLMPVATGIPEDEPWEYVEKGMMNTIERRAGRNRYCREHSAEYVQTILAGKAVPFKKTITDADIISRREQMAYSKLWRYIEARILPLAPQGIDRIVVERTAFDLLAGSWKTIQGATDKYKEEMYQQGPMFGFSSKREMLNEEFGGLCAYCGKPSADLMDHDHIMPRADFFFDGYLNILPACPTCNTNLKGKRALSDQALTIVPEAYEAYKKYLATKFRTRPMHFLHTVKKGILNLMKDPDRIWEAEKYLSIVARQYAQIVQTQRSPRPFARLLCRKIKESQGSEPSIAFRSGRHSALYRQIAYPEFEKYADKEQGNVINHGLDAILLASSLPDLYPVESLNIPIARLKGWTASVRKRAPRPGSDGIPAISVKGMVDGFEKIHAPGYIEVEVRAMVWNKKNSRTHKQDPYGWSESHHMPTKRKAAADLYADMTKENSPTRLKAMVERIYHPALKHFILGRMDTDKPGQSAAAALKEWLQASIRNSLPDSQFSNHPGDQARKADLEMFAEVPAAPIPAIIGVKMIDTGVQGKIDLERMDHKTGRIVHRYMTDPPNKAVYVAYPKKRDGGSDMTKPCLLFLRQNDAIIVESLAAFRPLPEELARGRVLGSTQSKIFDAALLEKYLEECGFHCYIRLTSGCVINYEDGKRWFVRNFDQSKDFKKARLRNIKGVQKTPFSRRIEPLVYLGK

SEQ ID NO: 19838 - protein, 1273 aa, unidentified
  REGION 1..1273: note = Cas Enzyme sequence
MKILGLDLGIGSVGWCLIEIDEENHPLLIHAIGSRILSISPTESDNFCKGKGETVCSQRTFMRTARKGLDRYQMRRKILSLELAKLGMISSDNSLLTLSPLQTWQLRADAATTGKRLSLAEIGRVLLMLNQRRGYRHSKSDDSDSSQKSYVTDVNQRYSDLNGMTPGQFFATKLKESETTSSAGKNVYDYRIKGYVLPRKAYEEEFYRIMEVQGEFYPEILNDATVKKLHDIIFYQRPLKSCKRLVSVCEFESLKFINKTNGKEVITGPKVAPRTSPIAQETRLWETVNNIRLKNFSNKKRVRKDSQPGLFDEEMSQSKDFRLLQYEYIPNQEERTRIFNFLNTNEKLTQTQLLKILGLKASDGFRWEGAPKNGLEGNRTYTQLKEALGDLAESMPDILRFNIEYENTDIVDQDTGEIISRVKMNRRNSATGKNDGEIYPQYQDEPLYRLWHTVYSSSSKEELSKAIEKQFGITDKEVIDRLYKIDFVKPGYSNRSAKFMRKLLPYLKDGYLYSEACTFVGVNHSDSLTKEENERRVLKKHIDNIEKGELRQPVVEKILNQMINIVNALIEKYGEIDEIRVELARELKQSKDQRAETTSNIAKRERENAAIAIKIKEQGLVASRRNIQKYRLWEESGHRCIYCGKTLSLGEFLGGHGGEIEHIVPRSILFDDSMTNKACSCSHCNKEKNNRTAYDYMSGKSEADFNRYVANIDTLLKEKKISRTKHDRFMMSQSEIPQDFLDRDLRQSQYIAKKAREILFEVCRNVYATSGSVTDFLRHTWGYDNILHNLNIKRYEQADLVEEVSYEHEGQTHKELRINDWSKRLDHRHHAVDALVIALTRQGYIQRLSNLNTQRDKMYADIQGQSNEFKEKFHLLEKWAELLPHFPVNIAADTIDSIAVSIKSGKKLSTPGKRYIYRNGKRKLVQDNILVPRGALHQETVFGKIKLQDNGKDLKYAFSNPELIADDDIRNLVINRIQEADGDFKKALKALKRSPLIIAKNGKEKEITSIDCYKETFVTRADLSALTAPGIQRIVDKSIREAALDRLAECKNDIKKYQQSFEENPIYIGNDVRHPVKRVRIFSNDNLVPIRKDSTGKAVAFASSGNNHHVAFYEKDGKVTEVIVSAWTGMKRKLIGLPVIIKDPDEAWTRLIDMRESDDVREVADTLPPVGSRFLYSLKIGDMCLLGLTPEQLSDALDMNDMKTLTAHLYRVQTLSTGDYRFRLHTWTNVDAKNARPDTEMKALYRIRSYNAITLSNLIPVSVDNLGQIKILK

SEQ ID NO: 19839 - protein, 1008 aa, unidentified
  REGION 1..1008: note = Cas Enzyme sequence
MKILGLDLGIGSVGWCLIEIDEENHPLLIHAIGSRILSISPTESDNFCKGKGETVCSQRTFMRTARKGLDRYQMRRKILSLELAKLGMISSDNSLLTLSPLQTWQLRADAATTGKRLSLAEIGRVLLMLNQRRGYRHSKSDDYDSSQKSYVTDVNQRYSDLNGMTPGQFFATKLKESETTSSAGKNVYDYRIKGYVLPRKAYEEEFYRIMEVQGEFYPEILNDATVKKLHDIIFYQRPLKSCKRLVSVCEFESLKFINKTNGKEVITGPKVAPRTSPIAQETRLWETVNNIRLKNFSNKKRVRKDSQPGLFDEEMSQSKDFRLLQYEYIPNQEERTRIFNFLNTNEKLTQTQLLKILGLKASDGFRWEGAPKNGLEGNRTYTQLKEALGDLAESMPDILRFNIEYENTDIVDQDTGEIISRVKMNRRNSATGKNDGEIYPQYQDEPLYRLWHTVYSSSSKEELSKAIEKQFGITDKEVIDRLYKIDFVKPGYSNRSAKFMRKLLPYLKDGYLYSEACTFVGVNHSDSLTKEENERRVLKKHIDNIEKGELRQPVVEKILNQMINIVNALIEKYGEIDEIRVELARELKQSKDQRAETTSNIAKRERENAAIAIKIKEQGLVASRRNIQKYRLWEESGHRCIYCGKTLSLGEFLGGHGGEIEHIVPRSILFDDSMTNKACSCSHCNKEKNNRTAYDYMSGKSEADFNRYVANIDTLLKEKKISRTKHDRFMMSQSEIPQDFLDRDLRQSQYIAKKAREILFEVCRNVYATSGSVTDFLRHTWGYDNILHNLNIKRYEQADLVEEVSYEHEGQTHKELRIKDWSKRLDHRHHAVDALVIALTRQGYIQRLSNLNTQRDKMYADIQGQSNEFKEKFHLLEKWAELLPHFPVNIAADTIDSIAVSIKSGKKLSTPGKRYIYRNGKRKLVQDNILVPRGALHQETVFGKIKLQDNGKDLKYAFSNPELIADDDIRNLVINRIQEADGDFKKALKALKRSPLIIAKNGKEKEIT

SEQ ID NO: 19840 - protein, 1372 aa, unidentified
  REGION 1..1372: note = Cas Enzyme sequence
MEKREQKRYYLGLDMGTTSVGWAVTDPEYHLLRAKGKDLWGVRLFSPAETSAGRRSFRVARRRRQREVARIGILREYFETEINKIDPGFYARLDDSKFYKEERGADNQQPFALFADCNYTDKEYYQEYPTIFHLRSELLHSTEPHDVRLLYLAISNMFKHRGHFLNSSLDTEGGEVDFTAAYEELVECAGELGIEIAKSVDSKRIEDTLGEKGVSKRRMAENLFELLQLEKGNKAERALIQMICGFSVKMVDIFGEELLGEENKKLSLTFRASDYQEKADEIQAILGDNFELICVAKQLHDLGLLSSIRKGHQYLSDARLEIYQNHQADLKQLKTVLKRYNQDAYNEMFRIMKDGNYSAYVGSVNSSDGKVRRVGKLRTQEEFYKYLKAVIEKLPQEDRDVKEILKKIEAEAFLQKQRTSSNGVIPNQLHAQELTAILKNAEGYLPFLTERDESGLTVSERIIKLFTFQIPYYVGPLGQQHCGKRGYNVWAKRIAPGKIYPWNLEEKVDVPGAAISFIERMVKHCTYLSGAQALPKQSLLYQKFEVLNELNNLKIQGEKLTVEQKQDIYHQLFTNGKKVTLNKLKTYLRSIGYSDESLEMISGIDGGFNSSLSSLGKFREALGERALCDENRAMIENIIFWKTVYGNDKKFLKEKMAREYGAVLTQEEIKRISGFKFEGWGRLSKEFLTMEGASIEDGEIRSLIGALWDTNENLMELLGSRYTYMESLNQQLDLAEKPLEEWTIEDLDNMYLSAPVKRMVWQTLTILQEIEAVLGNVPERIFVEMAREDGEKGKRTTSRKQNLLSLYKGIKDDSIAWREELEERQEGEFRSKKLYLYYLQQGRCMYTGERIDLDELMKSNSQYDIDHIYPRHFIKDDSLENNLVLVNKAKNARKSDHFPIDAEIRSSRYPFWKLLVDKGFISREKFNRLSRNTELTLEEKAGFINRQLVETRQGTKAITEILRKAFPETEIVFSKAGLVSDFRNQYDLYKVRCINDLHHANDAYLNIVVGNTYFVKFTKNPLNFLKEAGKHPEDKAYQYNMDKVFRWDVKRNGETAWEASSNEHPGTIATVKKVMAKNSPLVTKMCREIHGGITRKSTIWNKEKAKGQGYIPVKMNDPRLQNVSRYGGLSDVTTAGYTLVEYQVKGKNVRSLEALPVYLGRIDTISNENLQEYFSKQIKEENAGKAISDVRICKRFIPLNSLIKYNGFYYYLGGKTGNRLIVRSAVQPCFDDKMMAYIKKIEKAISQNNYMEKDENKEQVLSCERNQELYEQFLEKCEKTVYKYRLGAVAGILKSGKEKFETLGLENQCNVLFELIKNFSQSADTINLSMVGGANTAGKMLINKKISEASEMYLLTQSSTGLFQTKTDLLTV

SEQ ID NO: 19841 - protein, 1366 aa, unidentified
  REGION 1..1366: note = Cas Enzyme sequence
MDKKMYVGIDMGTNSVGMAVTDEEYNLYRVKGKDLWCSRLFTEADTAAERRTNRISRRRRQREVARQGVLRKLFADEINKVDEGFFARLDESKYHLEDRDSEQKYTLFTDTGYTDKDYFKDYPTIFHLRNELLHPVKDSYDVRLVYLAIANMFKHRGNFLNESLDADKITSSADEAYRSLVETAMMYSIEFPENINVKKFIDIIGENGVSRSKHLENVCEYLGITKKDKQAYEILKLICGMSGVLINIYGEDVIDEENKKFSICFRDSNYEEKEGEALELLGDEYFELLEAIKEIHDIGMLAGIIKGHKYLSEARVDLYEQHKKDLDMLQHVLKKYDMKAYDEMFRVMKAGNYSAYVGSVNAHSKKIRRNGGDGRTQEEFYKNVKAVLKKFPEDDEEIKTILSEIDSETFMPKQLTASNGVIPNQLHVSELKAILTNAEKYLPFLLGKDESGLTVSERIVELFRFHIPYYVGPIGAQGENVWAKRRSGEENGKVYPWNFEQKIDTQSAAKEFINRMVRHCTYLSGERTLPKQSLLYEKFMVLNELNNLKIAGKKPSVQVKQDIYEKLFKLGKKVTLKQLEEYLCNNSIIASKEDIEGIDGGFNSSLTSVGKFRGVLGDELFTDANQAMAEEIIFWGTVYGNDKKFLKDEIESKYGTVLSKDQIKRILGFKFNGWGNLSKTFLELQGSCECGDCSLIQALWETNHNLMELLSEQYGFKKELDALASNVEKPLTEWTIDDLDNKYLSAPVKRMVWQTIKMLREACELTNKEPDRVFVEMPREHGKENDRKASRKKKLLDLYSALKRENKTWAELKIREIEGKTEADFRIKKLYLYYMQQGKCMYSGEKIELNDLFNNNLYDIDHIYPRHFIKDDSLENNLVLVKKQINNHKSDNYPLESDIRKNMNKFWKSLREKNFISEEKYSRLIRTEEFTDEEKAAFISRQLVETRQGTKAITQVLKQAFPNTQIVFVKAGIVSDFRKKFDINKVRALNDTHHAKDAYLNIVVGNTYYTKFTNNPMNFIKDARKNPKNDFYRYNMDKIFDYNVIRNGEEAWIADNGKTKQHVLQIMKKNSVTITVKTEEYHGALSNKVTVWSKEKAKGNPDAYMPVKTSDTKAQDVTKYGGITAIANSGYTLVEYKVKGKKVRSLEALPVYLGRSNALTNEDIMQYISAALQKEYAGKEISDLSVRVPFVPQKSKVRVDGFEYYLGGKTGKSVYLSNAMPLYLSGNDEEYLRKIMKAIEIDNYEEIDKDSNAIITEEKNVALFDVLCVKINSEPYINNQWNIYKILEGKEEIFKNLDIKKQCYIIGQIISWINSSTQNVNLKDVCGSEHSGMQRLNKKISECKECILIHQSVTGMYERRIDLLSI

SEQ ID NO: 19842 - protein, 1366 aa, unidentified; identical to SEQ ID NO: 19841
  REGION 1..1366: note = Cas Enzyme sequence

SEQ ID NO: 19843 - protein, 1319 aa, unidentified
  REGION 1..1319: note = Cas Enzyme sequence
MKQNGRNLETGKYYIGLDVGTNSVGWAVTDEAYNVQKFKGNAMWGVRLFDDAQDASVRRSSRTARRRLARKQQRLALLQMLFSEEILKIDPQFFLRMQESALFPEDKTTGKFSVFADEKFSDIEYHKKYPTVFHLRKELAASAQPHDVRLVYLALHHILKNRGHFLYETSENGEYATVEDACRELCTYLQQEYDLAFEAQNAEEFLAVLCRSDMGITAKKNALRKAYGAFDAQESDLSLLAVCDMLAGASVSFSDLFSDPELKKAEIKSFSLKNNLDDSYDALSETLGERLELLVQLKTVYDAAKLSQILSGNSSISAAKVALYEKNHRDLVLLKKYVRAAAPEKYRLIFIQKGKNLNNYPAFSRYRAESGDYACNQEEFCKFLRKELPAPGNEDGEMCRIFREIQDASFLTRLRGSDNGVIPYQLHKKELQQILENAAAYLPFLEERDGDGLSVRDKILKVFEFRVPYYVGPLPTGFKHHWAVRFAGKETEKVYPWNFESVVDTEASAEKFIENLIGLCTYTGEKVLPKDSLLYSEFMMRNEMNLLRVNDHPLPVWVKEELIQHFFYRSGRKVTKKRIREYLLSEGQITAGDEITGIDDTVKTTLRSYHDLRGILERTGDYDMVEAIIRSILVFGEDKRMLRRWLRKNTHDLTESDVKHICRLKYTEWGRLSEFYLNGLKNGEGKTVIACLRETDCNLMQINEEFGFAQPAEAHRNELLGCNQTLTDKLDAMYLSPGARRSIRQALRIVDEIVDIRKAAPAKIFIEMARDSREEMKGKRTESRKTKLQELYRACKEESAALVGSLEREDDSSLRSDKLYLYYLQLGKCMYSGEPIDLETLLHGDRYDIDHIFPRSRIKDNSLDNRVLVKAELNREKTNVYPIDESIRSRMRPMWSRMKAQGLISQKKFDRLVRAAPLTTDELSAFVARQLTETQQSTKALASLLQNINPDIRIVYSKAGNVSDFRHDFEMLKCREVNDLHHAKDAYLNVVVGNVYDTRFTKQFFRNIHRENYSLNQVFAYDTPGAWDKTETIKTVRRWMDKNNILVTRMPREVKGQLFDLQLMPAGKGQLEKKKGLPVEKYGGYNKLSGAWFCAVEYTDKKKRVRALQPVYVYQKDLFEKDPLRYCTEILRLEDPRIIVPKIRMDALLELDGKRLLVSGRTGSRLICKHTYQLTIDKSREAYIRNISKYVDRCAAKKTELPVTAYDKVSAEQNRELYAWFLMKCRQNVYADLLKNMAEDMLAHKAKFDGASVLEQCRLLLEILKAFKCNAQNPDFTFLCGKGAVAILLSNANITKRNTAFLIHQSVTGLYEYKTNLLG

SEQ ID NO: 19844 - protein, 1330 aa, unidentified
  REGION 1..1330: note = Cas Enzyme sequence
MEQGTKRGDYYLGLDMGTDSVGWAVTDMDYRIPKFKGNAMWGVRLFDESNTAEERRLFRISRRRTQRRRERLDLLEMLFDGPVSTKDPAFFQRLRESDLYAEDKTTNTPFAVFADPDYTDTDYHRQFPTIYHLRNALLHENGPYDVRLVFLAVHHIIKNRGHFLFDSLGEAQNFGSIYGAFRDYLQEEYECAVECTDEKAFGAVLKDKSLSKSRKTAAAAELFGVTKKSAPQLYACLALACGATVKLKDLFNDDTLAEAEKPSIAFTGSYEDNEPEYQSLLEERFDLVVRIKALYDWAILDEILAGHQYLCEAKVATYEQHKTDLQRLKTYVKTYRSELYKKIFKLSSKDDNYVAYSGHIKENGHTGVLEKTCNQEAFCAYLKKTLGDNEDPAYADMFAAIENGTFMPKQVSKDNGVIPMQLQKKELEGILDRAQGYLPFLTEKDETGLTVREKIISLCEHRIPYYVGPLNKHSKKAWIVRKEGKIYPWNFDQVVDLDRSAEAFIENLTSKCTYLPQYDVIPKYSLLYTKFMVLNELNNLTLDGQRVKVKLKQEIYRDLFEKRGKVTGKGLKNYLQSRGIAYEVMGGFDENFKASLKPWQDLAPYDLTYDEKEEVVRLITIFGDDKKLLKKRLRDLFVDRLTETERGKLARLKYTGWSRLSREFLTQVVCTDKDTGEVTNIISALWDTNLNLMQLLYSEDYMPTFGEQVAACNQFDKDVSLRQMVEDLYVSPKVKRPIYQSLLIAREIEKIQKCPPKKIFIEVARGEEKKERKKSRKAQLLELYQSCKKEYADLYAQLEGTEEDRLRSDKLYLYYTQMGRCMYTGEHIDLNSLLSGNVYDIDHIFPRSKVKDDSLNNRVLVKKVDNAKKTDVYPLDRETQAKMHGFWQLLLSKNLISKVKYQRLIRTTPLTDEELGAFISRQLVETRQSTKAVAQIMEQLYDKEQTEIVYVKAALASDFRHTYDMLKCREVNDFHHAKDAYLNVVVGNVYNVRCTHNLRNFIRGLQENGPRGYSMNAMFKWDIPGAWVAENGELQETQTKSLKIVKQMMAKNNIRYTRYAFCQHGGLFDQMPVKKGKGQIPLKQDGPKSDMAKYGAYNKAMSKYFALISYLDKKDKEVRQLVPIDAVTEKAYLADPDGYVSSYVGAPAKVLIPCVKYNACLSFDGFRMHLSKKSGNQLGYKPAMQLVLSYEQEKYVRNITKYLSQNKDRPLNKYDGITPDKNIALFDTLVDKMNHSVLSLRFGDMGAKIADKREVFCALSSEEQCVVVAEILKILHANVMIGDLTLIKLAKNAGRLYTNMKLSEIKGVTSVKLIHQSITGLFEQQIELLP

SEQ ID NO: 19845 - protein, 1330 aa, unidentified
  REGION 1..1330: note = Cas Enzyme sequence
MEQGTKRGDYYLGLDMGTDSVGWAVTDMDYRIPKFKGNAMWGVRLFDESNTAEERRLFRISRRRTQRRRERLDLLEMLFDGPVSTKDPAFFQRLRESDLYAEDKTTNTPFAVFADPDYTDTDYHRQFPTIYHLRNALLHEDGPYDVRLVFLAVHHIIKNRGHFLFDSLGEAQNFGSIYGAFRDYLQEEYECAVECTDEKAFGAVLKDKSLSKSRKTAAAAELFGVTKKSAPQLYACLALACGATVKLKDLFNDDTLAEAEKPSIAFTGSYEDNEPEYQSLLEERFDLVVRIKALYDWAILDEILAGHQYLCEAKVATYEQHKTDLQRLKTYVKTYRSELYKKIFKLSSKDENYVAYSGHIKENGHTGVLEKTCNQEAFCAYLKKTLGDNGDPAYADMFAAIENGTFMPKQVSKDNGVIPMQLQKKELEGILDRAQRYLPFLTEKDETGLTVREKIISLCEHRIPYYVGPLNKHSKKAWIVRKEGKIYPWNFDQVVDLDRSAEAFIENLTSKCTYLPQYDVIPKYSLLYTKFMVLNELNNLTLDGQRVEVKLKQEIYRDLFEKRSKVTGKGLKNYLQSRGIAYEVMGGFDENFKASLKPWQDLAPYDLTYDEKEEVVRLITIFGDDKKLLKKRLRDLFGDRLTETERGKLARLKYTGWSRLSREFLTQVACTDKNTGEVTNIISALWDTNLNLMQLLYSEDYMPTFGERVAACNQFDKDVSLRQMVEDLYVSPKVKRPIYQSLLIAREIEKIQKCPPKKIFIEVARGEEKKERKKSRKAQLLELYQSCKKEYADLYAQLEGTEEDRLRSDKLYLYYTQMGRCMYTGEHIDLNSLLSGNVYDIDHIFPRSKVKDDSLNNRVLVKKVDNAKKTDVYPLDRETQAKMHGFWQLLLSKNLISKVKYQRLIRTTPLTDEELGAFISRQLVETRQSTKAVAKIMEQLYDKEQTEIVYVKAALASDFRHTYDMLKCREVNDFHHAKDAYLNVVVGNVYNVRCTHNLRNFIRGLQENGSRSYSMNAMFKWDIPGAWVAEDGELQKTQTKSLEIVKQMMAKNNIRYTRYAFCQHGGLFDQMPVKKGKGQIPLKQDGPKSDMAKYGAYNKAMSKYFALVSYLDKKGKEVRQLVPIDAVTEKAYLADPDGYVSSYVGTPAKVLIPCIKYNACLSFDGFRMHLSKKAGNQLGYKPGVQLVLSYGQEKYVRNITKYLSQNKDRPLNKYDGISVEENVALFDALMGKMNNSIFSLRFGDMGVKISNKREVFLALPPEEQCVVLAEILKILHANVMCGDLTNIKLAKTAGALVSNMKLSEIKGVTSVKLIHQSITGLFEQQIELLP

SEQ ID NO: 19846 - protein, 1330 aa, unidentified
  REGION 1..1330: note = Cas Enzyme sequence
MEQGRKRGDYYLGLDMGTDSVGWAVTDMDYRVPKFKGNAMWGVRLFDESNTAEERRLFRISRRRTQRRRERLDLLEMLFDGPVSTKDPAFFQRLRESDLYAEDKTTNTPFAVFADPDYTDTDYHRQFPTIYHLRNALLHEDGPYDVRLVFLAVHHIIKNRGHFLFDSLGEAQNFGSIYGAFRDYLQEEYECAVECTDEKAFGAVLKDKSLSKSRKTAAAAELFGVTKKSAPQLYACLALACGATVKLKDLFNDDTLVEAEKPSIAFTGSYEDNEPEYQSLLEERFDLVVRIKALYDWAILDEILAGHQYLCEAKVATYEQHKTDLQRLKIYVKTYRSELYKKIFKLSSKNDNYVAYSGHIKENGHTGVLEKICNQEAFCAYLKKTLGDNGDPAYADMFAAIENGTFMPKQVSKDNGVIPMQLQKKELEGILNRAQRYLPFLTEKDETGLTVREKIISLCEHRIPYYVGPLNKHSKKAWIVRKEEKIYPWNFDQVVDLDRSAEAFIENLTSKCTYLPQYDVIPKYSLLYTKFMVLNELNNLTLDGQRVEVKLKQEIYRDLFEKRGKVTGKGLKNYLQSRGIAYEVMGGFDENFKASLKPWQDLAPYDLTYDEKEEVVRLITIFGDDKKLLKKRLRDLFGDRLTETERGKLARLKYTGWSRLSREFLTQVACTDKNTGEVTNIISALWDTNLNLMQLLYSADYMPTFGEQVAACNQFDKDVSLRQMVEDLYVSPKVKRPIYQSLLIAREIEKIQKCPPKKIFIEVARGEEKKERKKSRKAQLLELYQSCKKEYADLYAQLEGTEEDRLRSDKLYLYYTQMGRCMYTGEHIDLNSLLSGNVYDIDHIFPRSKVKDDSLNNRVLVKKVDNAKKTDVYPLDRETQAKMHGFWQLLLSKNLISKVKYQRLIRTTPLTDEELGAFISRQLVETRQSTKAVAKIMEQLYDKEQTEIVYVKAALASDFRHTYDMLKCREVNDFHHAKDAYLNVVVGNVYNVRCTHNLRNFIRGLQENGPRGYSMNAMFKWDIPGAWVAENGELQKTQTKSLEIVKQMMAKNNIRYTRYAFCQHGGLFDQMPVKKGKGQIPLKQDGPKSDMTKYGAYNKAMSKYFALISYLDKKGKEVRQLVPIDAVTEKVYLADPDEYVSNCVGVPAKVLIPCIKYNACLSFDGFRMHLSSKSGNQLGYKPAMQLVLSYEQEKYVRNITKYLSQNKDRPLNKYDGITPDKNIALFDTLVDKMSNSILSLRFGDMGAKIVDKREAFCVLTPEEQCVVLAEVLKILHANVMRGDLTNIKLAKTAGALVSNMKLSEIKGVTSIKLIHQSITGLFEQQVELLP

SEQ ID NO: 19847 - protein, 1330 aa, unidentified
  REGION 1..1330: note = Cas Enzyme sequence
MEQGTKRGDYYLGLDMGTDSVGWAVTDMDYRIPKFKGNAMWGVRLFDESNTAEERRLFRISRRRTQRRRERLDLLEMLFDGPVSTKDPAFFQRLRESDLYAEDKTTNTPFAVFADTDYTDTDYHRQFPTIYHLRNALLHEDGPYDVRLVFLVVHHIIKNRGHFLFDSLGEAQNFGSIYGAFRDYLQEEYECAVECTDEKAFGAVLKDKSLSKSRKTAAAAELFGVTKKSAPQLYACLALACGATVKLKDLFNDDTLAEAEKPSIAFTGSYEDNEPEYQSLLEERFDLVVRIKALYDWAILDEILAGHQYLCEAKVATYEQHKTDLQRLKTYVKTYRSELYKKIFKLSSKDDNYVAYSGHIKENGHTGVLEKTCNQEAFCAYLKKTLGDNGDPAYADMFAAIENGTFMPKQVSKDNGVIPMQLQKKELEGILDRAQRYLPFLTEKDETGLTVREKIISLCEHRIPYYVGPLNKHSKKAWIVRKEGKIYPWNFDQVVDLDRSAEAFIENLTSKCTYLPQYDVIPKYSLLYTKFMVLNELNNLTLDGQRVKVKLKQEIYRDLFEKRGKVTGKGLKNYLQSRGIAYEVMGGFDENFKASLKPWQDLAPYDLTYDEKEEVVRLITIFGDDKKLLKKRLRDLFGDRLTETERGKLARLKYNGWSRLSREFLTQVVCTDKDTGEVTNIISALWDTNLNLMQLLYSEDYVPTFGEQVAACNRFDKDVSLRQMVEDLYVSPKVKRPIYQSLLIAREIEKIQKCPPKKIFIEVARGEEKKERKKSRKAQLLELYQSCKKEYADLYAQLEGTEEDRLRSDKLYLYYTQMGRCMYTGEHIDLNSLLSGNVYDIDHIFPRSKVKDDSLNNRVLVKKVDNAKKTDVYPLDRETQAKMHGFWQLLLSKNLISKVKYQRLIRTTPLTDEELGAFISRQLVETRQSTKAVAQIMEQLYDKEQTEIVYVKAALASDFRHTYDMLKCREVNDFHHAKDAYLNVVVGNVYNVRCTHNLRNFIRGLQENGPRGYSMNAMFKWDIPGAWVAEGGELQKTQTKSLEIVKQMMAKNNIRYTRYAFCQHGGLFDQMPVKKGKGQIPLKQDGPKSDMAKYGAYNKAMSMYFALVTYQDKKDREVRQLVPIDAVTEKAYLTDPDGYVSSYVGVPAKVLIPCIKYNACLSFDGFRMHISQKSGNQIGYKPAMQLVLSYEQEKYVRNITKYLSQNKDRPLNTYDGISTEKNVTLFDTLIDKMRNTVLRLRFGDMGAKIADKREVFCALSSEEQCVVVAEILKILHANVMRGDLTNIKLAKTAGALVSNMKLSEIKGVTSVKLIHQSITGLFEQQIELLP

SEQ ID NO: 19848 - protein, 1332 aa, unidentified
  REGION 1..1332: note = Cas Enzyme sequence
MEQGTKRGDYYLGLDMGTDSVGWAVTDMDYRIPKFKGNAMWGVRLFDESNTAEERRLFRISRRRTQRRRERLDLLEMLFDGPVSTKDPAFFQRLRESDLYAEDKTTNTPFAVFADPDYTDTDYHRQFPTIYHLRNALLHEDGPYDVRLVFLAVHHIIKNRGHFLFDSLGEAQNFGSIYGAFRDYLQEEYECAVECTDEKAFGAVLKDKSLSKSRKTAAAAELFGVTKKSAPQLYACLALACGATVKLKDLFNDDTLAEAEKPSIAFTGSYEDNEPEYQSLLEERFDLVVRIKALYDWAILDEILAGHQYLCEAKVATYEQHKTDLQRLKTYVKTYRSELYKKIFKLSSKDENYVAYSGHIKENGHTGVLEKTCNQEAFCAYLKKTLGDNGDPAYADMFAAIENGTFMPKQVSKDNGVIPMQLQKKELEGILDRAQRYLPFLTEKDETGLTVREKIISLCEHRIPYYVGPLNKHSKKAWIVRKEGKIYPWNFDQVVDLDRSAEAFIENLTSKCTYLPQYDVIPKYSLLYTKFMVLNELNNLTLDGHRVEVKLKQEIYRNLFEKRGKVTGKGLKNYLQSRGIAYEVMGGFDENFKASLKPWQDLAPYDLTYDEKEEVVRLITIFGDDKKLLKKRLRDLFGDRLTETERGKLARLKYTGWSRLSREFLTQVACTDKNTGEVTNIISALWDTNLNLMQLLYSADYKPTFGEQVTACNQFDKAVSLRQMVEDLYVSPKVKRPIYQSLLIAREIEKIQKCPPKKIFIEVARGEEKKERKKSRKAQLLELYQSCKKEYADLYAQLEGTEEDRLRSDKLYLYYTQMGRCMYTGEHIDLNSLLNGNVYDIDHIFPRSKVKDDSLNNRVLVKKVDNEKKTDVYPLDRETQAKMHGFWQLLLSKNLISKVKYQRLIRTTPLTDEELGAFISRQLVETRQSTKAVAQIMEQLYDKEQTEIVYVKAALASDFRHTYDMLKCREVNDFHHAKDAYLNVVVGNVYNVRCTHNLRNFIRGLQENGSRGYSMNAVFKWDIPGAWVAENGELQETQTKSLKIVKQMMAKNNIRYTRYAFCQHGGLFDQMPVKKGKGQIPLKQDGPKSDMAKYGAYNNAKSKYFTLVSYSDKKGKEVRQLVPIDAVTEKAYLADPDGYVSSYVGAPAKVLIPCIKYNACLSFDGFRMHLSSKSGGGSTLVYKPAMQLVLSYEQEKYVRNVTKYLSQNKDRPLNKYDGISAEENIALFNALVDKMNHSILSLRFGSIGEKISGKAERFIVLSAEDQCVVLSEMLKILHANVMSGDLTKIGLAGKAGIVTTNSKISDIKGVDSVTLIHQSITGLFEQQIELLP

SEQ ID NO: 19849 - protein, 1330 aa, unidentified; identical to SEQ ID NO: 19845
  REGION 1..1330: note = Cas Enzyme sequence

SEQ ID NO: 19850 - protein, 1041 aa, unidentified
  REGION 1..1041: note = Cas Enzyme sequence
  REGION 381..384: note = misc_feature - Xaa can be any naturally occurring amino acid
  REGION 739..746: note = misc_feature - Xaa can be any naturally occurring amino acid
LSREDITGIGEEFHTSLTSYHAFKANFTNTDITEREKEDIIKDITVFGAEPVMLKKRLYRKYPEYQSQIAGLMKMLKCKEWGRLSGKVLSGIAVDVPGLGKVGTVIYQMWATNKDFMQIVGALDSPYAKMIEEENGIQKKNKIEYSMVDELYVSPASKRAIWKSLQIIDEIIGIMGKPPKRIFVEMIRENQKTSRSVTRKDRLMELYKNIEEEAQLYDVLGKTENDKLRNDKLYLYYTQLGKCAYTGEEIELDKFENYDIDHIYPQSQTADDSLDNRVLVLRKKNEEKEDIYPIREEIRQKMKDVWKIWKDKGLISAEKYYRLTRESELTNEELTKFINRQLVETGQSTRALTTLLKEILPETTEIVYSKARNVNRFRQKXXXXELNDFHHAKDAYLNIVVGNVYHIRFTKDIRKYFLEKGTYRTYNIPKLFENRVCLGDEVAWDTDKSIAVVKKVMENNKVLVTKQLIERKGKLFDENPLKKGKGQIVLKSGDDRLRSIEKYGAYNSATITYFMLIEGEGKKGKTEKHFVPVPLYLKQKYEDEAFVYDILKNEVKLDNIRILKRKIPIYTLFVTSGFKMRLTGKMGDRLIFNNANQLAMSDTNQKYLKEIIKYNNDIMIKKDAKINTQSVLDKQKMQELYEEFQNKIKTTIYGKDSMFQNVFNVMENGKEKFCALTIEEEAEVLFQILKLFQCTSEMPKLEKIGGKKSMGRINRGMNITNIDNLAIIHQSVTGLYEKXXXXXXXXKDYIKMSWRTVVITQRAKLDLQMGYLVIRMDKITKIHLSEINTVLIDSPAVSLTTSLLAELSRKKIKVIFCDEKRLPSSQLIPFYGSHDTSLKYKKQIQWTDEMKKFIWSEIVAEKIKQQAEFLDEKRREESKLLWKYKSEVLPGDETNREGHAAKVYFNALFGMEFLRTQENTINAALNYGYSIILSMFAKEIVSQGYFTQLGIFHDNMFNELNLACDLMEPFRILVDRQVYKMNLQEFGKEEKIELVDILNHSVYIDGNQEYVSKAIRIYSKSIFDALNENDVSQIRFYKDEL

SEQ ID NO: 19851 - protein, 1331 aa, unidentified
  REGION 1..1331: note = Cas Enzyme sequence
  REGION 1206..1209: note = misc_feature - Xaa can be any naturally occurring amino acid
  REGION 1320..1331: note = misc_feature - Xaa can be any naturally occurring amino acid
MNKKDYYLGLDIGTGSVGYAVTDEQYQLMKCNHKYAWGSVLFDSSEGAEERRMHRTARRNRNREVERLNLLRDLFDEEISKIDPGFFHRLKESRYVPEDKRDQNGQKPDLPYALFVDEGYTDVDYHKEFPTIYHLRKALIEGKKEYDIRLVYLAIAHILKNRGHFLSDIDSDNGENNLNAALNELFEVWNRVVLGREEQFCAAIQITEIAEILKEKISKSRKKEKIAAVISDGDKRTKELAALITGNTVKFEKLFQVEQFKKLEEDKISFAQGNYEEKEKSYEENLGEYFEIIPMAKTVYDQVILSKILDENSKGYISYAKVAEYEKHKQDLKELKQLIINHGGGKATELYHRVFRTPKGKENNYSVYIGNTSLNGKKQVLSEKKCSQKDFYDFLTKKIFPEIEDCKEKIEIMEKIELDNFMPKLRDKDNSVIPYQLQEKELKIILSNAKKYLTFLKRKDESGKSTEEKILLLLNFRIPYYVGPLNINSENAWIVRKPGKITPWNFSEMVDVESSAENFIKKLTSKCSYLRNEDVLPKSSLLYEKYMVLNEINHLKIKSKTISVELKQEIYRELFEKKQKVTIKKLQDYLKREKGWILSREDITGIGEEFHTSLTSYHAFKANFTNTDITEREKEDIIKDITVFGAEPVMLKKRLYRKYPEYQSQIAGLMKMLKCKEWGRLSEKVLSGIAVDVPGLGKVGTVIYQMWATNKDFMQIVGALDSPYAKMIEEENGIQKKNKIEYSMVDELYVSPASKRAIWKSLQIIDEIIGIMGKPPKRIFVEMIRENQKTSRSVTRKDRLMELYKNIEEEAQLYDVLGKTENDKLRNDKLYLYYAQLGKCAYTGEEIELDKFENYDIDHIYPQSQTADDSLDNRVLVLRKKNEEKEDIYPIREEIRQKMKDVWKIWKDKGLISAEKYYRLTRESELTNEELTKFINRQLVETGQSTRALTTLLKEILPETTEIVYSKARNVNRFRQKYEILKLRELNDFHHAKDAYLNIVVGNVYHIRFTKDIRKYFLEKGTYRTYNIPKLFENRVCLGDEVAWDTDKSIAVVKKVMENNKVLVTKQLIERKGKLFDENPLKKGKGQIVLKSGDDRLRSIEKYGAYNSATITYFMLIEGEGKKGKIEKHFVPVPLYLKQKYEDEAFVYDILKNEVKLDNIRILKRKIPIYTLFVTSGFKMRLTGKMGDRLIFNNANQLDMSDTNQXXXXKEIIKYNNDIMIKKDAKINTQSVLDKQKMQELYEEFQNKIKTTIYGKDSMFQNVFNVMENGKEKFCALTIEEEAEVLFQILKLFQCTSEMPKLEKIGGKKSMGRINRGMNXXXXXXXXXXXX

SEQ ID NO: 19852 - protein, 1113 aa, unidentified
  REGION 1..1113: note = Cas Enzyme sequence
AFISLVLGTPVKIDALFPELDLEEADTVKIDFSSGKFEEEYDQLAALLGDKILCIDKFKAIYDWALLAEIRKNARYLSEGKTRVYDKHKSDLQTLKLLVKTYLPKKYSEVFKNPTVAGNYCSYAGVAKKGGRKIVVEKRCDQDAFYKFIGKILKELPKDVNQPVLQEIENRTFLPKQVTTDNSVIPYQMHLEELSIILENASDHYPFLNQVDNTGFSVRQKIELLMQFRIPYYVGPLNTYHKENGGHCWAERKQSGAVRPWNFEQMVDVDKSAEAFIKRMTGKCTYLIGADVLPKNSLLYSEFMVLNELNNLKINGSGIPVGLKQRIFNELFLVQKKVTMRRLREFLENEGEITSNDDLSGIDGDFKSSMASYHDLKRILASKAGDVNMVENLIRWIVLFGDDSKLLKRRIESFYRDKLSESEIRQLAKLRYSGWGRLSKEFLVDVVHVDKTTGECVSIISALRGDLGENLNLMQLLSGRFDYLQAIARRNEKTSGPISGIGYDTVKELYVSPAVKRGIWQTMLIVAEVAKIMQHPPKKVFVEVAREEGEKKRTRTRQSILLDLYKKCRDDSREWAKELQGKSDAELRSDRLYLYYLQMGRCMYSGESIDLLSLFDEKIYDVDHIFPRSKVKDDSLENRVLVKRVINAEKSDVFPLPEAIRQKNSAFWRSLYEKGFIGKKKFDRLTRATGFSDDELADFIARQLVETRQYRQAVAEMLKRVFPQTEIVYVKAGNVSDFRHKFDLVKVREINDFHHARDAYLNIVIGNVYNTRFTHSPLNFIREREGKNYNLRKIYDSDVVRNGVIAWKTTGDETITRVKRVMQKNNILFTRYAIARHGGLFDQNIMKKGKGQLPVKGSDSRLTIEKYGGYNNVAGACFMLVEHDTGSGKKARRSRTIEVLHIHIARKISSDKKNGLDYCVNELGLCNPRILLPAIKINTLFIFEGARMHLAGRSEDRLEFRGAHQLCVCNDSERYIKKILKYQNRCREARRPLTIDSHDGITSDDNLKLYDVFCRKLNDTVYRKMFPTPADVVKKGREKFVALSLIDQCGVLENILCLFKCGKNRVDLSSIGGASNTGTIRRPKKLDNLSVVLLNQSVTGVFEQIVDLQKIGA

SEQ ID NO: 19853 - protein, 1356 aa, unidentified
  REGION 1..1356: note = Cas Enzyme sequence
MEVGNYYLGIDAGTDSVGWAVTDNQYNVIRKKGKSLWGIRLFDGANTAQERRTFRALRRRNERKKQRINLLQELFCKEICKLDPNFFIRLRDSSLWSEDKEEKQIYSLFNDKNFNDRNYHNNYKTIYHLRADLIKNKEKHDARLVYLAIHHIMKNRGHFLFNGNIESVTSFENTFNEFKNCLLDELEINLECPSISEFENILKDRTFKGTQKCKKLKELCSIPSSDKKLDNIFKLISGLKADLSIIFEDESFKENEHNKISFADSNYEETREVLNSEIQEKTLIIDIFNIIYNWVILSDILSGGEYNGRLYLSIAKVNTYNKHSKDLKILKSVIKKYFPQKYTDIFASNKENNYCSYIGMYKSGGKKYSVKKCSDKPEEFYKTIKNIINKNTAEEISNDKDVQYILSEIENNSFLPLQINKNNGVIPYQANKIELESILKNAENYLPFLKEIDTECNKTTSEKIIDLFEFRIPYYVGPLNTSKGENAWMIRKEDGTIRPWNFEQKVDIDKTAAEFITRMTNQCTYLNNETVLPKYSLLYSEYTVLNEINNIRINGEKISVELKQDIFNSLFKNNKQVTCKKLLSHLNSNGYNLKKDDLSGFDGNFKSSLSSYIDLKNYIFGDNIDKLQIYNLAEKIILWITLYGDDSKLLKRVLQKNCSEQLNPEQIKKITKLKFKGWGRLSKAFLSELRGADRETGETMTIIKGLRNTQNNLMQLLSQNYTFTEECEKINSGYFINPNEISYDSIVKNIVASPSIKRSVWQTIQIVEEIQKVMGSKPRKIFVEMARGEEEKVRTTSRKQKLLDLYKNISDECAKGMYDEIYSKDESDFKNIRLYLYYTQMGCCMYSGKHIDLSQLSNTNIWDRDHIYPQSKTKDDSLDNLVLVYKSINSEKSDDIISPTIQNNMRTFWKLLFDRKFISEKKYHRLTRTTPLTDEELAGFINRQLVETRQSTKVMASIFKRIYPNTEIIYVKAKNVSDFRHRKDCENGVKVRELNDYHHAKDAYLNIVVGNVYSSKFTNNPLMWLKNNRNVKYSLNRMYDFNLTVNNENIWVVGNEGTQKTVNKYLGKNDILYTRYAMTNKGELFDQNPLKATGDKSKQTTLVPLKKGKEVWKYGGYNSITPSYFMLVESKDKKGNYIRTIETMPLYREKEFSKNEEFLLNYCKEVHKLKEPKIILKCIKKNSLLIVDGFPMHLKGSTGLQLKLQGAVQLILESDMVIYLKKLMKFVNENNINKNKLEVTPYMKLSAKENIKLYDIFIQKLTTGIYSKRPANPVEKLINARDIFIELTVKEQCIVLSEILHLFQCKPLTSANLVSINLKKTVGIIQIAKNITAKNVKLVHQSPTGIYEYTVDLNKI

SEQ ID NO: 19854 - protein, 956 aa, unidentified
  REGION 1..956: note = Cas Enzyme sequence
MKIVNEIELDQFMPKQRTSQNGVIPHQLHQKELDEIIENQKQYYPFLAEPNPNEKRKPHAQFKLDELIAFKIPYYVGPLITKEEQQAQSGAKFAWMKRKQDGVITPWNFDEKVDRMASANEFIRRMTTKDTYLLGEDVLPDESLIYQKFKVLNELNNVKVNDKKLTVSDKQDIFNDLFKKQKTVSVSKLQKYFVTEKHYLTEPTIKGLSDTKKFSNSLSTYIDFEKIFGNEILADQNKQNDLEKIIEWSTIFEDRKIFEDKLHEIEWLTEKQIKAVRRYRGWGRLSKKLLVDLRNNEGKSILDELWRTNDNFMQIQAREEFAKSIVEANQKLMNLGGAASVQNTVESTLEDAYTSPQNKKAIRQVIKVVEDIVKAVGYAPEKITIEFTRGADKNPRRTQNRQKQIMEVYKTAAKEIVDATLKGQLENEEKLTDKLYLYFTQLGKDIYSGETINIDQLNNYDIDHILPQAFIKDDSLDNRVLTSRDLNNGKSDSVPVKQFGANMKSFWMRLQAHGLISKRKLNNLMTDPDSIGKYTMQGFVRRQLVETSQVIKLTANILGAIYGENTDIVEIPAKLTHQMREKFNLYKVREVNDYHHAFDAYLTTFVGNYLFKRYPKLRPYFVYGDFKMTDNALKGMRRFNFLHDLKDDEVLVDNETGEVLWEGQKSIEELKKIYGYKFMLTTHEAYTQHGPMFKQTVYSSDTPGKLIKIKNNKPTEIYGGYTSNTDAYMAIVRIKARKGDTYKVVGVPRKEGDALSRIKLLDESKYHENLKNILAINLNKSLNKFDVVLDKVKYRQVIYDGTDHLMLGSSKYKYSTKQLVLSDQSMKILSSTGEFSDEELIKVFDEIMYIVNKNFSLYDTRVFRDKLNNARENFIKLPNKTLFEKGKLKQHSKLEILKQILIGLHANAGRGDLKDIGVNNFGAMVVTAGVTLSPDATIVYQSPTGLFERKVKLSDL

SEQ ID NO: 19855 - protein, 1385 aa, unidentified
  REGION 1..1385: note = Cas Enzyme sequence
MSRKKIVPNYAISLDIGNASVGWAAFTPDYRLMRAKGRELIGVRLFEPAQTAEARRMARTTRRRYSRRRWRLHMLDAIFDAPLAEVDPSFLARRKYSWVHPADENNADYWYGGVLFDSKNQDKRFYKQYPTIYHLRKTLMEDDKQHDIREVYFAVHHLLKYRGNFLVEGDLDSSSVFDSKNLLNLIGEIILCVFDEQLDGSWTAGIDKKRLADTLCTTKGSRSMRVENALAVICESCELPKEQINVIKAIFAGLEGNKLDLAKIFPSEERTSDEKKALGIYFNKSDYEEVRAQVVDSGLLDDEQCELLDKMQKQYSAIALKQLLGNAKSVSESMCASYTRHQRNWDLIKKELRTEDNADEINKHYGELVGWTMVDGRRRSIRGTSTYEKTRQNANKYFSKLIEASNLSESKKLDLKHAIDEDRLFPVQRDSDNGVIPYQLHRNELRRILEKQGKYYPFLLDTFEKNGEQVNKIEGLLTFRVPYFVGPLVEREGMQPSDNGENHWMKRKKSGEITPWNFDKMVDKDESGRRFIERLVDTDSYLLGEATLPKNSMLYQEYEVLNELNNVRLSVRSGNRWENRRRQRLGREEKTLLIRNLFMKGGVVTKKAAENLLRKEYGRTYELSGLASESKFMSSMSSYGKLCRIFGAERVNKDSELMEQIIELQTVFEDKETLLHQLRMLDGLSDSDCELLARTHYTGWGKLSRKLLTTKVGECKIGDDFAPQKHSIIEIMRFEDRNFMEIITDKNYGFPEWIDEQNLGADKKQSLESMVDELHVSPKVKRGIIQSVRLIDDISKAVGKKPSRIFLELAGDIQASVRTTSRKNRLLELYKNAGLRKEFSDIYDRLEASDDKGLQDDRWFLYYTQLGKDMYTGEELDIDRLSSDYDIDHIIPQAVTQNDSLDNRVLVSRAANARKTDSFAYLPELVEARRGFWQELLDNRLISQTKFERLVRQNDFGRHEKERFVERSLVETRQIMKNVATLMRRRYGNSSAVIGLNSELTKEMRQYLGFEHKNRDINDYHHAQDALCLGVAGQFAVNRGFFDNGAVSDGAANAYNIYLQDYLRGYREKLKAGDRKHGKAFGFIVGSMASADENKRINPKTGEIAWSEADKDYLRRVMNYRKMLVTQKVGDSFGALYNETRYGAAVKEGHDGIAFDKNKADTSLYGGFSSAKVVYSILVELKGKVRLVNITMQEYSMLGDCPSDEALKKVLVAKKPEYAKAKILLRHIPSMQLIHYKGACMTIKSATELNNTRQLWLDCDVYNALDDYLKCGTSKSSIDIMQIWDALFDAVNKHYPLHRVEESTLAKARTKFEKLDLDKQLDVLGMIVVALHADPGRANLSLVGLPSEWKRVRSVSFSDDDEFVFQSPSGLFETKITIAELKKAE

SEQ ID NO: 19856 - protein, 1385 aa, unidentified
  REGION 1..1385: note = Cas Enzyme sequence
MSRKKIVPNYAISLDIGNASVGWAAFTPDYRLMRAKGRELIGVRLFEPAQTAEARRMARTTRRRYSRRRWRLHMLDAIFDAPLAEVDPSFLARRKYSWVHPADENNADYWYGGVLFDSKNQDKRFYKQYPTIYHLRKTLMEDDKQHDIREVYFAVHHLLKYRGNFLVEGDLDSSSVFDSKNLLNLIGEIILCVFDEQLDGSWTAGIDKKRLADTLCTTKGSRSMRVENALAVICESCELPKEQINVIKAIFAGLEGNKLDLAKIFPSEERTSDEKKALGIYFNKSDYEEVRAQVVDSGLLDDEQCELLDKMQKQYSAIALKQLLGNAKSVSESMCASYTRHQRNWDLIKKELRTEDNADEINKHYGELVGWTMVDGRRRSIRGTSTYEKTRQNANKYFSKLIEASNLSESKKLDLKHAIDEDRLFPVQRDSDNGVIPYQLHRNELRRILEKQGKYYPFLLDTFEKNGEQVNKIEGLLTFRVPYFVGPLVEREGMQPSDNGENHWMKRKKSGEITPWNFDKMVDKDESGRRFIERLVDTDSYLLGEATLPKNSMLYQEYEVLNELNNVRLSVRSGNRWENRRRQRLGREEKTLLIRNLFMKGGVVTKKAAENLLRKEYGRTYELSGLASESKFMSSMSSYGKLCRIFGAERVNKDSELMEQIIELQTVFEDKETLLHQLRMLDGLSDSDCELLARTHYTGWGKLSRKLLTTKVGECKIGDDFAPQKHSIIEIMRFEDRNFMEIITDKNYGFPEWIDEQNLGADKKQSLESMVDELHVSPKVKRGIIQSVRLIDDISKAVGKKPSRIFLELAGDIQASVRTTSRKNRLLELYKNAGLRKEFSDIYDRLEASDDKGLQDDRWFLYYTQLGKDMYTGEELDIDRLSSDYDIDHIIPQAVTQNDSLDNRVLVSRAANARKTDSFAYLPELVEARRGFWQELLDNRLISQTKFERLVRQNDFGRHEKERFVERSLVETRQIMKNVATLMRRRYGNSSAVIGLNSELTKEMRQYLGFEHKNRDINDYHHAQDALCLGVAGQFAVNRGFFDNGAVSDGAANAYNIYLQDYLRGYREKLKAGDRKHGKAFGFIVGSMASADENKRINPKTGEIAWSEADKDYLRRVMNYRKMLVTQKVGDSFGALYNETRYGAAVKEGHDGIAFDKNKADTSLYGGFSSAKVVYSILVELKGKVRLVNITMQEYSMLGDCPSDEALKKVLVAKKPEYAKAKILLRHIPSMQLIHYKGACMTIKSATELNNARQLWLDCDVYNALDDYLKCGTSKSSIDIMQIWDALFDAVNKHYPLHRVEESTLAKARTKFEKLDLDKQLDVLGMIVVALHADPGRANLSLVGLPSEWKRVRSVSFSDDDEFVFQSPSGLFETKITIAELKKAE

SEQ ID NO: 19857 - protein, 1107 aa, unidentified
  REGION 1..1107: note = Cas Enzyme sequence
MLDAIFDAPLAEVDPSFLARRKYSWVHPADENNADYWYGGVLFDSKNQDKRFYKQYPTIYHLRKTLMEDDKQHDIREVYFAVHHLLKYRGNFLVEGDLDSSSVFDSKNLLNLIGEIILCVFDEQLDGSWTAGIDKKRLADTLCTTKGSRSMRVENALAVICESCELPKEQINVIKAIFAGLEGNKLDLAKIFPSEERTSDEKKALGIYFNKSDYEEVRAQVVDSGLLDDEQCELLDKMQKQYSAIALKQLLGNAKSVSESMCASYTRHQRNWDLIKKELRTEDNADEINKHYGELVGWTMVDGRRRSIRGTSTYEKTRQNANKYFSKLIEASNLSESKKLDLKHAIDEDRLFPVQRDSDNGVIPYQLHRNELRRILEKQGKYYPFLLDTFEKNGEQVNKIEGLLTFRVPYFVGPLVEREGMQPSDNGENHWMKRKKSGEITPWNFDKMVDKDESGRRFIERLVDTDSYLLGEATLPKNSMLYQEYEVLNELNNVRLSVRSGNRWENRRRQRLGREEKTLLIRNLFMKGGVVTKKAAENLLRKEYGRTYELSGLASESKFMSSMSSYGKLCRIFGAERVNKDSELMEQIIELQTVFEDKETLLHQLRMLDGLSDSDCELLARTHYTGWGKLSRKLLTTKVGECKIGDDFAPQKHSIIEIMRFEDRNFMEIITDKNYGFPEWIDEQNLGADKKQSLESMVDELHVSPKVKRGIIQSVRLIDDISKAVGKKPSRIFLELAGDIQASVRTTSRKNRLLELYKNAGLRKEFSDIYDRLEASDDKGLQDDRWFLYYTQLGKDMYTGEELDIDRLSSDYDIDHIIPQAVTQNDSLDNRVLVSRAANARKTDSFAYLPELVEARRGFWQELLDNRLISQTKFERLVRQNDFGRHEKERFVERSLVETRQIMKNVATLMRRRYGNSSAVIGLNSELTKEMRQYLGFEHKNRDINDYHHAQDALCLGVAGQFAVNRGFFDNGAVSDGAANAYNIYLQDYLRGYREKLKAGDRKHGKAFGFIVGSMASADENKRINPKTGEIAWSEADKDYLRRVMNYRKMLVTQKVGIVLALYITKRDMELRLKKGMTVLLSIKIKPIRLCMVVSPAQRWFIRFLSN

SEQ ID NO: 19858 - protein, 1312 aa, unidentified
  REGION 1..1312: note = Cas Enzyme sequence
MLDAIFDAPLAEVDPSFLARRKYSWVHPADENNADYWYGGVLFDSKNQDKRFYKQYPTIYHLRKTLMEDDKQHDIREVYFAVHHLLKYRGNFLVEGDLDSSSVFDSKNLLNLIGEIILCVFDEQLDGSWTAGIDKKRLADTLCTTKGSRSMRVENALAVICESCELPKEQINVIKAIFAGLEGNKLDLAKIFPSEERTSDEKKALGIYFNKSDYEEVRAQVVDSGLLDDEQCELLDKMQKQYSAIALKQLLGNAKSVSESMCASYTRHQRNWDLIKKELRTEDNADEINKHYGELVGWTMVDGRRRSIRGTSTYEKTRQNANKYFSKLIEASNLSESKKLDLKHAIDEDRLFPVQRDSDNGVIPYQLHRNELRRILEKQGKYYPFLLDTFEKNGEQVNKIEGLLTFRVPYFVGPLVEREGMQPSDNGENHWMKRKKSGEITPWNFDKMVDKDESGRRFIERLVDTDSYLLGEATLPKNSMLYQEYEVLNELNNVRLSVRSGNRWENRRRQRLGREEKTLLIRNLFMKGGVVTKKAAENLLRKEYGRTYELSGLASESKFMSSMSSYGKLCRIFGAERVNKDSELMEQIIELQTVFEDKETLLHQLRMLDGLSDSDCELLARTHYTGWGKLSRKLLTTKVGECKIGDDFAPQKHSIIEIMRFEDRNFMEIITDKNYGFPEWIDEQNLGADKKQSLESMVDELHVSPKVKRGIIQSVRLIDDISKAVGKKPSRIFLELAGDIQASVRTTSRKNRLLELYKNAGLRKEFSDIYDRLEASDDKGLQDDRWFLYYTQLGKDMYTGEELDIYRLSSDYDIDHIIPQAVTQNDSLDNRVLVSRAANARKTDSFAYLPELVEARRGFWQELLDNRLISQTKFERLVRQNDFGRHEKERFVERSLVETRQIMKNVATLMRRRYGNSSAVIGLNSELTKEMRQYLGFEHKNRDINDYHHAQDALCLGVAGQFAVNRGFFDNGAVSDGAANAYNIYLQDYLRGYREKLKAGDRKHGKAFGFIVGSMASADENKRINPKTGEIAWSEADKDYLRRVMNYRKMLVTQKVGDSFGALYNETRYGAAVKEGHDGIAFDKNKADTSLYGGFSSAKVVYSILVELKGKVRLVNITMQEYSMLGDCPSDEALKKVLVAKKPEYAKAKILLRHIPSMQLIHYKGACMTIKSATELNNARQLWLGCDVYNALDDYLKCGTSKSSIDIMQIWDALFDAVNKHYPLHRVEESTLAKARTKFEKLDLDKQLDVLGMIVVALHADPGRANLSLVGLPSEWKRVRSVSFSDDDEFVFQSPSGLFETKITIAELKKAE

SEQ ID NO: 19859 - protein, 1312 aa, unidentified
  REGION 1..1312: note = Cas Enzyme sequence
MLDAIFDAPLAEVDPSFLARRKYSWVHPADENNADYWYGGVLFDSKNQDKRLIKQYPTIYHLRKTLMEDDKQHDIREVYFAVHHLLKYRGNFLVEGDLDSSSVFDSKNLLNLIGEIILCVFDEQLDGSWTAGIDKKRLADTLCTTKGSRSMRVENALAVICESCELPKEQINVIKAIFAGLEGNKLDLAKIFPSEERTSDEKKALGIYFNKSDYEEVRAQVVDSGLLDDEQCELLDKMQKQYSAIALKQLLGNAKSVSESMCASYTRHQRNWDLIKKELRTEDNADEINKHYGELVGWTMVDGRRRSIRGTSTYEKTRQNANKYFSKLIEASNLSESKKMDLKHAIDEDRLFPVQRDSDNGVIPYQLHRNELRRILEKQGKYYPFLLDTFEKNGEQVNKIEGLLTFRVPYFVGPLVEREGMQPSDNGENHWMKRKKSGEITPWNFDKMVDKDESGRRFIERLVDTDSYLLGEATLPKNSMLYQEYEVLNELNNVRLSVRSGNRWENRRRQRLGREEKTLLIRNLFMKGGVVTKKAAENLLRKEYGRTYELSGLASESKFMSSMSSYGKLCRIFGAERVNKDSELMEQIIELQTVFEDKETLLHQLRMLDGLSDSDCELLARTHYTGWGKLSRKLLTTKVGECKIGDDFAPQKHSIIEIMRFEDRNFMEIITDKNYGFPEWIDEQNLGADKKQSLESMVDELHVSPKVKRGIIQSVRLIDDISKAVGKKPSRIFLELAGDIQASVRTTSRKNRLLELYKNAGLRKEFSDIYDRLEASDDKGLQDDRWFLYYTQLGKDMYTGEELDIDRLSSDYDIDHIIPQAVTQNDSLDNRVLVSRAANARKTDSFAYLPELVEARRGFWQELLDNRLISQTKFERLVRQNDFGRHEKERFVERSLVETRQIMKNVATLMRRRYGNSSAVIGLNSELTKEMRQYLGFEHKNRDINDYHHAQDALCLGVAGQFAVNRGFFDNGAVSDGAANAYNIYLQDYLRGYREKLKAGDRKHGKAFGFIVGSMASADENKRINPKTGEIAWSEADKDYLRRVMNYRKMLVTQKVGDSFGALYNETRYGAAVKEGHDGIAFDKNKADTSLYGGFSSAKVVYSILVELKGKVRLVNITMQEYSMLGDCPSDEALKKVLVAKKPEYAKAKILLRHIPSMQLIRYKGACMTIKSATELNNARQLWLDCDVYNALDDYLKCGTSKSSIDIMQIWDALFDAVNKHYPLHRVEESTLAKARTKFEKLDLDKQLDVLGMIVVALHADPGRANLSLVGLPSEWKRVRSVSFSDDDEFVFQSPSGLFETKITIAELKKAE

SEQ ID NO: 19860 - protein, 1385 aa, unidentified; identical to SEQ ID NO: 19856
  REGION 1..1385: note = Cas Enzyme sequence

SEQ ID NO: 19861 - protein, 1385 aa, unidentified
  REGION 1..1385: note = Cas Enzyme sequence
MSRKKIVPNYAISLDIGNASVGWAAFTPDYRLMRAKGRELIGVRLFEPAQTAEARRMARTTRRRYSRRRWRLHMLDAIFDAPLAEVDPSFLARRKYSWVHPADENNADYWYGGVLFDSKNQDKRFYKQYPTIYHLRKTLMEDDKQHDIREVYFAVHHLLKYRGNFLVEGDLDSSSVFDSKNLLNLIGEIILCVFDEQLDGSWTAGIDKKRLADTLCTTKGSRSMRVENALAVIRESCELPKEQINVIKAIFAGLEGNKLDLAKIFPSEEHTSDEKKALGIYFNKSDYEEARAQVVDSGLLDDEQCELLDKMQKQYSAIALKQLLGNAKSVSESMCASYTRHQRNWDLIKKELRTEDNADEINKHYGELVGWTMVDGRRRSIRGTSTYEKTRQNANKYFSKLIEASNLSESKKLDLKHAIDEDRLFPVQRDSDNGVIPYQLHRNELRRILEKQGKYYPFLLDTFEKNGEQVNKIEGLLTFRVPYFVGPLVEREGMQPSDNGENHWMKRKKSGEITPWNFDKMVDKDESGRRFIERLVDTDSYLLGEATLPKNSMLYQEYEVLNELNNVRLSVRSGNRWENRRRQRLGREEKTLLIRNLFMKGGVVTKKAAENLLRKEYGRTYELSGLASESKFMSSMSSYGKLCRIFGAERVNKDSELMEQIIELQTVFEDKETLLHQLRMLDGLSDSDCELLARTHYTGWGKLSRKLLTTKVGECKIGDDFAPQKHSIIEIMRFEDRNFMEIITDKNYGFPEWIDEQNLGADKKQSLESMVDELHVSPKVKRGIIQSVRLIDDISKAVGKKPSRIFLELAGDIQASVRTTSRKNRLLELYKNAGLRKEFSDIYDRLEASDDKGLQDDRWFLYYTQLGKDMYTGEELDIDRLSSDYDIDHIIPQAVTQNDSLDNRVLVSRAANARKTDSFAYLPELVEARRGFWQELLDNRLISQTKFERLVRQNDFGRHEKERFVERSLVETRQIMKNVATLMRRRYGNSSAVIGLNSELTKEMRQYLGFEHKNRDINDYHHAQDALCLGVAGQFAVNRGFFDNGAVSDGAANAYNIYLQDYLRGYREKLKAGDRKHGKAFGFIVGSMASADENKRINPKTGEIAWSEADKDYLRRVMNYRKMLVTQKVGDSFGALYNETRYGAAVKEGHDGIAFDKNKADTSLYGGFSSAKVVYSILVELKGKVRLVNITMQEYSMLGDCPSDEALKKVLVAKKPEYAKAKILLRHIPSMQLIHYKGACMTIKSATELNNARQLWLDCDVYNALDDYLKCGTSKSSIDIMQIWDALFDAVNKHYPLHRVEESTLAKARTKFEKLDLDKQLDVLGMIVVALHADPGRANLSLVGLPSEWKRVRSVSFSDDDEFVFQSPSGLFETKITIAELKKAE

SEQ ID NO: 19862 - protein, 1240 aa, unidentified
  REGION 1..1240: note = Cas Enzyme sequence
MSRKKIVPNYAISLDIGNASVGWAAFTPDYRLMRAKGRELIGVRLFEPAQTAEARRMARTTRRRYSRRRWRLHMLDAIFDAPLAEVDPSFLARRKYSWVHPADENNADYWYGGVLFDSKNQDKRFYKQYPTIYHLRKTLMEDDKQHDIREVYFAVHHLLKYRGNFLVEGDLDSSSVFDSKNLLNLIGEIILCVFDEQLDGSWTAGIDKKRLADTLCTTKGSRSMRVENALAVICESCELPKEQINVIKAIFAGLEGNKLDLAKIFPSEERTSDEKKALGIYFNKSDYEEVRAQVVDSGLLDDEQCELLDKMQKQYSAIALKQLLGNAKSVSESMCASYTRHQRNWDLIKKELRTEDNADEINKHYGELVGWTMVDGRRRSIRGTSTYEKTRQNANKYFSKLIEASNLSESKKLDLKHAIDEDRLFPVQRDSDNGVIPYQLHRNELRRILEKQGKYYPFLLDTFEKNGEQVNKIEGLLTFRVPYFVGPLVEREGMQPSDNGENHWMKRKKSGEITPWNFDKMVDKDESGRRFIERLVDTDSYLLGEATLPKNSMLYQEYEVLNELNNVRLSVRSGNRWENRRRQRLGREEKTLLIRNLFMKGGVVTKKAAENLLRKEYGRTYELSGLASESKFMSSMSSYGKLCRIFGAERVNKDSELMEQIIELQTVFEDKETLLHQLRMLDGLSDSDCELLARTHYTGWGKLSRKLLTTKVGECKIGDDFAPQKHSIIEIMRFEDRNFMEIITDKNYGFPEWIDEQNLGADKKQSLESMVDELHVSPKVKRGIIQSVRLIDDISKAVGKKPSRIFLELAGDIQASVRTTSRKNRLLELYKNAGLRKEFSDIYDRLEASDDKGLQDDRWFLYYTQLGKDMYTGEELDIDRLSSDYDIDHIIPQAVTQNDSLDNRVLVSRAANARKTDSFAYLPELVEARRGFWQELLDNRLISQTKFERLVRQNDFGRHEKERFVERSLVETRQIMKNVATLMRRRYGNSSAVIGLNSELTKEMRQYLGFEHKNRDINDYHHAQDALCLGVAGQFAVNRGFFDNGAVSDGAANAYNIYLQDYLRGYREKLKAGDRKHGKAFGFIVGSMASADENKRINPKTGEIAWSEADKDYLRRVMNYRKMLVTQKVGDSFGALYNETRYGAAVKEGHDGIAFDKNKADTSLYGGFSSAKVVYSILVELKGKVRLVNITMQEYSMLGDCPSDEALKKVLVAKSLNMQKRKFCFDIFRQCSLFTIKGHA

SEQ ID NO: 19863 - protein, 1165 aa, unidentified
  REGION 1..1165: note = Cas Enzyme sequence
  REGION 403..416: note = misc_feature - Xaa can be any naturally occurring amino acid
MLDAIFDAPLAEVDPSFLARRKYSWVHPADENNADYWYGGVLFDSKNQDKRFYKQYPTIYHLRKTLMEDDKQHDIREVYFVHHLLKYRGNFLVEGDLDSSSVFDSKNLLNLIGEIILCVFDEQLDGSWTAGIDKKRLADTLCTTKGSRSMRVENALAVICESCELPKEQINVIKAIFAGLEGNKLDLAKIFPSEERTSDEKKALGIYFNKSDYEEVRAQVVDSGLLDDEQCELLDKMQKQYSAIALKQLLGNAKSVSESMCASYTRHQRNWDLIKKELRTEDNADEINKHYGELVGWTMVDGRRRSIRGTSTYEKTRQNANKYFSKLIEASNLSESKKLDLKHAIDEDRLFPVQRDSDNGVIPYQLHRNELRRILEKQGKYYPFLLDTFEKNGEQVNKIEGLXXXXXXXXXXXXXXEGMQPSDNGENHWMKRKKSGEITPWNFDKMVDKDESGRRFIERLVDTDSYLLGEATLPKNSMLYQEYEVLNELNNVRLSVRSGNRWENRRRQRLGREEKTLLIRNLFMKGGVVTKKAAENLLRKEYGRTYELSGLASESKFMSSMSSYGKLCRIFGAERVNKDSELMEQIIELQTVFEDKETLLHQLRMLDGLSDSDCELLARTHYTGWGKLSRKLLTTKVGECKIGDDFAPQKHSIIEIMRFEDRNFMEIITDKNYGFPEWIDEQNLGADKKQSLESMVDELHVSPKVKRGIIQSVRLIDDISKAVGKKPSRIFLELAGDIQASVRTTSRKNRLLELYKNAGLRKEFSDIYDRLEASDDKGLQDDRWFLYYTQLGKDMYTGEELDIDRLSSDYDIDHIIPQAVTQNDSLDNRVLVSRAANARKTDSFAYLPELVEARRGFWQELLDNRLISQTKFERLVRQNDFGRHEKERFVERSLVETRQIMKNVATLMRRRYGNSSAVIGLNSELTKEMRQYLGFEHKNRDINDYHHAQDALCLGVAGQFAVNRGFFDNGAVSDGAANAYNIYLQDYLRGYREKLKAGDRKHGKAFGFIVGSMASADENKRINPKTGEIAWSEADKDYLRRVMNYRKMLVTQKVGDSFGALYNETRYGAAVKEGHDGIAFDKNKADTSLYGGFSSAKVVYSILVELKGKVRLVNITMQEYSMLGDCPSDEALKKVLVAKSLNMQKRKFCFDIFRQCSLFTIKGHA

SEQ ID NO: 19864 - protein, 1385 aa, unidentified
  REGION 1..1385: note = Cas Enzyme sequence
MSRKKIVPNYAISLDIGNASVGWAAFTPDYRLMRAKGRELIGVRLFEPAQTAEARRMARTTRRRYSRRRWRLHMLDAIFDAPLAEVDPSFLARRKYSWVHPADENNADYWYGGVLFDSKNQDKRFYKQYPTIYHLRKTLMEDDKQHDIREVYFAVHHLLKYRGNFLVEGDLDSSSVFDSKNLLNLIGEIILCVFDEQLDGSWTAGIDKKRLADTLCTTKGSRSMRVENALAVICESCELPKEQINVIKAIFAGLEGNKLDLAKIFPSEERTSDEKKALGIYFNKSDYEEVRAQVVDSGLLDDEQCELLDKMQKQYSAIALKQLLGNAKSVSESMCASYTRHQRNWDLIKKELRTEDNADEINKHYGELVGWTMVDGRRRSIRGTSTYEKTRQNANKYFSKLIEASNLSESKKMDLKHAIDEDRLFPVQRDSDNGVIPYQLHRNELRRILEKQGKYYPFLLDTFEKNGEQVNKIEGLLTFRVPYFVGPLVEREGMQPSDNGENHWMKRKKSGEITPWNFDKMVDKDESGRRFIERLVDTDSYLLGEATLPKNSMLYQEYEVLNELNNVRLSVRSGNRWENRRRQRLGREEKTLLIRNLFMKGGVVTKKAAENLLRKEYGRTYELSGLASESKFMSSMSSYGKLCRIFGAERVNKDSELMEQIIELQTVFEDKETLLHQLRMLDGLSDSDCELLARTHYTGWGKLSRKLLTTKVGECKIGDDFAPQKHSIIEIMRFEDRNFMEIITDKNYGFPEWIDEQNLGADKKQSLESMVDELHVSPKVKRGIIQSVRLIDDISKAVGKKPSRIFLELAGDIQASVRTTSRKNRLLELYKNAGLRKEFSDIYDRLEASDDKGLQDDRWFLYYTQLGKDMYTGEELDIDRLSSDYDIDHIIPQAVTQNDSLDNRVLVSRAANARKTDSFAYLPELVEARRGFWQELLDNRLISQTKFERLVRQNDFGRHEKERFVERSLVETRQIMKNVATLMRRRYGNSSAVIGLNSELTKEMRQYLGFEHKNRDINDYHHAQDALCLGVAGQFAVNRGFFDNGAVSDGAANAYNIYLQDYLRGYREKLKAGDRKHGKAFGFIVGSMASADENKRINPKTGEIAWSEADKDYLRRVMNYRKMLVTQKVGDSFGALYNETRYGAAVKEGHDGIAFDKNKADTSLYGGFSSAKVVYSILVELKGKVRLVNITMQEYSMLGDCPSDEALKKVLVAKKPEYAKAKILLRHIPSMQLIRYKGACMTIKSATELNNARQLWLDCDVYNALDDYLKCGTSKSSIDIMQIWDALFDAVNKHYPLHRVEESTLAKARTKFEKLDLDKQLDVLGMIVVALHADPGRANLSLVGLPSEWKRVRSVSFSDDDEFVFQSPSGLFETKITIAELKKAE

SEQ ID NO: 19865 - protein, 1385 aa, unidentified
  REGION 1..1385: note = Cas Enzyme sequence
MSRKKIAPNYAISLDIGNASVGWAAFTPDYRLMRAKGRELIGVRLFEPAQTAEARRMARTTRRRYSRRRWRLHMLDAIFDAPLAEVDPSFLARRKYSWVHPADENNADYWYGGVLFDSKNQDKRFYKQYPTIYHLRKTLMEDDKQHDIREVYFAVHHLLKYRGNFLVEGDLDSSSVFDSKNLLNLIGEIILCVFDEQLDGSWTAGIDKKRLADTLCTTKGSRSMRVENALAVICESCELPKEQINVIKAIFAGLEGNKLDLAKIFPSEERTSDEKKALGIYFNKSDYEEVRAQVVDSGLLDDEQCELLDKMQKQYSAITLKQLLGNAKSVSESMCASYTRHQRNWDLIKKELRTEDNADEINKHYGELVGWTMVDGRRRSIRGTSTYEKTRQNANKYFSKLIEASNLSESKKLDLKHAIDEDRLFPVQRDSDNGVIPYQLHRNELRRILEKQGKYYPFLLDTFEKNGEQVNKIEGLLTFRVPYFVGPLVEREGMQPSDNGENHWMKRKKSGEITPWNFDKMVDKDESGRRFIERLVDTDSYLLGEATLPKNSMLYQEYEVLNELNNVRLSVRSGNRWENRRRQRLGREEKTLLIRNLFMKGGVVTKKAAENLLRKEYGRTYELSGLASESKFMSSMSSYGKLCRIFGAERVNKDSELMEQIIELQTVFEDKETLLHQLRMLDGLSDSDCELLARTHYTGWGKLSRKLLTTKVGECKIGDDFAPQKHSIIEIMRFEDRNFMEIITDKNYGFPEWIDEQNLGADKKQSLESMVDELHVSPKVKRGIIQSVRLIDDISKAVGKKPSRIFLELAGDIQASVRTTSRKNRLLELYKNAGLRKEFSDIYDRLEASDDKGLQDDRWFLYYTQLGKDMYTGEELDIDRLSSDYDIDHIIPQAVTQNDSLDNRVLVSRAANARKTDSFAYLPELVEARRGFWQELLDNRLISQTKFERLVRQNDFGRHEKERFVERSLVETRQIMKNVATLMRRRYGNSSAVIGLNSELTKEMRQYLGFEHKNRDINDYHHAQDALCLGVAGQFAVNRGFFDNGAVSDGAANAYNIYLQDYLRGYREKLKAGDRKHGKAFGFIVGSMASADENKRINPKTDEIAWSEADKDYLRRVMNYRKMLVTQKVGDSFGALYNETRYGAAVKEGHDGIAFDKNKADTSLYGGFSSAKVVYSILVELKGKVRLVNITMQEYSMLGDCPSDEALKKVLVAKKPEYAKAKILLRHIPSMQLIHYKGACMTIKSATELNNARQLWLDCDVYNALDDYLKCGTSKSSIDIMQIWDALFDAVNKHYPLHRVEESTLAKARTKFEKLDLDKQLDVLGMIVVALHADPGRANLSLVGLPSEWKRVRSVSFSDDDEFVFQSPSGLFETKITIAELKKAE

SEQ ID NO: 19866 - protein, 1384 aa, unidentified
  REGION 1..1384: note = Cas Enzyme sequence
MSRKKIVPNYAISLDIGNASVGWAAFTPDYRLMRAKGRELIGVRLFEPAQTAEARRMARTTRRRYSRRRWRLHMLDAIFDAPLAEVDPSFLARRKYSWVHPADENNADYWYGGVLFDSKNQDKRFYKQYPTIYHLRKTLMEDDKQHDIREVYFAVHHLLKYRGNFLVEGDLDSSSVFDSKNLLNLIGEIILCVFDEQLDGSWTAGIDKKRLADTLCTTKGSRSMRVENALAVICESCELPKEQINVIKAIFAGLEGNKLDLAKIFPSEERTSDEKKALGIYFNKSDYEEVRAQVVDSGLLDDEQCELLDKMQKQYSAIALKQLLGNAKSVSESMRASYTRHQRNWDLIKKELRTEDNADEINKHYGELVGWTMVDGRRRSIRGTSTYEKTRQNANKYFSKLIEASNLSESKKMDLKHAIDEDRLFPVQRDSNNGVIPYQLHRNELRRILEKQGKYYPFLLDTFEKNGEQVNKIEGLLTFRVPYFVGPLVEREGMQPSDNGENHWMKRKKTGEITPWNFDKMVDKDESGRRFIERLVDTDSYLLGEATLPKNSMLYQEYEVLNELNNVRLSVRSGNRWENRRRQRLGREEKTLLIRNLFMKGGVVTKKAAENLLRKEYGRTYELSGLASESKFMSSMSSYGKLCRIFGAERVNKDSELMEQIIELQTVFEDKETLLHQLRMLDGLSDSDCELLARTHYTGWGKLSRKLLTTKVGECKIGDDFAPQKHSIIEIMRFEDRNFMEIITDKNYGFPEWIDEQNLGADKKQSLESMVDELHVSPKVKRGIIQSVRLIDDISKAVGKKPSRIFLELAGDIQASVRTTSRKNRLLELYKNAGLRKEFSDIYDRLEASDDKGLQDDRWFLYYTQLGKDMYTGEELDIDRLSSDYDIDHIIPQAVTQNDSLDNRVLVSRAANARKTDSFAYLPELVEARRGFWQELLDNRLISQTKFERLVRQNDFGRHEKERFVERSLVETQIMKNVATLMRRRYGNSSAVIGLNSELTKEMRQYLGFEHKNRDINDYHHAQDALCLGVAGQFAVNRGFFDNGAVSDGAANAYNIYLQDYLRGYREKLKAGDRKHGKAFGFIVGSMASADENKRINPKTGEIAWSEADKDYLRRVMNYRKMLVTQKVGDSFGALYNETRYGAAVKEGHDGIAFDKNKADTSLYGGFSSAKVVYSILVELKGKVRLVNITMQEYSMLGDCPSDEALKKVLVAKKPEYAKAKILLRHIPSMQLIHYKGACMTIKSATELNNARQLWLDCDVYNALDDYLKCGTSKSSIDIMQIWDALFDAVNKHYPLHRVEESTLAKARTKFEKLDLDKQLDVLGMIVVALHADPGRANLSLVGLPSEWKRVRSVSFSDDDEFVFQSPSGLFETKNTIAELKKAE

SEQ ID NO: 19867 - protein, 1385 aa, unidentified
  REGION 1..1385: note = Cas Enzyme sequence
MSRKKIVPNYAISLDIGNASVGWAAFTPDYRLMRAKGRELIGVRLFEPAQTAEARRMARTTRRRYSRRRWRLHMLDAIFDAPLAEVDPSFLARRKYSWVHPADENNADYWYGGVLFDSKNQDKRFYKQYPTIYHLRKTLMEDDKQHDIREVYFAVHHLLKYRGNFLVEGDLDSSSVFDSKNLLNLIGEIILCVFDEQLDGSWTAGIDKKRLADTLCTTKGSRSMRVENALAVICESCELPKEQINVIKAIFAGLEGNKLDLAKIFPSEERTSDEKKALGIYFNKSDYEEVRAQVVDSGLLDDEQCELLDKMQKQYSAIALKQLLGNAKSVSESMCASYTRHQRNWDLIKKELRTEDNADEINKHYGELVGWTMVDGRRRSIRGTSTYEKTRQNANKYFSKLIEASNLSESKKMDLKHAIDEDRLFPVQRDSDNGVIPYQLHRNELRRILEKQGKYYPFLLDTFEKNGEQVNKIEGLLTFRVPYFVGPLVEREGMQPSDNGENHWMKRKKTGEITPWNFDKMVDKDESGRRFIERLVDTDSYLLGEATLPKNSMLYQEYEVLNELNNVRLSVRSGNRWENRRRQRLGREEKTLLIRNLFMKGGVVTKKAAENLLRKEYGRTYELSGLASESKFMSSMSSYGKLCRIFGAERVNKDSELMEQIIELQTVFEDKETLLHQLRMLDGLSDSDCELLARTHYTGWGKLSRKLLTTKVGECKIGDDFAPQKHSIIEIMRFEDRNFMEIITDKNYGFPEWIDEQNLGADKKQSLESMVDELHVSPKVKRGIIQSVRLIDDISKAVGKKPSRIFLELAGDIQASVRTTSRKNRLLELYKNAGLRKEFSDIYDRLEASDDKGLQDDRWFLYYTQLGKDMYTGEELDIDRLSSDYDIDHIIPQAVTQNDSLDNRVLVSRAANARKTDSFAYLPELVEARRGFWQELLDNRLISQTKFERLVRQNDFGRHEKERFVERSLVETRQIMKNVATLMRRRYGNSSAVIGLNSELTKEMRQYLGFEHKNRDINDYHHAQDALCLGVAGQFAVNRGFFDNGAVSDGAANAYNIYLQDYLRGYREKLKAGDRKHGKAFGFIVGSMASADENKRINPKTGEIAWSEADKDYLRRVMNYRKMLVTQKVGDSFGALYNETRYGAAVKEGHDGIAFDKNKADTSLYGGFSSAKVVYSILVELKGKVRLVNITMQEYSMLGDCPSDEALKKVLVAKKPEYAKAKILLRHIPSMQLIHYKGAWMTIKSATELNNTRQLWLDCDVYNALDDYLKCGTSKSSIDIMQIWDALFDAVNKHYPLHRVEESTLAKARTKFEKLDLDKQLDVLGMIVVALHADPGRANLSLVGLPSEWKRVRSVSFSDDDEFVFQSPSGLFETKITIAELKKAE

SEQ ID NO: 19868 - protein, 1385 aa, unidentified
  REGION 1..1385: note = Cas Enzyme sequence
MSRKKIVPNYAISLDIGNASVGWAAFTPDYRLMRAKGRELIGVRLFEPAQTAEARRMARTTRRRYSRRRWRLHMLDAIFDAPLAEVDPSFLARRKYSWVHPADENNADYWYGGVLFDSKNQDKRFYKQYPTIYHLRKTLMEDDKQHDIREVYFAVHHLLKYRGNFLVEGDLDSSSVFDSKNLLNLIGEIILCVFDEQLDGSWTAGIDKKRLADTLCTTKGSRSMRVENALAVICESCELPKEQINVIKAIFAGLEGNKLDLAKIFPSEERTSDEKKALGIYFNKSDYEEVRAQVVDSGLLDDEQCELLDKMQKQYSAIALKQLLGNAKSVSESMCASYTRHQRNWDLIKKELRTEDNADEINKHYGELVGWTMVDGRRRSIRGTSTYEKTRQNANKYFSKLIEASNLSESKKMDLKHAIDEDRLFPVQRDSDNGVIPYQLHRNELRRILEKQGKYYPFLLDTFEKNGEQVNKIEGLLTFRVPYFVGPLVEREGMQPSDNGENHWMKRKKTGEITPWNFDKMVDKDESGRRFIERLVDTDSYLLGEATLPKNSMLYQEYEVLNELNNVRLSVRSGNRWENRRRQRLGREEKTLLIRNLFMKGGVVTKKAAENLLRKEYGRTYELSGLASESKFMSSMSSYGKLCRIFGAERVNKDSELMEQIIELQTVFEDKETLLHQLRMLDGLSDSDCELLARTHYTGWGKLSRKLLTTKVGECKIGDDFAPQKHSIIEIMRFEDRNFMEIITDKNYGFPEWIDEQNLGADKKQSLESMVDELHVSPKVKRGIIQSVRLIDDISKAVGKKPSRIFLELAGDIQASVRTTSRKNRLLELYKNAGLRKEFSDIYDRLEASDDKGLQDDRWFLYYTQLGKDMYTGEELDIDRLSSDYDIDHIIPQAVTQNDSLDNRVLVSRAANARKTDSFAYLPELVEARRGFWQELLDNRLISQTKFERLVRQNDFGRHEKERFVERSLVETRQIMKNVATLMRRRYGNSSAVIGLNSELTKEMRQYLGFEHKNRDINDYHHAQDALCLGVAGQFAVNRGFFDNGAVSDGAANAYNIYLQDYLRGYREKLKAGDRKHGKAFGFIVGSMASADENKRINPKTGEIAWSEADKDYLRRVMNYRKMLVTQKVGDSFGALYNETRYGAAVKEGHDGIAFDKNKADTSLYGGFSSAKVVYSILVELKGKVRLVNITMQEYSMLGDCPSDEALKKVLVAKKPEYAKAKNLLRHIPSMQLIRYKGACMTIKSATELNNARQLWLDCDVYNALDDYLKCGTSKSSIDIMQIWDALFDAVNKHYPLHRVEESTLAKARTKFEKLDLDKQLDVLGMIVVALHADPGRANLSLVGLPSEWKRVRSVSFSDDDEFVFQSPSGLFETKITIAELKKAE

SEQ ID NO: 19869 - protein, 1312 aa, unidentified
  REGION 1..1312: note = Cas Enzyme sequence
MLDAIFDAPLAEVDPSFLARRKYSWVHPADENNADYWYGGVLFDSKNQDKRFYKQYPTIYHLRKTLMEDDKQHDIREVYFAVHHLLKYRGNFLVEGDLDSSSVFDSKNLLNLIGEIILCVFDEQLDGSWTAGIDKKRLADTLCTTKGSRSMRVENALAVICESCELPKEQINVIKAIFAGLEGNKLDLAKIFPSEERTSDEKKALGIYFNKSDYEEVRAQVVDSGLLDDEQCELLDKMQKQYSAIALKQLLGNAKSVSESMCASYTRHQRNWDLIKKELRTEDNADEINKHYGELVGWTMVDGRRRSIRGTSTYEKTRQNANKYFSKLIEASNLSESKKMDLKHAIDEDRLFPVQRDSDNGVIPYQLHRNELRRILEKQGKYYPFLLDTFEKNGEQVNKIEGLLTFRVPYFVGPLVEREGMQPSDNGENHWMKRKKTGEITPWNFDKMVDKDESGRRFIERLVDTDSYLLGEATLPKNSMLYQEYEVLNELNNVRLSVRSGNRWENRRRQRLGREEKTLLIRNLFMKGGVVTKKAAENLLRKEYGRTYELSGLASESKFMSSMSSYGKLCRIFGAERVNKDSELMEQIIELQTVFEDKETLLHQLRMLDGLSDSDCELLARTHYTGWGKLSRKLLTTKVGECKIGDDFAPQKHSIIEIMRFEDRNFMEIITDKNYGFPEWIDEQNLGADKKQSLESMVDELHVSPKVKRGIIQSVRLIDDISKAVGKKPSRIFLELAGDIQASVRTTSRKNRLLELYKNAGLRKEFSDIYDRLEASDDKGLQDDRWFLYYTQLGKDMYTGEELDIDRLSSDYDIDHIIPQAVTQNDSLDNRVLVSRAANARKTDSFAYLPELVEARRGFWQELLDNRLISQTKFERLVRQNDFGRHEKERFVERSLVETRQIMKNVATLMRRRYGNSSAVIGLNSELTKEMRQYLGFEHKNRDINDYHHAQDALCLGVAGQFAVNRGFFDNGAVSDGAANAYNIYLQDYLRGYREKLKAGDRKHGKAFGFIVGSMASADENKRINPKTGEIAWSEADKDYLRRVMNYRKMLVTQKVGDSFGALYNETRYGAAVKEGHDGIAFDKNKADTSLYGGFSSAKVVYSILVELKGKVRLVNITMQEYSMLGDCPSDEALKKVLVAKKPEYAKAKILLRHIPSMQLIRYKGACMTIKSATELNNARQLWLDCDVYNALDDYLKCGTSKSSIDIMQIWDALFDAVNKHYPLHRVEESTLAKARTKFEKLDLDKQLDVLGMIVVALHADPGRANLSLVGLPSEWKRVRSVSFSDDDEFVFQSPSGLFETKITIAELKKAE

SEQ ID NO: 19870 - protein, 1385 aa, unidentified
  REGION 1..1385: note = Cas Enzyme sequence
MSRKKIVPNYAISLDIGNASVGWAAFTPDYRLMRAKGRELIGVRLFEPAQTAEARRMARTTRRRYSRRRWRLHMLDAIFDAPLAEVDPSFLARRKYSWVHPADENNADYWYGGVLFDSKNQDKRFYKQYPTIYHLRKTLMEDDKQHDIREVYFAVHHLLKYRGNFLVEGDLDSSSVFDSKNLLNLIGEIILCVFDEQLDGSWTAGIDKKRLADTLCTTKGSRSMRVENALAVICESCELPKEQINVIKAIFAGLEGNKLDLAKIFPSEERTSDEKKALGIYFNKSDYEEVRAQVVDSGLLDDEQCELLDKMQKQYSAIALKQLLGNAKSVSESMCASYTRHQRNWDLIKKELRTEDNADEINKHYGELVGWTMVDGRRRSIRGTSTYEKTRQNANKYFSKLIEASNLSESKKLDLKHAIDEDRLFPVQRDSDNGVIPYQLHRNELRRILEKQGKYYPFLLDTFEKNGEQVNKIEGLLTFRVPYFVGPLVEREGMQPSDNGENHWMKRKKSGEITPWNFDKMVDKDESGRRFIERLVDTDSYLLGEATLPKNSMLYQEYEVLNELNNVRLSVRSGNRWENRRRQRLGREEKTLLIRNLFMKGGVVTKKAAENLLRKEYGRTYELSGLASESKFMSSMSSYGKLCRIFGAERVNKDSELMEQIIELQTVFEDKETLLHQLRMLDGLSDSDCELLARTHYTGWGKLLRKLLTTKVGECKIGDDFAPQKHSIIEIMRFEDRNFMEIITDKNYGFPEWIDEQNLGADKKQSLESMVDELHVSPKVKRGIIQSVRLIDDISKAVGKKPSRIFLELAGDIQASVRTTSRKNRLLELYKNAGLRKEFSDIYDRLEASDDKGLQDDRWFLYYTQLGKDMYTGEELDIDRLSSDYDIDHIIPQAVTQNDSLDNRVLVSRAANARKTDSFAYLPELVEARRGFWQELLDNRLISQTKFERLVRQNDFGRHEKERFVERSLVETRQIMKNVATLMRRRYGNSSAVIGLNSELTKEMRQYLGFEHKNRDINDYHHAQDALCLGVAGQFAVNRGFFDNGAVSDGAANAYNIYLQDYLRGYREKLKAGDRKHGKAFGFIVGSMASADENKRINPKTGEIAWSEADKDYLRRVMNYRKMLVTQKVGDSFGALYNETRYGAAVKEGHDGIAFDKNKADTSLYGGFSSAKVVYSILVELKGKVRLVNITMQEYSMLGDCPSDEALKKVLVAKKPEYAKAKILLRHIPSMQLIHYKGACMTIKSATELNNARQLWLDCDVYNALDDYLKCGTSKSSIDIMQIWDALFDAVNKHYPLHRVEESTLAKARTKFEKLDLDKQLDVLGMIVVALHADPGRANLSLVGLPSEWKRVRSVSFSDDDEFVFQSPSGLFETKITIAELKKAE

SEQ ID NO: 19871 - protein, 1385 aa, unidentified
  REGION 1..1385: note = Cas Enzyme sequence
MSRKKIVPNYAISLDIGNASVGWAAFTPDYRLMRAKGRELIGVRLFEPAQTAEARRMARTTRRRYSRRRWRLHMLDAIFDAPLAEVDPSFLARRKYSWVHPADENNADYWYGGVLFDSKNQDKRFYKQYPTIYHLRKTLMEDDKQHDIREVYFAVHHLLKYRGNFLVEGDLDSSSVFDSKNLLNLIGEIILCVFDEQLDGSWTAGIDKKRLADTLCTTKGSRSMRVENALAVICESCELPKEQINVIKAIFAGLEGNKLDLAKIFPSEERTSDEKKALGIYFNKSDYEEVRAQVVDSGLLDDEQCELLDKMQKQYSAIALKQLLGNAKSVSESMCASYTRHQRNWDLIKKELRTEDNADEINKHYGELVGWTMVDGRRRSIRGTSTYEKTRQNANKYFSKLIEASNLSESKKMDLKHAIDEDRLFPVQRDSDNGVIPYQLHRNELRRILEKQGKYYPFLLDTFEKNGEQVNKIEGLLTFRVPYFVGPLVEREGMQPSDNGENHWMKRKKSGEITPWNFDKMVDKDESGRRFIERLVDTDSYLLGEATLPKNSMLYQKYEVLNELNNVRLSVRSGNRWENRRRQRLGREEKTLLIRNLFMKGGVVTKKAAENLLRKEYGRTYELSGLASESKFMSSMSSYGKLCRIFGAERVNKDSELMEQIIELQTVFEDKETLLHQLRMLDGLSDSDCELLARTHYTGWGKLSRKLLTTKVGECKIGDDFAPQKHSIIEIMRFEDRNFMEIITDKNYGFPEWIYEQNLGADKKQSLESMVDELHVSPKVKRGIIQSVRLIDDISKAVGKKPSRIFLELAGDIQASVRTTSRKNRLLELYKNAGLRKEFSDIYDRLEASDDKGLQDDRWFLYYTQLGKDMYTGEELDIDRLSSDYDIDHIIPQAVTQNDSLDNRVLVSRAANARKTDSFAYLPELVEARRDFWQELLDNRLISQTKFERLVRQNDFGRHEKERFVERSLVETRQIMKNVATLMRRRYGNSSAVIGLNSELTKEMRQYLGFEHKNRDINDYHHAQDALCLGVAGQFAVNRGFFDNGAVSDGAANAYNIYLQDYLRGYREKLKAGDRKHGKAFGFIVGSMASADENKRINPKTGEIAWSEADKDYLRRVMNYRKMLVTQKVGDSFGALYNETRYGAAVKEGHDGIAFDKNKADTSLYGGFSSAKVVYSILVELKGKVRLVNITMQEYSMLGDCPSDEALKKVLVAKKPEYAKAKILLRHIPPMQLIHYKGACMTIKSATELNNARQLWLDCDVYNALDDYLKCGTSKSSIDIMQIWDALFDAVNKHYPLHRVEESTLAKARTKFEKLDLDKQLDVLGMIVVALHADPGRANLSLVGLPSEWKRVRSVSFSDDDEFVFQSPSGLFETKITIAELKKAE

SEQ ID NO: 19872 - protein, 1385 aa, unidentified
  REGION 1..1385: note = Cas Enzyme sequence
MSRKKIVPNYAISLDIGNASVGWAAFTPDYRLMRAKGRELIGVRLFEPAQTAEARRMARTTRRRYSRRRWRLHMLDAIFDAPLAEVDPSFLARRKYSWVHPADENNADYWYGGVLFDSKNQDKRFYKQYPTIYHLRKTLMEDDKQHDIREVYFAVHHLLKYRGNFLVEGDLDSSSVFDSKNLLNLIGEIILCVFDEQLDGSWTAGIDKKRLADTLCTTKGSRSMRVENALAVIRESCELPKEQINVIKAIFAGLEGNKLDLAKIFPSEEHTSDEKKALGIYFNKSDYEEARAQVVDSGLLDDEQCELLDKMQKQYSAIALKQLLGNAKSVSESMCASYTRHQRNWDLIKKELRTEDNADEINKHYGELVGWTMVDGRRRSIRGTSTYEKTRQNANKYFSKLIEASNLSESKKLDLKHAIDEDRLFPVQRDSDNGVIPYQLHRNELRRILEKQGKYYPFLLDTFEKNGEQVNKIEGLLTFRVPYFVGPLVEREGMQPSDNGENHWMKRKKSGEITPWNFDKMVDKDESGRRFIERLVDTDSYLLGEATLPKNSMLYQEYEVLNELNNVRLSVRSGNRWENRRRQRLGREEKTLLIRNLFMKGGVVTKKAAENLLRKEYGRTYELSGLASESKFMSSMSSYGKLCRIFGAERVNKDSELMEQIIELQTVFEDKETLLHQLRMLDGLSDSDCELLARTHYTGWGKLSRKLLTTKVGECKIGDDFAPQKHSIIEIMRFEDRNFMEIIVQKNYGFPEWIDEQNLGADKKQSLESMVDELHVSPKVKRGIIQSVRLIDDISKAVGKKPSRIFLELAGDIQASVRTTSRKNRLLELYKNAGLRKEFSDIYDRLEASDDKGLQDDRWFLYYTQLGKDMYTGEELDIDRLSSDYDIDHIIPQAVTQNDSLDNRVLVSRAANARKTDSFAYLPELVEARRGFWQELLDNRLISQTKFERLVRQNDFGRHEKERFVERSLVETRQIMKNVATLMRRRYGNSSAVIGLNSELTKEMRQYLGFEHKNRDINDYHHAQDALCLGVAGQFAVNRGFFDNGAVSDGAANAYNIYLQDYLRGYREKLKAGDRKHGKAFGFIVGSMASADENKRINPKTGEIAWSEADKDYLRRVMNYRKMLVTQKVGDSFGALYNETRYGAAVKEGHDGIAFDKNKADTSLYGGFSSAKVVYSILVELKGKVRLVNITMQEYSMLGDCPSDEALKKVLVAKKPEYAKAKILLRHIPSMQLIHYKGACMTIKSATELNNARQLWLDCDVYNALDDYLKCGTSKSSIDIMQIWDALFDAVNKHYPLHRVEESTLAKARTKFEKLDLDKQLDVLGMIVVALHADPGRANLSLVGLPSEWKRVRSVSFSDDDEFVFQSPSGLFETKITIAELKKAE

SEQ ID NO: 19873 - protein, 1180 aa, unidentified
  REGION 1..1180: note = Cas Enzyme sequence
MSRKKIVPNYAISLDIGNASVGWAAFTPDYRLMRAKGRELIGVRLFEPAQTAEARRMARTTRRRYSRRRWRLHMLDAIFDAPLAEVDPSFLARRKYSWVHPADENNADYWYGGVLFDSKNQDKRFYKQYPTIYHLRKTLMEDDKQHDIREVYFAVHHLLKYRGNFLVEGDLDSSSVFDSKNLLNLIGEIILCVFDEQLDGSWTAGIDKKRLADTLCTTKGSRSMRVENALAVICESCELPKEQINVIKAIFAGLEGNKLDLAKIFPSEERTSDEKKALGIYFNKSDYEEVRAQVVDSGLLDDEQCELLDKMQKQYSAIALKQLLGNAKSVSESMCASYTRHQRNWDLIKKELRTEDNADEINKHYGELVGWTMVDGRRRSIRGTSTYEKTRQNANKYFSKLIEASNLSESKKLDLKHAIDEDRLFPVQRDSDNGVIPYQLHRNELRRILEKQGKYYPFLLDTFEKNGEQVNKIEGLLTFRVPYFVGPLVEREGMQPSDNGENHWMKRKKSGEITPWNFDKMVDKDESGRRFIERLVDTDSYLLGEATLPKNSMLYQEYEVLNELNNVRLSVRSGNRWENRRRQRLGREEKTLLIRNLFMKGGVVTKKAAENLLRKEYGRTYELSGLASESKFMSSMSSYGKLCRIFGAERVNKDSELMEQIIELQTVFEDKETLLHQLRMLDGLSDSDCELLARTHYTGWGKLSRKLLTTKVGECKIGDDFAPQKHSIIEIMRFEDRNFMEIITDKNYGFPEWIDEQNLGADKKQSLESMVDELHVSPKVKRGIIQSVRLIDDISKAVGKKPSRIFLELAGDIQASVRTTSRKNRLLELYKNAGLRKEFSDIYDRLEASDDKGLQDDRWFLYYTQLGKDMYTGEELDIDRLSSDYDIDHIIPQAVTQNDSLDNRVLVSRAANARKTDSFAYLPELVEARRGFWQELLDNRLISQTKFERLVRQNDFGRHEKERFVERSLVETRQIMKNVATLMRRRYGNSSAVIGLNSELTKEMRQYLGFEHKNRDINDYHHAQDALCLGVAGQFAVNRGFFDNGAVSDGAANAYNIYLQDYLRGYREKLKAGDRKHGKAFGFIVGSMASADENKRINPKTGEIAWSEADKDYLRRVMNYRKMLVTQKVGIVLALYITKRDMELRLKKGMTVLLSIKIKPIRLCMVVSPAQRWFIRFLSN

SEQ ID NO: 19874 - protein, 1341 aa, unidentified
  REGION 1..1341: note = Cas Enzyme sequence
MEDMERYHIGLDIGTSSIGWAVIGDDFKIKRKKGKNLIGVRLFKEGDTAAERRSFRTQRRRLNRRKWRLKLLEEIFDPYMAEVDEYFFARLKESNLSPKDSNKKYLGSLLFPDISDSNFYDKYPTIYHLRRDLMEKDKKFDLREIYLAIHHIVKYRGNFLEKVPAKNYKNSGASIGFLLEEVNSLYKDIIGDESVAILNSGKFEDVEKIILDEETRNLDKQKSVGKLLVEDKKKKNIVTAFSKAILGYKFNIEDLLLIESDEKNKLTFNDENIDDIFNELSHSLDDNQMDLLTKTREIYFKFKLNMIVPTGYTLSESMIEKYEMHKAHLKMYKEFINTLNAKDRKILKNAYSDYINNEKAKAANAQENFYKTIKKTIKDNNSDTAKKIIGLIDEGNFMPKQRTGENGVIPHQLHQIELDRIIENQAKYYPWLAEENPVEKNRKFAKYKLDELVTFRVPYYVGPLVDKTESNKNEKETKFAWMVRKAKGTITPWNFENLVDRTESANRFIKRMTSKDTYIIGEDVLPASSLLYEKFKVLNELNNIKVNKKKLDVEQKQHVYLDLFTTRKNVTKDNLATSLNCDVESITGLSDNEKFNSSLSSYIDLKAILGNAVDDCNKNKDLEKIIEYSTIFEDGNIYKEKLSEISWLTDEQIEKLSNIHFKGWGRLSKKLLTQITNENGERIIDALWNTSNNFIQIISDESIQAKLAEINGEYADKSNLEDILDEAYTSPQNKKAIRQVMKVVEDIEKAMKCKPTSIAIEFTRRKGKSKLTNTRYKKISETYEKITDELISEYELGKLQSKLDSKANNMRDIYYLYFMQLGRDMYTGEKINIDELHQYYDIDHIFPRSFIKDNSLNNRVLTRKEINNNEKADRTAADLYAVKMGDFWRKLRKQGLITEKKYKNLLTRTDSIDKYTKQSFIKRQLVETSQVVKMAANILQDKYSNTKIIEVRARLNSDLRKEYELIKNREVNDYHHAIDGYLTIFIGQYLYKTYPKLRSYFVYDDFKKLDSNYLKHMDKFNFIWKLEDKKAEDVYDNVNNEFILNVPKMKDYIQKIYNYKYMLISKEVTTESGAFYKETKYKAGGMNLIPIKQNKPINIYGGYKEKRNSYMMLVKIKKKKETIYKIVGIPRLLSDELDRLNTMSEKQLLLETIARTSLSKTEQNFKIILDKIYYGQLVIDENQKYTLGSVIYKHNAMQLHLSKQALEILAVGKTKSREVKDEELIAVYEEILLVVNKYFELYDISKFRQKLNDGLEIFKELPIYNIYENNKIKKIGKFEVLNRILIGLHANAARADLSVLGFKDLGKLQVNGGIKLSPDAKLIYQSPTGIFSRAVRVKDLG

SEQ ID NO: 19875 - protein, 1338 aa, unidentified
  REGION 1..1338: note = Cas Enzyme sequence
MERYHIGLDIGTSSIGWAVIGDDFKIKRKKGKNLIGVRLFKEGDTAAERRSFRTQRRRLNRRKWRLKLLEEIFDPYMAEVDEYFFARLKESNLSPKDSNKKYLGSLLFPDISDSNFYDKYPTIYHLRRDLMEKDKKFDLREIYLAIHHIVKYRGNFLEKVPAKNYKNSGASIGFLLEEVNSLYKDIIGDESVAILNSGKFEDVEKIILDEETRNLDKQKSVGKLLVEDKKKKNIVTAFSKAILGYKFNIEDLLLIESDEKNKLTFNDENIDDIFNELSHSLDDNQMDLLTKTREIYFKFKLNMIVPTGYTLSESMIEKYEMHKAHLKMYKEFINTLNAKDRKILKNAYSDYINNEKAKAANAQENFYKTIKKTIKDNNSDTAKKIIGLIDEGNFMPKQRTGENGVIPHQLHQIELDRIIENQAKYYPWLAEENPVEKNRKFAKYKLDELVTFRVPYYVGPLVDKTESNKNEKETKFAWMVRKAKGTITPWNFENLVDRTESANRFIKRMTSKDTYIIGEDVLPASSLLYEKFKVLNELNNIKVNKKKLDVEQKQHVYLDLFTTRKNVTKDNLATSLNCDVESITGLSDNEKFNSSLSSYIDLKAILGNAVDDCNKNKDLEKIIEYSTIFEDGNIYKEKLSEISWLTDEQIEKLSNIHFKGWGRLSKKLLTQITNENGERIIDALWNTSNNFIQIISDESIQAKLAEINGEYADKSNLEDILDEAYTSPQNKKAIRQVMKVVEDIEKAMKCKPTSIAIEFTRRKGKSKLTNTRYKKISETYEKITDELISEYELGKLQSKLDSKANNMRDIYYLYFMQLGRDMYTGEKINIDELHQYYDIDHIFPRSFIKDNSLNNRVLTRKEINNNEKADRTAADLYAVKMGDFWRKLRKQGLITEKKYKNLLTRTDSIDKYTKQSFIKRQLVETSQVVKMAANILQDKYSNTKIIEVRARLNSDLRKEYELIKNREVNDYHHAIDGYLTIFIGQYLYKTYPKLRSYFVYDDFKKLDSNYLKHMDKFNFIWKLEDKKAEDVYDNVNNEFILNVPKMKDYIQKIYNYKYMLISKEVTTESGAFYKETKYKAGGMNLIPIKQNKPINIYGGYKEKRNSYMMLVKIKKKKETIYKIVGIPRLLSDELDRLNTMSEKQLLLETIARTSLSKTEQNFKIILDKIYYGQLVIDGNQKYTLGSVIYKHNAMQLHLSKQALEILAVGKTKSREVKDEELIAVYEEILLVVNKYFELYDISKFRQKLNDGLEIFKELPIYNIYENNKIKKIGKFEVLNRILIGLHANAARADLSVLGFKDLGKLQVNGGIKLSPDAKLIYQSPTGIFSRAVRVKDLG

SEQ ID NO: 19876 - protein, 941 aa, unidentified
  REGION 1..941: note = Cas Enzyme sequence
MASRSTTLAIDFGVKYVGIALVEHNENVHNRVLYAATVVVDPKPLRSLVENRAATRRLRRTRKTHSRRLRRLAQALAGVPNAEAIVRFSRRRGYSHEAPEEQDEQTFHVPREQFFVALKDEIDRLVPDQDRERVLAICGEHLNRLRRRGAELRPARFDNRGRSRCNWEGCRHNVPRAGNDVRGRLQQSLFLWLQPVFGQTADVPRFRKSLQHWIDELAGLAKAYRQTEGDAPEIKGARKLVNARIKRVAKNLRDRVHGEAQNDVVEKFDIDWKEYYWPQIAEIVRGESGGRVRFCGEHSKMFVDYVMAGKQIPNRQEINDGDLISRQQRIVFQRLARLVEGRILPLAGNQIDRVVVERVAFDVLTGPLKARQSMSESKAAEIYWYGPQAGFESRAQMLEAEFAGTCAYCGEKKSTTEVEHIFNRSEFPFDSYFNVVPACRECNSRKGGRTALQAGMTIHEAAYTAYCNYLRSIRVLHPYHTVKKGILNLLRRSATSDRAQQMIGLIADNLVSVTNTQRSPRPLARYLTTKLGRLMGNGPKIEYRAGRHTALYRSVMLPEYAKAERKAEGDLRNHALDAIILGCELPSASALENRKWTKTAGDVAQWMESVKAASPAMLEGMPRVEPVEFVRFFEQDAGGGYCTIDLSAFNWNRRRKAAHKLDPFGKTAAGVPYKRDSAANVFSELVKGAAARDKQIEVIAHRGLRQALALDRDRAGETLVAWLQQTTKAGLANENMSAHPADRERLRLLQKFVETPVVEFFKKDEPAGIPWVIGVRCLNLDTGGPRKVNVRRSINGNPAAQFYQSEAVIREMYVGYRAEHGQLDRRHPILFAVSQIGELSRIARGRWVQVDIAADSPLRGRPLGATDDLGRFREQWDAAFADVRQAEGITKLFRLTQGCVIEKMDGTQFQIRNFDKSEPWMSSESLKDIRRIHRSPFRVMG

SEQ ID NO: 19877 - protein, 1388 aa, unidentified
  REGION 1..1388: note = Cas Enzyme sequence
MNRENAVEDYAVSLDIGNASVGWAAFTPNYRLMRAKGHELIGARLFEPASTAEERRMARTTRRRYSRRHWRLRMLDSMFDQALSEVDPSFLMRRKYSWVHPEDKNNEGHWFGGVLFDSNEQDKRFYEKYPTIYHLRKTLMEDDERHDIREVYLAIHHMMKYRGNFLTEGELAPSSVFDVEDLLKLLTEILQYADEDETGDDLELQADANGLTEALCTTKGSRSIRAKNAISILKEGTALSKRQEAIISAVFAGLEGNKLDLTKVFPNKEYTPEDKKTLALHFNKADYDEKRIAIGDSGLLEDNECDFLDCIQRQYSAIALKQLLGDSTSVSESMCARYEQHQRNWDLIKRYCREESNAENINKNYGALVGWEIVGGQRRSIRGAKDYENKRKAANKFFEELIKGSVLPDREKERLLHDIENDELFPVQRDSGNGVIPYQLHLNELKKIIQKQGRYYPFLLETYIKDGKEVNKLEGLLAFRVPYYVGPLVSRDDMQSSDNRENHWMIRKKKGVITPWNFDEMVDKDKSGHEFIKSLVGTDSYLLGETTLPKNSLLYQEFEVLNELNNVRLSIRTGNHWADKRRVRLGHNEKQLLLEELFAKQATVTKKDAEKLLRRTYGNTYEISGLADEKKFVSSLSSYGKMCRTLKASYVNSHKDVVEKIIELQTVFEDKKTLKHQLQLLGELTETNCELLSNTHYTGWGKLSRKLLASKVAVCKIGNDFAPAKHSIIEIMRETDRNFMEIITDKDLGVGEWISQQNVGAEDGNSYQDIIDNLRVSPKVKRGINQAIRVIDDISKAVGKEPSRIFLELAGDVQQSARTVSRKSRLQGLYKSAGLQKEFQDLAESLNECSDNDLRDDRLFLYYTQLGKDMYTGEPLNLDRLSSDYDIDHIIPQAVTQNDSLDNRVLVARAANARKTDSFQYLPEIANRMRNFWQELLDARLISRVKFDRLNRQNDFSSHEKERFVQRSLVETRQIMKNVATIMRKRYGNSAAVIGLNSELTKEMRQYLGFSHKNRDINDYHHAQDALCLGVAGQFAVNRGFFANGLVSDGAVNSYNLYLQDYLRGYREKVNAGERRRNKAFGFIVGSMNSRNPDKRINPKTGEIVWREEDKAYLRKVMNYRKMLVTQKVGDSFGALYDTTRYGALSKKKMRIPFNKEMRDTDLYGGFSSEKTVYAVLIESKKKTRLVNIAMREYAKLGDHPSDDALRMILVEKKPEYGKARILLRHVPPMQLIRYGGALITIKSAAELNNAQQLWLPYGEYCLFDDVMNSADSVSEEQLCGLFDAIVESIQNYYPKHRFDETELAAFYAAFNRVSLEEKKDVIKEVVGALHADAKTANLKNLKMPESWGRMNNKSGYSFADSDEFIFQSPSGLFEQRISVGELKRRAR

SEQ ID NO: 19878 - protein, 1388 aa, unidentified
  REGION 1..1388: note = Cas Enzyme sequence
MNRENAVEDYAVSLDIGNASVGWAAFTPNYRLMRAKGHELIGARLFEPASTAEERRMARTTRRRYSRRHWRLRMLDSMFDQALSEVDPSFLMRRKYSWVHPEDKNNEGHWFGGVLFDSNEQDKRFYEKYPTIYHLRKTLMEDDERHDIREVYLAIHHMMKYRGNFLTEGELAPSSVFDVEDLLKLLTEILQYADEDETGDDLELQADANGLTEALCTTKGSRSIRAKNAISILKEDTALSKRQEAIISAVFAGLEGNKLDLTKVFPNKEYTPEDKKTLALYFNKADYDEKRIAIGDSGLLEDNECDFLDCIQRQYSAIALKQLLGDSTSVSESMCARYEQHQRNWDLIKRYCREESNAENINKNYGALVGWEIVGGQRRSIRGAKDYENKRKAANKFFEELIKGSVLPDREKERLLHDIENDELFPVQRDSGNGVIPYQLHLNELKKIIQKQGRYYPFLLETYIKDGKEVNKLEGLLAFRVPYYVGPLVSRDDMQSSDNRENHWMIRKKKGVITPWNFDEMVDKDKSGHEFIKSLVGTDSYLLGETTLPKNSLLYQEFEVLNELNNVRLSIRTGNHWADKRRVRLGHNEKQLLLEELFAKQATVTKKDAEKLLRRTYGNTYEISGLADEKKFVSSLSSYGKMCRTLKASYVNSHKDVVEKIIELQTVFEDKKTLKHQLQLLGELTETNCELLSNTHYTGWGKLSRKLLASKVAVCKIGNDFAPAKHSIIEIMRETDRNFMEIITDKDLGVGEWISQQNVGAEDGNSYQDIIDNLRVSPKVKRGINQAIRVIDDISKTVGKEPSRIFLELAGDVQQSARTVSRKSRLQGLYKSAGLQKEFQDLAESLNECSDNDLRDDRLFLYYTQLGKDMYTGEPLNLDRLSSDYDIDHIIPQAVTQNDSLDNRVLVARAANARKTDSFQYLPEIANRMRNFWQELLDARLISRVKFDRLNRQNDFSSHEKERFVQRSLVETRQIMKNVATIMRKRYGNSAAVIGLNSELTKEMRQYLGFSHKNRDINDYHHAQDALCLGVAGQFAVNRGFFANGLVSDGAVNSYNLYLQDYLRGYREKVNAGERRRNKAFGFIVGSMNSRNPDKRINPKTGEIVWREEDKAYLRKVMNYRKMLVTQKVGDSFGALYDTTRYGALSKKKMRIPFNKEMRDTDLYGGFSSEKTVYAVLIESKKKTRLVNIAMREYAKLGDHPSDDALRMILVEKKPEYGKARILLRHVPPMQLIRYGGALITIKSAAELNNAQQLWLPYGEYCLFDDVMNSADSVSEEQLCGLFDAIVESIQNYYPKHRFDETELAAFYAAFNRVSLEEKKDVIKEVVGALHADAKTANLKNLKMPESWGRMNNKSGYSFADSDEFIFQSPSGLFEQRISVGELKRRAR

SEQ ID NO: 19879 - protein, 1388 aa, unidentified; identical to SEQ ID NO: 19877
  REGION 1..1388: note = Cas Enzyme sequence

SEQ ID NO: 19880 - protein, 1388 aa, unidentified
  REGION 1..1388: note = Cas Enzyme sequence
MNRENAVEDYAVSLDIGNASVGWAAFTPNYRLMRAKGHELIGARLFEPASTAEERRMARTTRRRYSRRHWRLRMLDSMFDQALSEVDPSFLMRRKYSWVHPEDTNNEGHWFGGVLFDSNEQDKRFYEKYPTIYHLRKTLMEDDERHDIREVYLAIHHMMKYRGNFLTEGELAPSSVFDVEDLLKLLTEILQYADEDETGDDLELQADANGLTEALCTTKGSRSIRAKNAISILKEDTALSKRQEAIISAVFAGLEGNKLDLTKVFPNKEYTPEDKKTLALYFNKADYDEKRIAIGDSGLLEDNECDFLDCIQRQYSAIALKQLLGDSTSVSESMCARYEQHQRNWDLIKRYCREESNAENINKNYGALVGWEIVGGQRRSIRGAKDYENKRKAANKFFEELIKGSVLSDQEKERLLHDIENDELFPVQRDSGNGVIPYQLHLNELKKIIQKQGRYYPFLLETYIKDGKEVNKLEGLLAFRVPYYVGPLVSRDDMQSSDNGENHWMIRKKKGVITPWNFDEMVDKDESGRKFIERLVGTDSYLLGEPTLPKNSLLYEEFEVLNELNNVRLSIRTGNHWADKRRVRLGHNEKQLLLEELFAKQATVTKKDAEKLLRRTYGNTYEISGLADEKKFVSSLSSYGKMCRTLKASYVNSHKDVVEKIIELQTVFEDKKTLKHQLQLLGELTETNCELLSNTHYTGWGKLSRKLLASKVAVCKIGNDFAPAKHSIIEIMRETDRNFMEIITDKDLGVGEWISQQNVGAEDGNSYQDIIDDLRVSPKVKRGINQAIRVIDDISKAVGKEPSRIFLELAGDVQQSARTVSRKSRLQGLYKSAGLQKEFQDLAESLNECSDNDLRDDRLFLYYTQLGKDMYTGEPLNLDRLSSDYDIDHIIPQAVTQNDSLDNRVLVARAANARKTDSFQYLPEIANRMRNFWQELLDARLISRVKFDRLNRQNDFSSHEKERFVQRSLVETRQIMKNVATIMRKRYGNSAAVIGLNSELTKEMRQYLGFSHKNRDINDYHHAQDALCLGVAGQFAVNRGFFANGLVSDGAVNSYNLYLQDYLRGYREKVNAGERRRNKAFGFIVGSMNSRNPDKRINPKTGEIVWREEDKAYLRKVMNYRKMLVTQKVGDSFGALYDTTRYGALSKKKMRIPFNKEMRDTDLYGGFSSEKTVYAVLIESKKKTRLVNIAMREYAKLGDHPSDDALRMILVEKKPEYGKARILLRHVPPMQLIRYGGALITIKSAAELNNAQQLWLPYGEYCLFDDVMNSADSVSEEQLCGLFDAIVESIQNYYPKHRFDETELAAFYAAFNRVSLEEKKDVIKEVVGALHADAKTANLKNLKMPESWGRMNNKSGYSFADSDEFIFQSPSGLFEQRISVGELKRRAR

SEQ ID NO: 19881 - protein, 1315 aa, unidentified
  REGION 1..1315: note = Cas Enzyme sequence
MLDSMFDQALSEVDPSFLMRRKYSWVHPEDKNNEGHWFGGVLFDSNEQDKRFYEKYPTIYHLRKTLMEDDERHDIREVYLAIHHMMKYRGNFLTEGELAPSSVFDVEDLLKLLTEILQYADEDETGDDLELQADANGLTEALCTTKGSRSIRAKNAISILKEGTALSKRQEAIISAVFAGLEGNKLDLTKVFPNKEYTPEDKKTLALHFNKADYDEKRIAIGDSGLLEDNECDFLDCIQRQYSAIALKQLLGDSTSVSESMCARYEQHQRNWDLIKRYCREESNAENINKNYGALVGWEIVGGQRRSIRGAKDYENKRKAANKFFEELIKGSVLPDREKERLLHDIENDELFPVQRDSGNGVIPYQLHLNELKKIIQKQGRYYPFLLETYIKDGKEVNKLEGLLAFRVPYYVGPLVSRDDMQSSDNRENHWMIRKKKGVITPWNFDEMVDKDKSGHEFIKSLVGTDSYLLGETTLPKNSLLYQEFEVLNELNNVRLSIRTGNHWADKRRVRLGHNEKQLLLEELFAKQATVTKKDAEKLLRRTYGNTYEISGLADEKKFVSSLSSYGKMCRTLKASYVNSHKDVVEKIIELQTVFEDKKTLKHQLQLLGELTETNCELLSNTHYTGWGKLSRKLLASKVAVCKIGNDFAPAKHSIIEIMRETDRNFMEIITDKDLGVGEWISQQNVGAEDGNSYQDIIDNLRVSPKVKRGINQAIRVIDDISKAVGKEPSRIFLELAGDVQQSARTVSRKSRLQGLYKSAGLQKEFQDLAESLNECSDNDLRDDRLFLYYTQLGKDMYTGEPLNLDRLSSDYDIDHIIPQAVTQNDSLDNRVLVARAANARKTDSFQYLPEIANRMRNFWQELLDARLISRVKFDRLNRQNDFSSHEKERFVQRSLVETRQIMKNVATIMRKRYGNSAAVIGLNSELTKEMRQYLGFSHKNRDINDYHHAQDALCLGVAGQFAVNRGFFANGLVSDGAVNSYNLYLQDYLRGYREKVNAGERRRNKAFGFIVGSMNSRNPDKRINPKTGEIVWREEDKAYLRKVMNYRKMLVTQKVGDSFGALYDTTRYGALSKKKMRIPFNKEMRDTDLYGGFSSEKTVYAVLIESKKKTRLVNIAMREYAKLGDHPSDDALRMILVEKKPEYGKARILLRHVPPMQLIRYGGALITIKSAAELNNAQQLWLPYGEYCLFDDVMNSADSVSEEQLCGLFDAIVESIQNYYPKHRFDETELAAFYAAFNRVSLEEKKDVIKEVVGALHADAKTANLKNLKMPESWGRMNNKSGYSFADSDEFIFQSPSGLFEQRISVGELKRRAR

SEQ ID NO: 19882 - protein, 1388 aa, unidentified
  REGION 1..1388: note = Cas Enzyme sequence
MNRENAVEDYAVSLDIGNASVGWAAFTPNYRLMRAKGHELIGARLFEPASTAEERRMARTTRRRYSRRHWRLRMLDSMFDQALSEVDPSFLMRRKYSWVHPEDKNNEGHWFGGVLFDSNEQDKRFYEKYPTIYHLRKTLMEDDERHDIREVYLAIHHMMKYRGNFLTEGELAPSSVFDVEDLLKLLTEILQYADEDETGDDLELQADANGLTEALCTTKGSRSIRAKNAISILKEDTALSKRQEAIISAVFAGLEGNKLDLTKVFPNKEYTPEDKKTLALYFNKADYDEKRIAIGDSGLLEDNECDFLDCIQRQYSAIALKQLLGDSTSVSESMCARYEQHQRNWDLIKRYCREESNAENINKNYGALVGWEIVGGQRRSIRGAKDYENKRKAANKFFEELIKGSVLSDQEKERLLHDIENDELFPVQRDSGNGVIPYQLHLNELKKIIQKQGRYYPFLLETYIKDGKEVNKLEGLLAFRVPYYVGPLVSRDDMQSSDNGENHWMIRKKKGVITPWNFDEMVDKDESGRKFIERLVGADSYLLGEPTLPKNSLLYEEFEVLNELNNVRLSIRTGNHWADKRRVRLGHNEKQLLLEELFAKQATVTKKDAEKLLRRTYGNTYEISGLADEKKFVSSLSSYGKMCRTLKASYVNSHKDVVEKIIELQTVFEDKKTLKHQLQLLGELTETNCELLSNTHYTGWGKLSRKLLASKVAVCKIGNDFAPAKHSIIEIMRETDRNFMEIITDKDLGVGEWISQQNVGAEDGNSYQDIIDDLRVSPKVKRGINQAIRVIDDISKAVGKEPSRIFLELAGDVQQSARTVSRKSRLQGLYKSAGLQKEFQDLAESLNECSDNDLRDDRLFLYYTQLGKDMYTGEPLNLDRLSSDYDIDHIIPQAVTQNDSLDNRVLVARAANARKTDSFQYLPEIANRMRNFWQELLDARLISRVKFDRLNRQNDFSSHEKERFVQRSLVETRQIMKNVATIMRKRYGNSAAVIGLNSELTKEMRQYLGFSHKNRDINDYHHAQDALCLGVAGQFAVNRGFFANGLVSDGAVNSYNLYLQDYLRGYREKVNAGERRRNKAFGFIVGSMNSRNPDKRINPKTGEIVWREEDKAYLRKVMNYRKMLVTQKVGDSFGALYDTTRYGALSKKKMRIPFNKEMRDTDLYGGFSSEKTVYAVLIESKKKTRLVNIAMREYAKLGDHPSDDALRMILVEKKPEYGKARILLRHVPPMQLIRYGGALITIKSAAELNNAQQLWLPYGEYCLFDDVMNSADSVSEEQLCGLFDAIVESIQNYYPKHRFDETELAAFYAAFNRVSLEEKKDVIKEVVGALHADAKTANLKNLKMPESWGRMNNKSGYSFADSDEFIFQSPSGLFEQRISVGELKRRAR

SEQ ID NO: 19883 - protein, 1013 aa, unidentified
  REGION 1..1013: note = Cas Enzyme sequence
ANENRTQDAGHALLRQGRNPKVRKNSGVITDKNRLIHDIEEDKLFPIQRDSDNGVIPHQLHQNELKQIIKKQGKYYPFLLDAFEKDGKQINKIEGLLAFRVPYFVGPLVVPEDLQKSDNSENHWMVRKKKGEITPWNFDEMVDKDASGRKFIERLVGTDSYLLGEPTLPKNSLLYQEYEVLNELNNVRLSVRTGNHWNDKRRMRLGREEKTLLCQRLFMKGQTVTKRTAENLLRKEYGRTYELSGLSDESKFTSSLSTYGKMCRIFGEKYVNEHRDLMEKIVELQTVFEDKETLLHQLRQLEGISEADCALLVNTHYTGWGRLSRKLLTTKAGECKISDDFAPRKHSIIEIMRAEDRNLMEIITDKQLGFSDWIEQENLGAENGSSLMEVVDDLRVSPKVKRGIIQSIRLIDDISKAVGKRPSRIFLELADDIQPSGRTISRKSRLQDLYRNANLGKEFKGIADELNACSDKDLQDDRLFLYYTQLGKDMYTGEELDLDRLSSAYDIDHIIPQAVTQNDSIDNRVLVARAENARKTDSFTYMPQIADRMRNFWQILLDNGLISRVKFERLTRQNEFSEREKERFVQRSLVETRQIMKNVATLMRQRYGNSAAVIGLNAELTKEMHRYLGFSHKNRDINDYHHAQDALCVGIAGQFAANRGFFADGEVSDGAQNSYNQYLRDYLRGYREKLSAEDRKQGRAFGFIVGSMRSQDEQKRVNPRTGEVVWSEEDKDYLRKVMNYRKMLVTQKVGDDFGALYDETRYAATDPKGIKGIPFDGAKQDTSLYGGFSSAKPAYAVLIESKGKTRLVNVTMQEYSLLGDRPSDDELRKVLAKKKSEYAKANILLRHVPKMQLIRYGGGLMVIKSAGELNNAQQLWLPYEEYCYFDDLSQGKGSLEKDDLKKLLDSILGSVQCLYPWHRFTEEELADLHVAFDKLPEDEKKNVITGIVSALHADAKTANLSIVGMTGSWRRMNNKSGYTFSDEDEFIFQSPSGLFEKRVTVGELKRKAKKRSK

SEQ ID NO: 19884 - protein, 1399 aa, unidentified; identical to SEQ ID NO: 18030
  REGION 1..1399: note = Cas Enzyme sequence

SEQ ID NO: 19885 - protein, 1420 aa, unidentified
  REGION 1..1420: note = Cas Enzyme sequence
MSRKNYVDDYAISLDIGNASVGWSAFTPNYRLLRAKGHELIGVRLFDPADTAESRRMARTTRRRYSRRRWRLRLLDALFDQALSEIDPSFLARRKYSWVHPDDENNADCWYGSVLFDSNEQDKRFYEKYPTIYHLRKALMEDDSQHDIREIYLAIHHMVKYRGNFLVEGTLESSNAFKEDELLKLLGRITRYEMSEGEQNSDIEQDDENKLVAPANGQLADALCATRGSRSMRVDNALEALSAVNDLSREQRAIVKAIFAGLEGNKLDLAKIFVSKEFSSENKKILGIYFNKSDYEEKCVQIVDSGLLDDEEREFLDRMQGQYNAIALKQLLGRSTSVSDSKCASYDAHRANWNLIKLQLRTKENEKDINENYGILVGWKIDSGQRKSVRGESAYENMRKKANVFFKKMIETSDLSETDKNRLIHDIEEDKLFPIQRDSDNGVIPHQLHQNELKQIIKKQGKYYPFLLDAFEKDGKQINKIEGLLAFRVPYFVGPLVVPEDLQKSDNSENHWMVRKKKGEITPWNFDEMVDKDASGRKFIERLVGTDSYLLGEPTLPKNSLLYQEYEVLNELNNVRLSVRTGNHWNDKRRMRLGREEKTLLCQRLFMKGQTVTKRTAENLLRKEYGRTYELSGLSDESKFTSSLSTYGKMCRIFGEKYVNEHRDLMEKIVELQTVFEDKETLLHQLRQLEGISEADCALLVNTHYTGWGRLSRKLLTTKAGECKISDDFAPRKHSIIEIMRAEDRNLMEIITDKQLGFSDWIEQENLGAENGSSLMEVVDDLRVSPKVKRGIIQSIRLIDDISKAVGKRPSRIFLELADDIQPSGRTISRKSRLQDLYRNANLGKEFKGIADELNACSDKDLQDDRLFLYYTQLGKDMYTGEELDLDRLSSAYDIDHIIPQAVTQNDSIDNRVLVARAENARKTDSFTYMPQIADRMRNFWQILLDNGLISRVKFERLTRQNEFSEREKERFVQRSLVETRQIMKNVATLMRQRYGNSAAVIGLNAELTKEMHRYLGFSHKNRDINDYHHAQDALCVGIAGQFAANRGFFADGEVSDGAQNSYNQYLRDYLRGYREKLSAEDRKQGRAFGFIVGSMRSQDEQKRVNPRTGEVVWSEEDKDYLRKVMNYRKMLVTQKVGDDFGALYDETRYAATDPKGIKGIPFDGAKQDTSLYGGFSSAKPAYAVLIESKGKTRLVNVTMQEYSLLGDRPSDDELRKVLAKKKSEYAKANILLRHVPKMQLIRYGGGLMVIKSAGELNNAQQLWLPYEEYCYFDDLSQGKGSLEKDDLKKLLDSILGSVQCLYPWHRFTEEELADLHVAFDKLPEDEKKNVITGIVSALHADAKTANLSIVGMTGSWRRMNNKSGYTFSDEDEFIFQSPSGLFEKRVTVGELKRKAKKEVNSKYRTNEKRLPTLSGASQP

SEQ ID NO: 19886 - protein, 1420 aa, unidentified
  REGION 1..1420: note = Cas Enzyme sequence
MSRKNYVDDYAISLDIGNASVGWSAFTPNYRLVRAKGHELIGVRLFDPADTAESRRMARTTRRRYSRRRWRLRLLDALFDQALSEIDPSFLARRKYSWVHPDDENNADCWYGSVLFDSNEQDKRFYEKYPTIYHLRKALMEDDSQHDIREIYLAIHHMVKYRGNFLVEGTLESSNAFKEDELLKLLGRITRYEMSEGEQNSDIEQDDENKLVAPANGQLADALCATRGSRSMRVDNALEALSAVNDLSREQRAIVKAIFAGLEGNKLDLAKIFVSKEFSSENKKILGIYFNKSDYEEKCVQIVDSGLLDDEEREFLDRMQGQYNAIALKQLLGRSTSVSDSKCASYDAHRANWNLIKLQLRTKENEKDINENYGILVGWKIDSGQRKSVRGESAYENMRKKANVFFKKMIETSDLSETDKNRLIHDIEEDKLFPIQRDSDNGVIPHQLHQNELKQIIKKQGKYYPFLLDAFEKDGKQINKIEGLLTFRVPYFVGPLVVPEDLQKSDNSENHWMVRKKKGEITPWNFDEMVDKDASGRKFIERLVGTDSYLLGEPTLPKNSLLYQEYEVLNELNNVRLSVRTGNHWNDKRRMRLGREEKTLLCQRLFMKGQTVTKRTAENLLRKEYGRTYELSGLSDESKFTSSLSTYGKMCRIFGEKYVNEHRDLMEKIVELQTVFEDKETLLHQLRQLEGISEADCALLVNTHYTGWGRLSRKLLTTKAGECKISDDFAPRKHSIIEIMRAEDRNLMEIITDKQLGFSDWIEQENLGAENGSSLMEVVDDLRVSPKVKRGIIQSIRLIDDISKAVGKRPSRIFLELADDIQPSGRTISRKSRLQDLYRNANLGKEFKGIADELNACSDKDLQDDRLFLYYTQLGKDMYTGEELDLDRLSSAYDIDHIIPQAVTQNDSIDNRVLVARAENARKTDSFTYMPQIADRMRNFWQILLDNGLISRVKFERLTRQNEFSEREKERFVQRSLVETRQIMKNVATLMRQRYGNSAAVIGLNAELTKEMHRYLGFSHKNRDINDYHHAQDALCVGIAGQFAANRGFFADGEVSDGAQNSYNQYLRDYLRGYREKLSAEDRKQGRAFGFIVGSMRSQDEQKRVNPRTGEVVWSEEDKDYLRKVMNYRKMLVTQKVGDDFGALYDETRYAATDPKGIKGIPFDGAKQDTSLYGGFSSAKPAYAVLIESKGKTRLVNVTMQEYSLLGDRPSDDELRKVLAKKKSEYAKANILLRHVPKMQLIRYGGGLMVIKSAGELNNAQQLWLPYEEYCYFDDLSQGKGSLEKDDLKKLLDSILGSVQCLYPWHRFTEEELADLHVAFDKLPEDEKKNVITGIVSALHADAKTANLSIVGMTGSWRRMNNKSGYTFSDEDEFIFQSPSGLFEKRVTVGELKRKAKKEVNSKYRTNEKRLPTLSGASQP

SEQ ID NO: 19887 - protein, 1420 aa, unidentified; identical to SEQ ID NO: 18022
  REGION 1..1420: note = Cas Enzyme sequence

SEQ ID NO: 19888 - protein, 1420 aa, unidentified
  REGION 1..1420: note = Cas Enzyme sequence
MSRKNYVDDYAISLDIGNASVGWSAFTPNYRLVRAKGHELIGVRLFDPADTAESRRMARTTRRRYSRRRWRLRLLDALFDQALSEIDPSFLARRKYSWVHPDDENNADCWYGSVLFDSNEQDKRFYEKYPTIYHLRKALMEDDSQHDIREIYLAIHHMVKYRGNFLVEGTLESSNAFKEDELLKLLGRITRYEMSEGEQNSDIEQDDENKLVAPANGQLADALCATRGSRSMRVDNALEALSAVNDLSREQRAIVKAIFAGLEGNKLDLAKIFVSKEFSSENKKILGIYFNKSDYEEKCVQIVDSGLLDDEEREFLDRMQGQYNAIALKQLLGRSTSVSDSKCASYDAHRANWNLIKLQLRTKENEKDINENYGILVGWKIDSGQRKSVRGESAYENMRKKANVFFKKMIETSDLSETDKNRLIHDIEEDKLFPIQRDSDNGVIPHQLHQNELKQIIKKQGKYYPFLLDAFEKDGKQINKIEGLLAFRVPYFVGPLVVPEDLQKSDNSENHWMVRKKKGEITPWNFDEMVDKDASGRKFIERLVDTDSYLLGEPTLPKNSLLYQEYEVLNELNNVRLSVRTGNHWNDKRRMRLGREEKTLLCQRLFMKGQTVTKRTAENLLRKEYGRTYELSGLSDESKFTSSLSTYGKMCRIFGEKYVNEHRDLMEKIVELQTVFEDKETLLHQLRLLEGISEADCALLVNTHYTGWGRLSRKLLTTKAGECKIGDDFAPRKHSIIEIMRAEDRNLMEIITDKQLGFSDWIEQENLGAENGSSLMEVVDDLRVSPKVKRGIIQSIRLIDDISKAVGKRPSRIFLELADDIQPSGRTISRKSRLQDLYRNANLGKEFKGIADELNACSDKDLQDDRLFLYYTQLGKDMYTGEELDLDRLSSAYDIDHIIPQAVTQNDSIDNRVLVARAENARKTDSFTYMPQIADRMRNFWQILLDNGLISRVKFERLTRQNEFSEREKERFVQRSLVETRQIMKNVATLMRQRYGNSAAVIGLNAELTKEMHRYLGFSHKNRDINDYHHAQDALCVGIAGQFAANRGFFADGEVSDGAQNSYNQYLRDYLRGYREKLSAEDRKQGRAFGFIVGSMRSQDEQKRVNPRTGEVVWSEEDKDYLRKVMNYRKMLVTQKVGDDFGALYDETRYAATDPKGIKGIPFDGAKQDTSLYGGFSSAKPAYAVLIESKGKTRLVNVTMQEYSLLGDRPSDDELRKVLAKKKSEYAKANILLRHVPKMQLIRYGGGLMVIKSAGELNNAQQLWLPYEEYCYFDDLSQGKGSLEKDDLKKLLDSILGSVQCLYPWHRFTEEELADLHVAFDKLPEDEKKNVITGIVSALHADAKTANLSIVGMTGSWRRMNNKSGYTFSDEDEFIFQSPSGLFEKRVTVGELKRKAKKEVNSKYRTNEKRLPTLSGASQP

SEQ ID NO: 19889 - protein, 1391 aa, unidentified
  REGION 1..1391: note = Cas Enzyme sequence
PSYVRAGIRKCARIRALSNYRLVRAKGHELIGVRLFDPADTAESRRMARTTRRRYSRRRWRLRLLDALFDQALSEIDPSFLARRKYSWVHPDDENNADCWYGSVLFDSNEQDKRFYEKYPTIYHLRKALMEDDSQHDIREIYLAIHHMVKYRGNFLVEGTLESSNAFKEDELLKLLGRITRYEMSEGEQNSDIEQDDENKLVAPANGQLADALCATRGSRSMRVDNALEALSAVNDLSREQRAIVKAIFAGLEGNKLDLAKIFVSKEFSSENKKILGIYFNKSDYEEKCVQIVDSGLLDDEEREFLDRMQGQYNAIALKQLLGRSTSVSDSKCASYDAHRANWNLIKLQLRTKENEKDINENYGILVGWKIDSGQRKSVRGESAYENMRKKANVFFKKMIETSDLSETDKNRLIHDIEEDKLFPIQRDSDNGVIPHQLHQNELKQIIKKQGKYYPFLLDAFEKDGKQINKIEGLLAFRVPYFVGPLVVPEDLQKSDNSENHWMVRKKKGEITPWNFDEMVDKDASGRKFIERLVDTDSYLLGEPTLPKNSLLYQEYEVLNELNNVRLSVRTGNHWNDKRRMRLGREEKTLLCQRLFMKGQTVTKRTAENLLRKEYGRTYELSGLSDESKFTSSLSTYGKMCRIFGEKYVNEHRDLMEKIVELQTVFEDKETLLHQLRLLEGISEADCALLVNTHYTGWGRLSRKLLTTKAGECKIGDDFAPRKHSIIEIMRAEDRNLMEIITDKQLGFSDWIEQENLGAENGSSLMEVVDDLRVSPKVKRGIIQSIRLIDDISKAVGKRPSRIFLELADDIQPSGRTISRKSRLQDLYRNANLGKEFKGIADELNACSDKDLQDDRLFLYYTQLGKDMYTGEELDLDRLSSAYDIDHIIPQAVTQNDSIDNRVLVARAENARKTDSFTYMPQIADRMRNFWQILLDNGLISRVKFERLTRQNEFSEREKERFVQRSLVETRQIMKNVATLMRQRYGNSAAVIGLNAELTKEMHRYLGFSHKNRDINDYHHAQDALCVGIAGQFAANRGFFADGEVSDGAQNSYNQYLRDYLRGYREKLSAEDRKQGRAFGFIVGSMRSQDEQKRVNPRTGEVVWSEEDKDYLRKVMNYRKMLVTQKVGDDFGALYDETRYAATDPKGIKGIPFDGAKQDTSLYGGFSSAKPAYAVLIESKGKTRLVNVTMQEYSLLGDRPSDDELRKVLAKKKSEYAKANILLRHVPKMQLIRYGGGLMVIKSAGELNNAQQLWLPYEEYCYFDDLSQGKGSLEKDDLKKLLDSILGSVQCLYPWHRFTEEELADLHVAFDKLPEDEKKNVITGIVSALHADAKTANLSIVGMTGSWRRMNNKSGYTFSDEDEFIFQSPSGLFEKRVTVGELKRKAKKRSK

SEQ ID NO: 19890 - protein, 1023 aa, unidentified
  REGION 1..1023: note = Cas Enzyme sequence
MRKKANVFFKKMIETSDLSETDKNRLIHDIEEDKLFPIQRDSDNGVIPHQLHQNELKQIIKKQGKYYPFLLDAFEKDGKQINKIEGLLAFRVPYFVGPLVVPEDLQKSDNSENHWMVRKKKGEITPWNFDEMVDKDASGRKFIERLVGTDSYLLGEPTLPKNSLLYQEYEVLNELNNVRLSVRTGNHWNDKRRMRLGREEKTLLCQRLFMKGQTVTKRTAENLLRKEYGRTYELSGLSDESKFTSSLSTYGKMCRIFGEKYVNEHRDLMEKIVELQTVFEDKETLLHQLRQLEGISEADCALLVNTHYTGWGRLSRKLLTTKAGECKISDDFAPRKHSIIEIMRAEDRNLMEIITDKQLGFSDWIEQENLGAENGSSLMEVVDDLRVSPKVKRGIIQSIRLIDDISKAVGKRPSRIFLELADDIQPSGRTISRKSRLQDLYRNANLGKEFKGIADELNACSDKDLQDDRLFLYYTQLGKDMYTGEELDLDRLSSAYDIDHIIPQAVTQNDSIDNRVLVARAENARKTDSFTYMPQIADRMRNFWQILLDNGLISRVKFERLTRQNEFSEREKERFVQRSLVETRQIMKNVATLMRQRYGNSAAVIGLNAELTKEMHRYLGFSHKNRDINDYHHAQDALCVGIAGQFAANRGFFADGEVSDGAQNSYNQYLRDYLRGYREKLSAEDRKQGRAFGFIVGSMRSQDEQKRVNPRTGEVVWSEEDKDYLRKVMNYRKMLVTQKVGDDFGALYDETRYAATDPKGIKGIPFDGAKQDTSLYGGFSSAKPAYAVLIESKGKTRLVNVTMQEYSLLGDRPSDDELRKVLAKKKSEYAKANILLRHVPKMQLIRYGGGLMVIKSAGELNNAQQLWLPYEEYCYFDDLSQGKGSLEKDDLKKLLDSILGSVQCLYPWHRFTEEELADLHVAFDKLPEDEKKNVITGIVSALHADAKTANLSIVGMTGSWRRMNNKSGYTFSDEDEFIFQSPSGLFEKRVTVGELKRKAKKEVNSKYRTNEKRLPTLSGASQP

SEQ ID NO: 19891 - protein, 1092 aa, unidentified
  REGION 1..1092: note = Cas Enzyme sequence
DEEREFLDRMQGQYNAIALKQLLGRSTSVSDSKCASYDAHRANWNLIKLQLRTKENEKDINENYGILVGWKIDSGQRKSVRGESAYENMRKKANVFFKKMIETSDLSETDKNRLIHDIEEDKLFPIQRDSDNGVIPHQLHQNELKQIIKKQGKYYPFLLDAFEKDGKQINKIEGLLAFRVPYFVGPLVVPEDLQKSDNSENHWMVRKKKGEITPWNFDEMVDKDASGRKFIERLVDTDSYLLGEPTLPKNSLLYQEYEVLNELNNVRLSVRTGNHWNDKRRMRLGREEKTLLCQRLFMKGQTVTKRTAENLLRKEYGRTYELSGLSDESKFTSSLSTYGKMCRIFGEKYVNEHRDLMEKIVELQTVFEDKETLLHQLRLLEGISEADCALLVNTHYTGWGRLSRKLLTTKAGECKIGDDFAPRKHSIIEIMRAEDRNLMEIITDKQLGFSDWIEQENLGAENGSSLMEVVDDLRVSPKVKRGIIQSIRLIDDISKAVGKRPSRIFLELADDIQPSGRTISRKSRLQDLYRNANLGKEFKGIADELNACSDKDLQDDRLFLYYTQLGKDMYTGEELDLDRLSSAYDIDHIIPQAVTQNDSIDNRVLVARAENARKTDSFTYMPQIADRMRNFWQILLDNGLISRVKFERLTRQNEFSEREKERFVQRSLVETRQIMKNVATLMRQRYGNSAAVIGLNAELTKEMHRYLGFSHKNRDINDYHHAQDALCVGIAGQFAANRGFFADGEVSDGAQNSYNQYLRDYLRGYREKLSAEDRKQGRAFGFIVGSMRSQDEQKRVNPRTGEVVWSEEDKDYLRKVMNYRKMLVTQKVGDDFGALYDETRYAATDPKGIKGIPFDGAKQDTSLYGGFSSAKPAYAVLIESKGKTRLVNVTMQEYSLLGDRPSDDELRKVLAKKKSEYAKANILLRHVPKMQLIRYGGGLMVIKSAGELNNAQQLWLPYEEYCYFDDLSQGKGSLEKDDLKKLLDSILGSVQCLYPWHRFTEEELADLHVAFDKLPEDEKKNVITGIVSALHADAKTANLSIVGMTGSWRRMNNKSGYTFSDEDEFIFQSPSGLFEKRVTVGELKRKAKKRSK

SEQ ID NO: 19892 - protein, 1080 aa, unidentified
  REGION 1..1080: note = Cas Enzyme sequence
MQGQYNAIALKQLLGRSTSVSDSKCASYDAHRANWNLIKLQLRTKENEKDINENYGILVGWKIDSGQRKSVRGESAYENMRKKANVFFKKMIETSDLSETDKNRLIHDIEEDKLFPIQRDSDNGVIPHQLHQNELKQIIKKQGKYYPFLLDAFEKDGKQINKIEGLLTFRVPYFVGPLVVPEDLQKSDNSENHWMVRKKKGEITPWNFDEMVDKDASGRKFIERLVGTDSYLLGEPTLPKNSLLYQEYEVLNELNNVRLSVRTGNHWNDKRRMRLGREEKTLLCQRLFMKGQTVTKRTAENLLRKEYGRTYELSGLSDESKFTSSLSTYGKMCRIFGEKYVNEHRDLMEKIVELQTVFEDKETLLHQLRQLEGISEADCALLVNTHYTGWGRLSRKLLTTKAGECKISDDFAPRKHSIIEIMRAEDRNLMEIITDKQLGFSDWIEQENLGAENGSSLMEVVDDLRVSPKVKRGIIQSIRLIDDISKAVGKRPSRIFLELADDIQPSGRTISRKSRLQDLYRNANLGKEFKGIADELNACSDKDLQDDRLFLYYTQLGKDMYTGEELDLDRLSSAYDIDHIIPQAVTQNDSIDNRVLVARAENARKTDSFTYMPQIADRMRNFWQILLDNGLISRVKFERLTRQNEFSEREKERFVQRSLVETRQIMKNVATLMRQRYGNSAAVIGLNAELTKEMHRYLGFSHKNRDINDYHHAQDALCVGIAGQFAANRGFFADGEVSDGAQNSYNQYLRDYLRGYREKLSAEDRKQGRAFGFIVGSMRSQDEQKRVNPRTGEVVWSEEDKDYLRKVMNYRKMLVTQKVGDDFGALYDETRYAATDPKGIKGIPFDGAKQDTSLYGGFSSAKPAYAVLIESKGKTRLVNVTMQEYSLLGDRPSDDELRKVLAKKKSEYAKANILLRHVPKMQLIRYGGGLMVIKSAGELNNAQQLWLPYEEYCYFDDLSQGKGSLEKDDLKKLLDSILGSVQCLYPWHRFTEEELADLHVAFDKLPEDEKKNVITGIVSALHADAKTANLSIVGMTGSWRRMNNKSGYTFSDEDEFIFQSPSGLFEKRVTVGELKRKAKK

SEQ ID NO: 19893 - protein, 1128 aa, unidentified
  REGION 1..1128: note = Cas Enzyme sequence
SDYEEKCVQIVDSGLLDDEEREFLDRMQGQYNAIALKQLLGRSTSVSDSKCASYDAHRANWNLIKLQLRTKENEKDINENYGILVGWKIDSGQRKSVRGESAYENMRKKANVFFKKMIETSDLSETDKNRLIHDIEEDKLFPIQRDSDNGVIPHQLHQNELKQIIKKQGKYYPFLLDAFEKDGKQINKIEGLLAFRVPYFVGPLVVPEDLQKSDNSENHWMVRKKKGEITPWNFDEMVDKDASGRKFIERLVGTDSYLLGEPTLPKNSLLYQEYEVLNELNNVRLSVRTGNHWNDKRRMRLGREEKTLLCQRLFMKGQTVTKRTAENLLRKEYGRTYELSGLSDESKFTSSLSTYGKMCRIFGEKYVNEHRDLMEKIVELQTVFEDKETLLHQLRQLEGISEADCALLVNTHYTGWGRLSRKLLTTKAGECKISDDFAPRKHSIIEIMRAEDRNLMEIITDKQLGFSDWIEQENLGAENGSSLMEVVDDLRVSPKVKRGIIQSIRLIDDISKAVGKRPSRIFLELADDIQPSGRTISRKSRLQDLYRNANLGKEFKGIADELNACSDKDLQDDRLFLYYTQLGKDMYTGEELDLDRLSSAYDIDHIIPQAVTQNDSIDNRVLVARAENARKTDSFTYMPQIADRMRNFWQILLDNGLISRVKFERLTRQNEFSEREKERFVQRSLVETRQIMKNVATLMRQRYGNSAAVIGLNAELTKEMHRYLGFSHKNRDINDYHHAQDALCVGIAGQFAANRGFFADGEVSDGAQNSYNQYLRDYLRGYREKLSAEDRKQGRAFGFIVGSMRSQDEQKRVNPRTGEVVWSEEDKDYLRKVMNYRKMLVTQKVGDDFGALYDETRYAATDPKGIKGIPFDGAKQDTSLYGGFSSAKPAYAVLIESKGKTRLVNVTMQEYSLLGDRPSDDELRKVLAKKKSEYAKANILLRHVPKMQLIRYGGGLMVIKSAGELNNAQQLWLPYEEYCYFDDLSQGKGSLEKDDLKKLLDSILGSVQCLYPWHRFTEEELADLHVAFDKLPEDEKKNVITGIVSALHADAKTANLSIVGMTGSWRRMNNKSGYTFSDEDEFIFQSPSGLFEKRVTVGELKRKAKKEVNSKYRTNEKRLPTLSGASQP

SEQ ID NO: 19894 - protein, 1420 aa, unidentified; identical to SEQ ID NO: 18023
  REGION 1..1420: note = Cas Enzyme sequence

SEQ ID NO: 19895 - protein, 963 aa, unidentified
  REGION 1..963: note = Cas Enzyme sequence
MSCTLAIDFGSKNIGIALVEHTESVPNRVLYAGTMVVAAKPLNAAVQPRALSRRMRRSRKTHVGRLRRLSQALAGTEGAQEIVRFCRRRGYSHEPEDSDESARGMHFSREDFFDVLRQEINRVITPEERDRTLRVCSKHLNEARIQTRELRPARFDNRGPTKCQWIGCRKSVPKAANAIKERIQQALYAWMKPVFDECSNPQGLRHSVDHWILELDGLARWYAKSQKLNDQARKETQKLINKRKNLIYKHIKSRVCQEVSEELAEKFRENWTETYGSNITEIITGGQGGRIRYCREHSNSFVDFFLAGKQIPNRTDITMADLFGRKQQILFSRIWRLLEERLLPLAGGQIDRVVVERVAFSILAGKAKDRRELSKDKASEMYRYGPQYGFSDRREMFKEEFGGRCAYCGQTNAINEVEHLLSRNEFPFDSYLNILPACSACNARKGARTAFAAGMTINRDAYQAYADYVGRKKPPHLFHTIKKGMLNLLSKNGNSLEVEKQLGMLADNLVTISATQKGPRPLARYLAGQLSKVNGYPCESLWISGRHTALYRKILLPEYEKQDRKAAHDLINHAVDAIILGCKLPSAAAIENPRWYARARDINDWRDKVRAAGPALENGIPRVEPVTFIPFFEGEIGNGYCSIDLSAFSWNRKHQSGHLLDPVGMTDGKLPIKREPATEVFANLKDQRKRDEQIKRIAHPALKKLLESNPKGAAEQLIRWLQQSVQSGLSSGKMGNHPSDQARKRLLEEFVNSPVEIFLKDDKDGRKDIPQIIGIRCLIAGSSFSMFDVTRCDMTGRIFQHYKTDPHLKALYVGYRKNKKGVLDLSRPVLFCVNQIYAVTKRESSGVQVLDITADSPLRGRALGSKGSLKEFLGRWQVAFDELCRSEYIIKRFRITQGCVIEKRDGTFFQLRNFARDKPWMKGSPFRNIRRVYRSPFLFLKQAQNIVLEEHHSTLIPIDQVIE

SEQ ID NO: 19896 - protein, 954 aa, unidentified
  REGION 1..954: note = Cas Enzyme sequence
METKVTLSIDFGSKNIGLALVRNQEGVNIPLFAGTLLYDPYQLSTKVGPRAELRRGRRTRKTKRHRLTLLKKKLLAINLPNETIQQLITFCRRRGYSSLFDEPQKIDQEAKDSKEEIVFRFSREEFFRALEKQIELLVPQEKSGKVLASCEDVLNRAGDPSKEVRPLRFNNRGASRCAWDGCGNVPPRRDNALRDPLSQFVHTVFAVSLRGDATLQDEVARMLDRIAVLGKRLRHRKGPDPDKERKALKAEISDGLKLLKKLYGLNPDLTEEAATPWAKIRKNITNLIEQTGGRNRFCRYHSSQYVTHFMEGKPIPFKATLTERDLVSRREEILFQKMWRYIEARILPLVPDGIDRVIVERTAIDLLGGSRKQRQGIMNKEALEEMYQHGPRYGFGNDLEMLRAEFDGLCAYCGRPNAELVERDHLLPQSKFFFDSYLNIVPACPSCNRDLKQAASPGGASLRINEQAYDAYSKYVASKFANKPPHLFHNIKKGILNLMREPGRVWEGERILNIIANQFAQVVGTQRGPRPLARYLSGKIYKRFGEKPQIGFINGRHTALWRKAAYPEFDKFREKKEGGVINHALDALLMACHLPDLTSLETRNLQPGLMHWWVDKVRKAAPPKGPDGIPGIPEPRFAVAGFEKVHPGNYVEVDLAKMNWNHKDSHIQRQGDYGWSKRDDLPVQRVTAASIAEELRKTDKAATPESRSTEVEKIVNVIVHPRLYQTLERASIGDSPGASTAEALKIWLRKAIKGNLYKSQFSSHPADQRRAKMFQDFINGQTDVIPAVIGVQRLQRSLKSNIDLNRVDPKSGRLVHRYVADPANVAYIVAYRGSNGNVKRDRPLTLEWRQSGALIPGVKLFGDVPEGPLRGRALGEKAIDQKEWKNALHQYLTRAGIAEYNFVSQGNVVVYEDGSELYIRNFSGSYGFRKSWFKGIKAVRPSPLTERLIPNAKI

SEQ ID NO: 19897 - protein, 954 aa, unidentified
  REGION 1..954: note = Cas Enzyme sequence
METKVTLSIDFGSKNIGLALVRNQEGVNIPLFAGTLLYDPYQLSTKVGPRAELRRGRRTRKTKRHRLTLLKKKLLAINLPNETIQQLITFCRRRGYSSLFDEPQKIDQEAKDSKEEIVFRFSREEFFRALEKQIELLVPQEKSGKVLASCEDVLNRAGDPSKEVRPLRFNNRGASRCAWDGCENVPPRRDNALRDPLSQFVHTVFAASLRGDATLQDEVARMLDRIAVLGKRLRHRKGPDPDKERKALKAEISDGLKLLKKLYGLNPDLTEEAATSWAKIRKNITNLIEQTGGRNRFCRYHSSQYVTHFMEGKPIPFKATLTERDLVSRREEILFQKIWRYIEARILPLVPDGIDRVIVERTAIDLLGGSRKQRQGIMNKEALEEMYQHGPRYGFGNDLEMLRAEFDGLCAYCGRPNAELVERDHLLPQSKFFFDSYLNIVPACPSCNRDLKQAASPGGASLRINEQAYDAYSKYVASKFANKPPHLFHNIKKGILNLMREPGRVWEGERILNIIANQFAQVVGTQRGPRPLARYLSGKIYKRFGEKPQIGFINGRHTALWRKAAYPEFDKFREKKEGGVINHALDALLMACHLPDLTSLETRNLQPSLMHWWVDKVRKAAPPKGPDGIPGIPEPRFAVAGFEKVHPGNYVEVDLAKMNWNHKDSHIQRQGAYGWSKRDDLPVQRVTAASIAEELRKTDKAATPESRRTEVEKIVNVIVHPRLYQTLERASIGDSPGASTAEALKIWLRKAIKGNLYKSQFSSLPADQRRAKMFQDFINGQTDVIPAVIGVQRLQRSLKSNIDLNRVEPKSGRLVHRYVADPANVAYIVAYRGSNGNVKRDRPLTLEWRQSGALIPGVKLFGDVPEGPLRGRALGEKAIDQKEWKNALHQYLTRAGIAEYNFVSQGNVVVYEDGSELYIRNFSGSYGFRKSWFKGIKAVRPSPLTERLIPNAKI

SEQ ID NO: 19898 - protein, 954 aa, unidentified
  REGION 1..954: note = Cas Enzyme sequence
METKVTLSIDFGSKNIGLALVRNQEGVNIPLFAGTLLYDPYQLSTKVGPRAELRRGRRTRKTKRHRLTLLKKKLLAINLPNETIQQLITFCRRRGYSSLFDEPQKIDQEAKDSKEEIVFRFSREEFFRALEKQIELLVPQEKSGKVLASCEDVLNRAGDPSKEVRPLRFNNRGASRCAWDGCENVPPRRDNALRDPLSQFVHTVFAVSLRGDATLQDEVARMLDRIAVLGKRLRHRKGPDPDKERKALKAEISDGLKLLKKLYGLNPDLTEEAATPWAKIRKNITILIEQTGGRNRFCRYHSSQYVTHFMEGKPIPFKATLTERDLVSRREEILFQKIWRYIEARILPLVPDGIDRVIVERTAIDLLGGSRKQRQGIMNKEALEEMYQHGPRYGFGNDLEMLRAEFDGLCAYCGRPNAELVERDHLLPQSKFFFDSYLNIVPACPSCNRDLKQAASPGGASLRINEQAYDAYSKYVASKFANKPPHLFHNIKKGILNLMREPGRVWEGERILNIIANQFAQVVGTQRGPRPLARYLSGKIYKRFGEKPQIGFINGRHTALWRKAAYPEFDKFREKKEGGVINHALDALLMACHLPDLTSLETRNLQPGLMHWWVDKVRKAAPPKGPDGIPGIPEPRFAVAGFEKVHPGNYVEVDLAKMNWNHKDSHIQRQGAYGWSKRDDLPVQRVTAASIAEELRKTDKAATPESRRTEVEKIVNVIVHPRLYQTLERASIGDSPGASTAEALEIWLRKAIKGNLYKSQFSSHPADQRRAKMFQDFINGQTDVIPAVIGVQRLQRSLKSNIDLNRVDPKSGRLVHRYVADPANVAYIVAYRGSNGNVKRDRPLTLEWRQSGALIPGVKLFGDVPEGPLRGRALGEKAIDQKEWKNALHQYLTRAGIAEYNFVSQGNVVVYEDGSELYIRNFSGSYGFRKSWFEGIKAVRPSPLTERLIPNAKL

SEQ ID NO: 19899 - protein, 1052 aa, unidentified
  REGION 1..1052: note = Cas Enzyme sequence
MLENGKKNYRLGIDMGSTSLGWCMVELDAENQPCGIINLGVRIFPDGRDAQSREPLAVARRGYRSQRKNLDRYLYRMRRLIDYLTENELLPMDEQRRAEVFKMNPYQLRTRALDEKLEPAAFARAIIHLAKRRGFRSNRKVMSDKKTAYTEAIANLKTGLTNTNSRTLGEYLWHRFRETPENKNHMRKPIKFRYEKNTEAPDPIFPLREMVEHEFDLLWASQSSYYPGLTADHRDSIRSIIFHQNPLKPQPKGKCQLIPTEDRAPKAHPLFQEFRIRQDLNNMKLINNFTNEVLELSREQYDLLYDSLNQKHEMTFKAMRKLLFRAQADDYRFNLETNNREKLLGNQTHHEIMRKGNELVAEHWNIWDEGTRNRAIELIISDLDDAPLLSELHELGISGEPATKLLELHLPSDYGHLSLKAMEMILPGMRNRMVYSDACQDAGFNHSLEYDGRIYDEGNLPYYGELLRREAIELNRKIGDEQADQYGKINNPTVHIALNQLRKVVNALCVKYGAPQEIILELGKEIKMGLAEKERLEKLHRKNRKINEMVDELLSKCDVPPNANNRLKAKLWLELGANEIDRRCVYTGQQINITDLFSSKIEIDHILPKSRTYDDSSSNKILCFREANRYKAERSPYEAFGESKEGYNWEQIVTRANNLPDNKLRRFQKDAMERYRDQEEVLARMLNDTRYMSRVAMKYMFYICGDRKVSTITGLHTGLLRGKWGLNDCLGEGDTKNRNDHRHHAIDAFVIALTTRAMVKKLANNIEQSRERFIEKLDLPYPGFCHESLSDMVDRIKVSYKPDQIKPSKLMEKYQTGGALAEETAYAFVGPDPQNPKYNLYAIRKNIADINEKNYEDIADPLIRQQIADMVANSQGSKFSDLLKDYASKHNIKKVKLLLSLNPKSMIPVTDKNGRAFKYLSSDKNLFADIFIKDPKAPNPKWDIEIVNSYQAHQPGFVPQWKKDYPKAKKVMRVFKNDIIALDSADGGRELRRVRKMTYGIIYLRELAVTKKEKGKEDIGEQFGSNKLQSLRARKAGIDIIGRVFDPIVNEP

SEQ ID NO: 19900 - protein, 1073 aa, unidentified
  REGION 1..1073: note = Cas Enzyme sequence
MKERYRLGVDLGSTSLGWCMLKLDDNNDPTGIINMGVRIFPDGRDMEKHEPLAVKRRGYRGKRRNLDRYLERIRALISYLLENGFLPEDERHRNEVFKINPYHLRAKALDEQLSPAEFARALIHLAKRRGFRSNRKIQSDKTTKITEGIENLRKQLDETGARTLGEYMWKLYNKNPDHPNQKTLKKRGVEAYPHKMGHHIDQPIKFRYEANPDNPNLIFPTRDMVQSEFNSIWNAQARFSDIYTEEHRQKIEELIFHQRPLLPTVKGKCQLLPEFDRAPKAHPLFQEFRIRQDLNNLKGINLFTNETFELSKEQYDTLYKLLSTKAEVKFEAMRNALWGKQHGDFRFNFETENRNKLLGDQTHAALHKKGNEDLAPLWDSWTMERKNKVIEVVISDLDDEPALVELTEAGISPKTAARLLELKLPDSYCHLSVEAMQRLLPLMRQRVIYSEACRQVKLDHSGEYNGEIFDSGNLPYYGEVLSRETIALNRKCGDAEADKHGRINNPTVHIALNQLRKVVNAITARCGAPEEIVLELGKDIKLGKEEKAHLNKIIDQNRKENEKIDALLAEHGLPVNHQNRLKVKLWWELGKDELDRRCVYSGHQISITDLFTHKIEIDHILPKSRTYDDNNANKILCIAPANHYKGERSPYEAFGQSRDGYDWQDIISRASNLKNSKRWKFNSDAMDNFKDKEKVLDRMLNDTRYMSRVAMKYMWYVCGNNRVWTVTGKHTSMLRGKWGLNTALGEDDSKDRTDHRHHAIDAFVIALTTRGFIKTLAKNIGSSRERFISELLPPWPGFDHNEFRKKVNSITVSYKPDQINADKLAKRNQTGGALVKETAYGYAGPDPDNPKYHLYTIRKAVSELTRKNIKNVVRADLKNELEQLASKFPDDDFKVEIKDWAARNNIKKVKLALSMNPAVMVPIRDKNGKAFKYMDSGENLFADIYLSKPTDPNCKWGIEIVGSYYAHRPGFVPQWKKDHPKGKKIMRVFKNDIIALDGPDGKRELRRVRKMTNSMLYLRPINIAKKPQVDSTGKQVSEDKGEAFVMSTLQDLNARKAGIDIIGRVFDPIVNEQ

SEQ ID NO: 19901 - protein, 938 aa, unidentified
  REGION 1..938: note = Cas Enzyme sequence
MTHTLSIDFGSTYIGLSLLAHNSADPNKVLYAATVVADPAWLTKTVEPRGQIRRMRRTRKTHRRRLHRLAQAMAGIQGATQVLSFCRRRGYSHDSDDDDQDTAAFRVPRAAFFRALLAEVERCVPAADRERVRAACSRHLNEQRTPGAELRPARFDNRGSSRCQWAGCNHNVPRAENCAQEKLSQALFAWLKPVFDGSADPIRLRRSIDHWIGELAGLSRAYRRAAKLEDESKRDENESGIKRRVKRVYKNLKERVCREATPEVAESFSESWNEFYQKNLSEIVYGKRGGRAKYCREHSQQFVEMFLAGQQIPNRQDLSDRDLASLKQQIIFRRLWRLLENRVLPLAGGTIDRLIVERVAIDTLGGLFKDRQQISDKKAGPLYWYGPQYRFNSRLEMLKEEFDGRCAYCGQAANLVDVEHILPHSAFPFDSYLNVVPACDDCNRRKGARTPLQAGMTINENAFDAYVNYVRRQKPPHRLHEIKKGMLKLLLRPGQDGQPERMLGMIANNLVQVTNTQRGPRPLARYLASKLETATGNRPAIAFVSGRHTALYRRVVLPEYDKPAEKESGDVRNHAVDAILLGCQFPSAAALENQTWYRTTADVVTWCNKVRAVSPPLDDGVPEVARHDLVPFFETDLGGGYIGIDLSAFNWNHGRRGTHDLDPFAITRSGKPAKRVPAAKVLAELLLDAGRRDKQIAGIANRGLRNLLEAAPQNAPMAFVTWLQQTTRDGLADGTMGNHPADQARRQQLEKFVAATVENVIADDEPIPAVVGVRCISNISAGLVEVPRCDRSGRVHQHYKANPPVREFYVGYRSKDGAIDGSRPIVFSVNQVYLVRREEGGKKVGLDLPPGSPLLGRPLGAQGRLRDFLVAWRSAFDELCRAEGISRRFRVTQGCVIEKVDGSLFQLRNFDKSEPWRKAASFRNIHRIHRSPLTATDP

SEQ ID NO: 19902 - protein, 1335 aa, unidentified
  REGION 1..1335: note = Cas Enzyme sequence
MKQPYSIGLDIGTNSVGWAVINEGFSLRKYKHQNMWGAHLFDEAQKAATRRSFRSSRRRLARRRRRVTLLQQIFNDEIQKVDPHFYLRLSESMLHVGDKSSTLELDANILFADHSFTDKSYREKYPTIYHLRSDLFHNSKKQDIRLVYLALHHIIKYRGNFLVEGGVDNVISSFDNQNLQKFMDFIGADESIAKKVKAILLDRSLSRSVRKSDIIKLLQPTPDNKKIVSEAVGAVIGLKWNANKLFEDDSLEAKGEFSNKNYEEQRDEIATTIGDDRYELVETLESVYQWTIFSQFIRKDSCLSDIMVEKYDAYRQDLSDLKSLFHEFLSKESCKSFFHGDAAEFEQYNKHKYSLDDLYKSIKNHLGNVAKEDPRYQRFEKRAELGEFLARQRIRDNGAIPHQIHQYELERIIDNQAQYYPFLAQNRDKIISIFTFKLPYYIGPLKTGGDFAWSVKKKDGVIYPWNFDEIIDDEASAEKFIDRMRNNCTYLPDEEVLPKNSLLYQEYEVRNELKNVTVNGERLSSDVQNRTVDELFTKEPSVTYKKLIKYLYDNQIYNTDSLIISGTAKEKSFASSRKSYIDFTQKVGVSITPKNQQAIEEIIKWITLFEDKKILAKKLQKYSDIFDDNQLRAILKLNYSGWGRLSHKLLDGITAHTPYGELTVIETMRSSKDNFMQIIQSDRYEFKKIIDDILSADQRTDIAYDDIKKLAGSPGIKRALWRSVRIVDEIVDTIGYEPKLISIEMARNEDEKVRTKNRYGQLEKMHKELYGKAYTKSDIKSQLAEYKDKLDKKKYYLYFLQNGKCAYTGEPLDIENDLRDSEIDHILPRSLTKDDSLDNTVLVLRKENQRKLDDYPIAPDIQNHMRPIWTSLKNAKLMSQLKFQRLTSQKQLSEDRVAGFVNRQLVETRQITKHLARMLTEKYHDSSTEVFTIRAGMSSEYRRIHDLPKCREVNDLHHAKDAYLAAVLAQYIKIRYPKLDKAFVYGEYMKFKSKKQTDTDRSSFILASMNYDFTDTNTGEIIWQSKTARNVIDRTMKYNDCLITKKTEIGDNQFYDQTIYGKNSGKTMIARKANLPVGKYGGYSGEKAAYFAAINYLKQVRNKDVSVNEIVSVPAQIYTLEKTRSDSINEYISNNYKQATILLPKIPINQKIEYEGNEQFIVGSSEVTNAKQLKLPYAIEYAIAIALKRGIPRVTISEEQAKEDDNLRDKRAKQIEKRDKVISGIERFWEVYTDKLSSQYQQFGSAVEKAKAASSKYQAMSVDDKIKVIGLVLVATHAGSGRVDMKKNFPKLQLPSDFGRMIGKNLDPTKLTFVYESITGLHCRKLDGKLLEQDQ

SEQ ID NO: 19903 - protein, 1340 aa, unidentified
  REGION 1..1340: note = Cas Enzyme sequence
MKQPYSIGLDIGTNSVGWAVINEGFDLRKYKHQNMWGAHLFDEAQKAAIRRSFRSSRRRLARRKRRITLLQQLFDDEIQKIDPHFYLRLSESMLHLGDKNSALELDANILFADHSFTDKSYREKYPTIYHLRSDLFHNSKKQDIRLVYLALHHIIKYRGNFLVEGGVDNVISSFDNQNLQKFMDFIGADESMAKKVKAILLDRSLSRSVRKSDIIKLLRPTPDNKKVVSEAIGAVIGLKWNANKLFEDDSLEAKGEFSNKNYEEQRDEIAAAIGDDRYELVETLESVYQWTIFSQFIRKDSCLSDIMVEKYDDYRQDLSDLKSLFHEFLPKESYKSFFHGDTAEFEQYNKHKYSLEDLYKSIKNHLGNVAKEDPRYKRLEKRAELGEFLARQRIRDNGAIPHQIHQYELERIIDNQAQHYPFLAQNHDKIISIFTFKLPYYIGPLKTGGDFAWSVKKKDGVIYPWNFDEMIDDEASAEKFIDRMRNNCTYLPDEEVLPKNSLLYQEYEVRNELKNVTVNGKRLSSDIQNRIVDELFNKEPSVTHKKLIKYLYDNQIYNTTSLVISGTAKEKSFASSRKSYIDFTQKVGTPITPKNQQAIEEIIKWITLFEDKKILAKKLQKYSDIFNENQLRTILKLNYSGWGRLSCKLLDGITAHTRYGEMTVIETMRRCSDNFMQIIQSDQYEFKKIIDDILSLDQRTEITYDDIKNLAGSPGIKRALWRSVRIIDEIVDTIGYEPKLISIEMARNEDEKVRTKSRYNQLEKMYKDLYGKEYNKSDIKSQLADHKDKLDRKKYYLYFLQNGKCAYTGDPLDIENDLKDCEIDHILPRSLTKDDSLDNTVLVLRKENQRKLDDYPIVPDIQNRMRPIWTSLKNTKLMSQLKFQRLTSQKQLSEDRIAGFVNRQLVETRQITKHLARMLTEKYHDSSTEVFTIRAGMSSEYRRIHDLPKCREVNDLHHAKDAYLAAVLAQYVKIRYPKLDKTFIYGEYNKFKSTKRNITDSGSFILSSMKYDFTNTETGEIIWQSETTRDVIDRTMRYNDCLITRKTKIGDDQFYDQTIYGKSSGKTMIARKANLPVGKYGGYSGEKAAYFAAINYLKQVRNKNVSVNEIISIPVQIYTLSKTKPDAIDEYIRKNYKQATILLPKIPINQKIEYEGNEQFIVGSSEVTNAKQLKLPYDIEYAVAIALKQRIPHVTITEEQAANDNELQNKRNKQIEKRDKVIDGIEKFWGIYAEKLANQYQQFGNAGNSARNTLAEYTKLSLDDKIKVIGLVLRATHAGSDRVDMKGNEKKPVFPELGLPNSFGRMAGKSLDPTTLTFVYESITGLHCRKLDGKLLEQDQ

SEQ ID NO: 19904 - protein, 1342 aa, unidentified
  REGION 1..1342: note = Cas Enzyme sequence
MKQSYSIGLDIGTNSVGWAVVDEDFKLRKYKHQNMWGAHLFDEAQKAATRRSFRSSRRRLARRKRRITLLQQIFDDDIQKVDPHFYLRLSESMQHLGDKNSALELDANILFADHSFTDKSYREKYPTIYHLRSDLFHNSAKQDIRLVYLALHHIIKYRGNFLVEGGVDNVISSFDNQNLQKFMDFIGADESMAKKVKAILLDRSLSRSVRKSDIIKLLRPTPDNKKVVSEAIGAVIGLKWNANKLFDDDSLEAKGEFSNKNYEEQRDEIAAVIGDDRYEIVETLESVYQWTIFSQFIRKDSCLSDIMVEKYDAYRQDLSDLKSLFREFLNEKNYKSFFHGKKSSFELYNTHKKYLSENNNKITPLYKDIKNILTNIAKEDPRYQRFEKRAELGEFLARQRIRDNGAIPHQIHQYELEQIIDNQAQYYPFLAQNRDKIISIFTFKLPYYIGPLKTGGNFAWSVKKKDGVIYPWNFDEMIDDEASAEEFIGRMRNHCTYLPDEEVLPKNSLLYQEYEVCNELKNITVNGERLSPDIQNRIVDELFAKESSVTYKKLIKYLYDNQIFSTDSLVISGTAKEKSFASSRKSYIDFTQKVGVSITPKNQQAIEEVIKWITLFEDKKILTKKLQKYSDIFNENQLRTILKLSYSGWGRLSHKLLDGITAHTRYGEITVIETMRRCSDNFMQIIQSDQYEFKKIIDDILSLDQRTEITYDDIKNLAGSPGIKRALWRSVRIIDEIVDTIGYEPKLISIEMARNEDEKVRTSSRYSQLEKMYKDLYGKEYNKSDIKSQLADYKDKLDRKKYYLYFLQNGKCAYTGEPLDIENDLKNCEIDHILPRSLTKDDSLDNTVLVLRKENQRKLDDYPIAPDVQKRMRPTWILLKRAKLISDVKFQRLTDPNQLPDDKISNFIKRQLVETRQITKHLARMLTEKYHDSSTEVFTIRAGMNSEYRRTHDLPKCREINDLHHAKDAYLAAVLAQYVKIRYPKLDKAFIYGEYMKFKSKKQTDADRSSFILTSMNYDFTDTDTGEIIWQGKTTHDVIDRTMHYNDCLITRKTEIGDNQFYDQTIYGKNSGKTMIARKADLPVDKYGGYSGRKPAYFMAINYLKQVRNKDISINEIISIPVQIYTLEKTKPGSIDEYIRNNYKQATILLPKIPINQKIEYESNEQFIVGSSEVTNAKQLKLPYDIEYAVAVALKRGIPRVTISEEQTKEDDNLRDKRAKQIEKRDKVISEIERFWEVYTDKLSSQYQQFGSAVEKAKAANSEYQAMSVEDKIKAIRLVLVATHAGSGRVDMKKNFLKLGLPDGFGRMKDKNLDLTKLTFVYESITGLHRRKLDGKSLRRGQ

SEQ ID NO: 19905 - protein, 1339 aa, unidentified
  REGION 1..1339: note = Cas Enzyme sequence
MKQPYSIGLDIGTNSVGWAVINEDFSLCKYKHQNMWGAHLFGEAQKAVTRRLFRSSRRRLARRKRRITLLQQIFDNEMQKVDPHFYLRLSESMLHVGDKSSTLELDANILFADRSFTDKSYREKYPTIYHLRSSLFHDSKKQDIRLVYLALHHLIKYRGNFLVEGGVDNVISSFDSQNLQTFMDFIGADESMAQKVKTILLDRSLSRSTRKSAIIELLQPSPDNKKTISEAVGAAIGLKWNANKLFEDDSLEAKGEFSNKNYEEQRDEVAAAIGDDRYELVETLESVYQWTIFSQFIRKDSCLSDIMVEKYDAYRQDLSDLKALFHEFLPQKYKTFFHGGAAEFELYNNHKRNLDDLYKSIKKQLGEVAKDDPCYQRFEKRAELEEFLSRQRIRDNGAIPHQIHQYELERIIDNQARYYPFLAQNRDKIISIFTFKLPYYIGPLKTGCDFAWSVKKKDGVIYPWNFDEMIDDEASAEKFIDRMRNNCTYLPDEEVLPKNSLLYQEYEVRNELKNVTVNGERLSPDIQNRIVDELFTKELSVTYKKFIKYLYDNQIYNTDSLIISGTAKEKSFASSRKSYIDFMQKVGVSITPKNQQAIEEVIKWITLFEDKKILAKKLQKHSDIFNEYQLRTILKLNYSGWGRLSHKLLDGITAHTPYGELTVIETMRSSKDNFMQIIQSDRYEFKKIIDDILSADQRTDIAYDDIKKLAGSPGIKRALWRSIRIIDEIVDTIGYEPKLISIEMARNEDEKVRTKSRYGQLEKMYKELYGKEYTKSDIKSQLADHKDKLDKKKYYLYFLQNGKCAYTGEPLDIENDLRDSEIDHILPRSLTKDDSLDNTVLVLRKENQRKLDDYPISPDIQNHMRPIWISLKNTKLMSQLKFQRLASQKQLSEDRVAGFVNRQLVETRQITKHLARMLTEKYHNSSTEVFTIRAGMSSEYRRIHDLPKCREVNDLHHAKDAYLAATLAQYIKIRYPKLDNAFIYGEYMKFKSRRQTDTDRSSFILASMNYDFTDINTGEIIWQSKTAHDVIDRTMKYNDCLTTKKTEIGDNQFYDQTIYGKDSGVTMITRKANLPVDKYGGYSGRKAAYFMAIRYLKQVRNKDVFVNEIISVPTQVYTLEKTKPGSINEYLRKNYRQVIVLVPKIPINQKIEYDGNEQFIVGSSEVTNAKQLKLPYGIEYAIAIVLKQGIPHVTISEEQAADDNKLQRKRNRQIEKRDRAISGVEKFWGIYAEKLANQYQQFGNAGNSARNTLAEYTKLSLDDKIKVIGLVLRATHAGSDRVDMKGSEKKPVFPELGLPNSFGRMAGKSLDPTKLTFVYESITGLHRRKLDGKTLGQDR

SEQ ID NO: 19906 - protein, 1339 aa, unidentified
  REGION 1..1339: note = Cas Enzyme sequence
MKQPYSIGLDIGTNSVGWAVINEGFDLRKYKHQNMWGAHLFDEAQKAATRRSFRSSRRRLARRKRRITLLQQIFDDEIQKIDPHFYLRLSESMLHLGDKNSTLELDANILFADHSFTDKSYREKYPTIYHLRSSLFHDSKKQDIRLVYLALHHLIKYRGNFLIEGGVDNVISSFDNQSLQAFMEFIGAGDSTAQKIKAILLDRSLSRSARKSDIINLLQPSSDKKRAVSEAVGAAIGLKWNANKLFEDDSLEAKGEFSNKNYEEQRDEIANAIGDDRYGLVETLESVYQWTIFSQFIRKDSCLSDIMIEKYDAYRQDLSDLKALFHEFLTQKYKTFFHGDAAEFELYNNHKRNLDDLYKSIKKQLGEVAKDDPRYQRFEKRAELEEFLSRQRIRDNGAIPHQIHQYELERIIDNQAQYYPFLAQNRDKIISIFTFKLPYYIGPLKTGSDFAWSVKKKDGVIYPWNFDEIIDDEASAEKFIDRMRNNCTCLPDEEVLPKNSLLYQEYEVRNELKNVTVNGERLSSDVQNRIVDELFTKESSVTYKKLVKYLYDNQIYNTDSLVISGTAKEKSFASSRKSYLDFTNKIGVEITPTNQKAIEEIIKWITLFEDKRILAKKLRKYSNIFNENQLRAILKLNYSGWGRLSRELLDGIIAHTPYGELTVIETMRHSKDNFIQIIQSDRYEFKKIIDDILSADQRTDIAYDDIKKLAGSPGIKRALWRSVRIIDEIVDTIGYEPKLISIEMARNEDEKVRTKSRYSQLEKMYKELYGKEYTKSDIKSQLADYKDKLDRKKYYLYFLQNGKCAYTGEPLDIENDLRDSEIDHILPRSLTKDDSLDNTVLVLRKENQRKLDDYPIAPDIQNHMRPIWISLKNAKLMSQLKFQRLASQKQLSEDRVAGFVNRQLVETRQITKHLARMLTEKYHNSSTEVFTIRAGMSSEYRHIHDLPKCREINDLHHAKDAYLAATLAQYIKIRYPKLDNAFIYGEYMKFKSKGQTDTDRSSFILASMNYDFTNTNTGEIIWQSKTAHDVIDRTMKYNDCLITKKTEIGDNQFYDQTIYGKDSGATMITRKSNLPVDKYGGYSGRKAAYFMAIRYLKQVRNKDVFVNEIISVPTQVYTLEKTKPGSINEYLRKNYRQVIVLVPKIPINQKIEYDGNEQFIVGSSEVTNAKQLKLPYDIEYAIAIVLKQGIPHVTISEEQAADDNKLQRKRNRQIEKRDRVISGVEKFWGIYAEKLANQYQQFGDAGHNAQSALVEYSELSLDDKIKVIGLVLRATHAGSDRVDMKGSEKKPVFPELGLPNSFGRMAGKSLDPTKLTFVYESITGLHRRKLDGKTLGRDR

SEQ ID NO: 19907 - protein, 1334 aa, unidentified
  REGION 1..1334: note = Cas Enzyme sequence
MKQPYSIGLDIGTNSVGWAVINEGFDLRKYKHQNMWGAHLFDEAQKAATRRSFRSSRRRLARRKRRITLLQQIFDNEMQKVDPHFYLRLSESMLHSCDKNSALELNANILFADRSFTDKSYREKYPTIYHLRSDLFHNSDKQDIRLVYLALHHLIKYRGNFLVEGGVDNVISSFDSQNLQTFMDFIGADESMAQKVKTILLDRSLSRSTRKSAIIELLQPSPDNKKTISEAVGAAIGLKWNANKLFEDDSLEAKGEFSNKNYEEQRDEVAAAIGDDRYELVETLESVYQWTIFSQFIRKDSCLSDIMVEKYDAYRQDLSDLKALFHEFLPQKYKTFFHGGAAEFELYNNHKRNLDDLYKSIKKQLGEVAKDDPCYQRFEKRAELEEFLSRQRIRDNGAIPHQIHQYELERIIDNQARYYPFLAQNRDKIISIFTFKLPYYIGPLKTGGDFAWSVKKKDGVIYPWNFDEMIDDEASAEKFIDRMRNNCTYLPDEEVLPKNSLLYQEYEVRNELKNVTVNGERLSPDIQNRIVDELFTKELSVTYKKFIKYLYDNQIYNTDSLIISGTAKEKSFASSRKSYIDFMQKVGVSITPKNQQAIEEVIKWITLFEDKKILAKKLQKHSDIFNENQLRTILKLNYSGWGRLSRKLLDGITAHTPYGELTVIETMRSSKDNFMQIIQSNRYEFKKIIDDILSADQRTDIAYDDIKKLAGSPGIKRALWRSVRIIDEIVDTIGYEPKLISIEMARNEDEKVRTKSRYSQLEKMYKELYGKEYTKSDIKSQLADYKDKLDRKKYYLYFLQNGKCAYTGEPLDIENGLRDSEIDHILPRSLTKDDSLDNTVLVLRKENQRKLDDYPISPDIQNHMRPIWISLKNAKLMSQTKFQRLASQKQLSEDRVAGFVNRQLVETRQITKHLARMLTEKYHNSSTEVFTIRAGMSSEYRRIHDLPKCREVNDLHHAKDAYLAAVLAQYIKVRYPRLDKAFIYGEYMKFKSKKQTDADRSSFILSSMKYDFTNTETGEIIWQNKTAQDVIDRTMRYNDCLITRKTKIGDDQFYDQTIYGKSSGKTMIARKANLPVGKYGGYSGEKAAYFAAINYLKQVRNKDVSVNEIVSIPAQIYTLEKTRSDSINEYISNNYKQATVLLSKIPINQKIEYEGNEQFIVGSSEVTNAKQLKLPYDIEYAVAIALRQGIPRITISEEQAEKDNNLRNKRAKQIEKRDKVISGIERFWEVYTDKLSSQYQQFGNAVEKAKAANSNYQAMSVEDKIKVIRLVLVATHAGSGRVDMKKNFPKLQLPSDFGRMIGKNLDPTKLTFVYESITGLHRRKLDGKSLGQDQ

SEQ ID NO: 19908 - protein, 1334 aa, unidentified
  REGION 1..1334: note = Cas Enzyme sequence
MKQPYSIGLDIGTNSVGWAVINEDFSLCKYKHQNMWGAHLFDEAQKAATRRSFRSSRRRLARRKRRITLLQQIFNDEIQKVDPHFYLRLSESMLHVGDKSSTLELDANILFADHSFTDKSYREKYPTIYHLRSSLFHNSEKQDIRLVYLALHHLIKYRGNFLIEGGVDNVISSFDSQSLQTFMEFIGADDSTAQKIKATLLDRSLSRSTRKSDIINLLQPSPDNKRAVSEAVGAAIGLKWNANKLFEDDSLEAKGEFSNKNYEEQRDEIATAIGDDRYGLVETLESVYQWTVFSQFIRKDSCLSDIMIEKYDAYRQDLSDLKALFHESLPQKYKTFFHGDAAEFELYNNHKRNLDDLYKSIKKQLSEVAKDDPRYQRFEKRAELEEFLSRQRIRDNGAIPHQIHQYELEKIIDNQAQYYPFLAQNRDKIISIFTFKLPYYIGPLKTGGDFAWSVKKKDGVIYPWNFDEMIDDEASAEKFIDRMRNNCTYLPDEEVLPKNSLLYQEYEVRNELKNVTVNGERLSPDIQNRIVDELFTKESSVTYKKLVKYLYDNQIYNTDSLIISGTAKEKSFASSRKSYLDFTNKIGIEITPKTQKAIEEVIKWITLFEDKKILAKKLQKYSDIFDDNQLRAILKLNYSGWGRLSHKLLDGITAHTPYGELTVIETMRSSKDNFMQIIQSDRYEFKKIIDDILSADQRTDIAYDDIKKLAGSPGIKRALWRSVRIVDEIVDTIGYEPKLISIEMARNEDEKVRTKSRYSQLEKMYKDLYGKAYTKSDIKSQLAEYKDKLDKKKYYLYFLQNGKCAYTGEPLDIENDLRDSEIDHILPRSLTKDDSLDNTVLVLRKENQRKLDDYPIAPDIQNHMRSIWTSLKNAKLMSQLKFQRLTNQKQLSEDRVAGFVNRQLVETRQITKHLARMLTEKYHNSSTEVFTIRAGMSSEYRRIHDLPKCREINDLHHAKDAYLAAVLAQYVKIRYPKLDNAFIYGEYMKFKSKKQTDTDRSSFILASMNYDLTNTETGEIIWQSKTERNVIDRTMKYNDCLITKKTEIGDNQFYDQTIYGKNSGATMIARKANLPVDKYGGYSGRKAAYFTAINYLKQVRNKDVSVNEIVSVPAQIYTLEKTRSDSINEYISNNYKQATVLLPKIPINQKIEYDGNEQFVVGSSEVTNAKQLKLPYDIEYAVAIALKRRIPRVTISEEQAKEDDNLRDKRAKQIEKRDKVISGIERFWEVYTDKLSSQYQQFGNAVEKAKAASSKYQAMSVDDKIKVIGLVLVATHAGSGRVDMKKNFPKLQLPSDFGRMIGKNLDPTKLTFVYESITGLHRRKLDGKTLEQGR

SEQ ID NO: 19909 - protein, 1345 aa, unidentified
  REGION 1..1345: note = Cas Enzyme sequence
MGNKLRNVDDYYLGLDIGTESVGWAVTDKDYVIPKFKGNAMWGVHLFDEGETSVKRRGFRSARRRTQRKRERLALLEALFDEEICKKDCTFFRRLHESDLWPEDKSGDDKYAVFADENYTDKDFHKEYPTIYHLRYELIKNKEPHDVRLVFLALHHIIKNRGHFLFDSLSSAEDFNSAYETMRSYLSDNEIQLNCSDIEQFKAILKDRRQGKIEKTKNLASLFGITKKSDPVSYAVMAALSGSTVKMCDLFGDDELKTVEKNNISFASGYEENEEIYASVLGDRFELVKILKAVYDWAVLADILDGKKYISEAKVAVYEKHKNDLKTLKKYVKTYLPEKYNEIFKISDGKKDNYVAYSGHIKESGKTGELKKTCNSENFCAYLKKTLGKNADLSYKEMFDEIEKKTFMPKQVTKSNGVVPMQVNEEELKAILDNAKDYLPFLNSCDENGVSVYDKIIKIFEYRIPYYVGPLNTHTEKSWLKRKDGVKIYPWNFDDVVDIDSSADKFINNLTSKCTYLPECDVIPKCSLLYSKFTVLNEINNLKLNGEDIPVELKQGIYNDLFMTRRKVTVKQIKDYLKARGCYDNNDVLSGIDTTVKSSLKSYFDFKDFESLTFDDKESIIASSVIFGDDKKLLKKRLKKLFPEKLTDEDIKKICKLKYTGWSRLSKEFLCDVEFTYKKTGEVMNVITALWETNYNLMQILYSEDFCCDGDEKKNLNDKLDELSYTGDQHSLRKAVDALYVSPKVKRPILRALLIAKEIEKIQGRPPKKIFVEVARGIDNREERHRDSRKNRLMELYKNCKKEAEKFCPYFDALSKKLSDEDESKLRSDKLYFYYIQLGKCMYTGEEISLGELMNGNGRFDIDHIYPRSKIKDDSLTNKVLVNKTVNNNKTNVYPIDAAIQSKMSPYWQMLRSSGLISEETYKRLTRKTPLTDDELSAFVSRQLTETQQSTKAVAHILEQLYPKPKTEIVYVKAALVHAFRQSNDMLKCREVNDLHHAKDAYLNIVVGNAYNVKVTHNKVNFIKGLQNNDKGYTVNPEKFFSHDIPGAWSVKDSMNTVRRFMNKNNIRYTRFPRKKQGGLFKINPLKKGNGQVPLKASGARNCIEKYGGYDKATSAYFSYVEYTDKKGKAVRQMFPVNLYEVKEYEADMQGFVTSHIAEASNVKILIPCVKYDACISFDGCRMFMSNKTGNQIGYKPGMQLVLGYKYEKYIRNIENYLSKHKDREIIPRDNISAEENIELYDILTGKMLNTVLSVKFSGIGKKLEKRREEFVLCSPEEQCYVLNEILKILHANVLLGDLKLIGESGQAGVMVTNVKFSEIKGIHSIKLINQSVTGLFEQEIDLLK

SEQ ID NO: 19910 - protein, 1345 aa, unidentified
  REGION 1..1345: note = Cas Enzyme sequence
MGNKLRNVDDYYLGLDIGTESVGWAVTDKDYVIPKFKGNAMWGVHLFDEGETSVKRRGFRSARRRTQRKRERLALLEALFDEEICKKDCTFFRRLHESNLWPEDKSGDDKYAVFADENYTDKDFHKEYPTIYHLRYELIKNKEPHDVRLVFLALHHIIKNRGHFLFDSLSSAEDFNSAYETMCSYLSDNEIQLNCSDIEQFKAILKDRRQGKIEKTKNLASLFGITKKSDPVSYAVMAVLSGSTVKMCDLFGDDELKTVEKNNISFASGYEENEEIYASVLGDRFELVNILKAVYDWAVLADILDGKKYISEAKVAVYEKHKNDLKTLKKYVKTYLPEKYNEIFKISDGKKDNYVAYSGHIKESGKTGELKKTCDSENFCAYLKKTLGKNADLSYKEMFDEIENKTFMPKQVTKSNGVVPMQVNEEELKAILDNAKDYLPFLNSCDENGVSVYDKIIKIFEYRIPYYVGPLNTHTEKSWLKRKDGVKIYPWNFDDVVDIDSSAEEFINNLTSKCTYLPECDVIPKCSLLYSKFTVLNEINNLKLNGEDIPVELKQGIYNDLFMTRRKVTVKQIKDYLKARDCYDNNDVLSGIDTAVKSSLKSYFDFKEFESLTFDDKESIIASSVIFGDDKKLLKKRLKKLFSEKLTDEDIKKICKLKYTGWSRLSKEFLCDVEFTYKKTGEVMNVITALWETNYNLMQILYSEDFCCDGDEKKNLNDKLDELSYTENQHSLRKAVDALYVSPKVKRPILRALLIAKEIEKIQERPPKKIFVEVARGIDNREERHRDSRKSRLMELYKNCKKEAEKFCPYFDALSKKLSDEDESKLRSDKLYFYYIQLGKCMYTGEEISLGELMNGNGRFDIDHIYPQSKIKDDSLTNRVLVNRTVNADKTNVYPIDSAVQAKMSPYWQMLRSSGLISEETYKRLTRKTPLTDDELSAFVSRQLTETQQSTKAVAHILEQLYPKPKTEIVYVKAALAHAFRQSNDMLKCREVNDLHHAKDAYLNIVVGNAYNVKVTHNKVNFIKGLQNNDKGYTVNPEKFFSHDIPGAWSVKDSMNTVRRFMNKNNIRYTRFPRKKQGGLFKINPLKKGNGQVPLKASGARSCIEKYGGYDKATSAYFSYVEYTDKKGKAVRQMFPVNLYEVKEYEADMQGFVTSRIAEASNVKILIPCVKYDACISFDGCRMFISNKNGNQIGYKPGMQLVLGYKYEKYIRNITNYLTKHKDREIIPRDNISAEENVELYDILTGKMLNTVLSVRFSGIGKKLEKRREKFVLCSPEEQCCVLNEILKILHANVLSGDLSLIEESHNTGTMKTNAKFSEIKDVHSIKLINQSVTGLFEQEIDLLK

SEQ ID NO: 19911 - protein, 948 aa, unidentified
  REGION 1..948: note = Cas Enzyme sequence
MFDEIENKTFMPKQVTKSNGVVPMQVNEEELKAILDNAKDYLPFLNSCDENGVSVYDKIIKIFEYRIPYYVGPLNTHTEKSWLKRKDGVKIYPWNFDDVVDIDSSAEEFINNLTSKCTYLPECDVIPKCSLLYSKFTVLNEINNLKLNGEDVPVELKQGIYNDLFMTRRKVTVKQIKDYLKARGCYDNNDVLSGIDTTVKSSLKSYFDFKDFESLTFDDKESIIASSVIFGDDKKLLKKRLKKLFSEKLTDEDIKKICKLKYTGWSRLSKEFLCDVEFTYKKTGEVMNVITALWETNYNLMQILYSEDFCCDGDEKKNLNDKLDELSYTGDQHSLRKAVDALYVSPKVKRPILRALLIAKEIEKIQERPPKKIFVEVARGIDNREERHRDSRKNRLMELYKNCKKEAEKFCPYFDAMSKKLSDEDESKLRSDKLYFYYIQLGKCMYTGEEISLGELMNGNGRFDIDHIYPQSKIKDDSLTNRVLVNRTVNADKTNVYPIDSAVQAKMSPYWQMLRSSGLISEETYKRLTRKTPLTDDELSAFVSRQLTETQQSTKAVAHILEQLYPKPKTEIVYVKAALAHAFRQSNDMLKCREVNDLHHAKDAYLNIVVGNAYNVKVTHNKVNFIKGLQNNDKGYTVNPEKFFSHDIPGAWSVKDSMNTVCRFMNKNNIRYTRFPRKKQGGLFKINPLKKGNGQVPLKASGARSCIKKYGGYDKATSAYFSYVEYTDKKGKAVRQMFPVNLYEVKEYEADMQGFVTSRIDGASNVKILIPCVKYDACISFDGCRMFITKKAGNQIGYKPGIQLVLGYKYEKYIRNITNYLTKHKDREIIPRDNISSEENIELYDVLTGKMLNTVLSVRFSGIGKKLEKRREKFVLCSPEEQCYVLNEILKILHANVLLGDLRLIGESPNAGAMLTNAKFSEIKDVHSIKLINQSVTGLFEQEIDLLK

SEQ ID NO: 19912 - protein, 1345 aa, unidentified
  REGION 1..1345: note = Cas Enzyme sequence
MGNKLRNVDDYYLGLDIGTESVGWAVTDKDYVIPKFKGNAMWGVHLFDEGETSVKRRGFRSARRRTQRKRERLALLEALFDEEISKKDCTFFRRLHESNLWPEDKSGDDKYAVFADENYTDKDFHKEYPTIYHLRYELIKNKEPHDVRLVFLALHHIIKNRGHFLFDSLSSAEDFNSAYETMCSYLSDNEIQLNCSDIEQFKAILKDRRQGKIEKTKNLASLFGITKKSDPVSYAVMAVLSGSTVKMCDLFGDDELKTVEKNNISFASGYEENEEIYASVLGDRFELVNILKAVYDWAVLADILDGKKYISEAKVAVYEKHKNDLKTLKKYVKTYLPEKYNEIFKISDGKKDNYVAYSGHIKESGKTGELKKTCDSENFCAYLKKTLGKNADLSYKEMFDEIENKTFMPKQVTKSNGVVPMQVNEEELKAILDNAKDYLPFLNSCDENGISVYDKIIKIFEYRIPYYVGPLNTHTEKSWLKRKDGVKIYPWNFDDVVDIDSSAEEFINNLTSKCTYLPECDVIPKCSLLYSKFTVLNEINNLKLNGEDVPVELKQGIYNDLFMTRRKVTVKQIKDYLKARGCYDNNDVLSGIDTTVKSSLKSYFDFKDFESLTFDDKESIIASSVIFGDDKKLLKKRLKKLFSEKLTDEDIKKICKLKYTGWSRLSKEFLCDVEFTYKKTGEVMNVITALWETNYNLMQILYSEDFCCDGDEKKNLNDKLDELSYTGDQHSLRKAVDALYVSPKVKRPILRALLIAKEIEKIQERPPKKIFVEVARGIDNREERHRDSRKNRLMELYKSCKKEAEKFCPYFDVLSKKLSDEDESKLRSDKLYFYYIQLGKCMYTGEEISLGELMNGNGRFDIDHIYPRSKIKDDSLTNKVLVNKTVNNNKTNVYPIDAAIQSKMSPYWQMLRSSGLISEETYKRLTRKTPLTDDELSAFVSRQLTETQQSTKAVAHILEQLYPKPKTEIVYVKAALAHAFRQSNDMLKCREVNDLHHAKDAYLNIVVGNAYNVKVTHNKVNFIKGLQNNDKGYTVNPEKFFCHDIPGAWSVKDSMNTVRRFMNKNNIRYTRFPRKKQGGLFKINPLKKGSGQIPLKASGARSCIEKYGGYDKATSAYFSYVEYTDKKGKAVRQMFPVNLYEVKEYEADMQGFVTSRIAEASNVKILIPCVKYDACISFDGCRMYVSNKTGNQIGYKPGIQLVLGYKYEKYIRNITNYLTKHKDREIIQRDNISSEENIELYDVLTGKMLNTVLSVRFSGIGKKLEKRREKFVLCSPEEQCYVLNEILKILHANVLSGDLKLIDESGQAGVMVTNVKFSEIKGIHSIKLINQSVTGLFEQEIDLLK

SEQ ID NO: 19913 - protein, 1345 aa, unidentified
  REGION 1..1345: note = Cas Enzyme sequence
MGNKLRNVDDYYLGLDIGTESVGWAVTDKDYVIPKFKGNAMWGVHLFDEGETSVKRRGFRSARRRTQRKRERLALLEALFDEEICKKDCTFFRRLHESDLWPDDKSGDDKYAVFADENYTDKDFHKEYPTIYHLRYELIKNKEPHDVRLVFLALHHIIKNRGHFLFDSLSSAEDFNSAYETMCSYLSDNEIQLNCSDIEQFKAILKDRRHGKIEKTKNLASLFGITKKSDPVSYAVMAVLSGSTVKMCDLFGDDELKTVEKNNISFASGYEENEEIYASVLGDRFELVKILKAVYDWAVLADILDGKKYISEAKVAVYEKHKNDLKTLKKYVKTYLPEKYNEIFRISDGKKDNYVAYSGHIKESGKTGELKKTCNSENFCAYLKKTLGKNADLSYKEMFDEIENKTFMPKQVTKSNGVVPMQVNEEELKAILDNAKDYLPFLNSCDENGVSVYDKIIKIFEYRIPYYVGPLNTHTEKSWLKRKDGVKIYPWNFDDVVDIDSSAEKFINNLTSKCTYLPECDVIPKCSLLYSKFTVLNEINNLKLNGEDIPVELKQGIYNDLFMTRRKVTVKQIKDYLKARGCYDNNDVLSGIDTTVKSSLKSYFDFKDFESLTFDDKESIIASSVIFGDDKKLLKKRLKKLFPEKLTDEDIKKICKLKYTGWSRLSKEFLCDVEFTYKKTGEVMNVITALWETNYNLMQILYSEDFCCDGDEKKNLNDKLDELSYTGDQHSLRKAVDALYVSPKVKRPILRALLIAKEIEKIQERPPKKIFVEVARGIDNREERHRDSRKNRLMELYKNCKKEAEKFCPYFDALSKKLSDEDESKLRSDKLYFYYIQLGKCMYTGEEISLGELMNGNGRFDIDHIYPRSKIKDDSLTNKVLVNKTVNNNKTNVYPIDAAIQSKMSPYWQMLRSSGLISEETYKRLTRKTPLTDDELSAFVSRQLTETQQSTKAVAHILEQLYPKPKTEIVYVKAALVHAFRQSNDMLKCREVNDLHHAKDAYLNIVVGNAYNVKVTHNKVNFIKGLLNNDKGYTVNPEKFFSHDIPGAWSVKDSMNTVRRFMNKNNIRYTRFPRKKQGGLFKINPLKKGNGQVPLKASGARSCIEKYGGYDKATSVYFSYVEYTDKKGKAVRQMFPVNLYEVKEYEADMQGFVTSHIAEASNVKILIPCVKYDACISFDGCRMFISNKTENRIGYKPGIQLVLGYKYEKYIRNITNYLTKHKDREIIPRDSISSEENTELYDVLTGKMLNTVLSVRFSGIGKKLEKRREEFVLCSPEEQCYVLNEILKILHANVLSGDLSLIEESHNTGTMKTNAKFSEIKDVHSIKLINQSITGLFEQEIDLLK

SEQ ID NO: 19914 - protein, 1345 aa, unidentified
  REGION 1..1345: note = Cas Enzyme sequence
MGNKLRNVDDYYLGLDIGTESVGWAVTDKDYVIPKFKGNAMWGVHLFDEGETSVKRRGFRSARRRTQRKRERLALLEALFDEEISKKDCTFFRRLHESNLWPEDKSGDDKYAVFADENYTDKDFHKEYPTIYHLRYELIKNKEPHDVRLVFLALHHIIKNRGHFLFDSLSSAEDFNSAYETMCSYLSDNEIQLNCSDIEQFKAILKDRRQGKIEKTKNLASLFGITKKSDPVSYAVMAVLSGSTVKMCDLFGDDELKTVEKNNISFASGYEENEEIYASVLGDRFELVNILKAVYDWAVLADILDGKKYISEAKVAVYEKHKNDLKTLKKYVKTYLPEKYNEIFKISDGKKDNYVAYSGHIKESGKTGELKKTCDSENFCAYLKKTLGKNADLSYKEMFDEIENKTFMPKQVTKSNGVVPMQVNEEELKAILDNVKDYLPFLNSCDENGISVYDKIIKIFEYRIPYYVGPLNTHTEKSWLKRKDGVKIYPWNFDDVVDIDSSAEEFINNLTSKCTYLPECDVIPKCSLLYSKFTVLNEINNLKLNGEDVPVELKQGIYNDLFMTRRKVTVKQIKDYLKARGCYDNNDVLSGIDTTVKSSLKSYFDFKDFESLTFDDKESIIASSVIFGDDKKLLKKRLKKLFSEKLTDEDIKKICKLKYTGWSRLSKEFLCDVEFTYKKTGEVMNVITALWETNYNLMQILYSEDFCCDGDEKKNLNDKLDELSYTGDQHSLRKAVDALYVSPKVKRPILRALLIAKEIEKIQERPPKKIFVEVARGIDNREERHRDSRKNRLMELYKNCKKEAEKFCPYFDAMSKKLSDEDESKLRSDKLYFYYIQLGKCMYTGEEISLGELMNGNGRFDIDHIYPQSKIKDDSLTNRVLVNRTVNADKTNVYPIDSAVQAKMSPYWQMLRSSGLISEETYKRLTRKTPLTDDELSAFVSRQLTETQQSTKAVAHILEQLYPKPKTEIVYVKAALAHAFRQSNDMLKCREVNDLHHAKDAYLNIVVGNAYNVKVTHNKVNFIKGLQNNDKGYTVNPEKFFSHDIPGAWSVKDSMNTVCRFMNKNNIRYTRFPRKKQGGLFKINPLKKGNGQVPLKASGARSCIKKYGGYDKATSAYFSYVEYTDKKGKAVRQMFPVNLYEVKEYEADMQGFVTSRIDGASNVKILIPCVKYDACISFDGCRMFITKKAGNQIGYKPGIQLVLGYKYEKYIRNITNYLTKHKDREIIPRDNISSEENIELYDVLTGKMLNTVLSVRFSGIGKKLEKRREKFVLCSPEEQCYVLNEILKILHANVLLGDLRLIGESPNAGAMLTNAKFSEIKDVHSIKLINQSVTGLFEQEIDLLK

SEQ ID NO: 19915 - protein, 1345 aa, unidentified
  REGION 1..1345: note = Cas Enzyme sequence
MGNKLRNVDDYYLGLDIGTESVGWAVTDKDYVIPKFKGNAMWGVHLFDEGETSVKRRGFRSARRRTQRKRERLALLEALFDEEICKKDCTFFRRLHESDLWPEDKSGDDKYAVFADENYTDKDFHKEYPTIYHLRYELIKNKEPHDVRLVFLALHHIIKNRGHFLFDSLSSAEDFNSAYETMCSYLSDNEIQLNCSDIEQFKAILKDRRQGKIEKTKNLASLFGITKKSDSVSYAVMAVLSGSTVKMCDLFGDDELKTVEKNNISFASGYEENEEIYASVLGDRFELVKILKAVYDWAVLADILDGKKYISEAKVAVYEKHKNDLKTLKKYVKTYLPEKYNEIFKISDGKKDNYVAYSGHIKESGKTGELKKTCNSESFCAYLKKTLGKNADLSYKEMFDEIENKTFMPKQVTKSNGVVPMQVNEEELKAILDNAKDYLPFLNSCDENGVSVYDKIIKIFEYRIPYYVGPLNTHTEKSWLKRKDGVKIYPWNFDDVVDIDSSAEEFINNLTSKCTYLPECDVIPKCSLLYSKFTVLNEINNLKLNGEDIPVELKQEIYNDLFMTRRNVTVKQIKDYLKARGCYDNNDVLSGIDTTVKSSLKSYFDFKDFESRTFDNKESIIASSVIFGDDKKLLKKRLKKLFPEKLTDEDIKKICKLKYTGWSRLSKEFLCDVEFTYKKTGEVMNVITALWETNYNLMQILYSEDFCCDGDEKKNLNDKLDELSYTGDQHSLRKAVDALYVSPKVKRPILRALLIAKEIEKIQERPPKKIFVEVARGIDNREERHRDSRKNRLMELYKNCKKEAEKFCPYFDALSKKLSDEDESKLRSDKLYFYYIQLGKCMYTGEEISLGELMNGNGRFDIDHIYPRSKIKDDSLTNKVLVNKTVNNNKTNVYPIDAAIQSKMSPYWQMLRSSGLISEETYKRLTRKTPLTDDELSAFVSRQLTETQQSTKAVAHILEQLYPKPKTEIVYVKAALAHAFRQSNDMLKCREVNDLHHAKDAYLNIVVGNAYNVKVTHNKVNFIKGLQNNDKGYTVNPEKFFSHDIPGAWSVKDSMNTVRRFMNKNNIRYTRFPRKKQGGLFKINPLKKGNGQVPLKASGARSCIEKYGGYDKATSAYFSYVEYTDKNGKAVRQMFPVNLYEVKEYEADMQGFVTSRIAEASNVKILIPCVKYDACISFDGCRMFITKKAGNQIGYKPGIQLVLGYKYEKYIRNITNYLSKHKDREIIPRDNISAEENTELYDVLTGKMLNTVLSVRFSGIGKKLEKRREKFVLCSPEEQCYVLNEILKILHANVLLGDLRLIGESPNAGAMLTNAKFSEIKDVHSIKLINQSVTGLFEQEIDLLK

SEQ ID NO: 19916 - protein, 1345 aa, unidentified
  REGION 1..1345: note = Cas Enzyme sequence
MGNKLRNVDDYYLGLDIGTESVGWAVTDKDYVIPKFKGNAMWGVHLFDEGETSVKRRGFRSARRRTQRKRERLALLEALFDEEICKKDCTFFRRLHESDLWPEDKSGDDKYAVFADENYTDKDFHKEYPTIYHLRYELIKNKEPHDVRLVFLALHHIIKNRGHFLFDSLSSAEDFNSAYETMCSYLSDNEIQLNCSDIEQFKAILKDRRQGKIEKTKNLASLFGITKKSDPVSYAVMAVLSGSTVKICDLFGDDELKTVEKNNISFASGYEENEEIYASVLGDRFELVNILKAVYDWAVLADILDGKKYISEAKVAVYEKHKNDLKTLKKYVKTYLPEKYNEIFKISDGKKDNYVAYSGHIKESGKTGELKKTCDSENFCAYLKKTLGKNADLSYKEMFDEIENKTFMPKQVTKSNGVVPMQVNEEELKAILDNAKDYLPFLNSCDENGVSVYDKIIKIFEYRIPYYVGPLNTHTEKSWLKRKDGVKIYPWNFDDVVDIDSSAEEFINNLTSKCTYLPECDVIPKCSLLYSKFTVLNEINNLKLNGEDIPVELKQGIYNDLFMTRRKVTVKQIKDYLKARGCYDNNDVLSGIDTTVKSSLKSYFDFKDFESLTFDDKESIIASSVIFGDDKKLLKKRLKKLFSEKLTDEDIKKICKLKYTGWSRLSKEFLCDIEFTYKKTGEVMNVITALWETNYNLMQILYSEDFCCDGDEKKNLNDKLDELSYTENQHSLRKAVDALYVSPKVKRPILRALLIAKEIEKIQERPPKKIFVEVARGIDNREERHRDSRKSRLMELYKNCKKEAEKFCPYFNALSKKLSDEDESKLRSDKLYFYYIQLGKCMYTGEEISLGELMNGNGRFDIDHIYPQSKIKDDSLTNRVLVNRTVNADKTNVYPIDSAVQAKMSPYWRMLRSSGLISEETYKRLTRKTPLTDDELSAFVSRQLTETQQSTKAVAHILEQLYPKPKTEIVYVKAALAHAFRQSNDMLKCREVNDLHHAKDAYLNIVVGNAYNVKVTHNKVNFIKGLQNNDKGYTVNPEKFFSHDIPGAWSVKDSMNTVRRFMNKNNIRYTRFPRKKQGGLFKINPLKKGNGQVPLKASGARSCIEKYGGYDKATSAYFSYVEYTDKKGKVVCQMFPVNLYEVKEYEADMQGFVTSRIDGASNVKILIPCVKYDACISFDGCRMFITKKAGNQIGYKPGIQLVLGYKYEKYIRNITNYLTKHKDREIIPRDNISAEENIELYDVLTGKMLNTVLSVRFSGIGKKLEKRREKFVLCSREEQCYVLNEILKILHANVLLGDLRLIGESPNAGAMLTNAKFSEIKDVHSIKLINQSVTGLFEQEIDLLK

SEQ ID NO: 19917 - protein, 1345 aa, unidentified
  REGION 1..1345: note = Cas Enzyme sequence
MGNKLRNADDYYLGLDIGTESVGWAVTDKDYVIPKFKGNAMWGVHLFDEGETSVKRRGFRSARRRTQRKRERLALLEALFDEEISKKDCTFFRRLHESDLWPEDKSGDDKYAVFADENYTDKDFHKEYPTIYHLRYELIKNKEPHDVRLVFLALHHIIKNRGHFLFDSLSSAEDFNSAYETMCSYLSDNEIQLNCSDIEQFKAILKDRRQGKIEKTKNLASLFGITKKSDPVSYAVMAVLSGSTVKMCDLFGDDELKTVEKNNISFASGYEENEEIYASVLGDRFELVKILKAVYDWAVLADILDGKKYISEAKVAVYEKHKNDLKTLKKYVKTYLPEKYNEIFKISDGKKDNYVAYSGHIKESGKTGELKKTCDSENFCAYLKKTLGKNADLSYKEMFDEIENKTFMPKQVTKSNGVVPMQVNEEELKAILDNAKDYLPFLNSCDENGVSVYDKIIKIFEYRIPYYVGPLNTHTEKSWLKRKDGVKIYPWNFDDVVDIDSSAEEFINNLTSKCTYLPECDVIPKCSLLYSKFTVLNEINNLKLNGEDIPVELKQGIYNDLFMTRRKVTVKQIKDYLKARGCYDNNDVLSGIDTAVKSSLKSYFDFKEFESLTFDDKESIIASSVIFGDDKKLLKKRLKKLFSEKLTDEDIKKICKLKYTGWSRLSKEFLCDIEFTYKKTGEVMNVITALWETNYNLMQILYSEDFCCDGDEKKNLNDKLDELSYTENQHSLRKAVDALYVSPKVKRPILRALLIAKEIEKIQERPPKKIFVEVARGIDNREERHRDSRKSRLMELYKNCKKEAEKFCPYFNALSKKLSDEDESKLRSDKLYFYYIQLGKCMYTGEEISLGELMNGNGRFDIDHIYPQSKIKDDSLTNRVLVNRTVNADKTNVYPIDSAVQAKMSPYWQMLRSSGLISEETYKRLTRKTPLTDDELSAFVSRQLTETQQSTKAVAHILEQLYPKPITEIVYVKAALVHAFRQSNDMLKCREVNDLHHAKDAYLNIVVGNAYNVKVTHNKVNFIKGLQNNDKGYTVNPEKFFSHDIPGAWSVKDSMNTVRRFMNKNNIRYTRFPRKKQGGLFKINPLKKGNGQVPLKASGARSCIEKYGGYDKATSAYFSYVEYTDKKGKAVRQMFPVNLYEVKEYEADMQGFVTSRIAEASNVKILIPCVKYDACISFDGCRMFISNKTGNRIGYKPGIQLVLGYKYEKYIRNITNYLTKHKDREIIPRDNISAEENTELYDILTGKMLNTVLSVRFSGIGKKLEKRREKFVLCSPEEQCYVLNEILKILHANVLLGDLRLIGESPNAGVMLTNAKFSEIKDVHSIKLINQSVTGLFEQEIDLLK

SEQ ID NO: 19918 - protein, 1345 aa, unidentified
  REGION 1..1345: note = Cas Enzyme sequence
MGNKLRNVDDYYLGLDIGTESVGWAVTDKDYVIPKFKGNAMWGVHLFDEGETSVKRRGFRSARRRTQRKRERLALLEALFDEEICKKDCTFFRRLHESDLWPEDKSGDDKYAVFADENYTDKDFHKEYPTIYHLRYELIKNKEPHDVRLVFLALHHIIKNRGHFLFDSLSSAEDFNSAYETMCSYLSDNEIQLNCSDIEQFKAILKDRRQGKIEKTKNLASLFGITKKSDPVSYAVMAVLSGSTVKMCDLFGDDELKTVEKNNISFASGYEENEEIYASVLGDRFELVNILKAVYDWAVLADILDGKKYISEAKVAVYEKHKNDLKTLKKYVKTYLPEKYNEIFKISDGKKDNYVAYSGHIKESGKTGELKKTCDSENFCAYLKKTLGKNADLSYKEMFDEIENKTFMPKQVTKSNGVVPMQVNEEELKAILDNAKDYLPFLNSCDENGVSVYDKIIKIFEYRIPYYVGPLNTHTEKSWLKRKDGVKIYPWNFDDVVDIDSSAEEFINNLTSKCTYLPECDVIPKCSLLYSKFTVLNEINNLKLNGEDIPVELKQGIYNDLFMTRRKVTVKQIKDYLKARGCYDNNDVLSGIDTAVKSSLKSYFDFKEFESLTFDDKESIIASSVIFGDDKKLLKKRLKKLFSEKLTDEDIKKICKLKYTGWSRLSKEFLCDVEFTYKKTGEVMNVITALWETNYNLMQILYSEDFCCDGDEKKNLNDKLDELSYTGDQHSLRKAVDALYVSPKVKRPILRALLIAKEIEKIQERPPKKIFVEVARGIDNREERHRDSRKSRLMELYKSCKKEAENFCSDFDSLSKKLSNEDESKLRSDKLYFYYIQLGKCMYTGEEISLGELMNGNGRFDIDHIYPQSKIKDDSLTNRVLVNRTVNADKTNVYPIDSAVQAKMSPYWQMLRSSGLISEETYKRLTRKTPLADDELSAFVSRQLTETQQSTKAVAHILEQLYPKPKTEIVYVKAALAHAFRQSNDMLKCREVNDLHHAKDAYLNIVVGNAYNVKVTHNKVNFIKGLQNNDKGYTVNPEKFFSHDIPGAWSVKDSMNTVRRFMNKNNIRYTRFPRKKQGGLFKINPLKKGNGQVPLKASGARSCIKKYGGYDKATSAYFSYVEYTDKNGKAVRQMFPVNLYEVKEYEADMQGFVTSCIDGASNVKILIPCVKYDACISFDGCRMFITKKTGNRIGYKPGMQLVLGYKYEKYIRNITNYLTKHKDREIIPRDNISAEENTELYDILTGKMLNTVLSVKFSGIGKKLEKRREEFVLCSPEKQCYVLNEILKILHANVLSGNLELIGEKPNTGVMLTKAMFSEIKDVHSIKLINQSVTGLFEQEIDLLK

SEQ ID NO: 19919 - protein, 1345 aa, unidentified
  REGION 1..1345: note = Cas Enzyme sequence
MGNKLRNVDDYYLGLDIGTESVGWAVTDKYYVIPKFKGNAMWGVHLFDEGETSVKRRGFRSARRRTQRKRERLALLEALFDEEICKKDCTFFRRLHESDLWPEDKSGDDKYAVFADENYTDKDFHKEYPTIYHLRYELIKNKEPHDVKLVFLALHHIIKNRGHFLFDSLSSAEDFNSAYETMCSYLSDNEIQLNCSDIEQFKAILKDRRQGKIEKTKNLASLFGITKKSDPVSYAVMAVLSGSTVKMCDLFGDDELKTVEKNNISFASGYEENEEIYASVLGDRFELVKILKAVYDWAVLADILDGKKYISEAKVAVYEKHKNDLKTLKKYVKTYLPEKYNEIFKISDGKKDNYVAYSGHIKESGKTGELKKTCNSENFCAYLKKTLGKNADLSYKEMFDEIENKTFMPKQVTKSNGVVPMQVNEEELKAILDNAKDYLSFLNSCDENGVSVYDKIIKIFEYRIPYYVGPLNTHTENSWLKRKDGVKIYPWNFDDVVDIDSSAEKFINNLTSKCTYLPECDVIPKCSLLYSKFTVLNEINNLKLNGEDIPVELKQGIYKDLFMTRRKVTVKQIKDYLKARGCYDNNDVLSGIDTTVKSSLKSYFDFKGFESLTFDDKESIIASSVIFGDDKKLLKKRLKKLFPEKLTDEDIKKICKLKYTGWSRLSKEFLCDVEFTYKKTGEVMNVITALWETNYNLMQILYSEDFCCDGDEKKNLNDKLDELSYTGDQHSLRKAVDALYVSPKVKRPILRALLIAKEIEKIQERPPKKIFVEVARGIDNREERHRDSRKNRLMELYKNCKKEAEKFCPYFDALSKKLSDEDESKLRRDKLYFYYIQLGKCMYTGEEISLGELMNGNGRFDIDHIYPRSKIKDDSLTNKVLVNKTVNNNKTNVYPIDAAIQSKMSPYWQMLRSSGLISEETYKRLTRKTPLTDDELSAFVSRQLTETQQSTKAVAHILEQLYPKPKTEIVYVKAALVHAFRQSNDMLKCREVNDLHHAKDAYLNIVVGNAYNVKVTHNKVNFIKGLQNNDKGYTVNPEKFFSHDIPGAWSVKDSMNTVRRFMNKNNIRYTRFPRKKQGGLFKINPLKKGNGQVPLKASGARSCIEKYGGYDKATSAYFSYVEYTDKKGKAVRQMFPVNLYEVKEYEADMQGFVTSRIAEASNVKILIPCVKYDACISFDGCRMFITKKTGNRIGYKPGMQLVLGYKYEKYIRNIENYLTKHKDREIIPRDNISAEENIELYDILTGKMLNTVLSVKFSGIGKKLEKRREKFVLCSPEEQCCVLNEILKILHANVLSGDLSLIGESPNTGTMKTNAKFSEIKDVHSIKLINQSVTGLFEQEIDLLK

SEQ ID NO: 19920 - protein, 1345 aa, unidentified
  REGION 1..1345: note = Cas Enzyme sequence
MGNKLRNVDDYYLGLDIGTESVGWAVTDKDYVIPKFKGNAMWGVHLFDEGETSVKRRGFRSARRRTQRKRERLALLETLFDEEICKKDCTFFRRLHESDLWPEDKSGDDKYAVFADENYTDKDFHKEYPTIYHLRYELIKNKEPHDVRLVFLALHHIIKNRGHFLFDSLSSAEDFNSAYETMRSYLSDNEIQLNCSDIEQFKAILKDRRQGKIEKTKNLASLFGITKKSDPVSYAVMAVLSGSTVKMCDLFGDDELKTVEKNNISFASGYEENEEIYASVLGDRFELVKILKAVYDWAVLADILDGKKYISEAKVAVYEKHKNDLKTLKKYVKTYLPEKYNEIFKISDGKKDNYVAYSGHIKESGKTGELKKTCNSENFCAYLKKTLGKNADLSYKEMFDEIENKTFMPKQVTKSNGVVPMQVNEEELKAILDNAKDYLPFLNSCDENGVSVYDKIIKIFEYRIPYYVGPLNTHTEKSWLKRKDGVKIYPWNFDDVVDIDSSAEKFINNLTSKCTYLPECDVIPKCSLLYSKFTVLNEINNLKLNGEDIPVELKQGIYNDLFMTRRKVTVKQIKDYLKARGCYDNNDVLSGIDTAVKSSLKSYFDFKDFESLTFDDKESIIASSVIFGDDKKLLKKRLKKLFPEKLTDEDIKKICKLKYTGWSRLSKEFLCDVEFTYKKTGEVMNVITALWETNYNLMQILYSEDFCCDGDEKKNLNDKLDELSYTGDQHSLRKAVDALYVSPKVKRPILRALLIAKEIEKIQERPPKKIFVEVARGIDNREERHRDSRKNRLMELYKNCKKEAEKFCPYFDVLSKKLSDEDESKLRSDKLYFYYIQLGKCMYTGEEISLGELMNGNGRFDIDHIYPRSKIKDDSLTNKVLVNKTVNNNKTNVYPIDAAIQSKMSPYWQMLRSSGLISEETYKRLTRKTPLTDDELSAFVSRQLTETQQSTKAVAHILEQLYPKPKTEIVYVKAALVHAFRQSNDMLKCREVNDLHHAKDAYLNIVVGNAYNVKVTHNKVNFIKGLQNNDKGYTVNPEKFFSHDIPGAWSVNDSMNTVRRFMNKNNIRYTRFPRKKQGGLFKINPLKKGNGQVPLKASGARSCIEKYGGYDKATSAYFSYVEYTDKKGKAVRQMFPVNLYEVKEYEADMQGFVTSHIAEASNVKILIPCVKYDACISFDGCRMFITKKTGNQIGYKPGMQLVLGYKYEKYIRNITNYLTKHKDREIIPRDNISAEENIELYDILTGKMLNTVLSVKFSGIGKKLEKRRGKFVLCSPEEQCYVLNEILKILHANVLLGDLKLIDESGQAGVMVTNAKLSEIKDVHSIKLINQSVTGLFEQEIDLLK

SEQ ID NO: 19921 - protein, 1345 aa, unidentified
  REGION 1..1345: note = Cas Enzyme sequence
MGNKLRNVDDYYLGLDIGTESVGWAVTDKDYVIPKFKGNAMWGVHLFDEGETSVKRRGFRSARRRTQRKRERLALLEALFDEEICKKDCTFFRRLHESDLWPEDKSGDDKYAVFADENYTDKDFHKEYPTIYHLRYELIKNKEPHDVRLVFLALHHIIKNRGHFLFDSLSSAEDFNSAYETMCSYLSDNEIQLNCSDIEQFKAILKDRRQGKIEKTKNLASLFGITKKSDPVSYAVMAVLSGSTVKMCDLFGDDELKTVEKNNISFASGYEENEEIYASVLGDRFELVNILKAVYDWAVLADILDGKKYISEAKVAVYEKHKNDLKTLKKYVKTYLPEKYNEIFKISDGKKDNYVAYSGHIKESGKTGELKKTCDSENFCAYLKKTLGKNADLSYKEMFDEIENKTFMPKQVTKSNGVVPMQVNEEELKAILDNAKDYLPFLNSCDENGVSVYDKIIKIFEYRIPYYVGPLNTHTEKSWLKRKDGVKIYPWNFDDVVDIDSSAEEFINNLTSKCTYLPECDVIPKCSLLYSKFTVLNEINNLKLNGEDVPVELKQGIYNDLFMTRRKVTVKQIKDYLKARGCYDNNDVLSGIDTTVKSSLKSYFDFKDFESLTFDDKESIIASSVIFGDDKKLLKKRLKKLFSEKLTDEDIKKICKLKYTGWSRLSKEFLCDVEFTYKKTGEVMNVITALWETNYNLMQILYSEDFCCDGDEKKNLNDKLDELSYTENQHSLRKAVDALYVSPKVKRPILRALLIAKEIEKIQERPPKKIFVEVARGIDNREERHRDSRKSRLMELYKSCKKEAENFCSDFDSLSKKLSNEDESKLRSDKLYFYYIQLGKCMYTGEEISLGELMNGNGRFDIDHIYPQSKIKDDSLTNRVLVNRTVNADKTNVYPIDSAVQAKMSPYWQMLRSSGLISEETYKRLTRKTPLTDDELSAFVSRQLTETQQSTKAVAHILEQLYPKPKTEIVYVKAALAHAFRQSNDMLKCREVNDLHHAKDAYLNIVVGNAYNVKVTHNKVNFIKGLQNNDKGYTVNPEKFFSHDIPGAWSVKDSMNTVRRFMNKNNIRYTRFPRKKQGGLFKINPLKKGNGQVPLKASGARSCIEKYGGYDKATSAYFSYVEYTDKKGKVVRQMFPVNLYEAKEYEADMQGFVTSRIDGASNVKILIPCVKYDACISFDGCRMFMSNKTGNQIGYKPGIQLVLGYKYEKYIRNIENYLSKHKDREIIPRDNISSEENIELYDVLTGKMLNTVLSVRFSGIGKKLEKRREKFVLCSPEEQCYVLNEILKILHANVLLGDLRLIGESPNAGAMLTNAKFSEIKDVHSIKLINQSVTGLFEQEIDLLK

SEQ ID NO: 19922 - protein, 1345 aa, unidentified
  REGION 1..1345: note = Cas Enzyme sequence
MGNKLRNVDDYYLGLDIGTESVGWAVTDKDYVIPKFKGNAMWGVHLFDEGETSVKRRGFRSARRRTQRKRERLALLEALFDEEICKKDCTFFRRLHESDLWPEDKSGDDKYAVFADENYTDKDFHKEYPTIYHLRYELIKNKEPHDVRLVFLALHHIIKNRGHFLFDSLSSAEDFNSAYETMCSYLSDNEIQLNCSDIEQFKAILKDRRQGKIEKTKNLASLFGITKKSDPVSYAVMAVLSGSTVKMCDLFGDDELKTVEKNNISFASGYEENEEIYASVLGDRFELVNILKAVYDWAVLADILDGKKYISEAKVAVYEKHKNDLKTLKKYVKTYLPEKYNEIFKISDGKKDNYVAYSGHIKESGKTGELKKTCDSENFCAYLKKTLGKNADLSYKEMFDEIENKTFMPKQVTKSNGVVPMQVNEEELKAILDNAKDYLPFLNSCDENGVSVYDKIIKIFEYRIPYYVGPLNTHTEKSWLKRKDGVKIYPWNFDDVVDIDSSAEEFINNLTSKCTYLPECDVIPKCSLLYSKFTVLNEINNLKLNGEDVPVELKQGIYNDLFMTRRKVTVKQIKDYLKARGCYDNNDVLSGIDTTVKSSLKSYFDFKDFESLTFDDKESIIASSVIFGDDKKLLKKRLKKLFSEKLTDEDIKKICKLKYTGWSRLSKEFLCDVEFTYKKTGEVMNVITALWETNYNLMQILYSEDFCCDGDEKKNLNDKLDELSYTGDQHSLRKAVDALYVSPKVKRPILRALLIAKEIEKIQGRPPKKIFVEVARGIDNREERHRDSRKNRLMELYKNCKKEAEKFCPYFDAMSKKLSDEDESKLRSDKLYFYYIQLGKCMYTGEEISLGELMNGNGRFDIDHIYPQSKIKDDSLTNRVLVNRTVNADKTNVYPIDSAVQAKMSPYWQMLRSSGLISEETYKRLTRKTPLTDDELSAFVSRQLTETQQSTKAVAHILEQLYPKPKTEIVYVKAALAHAFRQSNDMLKCREVNDLHHAKDAYLNIVVGNAYNVKVTHNKVNFIKGLQNNDKGYTVNPEKFFSHDIPGAWSVKDSMNTVCRFMNKNNIRYTRFPRKKQGGLFKINPLKKGNGQVPLKASGARSCIKKYGGYDKATSAYFSYVEYTDKKGKAVRQMFPVNLYEVKEYEADMQGFVTSRIDGASNVKILIPCVKYDACISFDGCRMFITKKAGNQIGYKPGIQLVLGYKYEKYIRNITNYLTKHKDREIIPRDNISSEENIELYDVLTGKMLNTVLSVRFSGIGKKLEKRREKFVLCSPEEQCYVLNEILKILHANVLLGDLRLIGESPNAGAMLTNAKFSEIKDVHSIKLINQSVTGLFEQEIDLLK

SEQ ID NO: 19923 - protein, 1345 aa, unidentified
  REGION 1..1345: note = Cas Enzyme sequence
MGNKLRNVDDYYLGLDIGTESVGWAVTDKYYVIPKFKGNAMWGVHLFDEGETSVKRRGFRSARRRTQRKRERLALLEALFDEEICKKDCTFFRRLHESDLWPEDKSGDDKYAVFADENYTDKDFHKEYPTIYHLRYELIKNKEPHDVRLVFLALHHIIKNRGHFLFDSLSSAEDFNSAYETMCSYLSDNEIQLNCSDIEQFKAILKDRRQGKIEKTKNLASLFGITKKSDPVSYAVMAVLSGSTVKMCDLFGDDELKTVEKNNISFASGYEENEEIYASVLGDRFELVKILKAVYDWAVLADILDGKKYISEAKVAVYEKHKNDLKTLKKYVKTYLPEKYNEIFKISDGKKDNYVAYSGHIKESGKTGELKKTCNSENFCAYLKKTLGKNADLSYKEMFDEIENKTFMPKQVTKSNGVVPMQVNEEELKAILDNAKDYLSFLNSCDENGVSVYDKIIKIFEYRIPYYVGPLNTHTENSWLKRKDGVKIYPWNFDDVVDIDSSAEKFINNLTSKCTYLPECDVIPKCSLLYSKFTVLNEINNLKLNGEDIPVELKQGIYKDLFMTRRKVTVKQIKDYLKARGCYDNNDVLSGIDTTVKSSLKSYFDFKGFESLTFDDKESIIASSVIFGDDKKLLKKRLKKLFPEKLTDEDIKKICKLKYTGWSRLSKEFLCDVEFTYKKTGEVMNVITALWETNYNLMQILYSEDFCCDGDEKKNLNDKLDELSYTGDQHSLRKAVDALYVSPKVKRPILRALLIAKEIEKIQERPPKKIFVEVARGIDNREERHRDSRKNRLMELYKNCKKEAEKFCPYFDALSKKLSDEDESKLRRDKLYFYYIQLGKCMYTGEEISLGELMNGNGRFDIDHIYPRSKIKDDSLTNKVLVNKTVNNNKTNVYPIDAAIQSKMSPYWQMLRSSGLISEETYKRLTRKTPLTDDELSAFVSRQLTETQQSTKAVAHILEQLYPKPKTEIVYVKAALVHAFRQSNDMLKCREVNDLHHAKDAYLNIVVGNAYNVKVTHNKVNFIKGLQNNDKGYTVNPEKFFSHDIPGAWSVKDSMNTVRRFMNKNNIRYTRFPRKKQGGLFKINPLKKGNGQVPLKASGARSCIEKYGGYDKATSAYFSYVEYTDKKGKAVRQMFPVNLYEVKEYEADMQGFVTSRIAEASNVKILIPCVKYDACISFDGCRMFITKKTGNQIGYKPGMQLVLGYKYEKYIRNIENYLTKHKDREIIPRDNISAEENIELYDILTGKMLNTVLSVKFSGIGKKLEKRREKFVLCSPEEQCCVLNEILKILHANVLSGDLSLIGESPNTGTMKTNAKFSEIKDVHSIKLINQSVTGLFEQEIDLLK

SEQ ID NO: 19924 - protein, 1345 aa, unidentified
  REGION 1..1345: note = Cas Enzyme sequence
MGNKLRNVDDYYLGLDIGTESVGWAVTDKDYVIPKFKGNAMWGVHLFDEGETSVKRRGFRSARRRTQRKRERLALLEALFDEEICKKDCTFFRRLHESDLWPEDKSGDDKYAVFADENYTDKDFHKEYPTIYHLRYELIKNKEPHDVRLVFLALHHIIKNRGHFLFDSLSSAEDFNSAYETMCSYLSDNEIQLNCSDIEQFKAILKDRRQGKIEKTKNLASLFGITKKSDPVSYAVMAVLSGSTVKMCDLFGDDELKTVEKNNISFASGYEENEEIYASVLGDRFELVNILKAVYDWAVLADILDGKKYISEAKVAVYEKHKNDLKTLKKYVKTYLPEKYNEIFKISDGKKDNYVAYSGHIKESGKTGELKKTCDSENFCAYLKKTLGKNADLSYKEMFDEIENKTFMPKQVTKSNGVVPMQVNEEELKAILDNAKDYLPFLNSCDENGVSVYDKIIKIFEYRIPYYVGPLNTHTEKSWLKRKDGVKIYPWNFDDVVDIDSSAEEFINNLTSKCTYLPECDVIPKCSLLYSKFTVLNEINNLKLNGEDVPVELKQGIYNDLFMTRRKVTVKQIKDYLKARGCYDNNDVLSGIDTTVKSSLKSYFDFKDFESLTFDDKESIIASSVIFGDDKKLLKKRLKKLFSEKLTDEDIKKICKLKYTGWSRLSKEFLCDVEFTYKKTGEVMNVITALWETNYNLMQILYSEDFCCDGDEKKNLNDKLDELSYTGDQHSLRKAVDALYVSPKVKRPILRALLIAKEIEKIQERPPKKIFVEVARGIDNREERHRDSRKNRLMELYKNCKKEAEKFCPYFDAMSKKLSDEDESKLRSDKLYFYYIQLGKCMYTGEEISLGELMNGNGRFDIDHIYPQSKIKDDSLTNRVLVNRTVNADKTNVYPIDSAVQAKMSPYWQMLRSSGLISEETYKRLTRKTPLTDDELSAFVSRQLTETQQSTKAVAHILEQLYPKPKTEIVYVKAALAHAFRQSNDMLKCREVNDLHHAKDAYLNIVVGNAYNVKVTHNKVNFIKGLQNNDKGYTVNPEKFFSHDIPGAWSVKDSMNTVRRFMNKNNIRYTRFPRKKQGGLFKINPLKKGNGQVPLKASGARSCIEKYGGYDKATSAYFSYVEYTDKKGKAVRQMFPVNLYEVKEYEADMQGFVTSRIAEASNVKILIPCVKYDACISFDGCRMFISNKNGNQIGYKPGMQLVLGYKYEKYIRNITNYLTKHKDREIIPRDNISAEENVELYDILTGKMLNTVLSVRFSGIGKKLEKRREKFVLCSPEEQCCVLNEILKILHANVLSGDLSLIEESHNTGTMKTNAKFSEIKDVHSIKLINQSVTGLFEQEIDLLK

SEQ ID NO: 19925 - protein, 1345 aa, unidentified
  REGION 1..1345: note = Cas Enzyme sequence
MGNKLRNVDDYYLGLDIGTESVGWAVTDKDYVIPKFKGNAMWGVHLFDEGETSVKRRGFRSARRRTQRKRERLALLEALFDEEICKKDCTFFRRLHESDLWPEDKSGDDKYAVFADENYTDKDFHKEYPTIYHLRYELIKNKEPHDVRLVFLALHHIIKNRGHFLFDSLSSAEDFNSAYETMRSYLSDNEIQLNCSDIEQFKAILKDRRQGKIEKTKNLASLFGITKKSDPVSYAVMAVLSGSTVKMCDLFGDDELKTVEKNNISFASGYEENEEIYASVLGDRFELVKILKAVYDWAVLADILDGKKYISEAKVTVYEKHKNDLKTLKKYVKTYLPEKYNEIFKISDGKKDNYVAYSGHIKESGKTGELKKTCNSENFCAYLKKTLGKNADLSYKEMFDEIENKTFMPKQVTKSNGVVPMQVNEEELKAILDNAKDYLPFLNSCDENGVPVYDKIIKIFEYRIPYYVGPLNTHTQKSWLKRKDGVKIYPWNFDDVVDIDSSAEKFINNLTSKCTYLPECDVIPKCSLLYSKFTVLNEINNLKLNGEDIPVELKQGIYNDLFMTHRKVTVKQIKDYLKTRGCYDNNDVLSGIDTTVKSSLKSYFDFKDFESLTFDDKESIIASSVIFGDDKKLLKKRLKKLFPEKLTDEDIKKICKLKYTGWSRLSKEFLCDVEFTYKKTGEVMNVITALWETNYNLMQILYSEDFCCDGDEKKNLNDKLDELSYTGDQHSLRKAVDALYVSPKVKRPILRALLIAKEIEKIQERPPKKIFVEVARGIDNREERHRDSRKNRLMELYKSCKKEAEKFCPYFDVLSKKLSDEDESKLRSDKLYFYYIQLGKCMYTGEEISLGELMNGNGRFDIDHIYPRSKIKDDSLTNKVLVNKTVNNNKTNVYPIDAAIQSKMSLYWQMLRSSGLISEETYKRLTRKTPLTDDELSAFVSRQLTETQQSTKAVAHILEQLYPKPKTEIVYVKAALVHAFRQSNDMLKCREVNDLHHAKDAYLNIVVGNAYNVKVTHNKVNFIKGLQNNDKGYTVNPEKFFSHDIPGAWSVKDSMNTVRRFMNKNNIRYTRFPRKKQGGLFKINPLKKENGQVPLKASGARSCIEKYGGYDKATSAYFSYVEYTDKKGKAVRRMFPVNLYEVKEYEADMQGFVTSHIAEASNAKILIPCVKYDACISFDGCRMFITKKAGNQIGYKPGIQLVLGYKYEKYIRNITNYLTKHKDREIIPRDNISAEENTELYDVLTGKMLNTVLSVRFSGIGKKLEKRREKFVLCSPEEQCYVLNEILKILHANVLLGDLRLIGESPNAGAMLTNAKFSEIKDVHSIKLINQSVTGLFEQEIDLLK

SEQ ID NO: 19926 - protein, 1345 aa, unidentified
  REGION 1..1345: note = Cas Enzyme sequence
MGNKLRNVDDYYLGLDIGTESVGWAVTDKDYVIPKFKGNAMWGVHLFDEGETSVKRRGFRSARRRTQRKRERLALLEALFDEEICKKDCTFFRRLHESDLWPEDKSGDDKYAVFADENYTDKDFHKEYPTIYHLRYELIKNKEPHDVRLVFLALHHIIKNRGHFLFDSLSSAEDFNSAYETMCSYLSDNEIQLNCSDIEQFKAILKERRQVKIEKTKNLASLFGITKKSDPVSYAVMAVLSGSTVKMCDLFGDDELKTVEKNNISFASGYEENEEIYASVLGDRFELVNILKAVYDWAVLADILDGKKYISEAKVAVYEKHKNDLKTLKKYVKTYLPEKYNEIFKISDGKKDNYVAYSGHIKESGKTGELKKTCDSENFCAYLKKTLGKNADLSYKEMFDEIENKTFMPKQVTKSNGVVPMQVNEEELKAILDNAKDYLPFLNSCDENGVSVYDKIIKIFEYRIPYYVGPLNTHTEKSWLKRKDGVKIYPWNFDDVVDIDSSAEEFINNLTSKCTYLPECDVIPKCSLLYSKFTVLNEINNLKLNGEDVPVELKQGIYNDLFMTRRKVTVKQIKDYLKARGCYDNNDVLSGIDTTVKSSLKSYFDFKDFESLTFVDKESIIASSVIFGDDKKLLKKRLKKLFSEKLTDEDIKKICKLKYTGWSRLSKEFLCDVEFTYKKTGEDMNVITALWETNYNLMQILYSEDFCCDGDEKKNLNDKLDELSYTGDQHSLRKAVDALYVSPKVKRPILRALLIAKEIEKIQERPPKKIFVEVARGIDNREERHRDSRKNRLMELYKNCKKEAEKFCPYFDAMSKKLSDEDESKLRSDKLYFYYIQLGKCMYTGEEISLGELMNGNGRFDIDHIYPQSKIKDDSLTNRVLVNRTVNADKTNVYPIDSAVQAKMSPYWQMLRSSGLISEETYKRLTRKTPLTDDELSAFVSRQLTETQQSTKAVAHILEQLYPKPKTEIVYVKAALAHAFRQSNDMLKCREVNDLHHAKDAYLNIVVGNAYNVKVTHNKVNFIKGLQNNDKGYTVNPEKFFSHDIPGAWSVKDSMNTVCRFMNKNNIRYTRFPRKKQGGLFKINPLKKGNGQVPLKASGARSCIKKYGGYDKATSAYFSYVEYTDKKGKAVRQMFPVNLYEVKEYEADMQGFVTSRIDGASNVKILIPCVKYDACISFDGCRMFITKKAGNQIGYKPGIQLVLGYKYEKYIRNITNYLTKHKDREIIPRDNISSEENIELYDVLTGKMLNTVLSVRFSGIGKKLEKRREKFVLCSPEEQCYVLNEILKILHANVLLGDLRLIGESPNAGAMLTNAKFSEIKDVHSIKLINQSVTGLFEQEIDLLK

SEQ ID NO: 19927 - protein, 1345 aa, unidentified
  REGION 1..1345: note = Cas Enzyme sequence
MGNKLRNVDDYYLGLDIGTESVGWAVTDKYYVIPKFKGNAMWGVHLFDEGETSVKRRGFRSARRRTQRKRERLALLEALFDEEICKKDCTFFRRLHESDLWPEDKSGDDKYAVFADENYTDKDFHKEYPTIYHLRYELIKNKEPHDVRLVFLALHHIIKNRGHFLFDSLSSAEDFNSAYETMRSYLSDNEIQLNCSDIEQFKAILKDRRQGKIEKTKNLASLFGITKKSDPVSYAVMAVLSGSTVKMCDLFGDDELKTVEKNNISFASGYEENEEIYASVLGDRFELVKILKAVYDWAVLADILDGKKYISEAKVAVYEKHKNDLKTLKKYVKTYLPEKYNEIFKISDGKKDNYVAYSGHIKEGGKTGELKKTCNSENFCAYLKKTLGSCADLSYKEMFDEIENKTFMPKQVTKSNGVVPMQVNEEELKAILDNAKDYLTFLKSCDENGVSVYDKIIKIFEYRIPYYVGPLNTHTQKSWLKRKDGVKIYPWNFDDVVDVDSSAEKFINNLTSKCTYLPECDVIPKCSLLYSKFTVLNEINNLKLNGEDIPVELKQGIYNDLFMTRRKVTVKQIKDYLKARGCYNNNDVLSGIDTTVKSSLKSYFDFKDFESLTFDDKESIIASSVIFGDDKKLLKKRLKKLFPEKLTDEDIKKICKLKYTGWSRLSKEFLCDVEFTYKKTGEVMNVITALWETNYNLMQILYSEDFCCDGDEKKNLNDKLDELSYTGDQHSLRKAVDALYVSPKVKRPILRALLIAKEIEKIQGRPPKKIFVEVARGIDNREERHRDSRKNRLMELYKNCKKEAEKFCPYFDALSKKLSDEDESKLRSDKLYFYYIQLGKCMYTGEEISLGELMNGNGRFDIDHIYPRSKIKDDSLTNKVLVNKTVNNNKTNVYPIDAAIQSKMSPYWQMLRSSGLISEETYKRLTRKTPLTDDELSAFVSRQLTETQQSTKAVAHILEQLYPKPKTEIVYVKAALVHAFRQSNDMLKCREVNDLHHAKDAYLNIVVGNAYNVKVTHNKVNFIKGLQNNDKGYTVNPEKFFSHDIPGAWSVKDSMNTVRRFMNKNNIRYTRFPRKKQGGLFKINPLKKGNGQVPLKASGARSCIEKYGGYDKATSAYFSYVEYTDKKGKVVRQMFPVNLYEVKEYEADMQGFVTSRIAEASNVNILIPCVKYDACISFDGCRMYVSNKTENRIGYKPGIQLVLGYKYEKYIRNITNYLTKHKDREIIPRDNISAEENTELYDVLTGKMLNTVLSVRFSGIGKKLEKRREKFVLCSPEEQCCVLNEILKILHANVLSGDLSLIGESPNTGTMKINAKLSEIKDVHSIKLINQSVTGLFEQEIDLLK

SEQ ID NO: 19928 - protein, 1345 aa, unidentified
  REGION 1..1345: note = Cas Enzyme sequence
MGNKLRNVDDYYLGLDIGTESVGWAVTDKDYVIPKFKGNAMWGVHLFDEGETSVKRRGFRSARRRTQRKRERLALLEALFDEEICKKDCTFFKRLHESNLWPEDKSGDDKYAVFADENYTDKDFHKEYPTIYHLRYELIKNKEPHDVRLVFLALHHIIKNRGHFLFDSLSSAEDFNSAYETMCSYLSDNEIQLNCSDIEQFKAILKDRRQGKIEKTKNLASLFGITKKSDPVSYAVMAVLSGSTVKMCDLFGDDELKTVEKNNISFASGYEENEEIYASVLGDRFELVKILKAVYDWAVLADILDGKKYISEAKVAVYEKHKNDLKTLKKYVKTYLPEKYNEIFKISDGKKDNYVAYSGHIKESGKTGELKKTCDSENFCAYLKKTLGKNADLSYKEMFDEIENKTFMPKQVTKSNGVVPMQVNEEELKAILDNAKDYLPFLNSCDENGVSVYDKIIKIFEYRIPYYVGPLNTHTEKSWLKRKDGVKIYPWNFDDVVDIDSSAEEFINNLTSKCTYLPECDVIPKCSLLYSKFTVLNEINNLKLNGEDIPVELKQGIYNDLFMTRRKVTVKQIKDYLKARDCYDNNDVLSGIDTAVKSSLKSYFDFKEFESLTFDDKESIIASSVIFGDDKKLLKKRLKKLFSEKLTDEDIKKICKLKYTGWSRLSKEFLCDVEFTYKKTGEVMNVITALWETNYNLMQILYSEDFCCDGDEKKNLNDKLDELSYTENQHSLRKAVDALYVSPKVKRPILRALLIAKEIEKIQERPPKKIFVEVARGIDNREERHRDSRKSRLMELYKNCKKEAEKFCPYFDALSKKLSDEDESKLRSDKLYFYYIQLGKCMYTGEEISLGELMNGNGRFDIDHIYPQSKIKDDSLTNRVLVNRTVNADKTNVYPIDSAVQAKMSPYWRMLRSSGLISEETYKRLTRKTPLTDDELSAFVSRQLTETQQSTKAVAHILEQLYPKPKTEIVYVKAALAHAFRQSNDMLKCREVNDLHHAKDAYLNIVVGNAYNVKVTHNKVNFIKGLQNNDKGYTVNPEKFFSHDIPGAWSVKDSMNTVRRFMNKNNIRYTRFPRKKQGGLFKINPLKKGNGQVPLKASGARSCIEKYGGYDKATFAYFSYVEYTDKKGKAVRQMFPVNLYEVKEYEADMQGFVTSRIAEASNVKILIPCVKYDACISFDGCRMFMSNKTGNQIGYKPGIQLVLGYKYEKYIRNITNYLTKHKDREIIPRDNISSEENIELYDALTGKMLNTVLSVRFSGIGKKLEKRREKFVLCSPEEQCYVLNEILKILHANVLSGDLKLIDESGQAGVMVTNVKFSEIKGIHSIKLINQSVTGLFEQEIDLLK

SEQ ID NO: 19929 - protein, 1345 aa, unidentified
  REGION 1..1345: note = Cas Enzyme sequence
MGNKLRNVDDYYLGLDIGTESVGWAVTDKDYVIPKFKGNAMWGVHLFDEGETSVKRRGFRSARRRTQRKRERLALLEALFDEEICKKDCTFFRRLHESDLWPEDKSGDDKYAVFADENYTDKDFHKEYPTIYHLRYELIKNKEPHDVRLVFLALHHIIKNRGHFLFDSLSSAEDFNSAYETMCSYLSDNEIQLNCSDIEQFKAILKDRRQGKIEKTKNLASLFGITKKSDPVSYAVMAVLSGSTVKMCDLFGDDELKTVEKNNISFASGYEENEEIYASVLGDRFELVKILKAVYDWAVLADILDGKKYISEAKVAVYEKHKNDLKTLKKYVKTYLPEKYNEIFKISDGKKDNYVAYSGHIKESGKTGELKKTCNSENFCAYLKKTLGKNADLSYKEMFDEIENKTFMPKQVTKSNGVVPMQVNEEELKAILDNAKDYLPFLNSCDENGVSVYDKIIKIFEYRIPYYVGPLNTHTENSWLKRKDGVKIYPWNFDDVVDIDSSAEKFINNLTSKCTYLPECDVIPKCSLLYSKFTVLNEINNLKLNGEDIPVELKQGIYKDLFMTRRKVTVKQIKDYLKARGCYDNNDVLSGIDTAVKSSLKSYFDFKDFESLTFDDKESIIASSVIFGDDKKLLKKRLKKLFPEKLTDEDIKKICKLKYTGWSRLSKEFLCDVEFTYKKTGEVMNVITALWETNYNLMQILYSEDFCCDGDEKKNLNDKLDELSYTGDQHSLRKAVDALYVSPKVKRPILRALLIAKEIEKIQERPPKKIFVEVARGIDNREERHRDSRKNRLMELYKSCKKEAEKFCPYFDVLSKKLSDEDESKLRSDKLYFYYIQLGKCMYTGEEISLGELMNGNGRFDIDHIYPRSKIKDDSLTNKVLVNKTVNNNKTNVYPIDAAIQSKMSPYWQMLRSSGLISEETYKRLTRKTPLTDDELSAFVSRQLTETQQSTKAVAHILEQLYPKPKTEIVYVKAALAHAFRQSNDMLKCREVNDLHHAKDAYLNIVVGNAYNVKVTHNKVNFIKGLQNNDKGYTVNPEKFFCHDIPGAWSVKDSMNTVRRFMNKNNIRYTRFPRKKQGGLFKINPLKKGSGQIPLKASGARSCIEKYGGYDKATSAYFSYVEYTDKKGKAVRQMFPVNLYEVKEYEADMQGFVTSRIAEASNVKILIPCVKYDACISFDGCRMYVSNKTGNQIGYKPGIQLVLGYKYEKYIRNITNYLTKHKDREIIQRDNISSEENIELYDVLTGKMLNTVLSVRFSGIGKKLEKRREKFVLCSPEEQCYVLNEILKILHANVLSGDLKLIDESGQAGVMVTNVKFSEIKGIHSIKLINQSVTGLFEQEIDLLK

SEQ ID NO: 19930 - protein, 1341 aa, unidentified
  REGION 1..1341: note = Cas Enzyme sequence
MKQSYSIGLDIGTGSVGWAVINEDFSLRIHKHQNMWGANLFNEAQKAELRRSFRSSRRRLARRKRRITLLQQIFNNEICNVDPNFYLRLTESMLYIDDKSSSLDLDANILFSDHTFTDKTYREKYPTIYHLRSELFHNPEKQDIRLIYLALHHIIKYRGNFLIEGGVDGVISSFDSQNLQKFMEFIGAGDKEAKQIKSILLNQSQTRSARKSNIIQLLQPSADNKSIISEAIGAAIGLKWNAEKLFDDKSLEIKGEFSDKNYEDQRDDIAAAIGDDRYELIETLESVYQWTIFSQFIRKNSCLSDIMVEKYDAYRQDLSDLKGLFRDFLSEKEYKSFFHGDASKFDLYNKHKIDTDDLYKSIKKHLGESAKDDAQYQRFEKRAELGEFLSRQRIRDNGAIPHQIHQYELEKIIDNQAAHYSFLAQNRDKIISIFTFKLPYYIGPLKTGGDFAWSIKKKDGVIYPWNFNEIIDDEASAEEFIERMRNKCTYLPDKDVLPKNSLLYQEYECRNELKNVTVNGKRLSPDIQNRIIDELFTKEYSVNYKKLAKYLYDNQIYDTSSLVISGTADDKSFMSSRKSYIDFTNKIGIEITPENKAAIEEVIKWITLFEDKKILAKKLQKYSDIFSKDQIDSILKLKYTGWGRLSSELLDGIAAHTRYGKMTVIEVMRQCSDNFMQIIQSDRYEFKKIIEDALLKDATPEITYDDIKNLAASPGIKRALWRSIRIIDEIVDTIGYGPKLISIEMARSEEDKVRTKNRYSQLEKMYKELYGREYNKSDIKPQLENYKDCLDKKKYYLYFLQNGKSAYSGKKLDIENGLKDCEIDHILPRSLTKDDSLDNTVLVLREENQLKLDDYPISPDVQKKMLPIWMSLKNTKFMSQLKFQRLTSQKQLSDDQIYGFINRQLVETRQITKHLARMLTEKYKDSSTEVFTIRAGMSSEYRRIHDLPKCREVNNLHHAKDAYLAATLAQYVKVRYPKLDKEFIYGEYKKFKSDKKKNNREYGSFILSSMKYDFTNTSTGEIVWQGKSSCEIIDKTMKYNDCLITKKTEIGDNQFYDQTVYSKNSGKKMIARKAHLPVNRYGGYSGKKAAYFAVINYLKPSGKKESPVTEIVSIPAQIYTLEKTHPGSIDKYIQDNYKDAVVLLPKVPINQKIEYDGNEQFIVGSSEVTNAKQLKLPYDIEYAIAVALKRGVPRVTISEEQADEDDKLRDKRNRQIEKRNKVIDGINRFWKVYSDKLANQYQQFGEAGNNARNAAPEYDKLSIDDKIEVIKLVLVATSAGSGRVDMKGSEKNPKFPELGLPNSFGRMSGKTINPLNVTFVYESITGLHCRKLNGKSLGHKR

SEQ ID NO: 19931 - protein, 1341 aa, unidentified
  REGION 1..1341: note = Cas Enzyme sequence
MKQLYSIGLDIGTGSVGWAVINEDFSLRRHKHQNMWGANLFNEAQKAELRRSFRSSRRRLARRKRRITLLQQIFNNEICNVDPNFYLRLTESMLYIDDKSSSLDLDANILFSDHTFTDKTYREKYPTIYHLRSELFHNPEKQDIRLIYLALHHIIKYRGNFLIEGGVDGVISSFDSQNLQKFMEFIGAGDKEAKQIKSILLNQSQTRSARKSNIIQLLQPSADNKSIISEAVGAAIGLKWNAEKLFDDKSLEIKGEFSDKNYEDQRDDIAAAIGDDRYELVETLESVYQWTIFSQFIRKDSCLSDIMVEKYDAYRQDLSDLKGLFRDFLSKKEYKSFFHGDASKFDLYNKHKIDADDLYKSIKKHLGESAKDDARYQRFEKRAELGEFLSRQRIRDNGAIPHQIHQYELEKIIDSQAAHYPFLAQNRDKIISIFTFKLPYYIGPLKTGGDFAWSIKKKDGVIYPWNFNEIIDDEASAEKFIERMRNKCTYLPDKDVLPKNSLLYQEYECRNELKNVTVNGKRLSPDIQNRIIDELFTKEYSVNYKKLAKYLYDNQIYDTSSLVISGTADDKSFMSSRKSYIDFTNKIGIEITPENKAAIEEVIKWITLFEDKKILAKKLQKYSDIFSKDQIDSILKLKYTGWGRLSSELLDGITAHTRYGKMTVIEVMRQCSDNFMQIIQSDRYEFKKIIEDALLEDANPEITYDDIKNLAASPGIKRALWRSIRIIDEIVDTIGYGPKLISIEMARSEEDKVRTKNRYSQLEKMYKELYGKEYNKSDIKPQLENYKDCLDKKKYYLYFLQNGKSAYSGKKLDIENGLKDCEIDHILPRSLTKDDSLDNTVLVLREENQLKLDDYPISPDVQKKMLPIWMSLKNTKFMSQLKFQRLTSQKQLSDDQIYGFINRQLVETRQITKHLARMLTEKYKNSSTEVFTIRAGMSSEYRRIHDLPKCREVNDLHHAKDAYLAATLAQYVKVRYPKLDKEFVYGEYKKFKSDKKKNNREYGSFILSSMKYDFTNTNTGEIVWQGKSSCEIIDKTMKYNDCLITKKTEIGDNQFYDQTVYSKNSGKKMIARKAHLPVNRYGGYSGKKAAYFAVINYLKPSGKKESPVTEIISIPTQIYTLEKTHPGSIDKYIQDNYKDAVVLLPKVPINQKIEYDGNEQFIVGSSEVTNAKQLKLPYDIEYAIAVALKRGVPRVTISEEQADEDDKLRDKRNRQIEKRNKVIDGINRFWKVYSDKLANQYQQFGEAGNNARNAAPEYDKLSIDDKIEVIKLVLVATSAGSGRVDMKGSEKNPKFPELGLPNSFGRMSGKTINPLNVTFVYESITGLHCRKINGKSLGHKR

SEQ ID NO: 19932 - protein, 1341 aa, unidentified
  REGION 1..1341: note = Cas Enzyme sequence
MKQSYSIGLDIGTGSVGWAVINEDFSLRRHKHQNMWGANLFNEAQKAELRRSFRSSRRRLARRKRRITLLQQIFNNEICNVDPNFYLRLTESMLYIDDKSSSLDLDANILFSDHTFTDKTYREKYPTIYHLRSELFHNPEKQDIRLIYLALHHIIKYRGNFLIEGGVDGVISSFDSQNLQKFMEFIGAGDKEAKQIKSILLNQSQTRSARKSNIIQLLQPSADNKNIISEAIGAAIGLKWNAEKLFDDKSLEIKGEFSDKNYEDQRDDIAAAIGDDRYELVETLESVYQWTIFSQFIRKDSCLSDIMIEKYDAYRQDLSDLKGLFRDFLSEKEYKSFFHGDASKFDLYNKHKIDTDDLYKSIKKHLGESAKDDVRYQRFEKRAELGEFLSRQRIRDNGAIPHQIHQYELEKIIDNQAAHYSFLAQNRDKIISIFTFKLPYYIGPLKTGGDFAWSIKKKDGVIYPWNFNEIIDDEASAEEFIERMRNKCTYLPDKDVLPKNSLLYQEYECRNELKNVTVNGKRLSPDIQNRIIDELFTKEYSVNYKKLAKYLYDNQIYDTSSLVISGTADDKSFMSSRKSYIDFTNKIGIEITPENKAAIEEVIKWITLFEDKKILSKKLQKYSDIFSKDQIDSILKLKYTGWGRLSSELLDGIAAHTRYGKMTVIEVMRQCSDNFMQIIQSDRYEFKKIIEDALLKDATPEITYDDIKNLAASPGIKRALWRSIRIIDEIVDTIGYGPKLISIEMARSEEDKIRTKNRYSQLEKMYKELYGKEYNKSDIKPQLENYKDCLDKKKYYLYFLQNGKSAYSGKKLDLENGLKDCEIDHILPRSLTKDDSLDNTVLVLREENQLKLDDYPISPDVQKKMLPIWMSLKNAKFMSQLKFQRLTSQKQLSDDQIYGFINRQLVETRQITKHLARMLTEKYKDSSTEVFTIRAGMSSEYRRIHDLPKCREVNDLHHAKDAYLAATLAQYVKVRYPKLDKEFIYGEYKKFKSDKKKNNREYGSFILSSMKYDFTDTNTGEIVWQGKSSCEIIDKTMKYNDCLITRKTEIGDNQFYDQTVYSKNSGKKMIARKAHLPVNRYGGYSGKKAAYFAVINYLKQSNKKESPATEIISIPTQIYTLEKTHPGSIDKYIRDNYKDAVVLLPKVPINQKIEYDGNEQFIVGSSEVTNAKQLKLPYDIEYAIAIALKRGIPRVTISEEQADEDDKLRNKRNRQIEKRAKVIDGINRFWKVYSDKLANQYQQFGEAGNNARNAAPEYDKLSIDDKIEVIKLVLVATSAGSGRVDMKGSEKNPKFPELGLPNSFGRMSGKTINPLNVTFVYESITGLHCRKINGKSLGHKR

SEQ ID NO: 19933 - protein, 1334 aa, unidentified
  REGION 1..1334: note = Cas Enzyme sequence
MKQSYSIGLDIGTGSVGWAVINEDFSLRRHKHQNMWGANLFNEAQKAELRRSFRSSRRRLARRKRRITLLQQIFNNEICNVDPNFYLRLTESMLYIDDKSSSLDLDANILFSDHAFTDKTYREKYPTIYHLRSELFHSPEKQDIRLIYLALHHIIKYRGNFLIEGGVDGVISSFDSQNLQKFMEFIGAGDKEAKQIKSILLNQSQTRSARKLNIIQLLQPSTDNKSIISEAVGAAIGLKWNAEKLFDDKSLEIKGEFSDKNYEDQRDDIAAAIGDDRYELIETLESVYQWTIFSQFIRKDSCLSDIMVEKYNAYRQDLSDLKWLFRDFLSEKEYKSFFHGDASKFDLYNKHKIDTDDLYKSIKKHLGESAKDDVRYQRFEKRAELGEFLSRQRIRDNGAIPHQIHQYELEKIIDNQAAHYPFLTQNRDKIISIFTFKLPYYIGPLKTGGDFAWSIKKKDGVIYPWNFNEIIDDEASAEKFIERMRNKCTYLPDKDILPKNSLLYQEYECRNELKNVTVNGKRLSPDIQNRIIDELFTKEYSINYKKLAKYLYDNQIYDTSSLVISGTADDKSFMSSRKSYIDFTNKIGIEITPENKAAIEEVIKWITLFEDKKILSKKLQKYSDIFSKDQIDSILKLKYTGWGRLSGELLNGIAAHTRYGKMTVIEVMRQCSDNFMQIIQSDRYEFKKIIEDALLKDTTPEITYDDIKNLAASPGIKRALWRSIRIIDEIVDTIGYGPKLISIEMARSEEDKVRTKKRYSQLEKMYKELYGKEYNKSDIKPQLENYKDCLDKKKYYLYFLQNGKSAYSGKKLDIENGLKDCEIDHILPRSLTKDDSLDNTVLVLREENQLKLDDYPISPDVQKKMLPIWMSLKNAKFMSQLKFQRLTSQKQLSDDQIYGFINRQLVETRQITKHLARMLTEKYKNSSTEVFTIRAGMSSEYRRIHDLPKCREVNDLHHAKDAYLAATLAQYVKVRYPKLDKEFIYGEYKKFKSDKKKNNREYGSFILSSMKYDFTNTNTGEIVWQGKSSCEIIDKTMKYNDCLITRKTEIGDNQFYRQTIYSKKSTDPKPTIPIKANLPTNRYGGYSGVQAAYFAVVNYLKKESLATEIISVPAQIYTLEKTHPGSIDKYIQDNYKDAVVLLPKIPINQKIEYDGNEQFIVGSSEVTNAKQLKLPYDIEYAIAIALKHGVPRVTISEEQADEDDKLRDKRNRQIEKRAKVIDGINRFWKVYSDKLANQYQQFGKAGDNARNAAPEYDKLSIDDKIRAIGMVLKATHAGSSRVNMSKEFPQLKLSSRFGRMDNKTLGPTKLTFVYESITGLHRRKLNGKSLGHKR

SEQ ID NO: 19934 - protein, 1335 aa, unidentified
  REGION 1..1335: note = Cas Enzyme sequence
MKQSYSIGLDIGTGSVGWAVINEDFSLRRHKHQNMWGVNLFNEAQKAELRRSFRSSRRRLARRKRRITLLQQIFNNEICNVDPNFYLRLTESMLYIDDKSSSLDLDANILFSDHTFTDKTYREKYPTIYHLRSELFHNPEKQDIRLIYLVLHHIIKYRGNFLIEGGVDGVISSFDSQNLQKFMEFIGAGDKEAKQIKSILLNQSQTRSARKSNIIQLLQPSADNKSIISEAVGAAIGLKWNAEKLFDDKSLEIKGEFSDKNYEDQRDDIATAIGDDRYDLIETLESVYQWTIFSQFIRKDSCLSDIMVEKYNAYRQDLSDLKGLFRDFLSEKEYKSFFHGDTAKFEQYNAHKIDAKDLSDSIKKLLSESAKDDARYQRFEKRSELGEFLSRQRIRDNGAIPHQIHQYELEKIIDNQATHYPFLAQNRDKIISIFTFKLPYYIGPLKTGGDFAWSIKKKDGVIYPWNFNEIIDDEASAEKFIERMRNKCTYLPDKDVLPKNSLLYQEYECRNELKNVTVNGKRLSPDIQNRIIDELFTKEYSVNYKKLAKYLYDNQIYDTSSLVITGTADDKSFMSSRKSYIDFTKKIGIEITPENKAAIEEVIKWITLFEDKKILSKKLQKYSDIFSKDQIDSILKLKYTGWGRLSGELLDGITAHTRYGKMTVIEVMRQCSDNFMQIIQSDRYEFKKIIEDALLKDATPEITYDDIKNLAASPGIKRALWRSVRIIDEIVDTIGYGPKLISIEMARSEEDKVRTKNRYSQLEKMYKELYGKEYNKSDIKPQLENYKDCLDKKKYYLYFLQNGKSAYSGKKLDIENGLKDCEIDHILPRSLTKDDSLDNTVLVLREENQLKLDDYPISPDVQKKMLPIWMSLKNAKFMSQLKFQRLTSQKQLSDDQIYGFINRQLVETRQITKHLARMLTEKYKDSSTEVFTIRAGMSSEYRRIHDLPKCREVNDLHHAKDAYLAATLAQYVKVRYPKLDKEFIYGEYKKFKSDKKNNREYGSFILSSMKYDFTNTNTGEIVWQGKSSCEIIDKTMKYNDCLITRKTEIGDNQFYDQTVYSKNSGKKMIARKAHLPVNRYGGYSGKKAAYFAVINYLKQSNKKESPATEIISIPTQIYTLEKTHPGSIDKYIQNNYKDAVVLLSKVPINQKIEYDGNEQFIVGSSEVTNAKQLKLPYDIEYAIAIALKRGVPRVTISEEQADQDDKLRDKRNRQIEKRDKVIDGINRFWKVYSDKLANQYQQFKKAGDNARNAAPEYDKLSIDDKIRAIGMVLKATHAGSSRVNMSKEFPQLKLSSRFGRMDSETLDPAKLTFVYESITGLHRRKLNGKSLGHKR

SEQ ID NO: 19935 - protein, 1341 aa, unidentified
  REGION 1..1341: note = Cas Enzyme sequence
MKQSYSIGLDIGTGSVGWAVINEDFSLRRHKHQNMWGANLFNEAQKAELRRSFRSSRRRLARRKRRITLLQQIFNNEICNVDPNFYLRLTESMLYIDDKSSSLDLDANILFSDHTFTDKTYREKYPTIYHLRSELFHNPEKQDIRLIYLALHHIIKYRGNFLIEGGVDGVISSFDSQNLQKFMEFIGAGDKEAKQIKSILLNQSQTRSARKSSIIQLLQPSADSKNIISEAVGAAIGLKWNAEKLFDDKSLEIKGEFSDKNYEDQRDDIAAAIGDDRYELIETLESVYQWTIFSQFIRKDSCLSDIMVEKYDAYRQDLSDLKGLFRDFLSKKEYKSFFHGDASKFDLYNRHKIDADDLYKSIKKHLGESAKDDARYQRFEKRAELGEFLSRQRIRDNGAIPHQIHQYELEKIIDNQSAHYPFLAQNRDKIISIFTFKLPYYIGPLKTGGDFAWSIKKKDGVIYPWNFNEIIDDEASAEKFIERMRNKCTYLPDKDVLPKNSLLYQEYECRNELKNVTVNGKRLSPDIQNRIIDELFTKEYSVNYKKLAKYLYDNQIYDTSSLVISGTADDKSFMSSRKSYIDFTKKIGIEITPENKAAIEEITKWITLFEDKKILSKKLQKYSDIFSKDQIDSILKLKYTGWGRLSSELLDGIAAHTRYGKMTVIEVMRQCSDNFMQIIQSDRYEFKKIIEDALLKDTTPEITYDDIKNLAASPGIKRALWRSIRIIDEIVDTIGYSPKLISIEMARGEEEKVRTKNRYSQLEKMYKELYGKEYNKSDIKPQLENYKDCLDKKKYYLYFLQNGKSAYSGKKLDIENGLKDCEIDHILPRSLTKDDSLDNTVLVLREENQLKLDDYPISPDVQKKMLPIWMSLKNAKFMSQLKFQRLTSQKQLSDDQIYGFINRQLVETRQISKHLARMLTEKYKDSSTEVFTIRAGMSSEYRRIHDLPKCREVNDLHHAKDAYLAATLAQYVKVRYPKLDKEFIYGEYKKFKSDKKKNNREYGSFILSSMKYDFTNTNTGEIVWQGKSSCEVIDKTMKYNDCLITRKTEIGDNQFYDQTVYSKNSGKKMIARKAHLPVNRYGGYSGKKAAYFVMINYFKQSNKKESPVTEIISIPTQIYTLEKTHPGSIDKYIQDNYKDAVVLLPKVPINQKIEYDGNEQFIVGSSEVTNAKQLKLPYDIEYAIAIALKRGIPRVTISEEQADEDDKLRDKRNRQIEKRAKVIDGINRFWKVYSDKLANQYQQFGKAGDNARNAAPEYDKLSIDDKIEVIKLVLVATSAGSGRVDMKGSEKNPKFPELGLPNSFGRMSGKAIDPLNVTFVYESITGLHCRKLNGKSLGHKR

SEQ ID NO: 19936 - protein, 1341 aa, unidentified
  REGION 1..1341: note = Cas Enzyme sequence
MKQSYSIGLDIGTGSVGWAVINEDFSLRRHKHQNMWGANLFNEAQKAELRRSFRSSRRRLARRKRRITLLQQIFNNEICNVDPNFYLRLTESMLYIDDKSSSLDLDANILFSDHTFTDKTYREKYPTIYHLRSELFHNPEKQDIRLIYLALHHIIKYRGNFLIEGGVDGVISSFDSQNLQKFMEFIGAGDKEAKQIKSILLNQSQTRSARKSNIIQLLQPSADNKSIISEAVGAAIGLKWNAEKLFDDKSLEIKGEFSDKNYEDQRDDIAAAIGDDRYELIETLESVYQWTIFSQFIRKDSCLSDIMVEKYNAYRQDLSDLKGLFRDFLSEKEYKSFFHGDASKFDLYNKHKIDADDLYKSIKKHLGELAKDDVRYQRFEKRAELGEFLSRQRIRDNGAIPHQIHQYELEKIIDNQAAHYSFLAQNRDKIISIFTFKLPYYIGPLKTGGDFAWSIKKKDGVIYPWNFNEIIDDEASAEEFIERMRNKCTYLPDKDVLPKNSLLYQEYECRNELKNVTVNGKRLSPDIQNRIIDELFTKEYFINYKKLAKYLYDNQIYDTSSLVISGTADDKSFMSSRKSHIDFTKKIGIEITQENKAAIEEIIKWITLFEDKKILSKKLQKYSDIFSKDQIDSILKLKYTGWGRLSSELLDGITAHTRYGKMTVIEVMRQCSDNFMQIIQSDRYEFKKIIEDALLKDATPEITYDDIKNLAASPGIKRALWRSIRIIDEIVDTIGYGPKLISIEMARSEEDKVRTKKRYSQLEKMYKELYGREYNKSDIKPQLENYKDCLDKKKYYLYFLQNGKSAYSGKKLDIENGLKDCEIDHILPRSLTKDDSLDNTVLVLREENQLKLDDYPISPDVQKKMLPIWMSLKNAKFMSQLKFQRLTSQKQLSDDQIYGFINRQLVETRQITKHLARMLTEKYKNSSTEVFTIRAGMSSEYRRIHDLPKCREVNDLHHAKDAYLAATLAQYVKVRYPKLDKEFIYGEYKKFKSDKKKNNREYGSFILSSMKYDFTNTNTGEIVWQSKSSCEIINKTMKYNDCLITRKTEIGDNQFYDQTVYGKNSGKKMIARKAHLPVNRYGGYSGRKAAYFAVINYLKQSNKKESPATEIISIPTQIYTLEKTHPGSIDKYIQDNYKDAVVLLSKVPINQKIEYDGNEQFIVGGSEVTNAKQLKLPYDVEYAIAIALKRGVPRVTISEEQADEDDKLRDKRNRQIEKRNKVIDGINRFWKVYSDKLANQYQQFGEAGNNARNAAPEYDKLSIDDKIEVIKLVLVATSAGSGRVDMKGSEKNPKFPELGLPNSFGRMSGKTINPLNVTFVYESITGLHCRKINGKSLGHKR

SEQ ID NO: 19937 - protein, 1340 aa, unidentified
  REGION 1..1340: note = Cas Enzyme sequence
MKQSYSIGLDIGTGSVGWAVINEDFSLRRHKHQNMWGANLFNEAQKAELRRSFRSSRRRLARRKRRITLLQQIFNNEICNVDPNFYLRLTESMLYIDDKSSSLDLDANILFSDHAFTDKTYREKYPTIYHLRSELFHNPEKQDIRLIYLALHHIIKYRGNFLIEGGVDGVISSFDSQNLQKFMEFIGAGDKEAKQIKSILLNQSQTRSARKLNIIQLLQPSTDNKSIISEAVGAAIGLKWNAEKLFDDKSLEIKGEFSDKNYEDQRDDIAAAIGDDRYELIETLESVYQWTIFSQFIRKDSCLSDIMVEKYNAYRQDLSDLKWLFRDFLSEKEYKSFFHGDASKFDLYNKHKIDTDDLYKSIKKHLGESAKDDVRYQRFEKRAELGEFLSRQRIRDNGAIPHQIHQYELEKIIDNQAAHYPFLTQNRDKIISIFTFKLPYYIGPLKTGGDFAWSIKKKDGVIYPWNFNEIIDDEASAEKFIERMRNKCTYLPDKDILPKNSLLYQEYECRNELKNVTVNGKRLSPDIQNRIIDELFTKEYSITYKKLAKYLYDNQIYDTSSLVISGTADDKSFVSSRKSYIDFTNKIGIEITPENKAAIEEIIKWITLFEDKKILSKKLQKYSDIFSKDQIDSILKLKYTGWGRLSGELLDGITAHTRYGKMTVIEVMRQCSDNFMQIIQSDRYEFKKIIEDALLKDTTPEITYDDIKNLAASPGIKRALWRSVRIIDEIVDTIGYGPKLISIEMARSEEDKVRTKNRYSQLEKMYKELYGKEYNKSDIKPQLENYKDCLDKKKYYLYFLQNGKSVYSGKKLDIENGLKDCEIDHILPRSLTKDDSLDNTVLVLREENQLKLDDYPISPDVQKKMLPIWMSLKNAKFMSQLKFQRLTSQKQLSDDQIYGFINRQLVETRQITKHLARMLTEKYKDSSTEVFTIRAGMSSEYRRIHDLPKCREVNDLHHAKDAYLAAALAQYVKVRYPKLDKEFIYGEYNKFKSDKKKNREYGSFILSSMKYDFTNTNTGEIVWQGKSSCEVIDKTMKYNDCLITKKTEIGDNQFYDQTVYSKNSGKKMIARKAHLPVNRYGGYSGKKAAYFAVINYLKQSNKKESPATEIISIPTQIYTLEKTHPGSIDKYIQDNYKDAVVLLSKVPINQKIEYDGNEQFIVGGSEVTNAKQLKLPYDVEYAIAIALKRGVPRVTISEEQADEDDKLRDKRNRQIEKRNKVIDGINRFWKVYSDKLANQYQQFGKAGDNARNATSEYDKLSIDDKIEVIKLVLVATSAGSGRVDMKGSEKNPKFPELGLPNSFGRMSGKTINPLNITFVYESITGLHCRKLNGKSLGHKR

SEQ ID NO: 19938 - protein, 1057 aa, unidentified
  REGION 1..1057: note = Cas Enzyme sequence
MGYILGLDLGITSVGFGIIEEDTYKIIKYGVRLFDEGTADNNLKRRQNRSSRRLKSRRKNRINAIKYLLLNNNVIPNVNFDILDNVYELRVKGLTQKLTNLELANVLVNLAKRRGSSLDVAVDENDNESVVAASALTKNTAELKKNNLYICQAQLAKIKSGVKLRNHDNIYKSDDYEKELRQILSNQDLSNELNDKIVEIIMRRRNFSEGPGSYEFPTKYGSYRVDYVDGIKTIKHVNLIEEMRGKCSIFRNEPRIAKCSFEACLFNLLNDLNNLTINGNGKITKEQKLQIINDYVIPKGKITIPQLVKYLGVEEKDITGFRKNKSEKNIITTFDTYSKMINFLPKDILNVTAYVDSIIELLTKTAVVEERIEEIKKLNLGLNDDIINQLANMTKVNGYHSLSKKAMDIIIPEMIETDKNQMQIIHDNNLDKNDCQEKGSKIKFDSSAILSPVTKRVHMQAIQVVNELRKEYGEFDSIVIETTRAKNSSDEKKDIQDDQKRLEEQKRKSDELLIDLDKNPDNYNTLTKLKLRLYKEQEGKTIYAGLPIDLDLLLNDPTAYQIEHIIPYAVSFDNSMNNKSLASAKENQDKGKRTPWQYFSSGMVSECEGPINDWESFEAFVNSLKISKNKKNNLLNQEDVTKFDNMKAFVARNLSDTSYGVRTVMNTMQQYFNDNNINTNVFTVKGRLTNIFRSRVGLKKDRDYFIHHAVDALIIAGSKNQSVFNNAYLLSSTKDGILIKKTGEVFDYSQDPFDDPRFLNYISSLKKIEGKPEDFSYKVDKKTNRQFADQTIYSTRNYDGVDYVVKKYKDIYGKDGESLKKLFDDKKEQTLLMARNDIQTFELFKKIYENYKNEKNPFAKYKDEFGPIKKYSKDGKGPEIYQVKYISDKLGNHLDISDKYNVENGNKKVVLLQISPYRTDVYQSKETGLYNFITIRRYHIYQENDMNIIKPELYQKLLSDKKIDETYEFKFSLNRNDIINLVTIDNQADHIDEMLYRFIGTNNDKTNKIEIRYIEKMTLKQIMVSIGKKIVKFEKYNVSPTGKKAKAEKEVLKLKWK

SEQ ID NO: 19939 - protein, 1044 aa, unidentified
  REGION 1..1044: note = Cas Enzyme sequence
  REGION 159..163: note = misc_feature - Xaa can be any naturally occurring amino acid
FGIIEEDTYKIIKYGVRLFDEGTADNNLTRRQNRSSRRLKSRRKNRINAIKYLLLNNNVIPNVNFDILDNVYELRVKGLTQKLTNLELANVLVNLAKRRGSSLDVAVDENDNESVVAASALTKNTAELKKNNLYICQAQLAKIKSGVKLRNHDNIYKSXXXXXEKELRQILSNQDLSNELNDKIVEIIMRRRNFSEGPGSFEFPTKYGSYRVDYVDGIKTIKHVNLIEEMRGKCSIFRNEPRIAKCSFEACLFNLLNDLNNLTINGNGKITKEQKLQIINDYVIPKGKITIPQLVKYLGVEEKDITGFRKNKSEKNIITTFDTYSKMINFLPKDILNVTAYVDSIIELLTKTAVVEERIEEIKKLNLGLNDDIINQLANMTKVNGYHSLSKKAMDIIIPEMIETDKNQMQIIHDNNLDKNDCQEKGSKIKFDSSAILSPVTKRVHMQAIQVVNELRKEYGEFDSIVIETTRAKNSSDEKKDIQEDQKRLEEQKRKSDELLIDLDKNPDNYNTLTKLKLRLYKEQEGKTIYAGLPIDLDLLLNDPTAYQIEHIIPYAVSFDNSMNNKSLASAKENQDKGKRTPWQYFSSGMVSECEGPINDWESFEAFVNSLKISKNKKNNLLNQEDVNKFDNMKAFVARNLSDTSYGVRTVMNTMQQYFNDNNINTNVFTVKGRLTNIFRSRVGLKKDRDYFIHHAVDALIIAGSKNQSVFNNAYLLSTTKDGILIKKTGEVFDYSQDPFDDPRFLNYISSLKQIEGKPEDFSYKVDKKTNRQFADQTIYSTRNYDGVDYVVKKYKDIYGKDGESLKKLFDDKKEQTLLMARNDIQTFEIFKKIYENYKNEKNPFAKYKDEFGPIKKYSKDGKGPEIYQVKYISDKLGNHLDISHKYNVENGNKKVVLLQNSPYRTDVYQSKETGLYNFITIRRYHIYQENDMNIIKPELYQKLLSDKKIDETYEFKFSLNRNDIINLVTVDNQADHINEMLYRFIGTNNDKTNRIEIRYIEKMTLKQIMVSIGKKIVKFEKYNVSPTGKKAKAEKEVLKLKWK

SEQ ID NO: 19940 - protein, 1057 aa, unidentified
  REGION 1..1057: note = Cas Enzyme sequence
MGYILGLDLGITSVGFGIIEEDTYKIIKYGVRLFDEGTADNNLTRRQNRSSRRLKSRRKNRINAIKYLLLNNNVIPNVNFDILDNVYELRVKGLTQKLTNLELANVLVNLAKRRGSSLDVAVDENDNESVVAASALTKNTAELKKNNLYICQAQLAKIKSGVKLRNHDNIYKSDDYEKELRQILSNQDLSNELNDKIVEIIMRRRNFSEGPGSYEFPTKYGSYRVDYVDGIKTIKHVNLIEEMRGKCSIFKNEPRIAKCSFEACLFNLLNDLNNLTINGNGKITKEQKLQIINDYVIPKGKITIPQLVKYLGVEEKDITGFRKNKSEKNIITTFDTYSKMINFLPKDILNVTAYVDSIIELLTKTAVVEERIEEIKKLNLGLNDDVINQLANMTKVNGYHSLSKKAMDIIIPEMIETDKNQMQIIHDNNLDKNDCQEKGPKIKFDSSAILSPVTKRVHMQAIQVVNELRKEYGEFDSIVIETTRAKNSSDEKKDIQEDQKRLEEQKRKSDELLIDLDKNPDNYNTLTKLKLRLYKEQEGKTIYAGLPIDRDLLLNDPTAYQIEHIIPYAVSFDNSMNNKSLASAKENQDKGKRTPWQYFSSGMVSECEGPINDWESFEAFVNSLKISKNKKNNLLNQEDVTKFDNMKAFVARNLSDTSYGVRTVMNTMQQYFNDNNINTKVFTVKGRLTNIFRSRVGLKKDRDYFIHHAVDALIIAGSKNQSVFNNAYLLSTTKDGILIKKTGEVFDYSQDPFDDPRFLNYISSLKKIEGKPEYFSYKVDKKTNRQFADQTIYSTRNYDGVDYVVKKYKDIYGKDGESLKKLFDDKKEQTLLMARNDIQTFELFKKIYENYKNEKNPFAKYKDEFGPIKKYSKDGKGPEIYQVKYISDKLGNHLDISHKYNVENGNKKVVLLQNSPYRTDVYQSKETGLYNFITIRRYHIYQENDMNIIKPELYQKLLSDKRIDETYEFKFSLNRNDIINLVTVDNQADHINEMLYRFIGTNNDKTNRIEIRYIEKMTLKQIMVSIGKKIVKFEKYNVSPTGKKAKAEKEVLKLKWK

SEQ ID NO: 19941 - protein, 1057 aa, unidentified
  REGION 1..1057: note = Cas Enzyme sequence
MGYILGLDLGITSVGFGIIEEDTYKIIKYGVRLFDEGTADNNLKRRQNRSSRRLKSRRKNRINAIKYLLLNNNVIPNVNFDILDNVYELRVKGLTQKLTNLELANVLVNLAKRRGSSLDVAVDENDNESVVAASALTKNTAELKKNNLYICQAQLAKIKSGVKLRNHDNIYKSDDYEKELRQILSNQDLSNELNDKIVEIIMRRRNFSEGPGSYEFPTKYGSYRVDYVDGIKTIKHVNLIEEMRGKCSIFRNEPRIAKCSFEACLFNLLNDLNNLTINGNGKITKEQKLQIINDYVIPKGKITIPQLVKYLGVEEKDITGFRKNKSEKNIITTFDTYSKMINFLPKDILNVTAYVDSIIELLTKTAVVEERIEEIKKLNLGLNDDIINQLANMTKVNGYHSLSKKAMDIIIPEMIETDKNQMQIIHDNNLDKNDCQEKGAKIKFDSSAILSPVTKRVHMQAIQVVNELRKEYGEFDSIVIETTRAKNSSDEKKDIQEDQKRLEEQKRKSDELLIDLDKNPDNYNTLTKLKLRLYKEQEGKTIYAGLPIDLDLLLNDPTAYQIEHIIPYAVSFDNSMNNKSLASAKENQDKGKRTPWQYFSSGMVSECEGPINDWESFEAFVNSLKISKNKKNNLLNQEDVTKFDNMKAFVARNLSDTSYGVRTVMNTMQQYFNDNNINTNVFTVKGRLTNIFRSRVGLKKDRDYFIHHAVDALIIAGSKNQSVFNNAYLLSSTKDGILIKKTGEVFDYSQDPFDDPRFLNYISSLKKIEGKPEDFSYKVDKKTNRQFADQTIYSTRNYDGVDYVVKKYKDIYGKDGESLKKLFDDKKEQTLLMARNDIQTFELFKKIYENYKNEKNPFAKYKDEFGPIKKYSKDGKGPEIYQVKYISDKLGNHLDISDKYNVENGNKKVVLLQISPYRTDVYQSKETGLYNFITIRRYHIYQENDMNIIKPELYQKLLSDKKIDETYEFKFSLNRNDIINLVTIDNQADHIDEMLYRFIGTNNDKTNKIEIRYIEKMTLKQIMVSIGKKIVKFEKYNVSPTGKKAKAEKEVLKLKWK

SEQ ID NO: 19942 - protein, 954 aa, unidentified
  REGION 1..954: note = Cas Enzyme sequence
MQSRVTLSIDFGYKNIGVALVRDQDGINTPLFAGTLLYDPFQLSTKVGPRAELRRGRRTRKTKKHRLNLLKKKLFDTNLPEGAVQELITFCRRRGYSSLFDVKEPPKTGKVDSKEEIVFRFSREEFFEALEKQIDRLVPDDKKEKALTLCEAILNRAGEPSREIRPLRINNRGASRCAWDGCENVTPRRDNALRDPLSQFVHTVFAASLRGDATLQDEVARMLDRIAELGKRLRHRGGTNPDKERKALKAEISEELKLLKKLYGLSPDLTEEAATPWAKIRQNITNLIEQTGGRNRFCRYHSSQYVTHFMEGKPLPFKATLTERDLVSRREEILFQKMWRYIEARILTLVPDGIDRVIVERTAIDLLGGSRKQRQGIINKEALEEMYQHGPRYGFSDDLEMLRAEFDGLCVYCGRPNAELVERDHLLPQSKFFFDSYLNIVPACPPCNRTLKQAASPGGASLRIHEQAYDAYSKFMASKFTNKPPHLFHTIKKGVLNLMREPGRVWEAEQYLNLIANQFAQVVGTQRGPRPLARYLSGKIYKRFGEKPQIGFINGRHTALWRKAAYPEFDKFREKKEGGVINHALDALLMACDLPDLTSLEARNLQPGLMYWWVDKVRKAAPPKGPDGIPVIPEPRFAVAGFEKVHPGNYIEAELAKMNWNHKDTKVQRQGAYGWSKKEDLPVQRVTAAGLADELRKANKKTSPELRRAEVDKIVNVIVHPQLHQTLKMANIGDTPGLSTAEALALWLRKTIRGNLSKARFSSHPADQSRAKMLQDFINGQSNVIPAVIAVQILYPSFKSNMDLNRVDPQSGRLVHRYVADPANVAYIVTYRGSNGDVKRDRPLTLKWRQSGAVIPGVKLFGDVPEGPLRGRALGEKTIDQKEWKSALHQYLIRAGIAEYNFVSQGNVVVYEDGSELYIRNFSGSYGFKKSWFKGIKAVRPSPLTERLIPNAKL

SEQ ID NO: 19943 - protein, 954 aa, unidentified
  REGION 1..954: note = Cas Enzyme sequence
MQSRVTLSIDFGYKNIGVALVRDQDGINTPLFAGTLLYDPFQLSTKVGPRAELRRGRRTRKTKKHRLNLLKKKLFDTNLPEGAVQELITFCRRRGYSSLFDVKEPPKTGKVDSKEEIVFRFSREEFFEALEKQIDRLVPDDKKEKALTLCEAILNRAGEPSREIRPLRINNRGASRCAWDGCENVTPRRDNALRDPLSQFVHTVFAASLRGDATLQDEVARMLDRIAELGKRLRHRGGTNPDKERKALKAEISEELKLLKKLYGLSPDLTEEAATPWAKIRQNITNLIEQTGGRNRFCRYHSSQYVTHFMEGKPLPFKATLTERDLVSRREEILFQKMWRYIEARILPLVPDGIDRVIVERTAIDLLGGSRKQRQGIINKEALEEMYQHGPRYGFSDDLEMLRAEFDGLCVYCGRPNAELVERDHLLPQSKFFFDSYLNIVPACPPCNRTLKQAASPGGASLRIHEQAYDAYSKFMASKFTNKPPHLFHTIKKGVLNLMREPGRVWEAEQYLNLIANQFAQVVGTQRGPRPLARYLSGKIYKRFGEKPQIGFVNGRHTALWRKAAYPEFDKFRDKAEGGVINHALDALLMACDLPDLTSLEARNLQPGLMYWWVDKVRKAAPPKGPDGIPVIPEPRFAVAGFEKVHPGNYIEAELAKMNWNHKDTKVQRQGAYGWSKKEDLPVQRVTAAGLADELRKANKKTSPELRRAEVDKIVNVIVHPQLHQTLKMANIGDTPGLSTAEALALWLRKTIRGNLSKARFSSHPADQSRAKMLQDFINGQSNVIPAVIAVQILYPSFKSNMDLNRVDPQSGRLVHRYVADPANVAYIVTYRGSNGDVKRDRPLTLKWRQSGAVIPGVKLFGDVPEGPLRGRALGEKTIDQKEWKSALHQYLIRAGIAEYNFVSQGNVVVYEDGSELYIRNFSGSYGFKKSWFKGIKAVRPSPLTERLIPNAKL

SEQ ID NO: 19944 - protein, 938 aa, unidentified
  REGION 1..938: note = Cas Enzyme sequence
VRNQDDHNVPLFAGTALYDRFTLSKKAEPRVQMRRMRRTKKSKKARLRWLEAGLLTLGLDHETVRHLVNFCRRRGYKSLFDEGKEETRGKKDQEEDEVFRFSREEFFLALEKLLETTLPEEQLAPILTLCEHVLNRHGDRYKEVRLIRIDNRGVSRCAWNGCNSVTPRRDNALRDALAQFVCTVYASDLRGNPDLYQEIQVMLDKVSELGKRLRNAGGSDPAKERKVLRKQIGQRLKKLKGLSGLAEELPDEAVGQGEKWVSIRRNLMDLIERSRGRNRFCRQHSDQYCSHLLAGRPIPFKKSLTEADITSRREEILFQKLWRYIEARVLPLVPQGVERVVVERTAFDLLAGTRKQRLAISDKELEAMYQEGPRHGFRNDLEMLKAEFGGLCAYCGKPCGDLLEREHILPQANFFFDSYLNKVPACPDCNRMWKGKASPLAAGLVVHEEAFKAYSKYLDTKFKAKNKPPHAFHTIKKGILKLMTQRDRLPEAEMLLAIIADNLGAIVEAQRGPRPLARYLCEKLRQRYGQVPQVAFRSGRHTAIWRQAAYPDFNKAAEKVAGGTLNHALDALIMACKLPDITVLEAKNLASWTLASWAEKVQAAAPPPGEDGVPVLPVPSFAVPGFEEVLPGNYVQTDLALLNWNRKDSRVQRQDAYGWDDWEDMPAKRVSAAELAALLRDADKKQTPAERQAEVRKEVEVIVHPRLRQSLVKANTGEKPGEATAQALTTWLRKTVKRSLKSANFSSHPADQARGKALRDFAQGVTDALPAVIGVRIRYPWLRANMDLSRVDRHTGALVHSYVADPANQGIIVAYAERDGKMHRDKPLTLELRQSGAVIPGVRALGEVPSGPLCGRALGQPKINPEEWSKALRSYLRGAGIKEYTMVTQGCVVHYEDGSKKYIRNFSSSYGFKKSLLKGIIGMRHSPLASKVTPNARI

SEQ ID NO: 19945 - protein, 969 aa, unidentified
  REGION 1..969: note = Cas Enzyme sequence
MPVTLAIDFGSRFIGLALVRNQDGHDEPLFAGTIAYKPSDLRSKVVDRAQIRRIRRTRKTKHARLRSLEHGLRSIGVPPEAVQSIARFSRRRGYKSLWGEEKDEEKDQDGQEEETLYRFSREVFFEALEAELFRVLPEGLMAQALEVCARVLNRPGDRRLEVRPLRIENRGKSRCAWEGCERVTPRRHNALRDTLSQVVYTTFKAAVEKQPELRQELDGRLDRVAELARRYRNAGGANPAEERKTLLKRIRTELSALKPLAKSAETREADADKAWRYIKANLEDIIKKQTGRNRYCREHSAAYVSHLLEGKPIPFKPTLTERDLVSRQQEVLYAKIWRYIEARLFPLAPEGFDRVVVERVAIDLVAGSRKQREKLGDAALENLYQQGPRLGFGSDLEMLKKEFGGLCAYCGQPNPGLIQREHILPRSIFFFDSYLNLVPACPACNQGRKGASTPGPADLRIHEEAYAAYTAYLDSISKSKPLHLFHTIKKGLLNLMREPDRVWEAEAYLALVAKHFATAVQSQRGPRPLARYLGEKLRQRQGRIPSVAFFSGRHTEAWRRASYPDFDKAADKASGGRINHALDALLLACALPSVAALEARHLRSRDLTAWKQAVQAKAPQPGPMGFPELPKLVKIVPGFEEPLPGNYVSLDLALFNWNRKNTATHQQDPFGWQARSDTPVKRGKAQDLAAALVKIDRDKKGSLEDRQKEVVRLLERLAHPNLRSHLLAGAAGDAPGEQAAEALKGWLRNAVAHSLPRSKFSSHPGDQARKRDLLAFAEGAAPDIPAIVGVRELFPDVRGKVDLHRRDPRTGGILHRYMTAPSNIALILAYKPDSRGGVNRKTPLLLQVRQSRAVTVLKGGRSLKPVPDGPLQGRVLGDLGGGPKMAAWLEAWTQALQEYLAVCGLAEYGFVYQGCVLQYENGEERYIRNFSPNYGFKPKLLQNVTGIRRSPLATAILPLERLDSGAQSG

SEQ ID NO: 19946 - protein, 936 aa, unidentified
  REGION 1..936: note = Cas Enzyme sequence
MENFTLAIDFGSVNIGLALVCNRDGVNEPLFAGIITYSNEVLKKKSNPRAQIRRLRRTRKTKKSRLNRLRQALFSLGLDQDVVNALVHFCRRRGYKALYGADREAEENGQAEETVFRYSREEFFRALNKEIDRLLPQDLRPPVLKVCDRVLNRHGELNREIRPIRIDNRGASRCAWSECDKVPPRRKNAIRDALAQFVYAIIDLPRLRNDENLHRDLDAALDTVAELAKRLRSVNGHDPDREKKVLRKRIREALKPVKDLAALDTWKVNSENIMNLLEKSQGRNRYCREHSGEYVRCLLEGRTVPFKASLVERDMVSRREEILYQKLWRYIETRILPLAPGGIDRLVVERVAFDLLAGTRKQRQKVGDKTVEESYQFGPRHGFKSDLEMLRQEFDGLCAYCGKPSGQIIQREHILPRGDFLFDSYLNILPSCPACNQVIKAKASPQAAGLHVHESAYQAYCRYLAGKFKIRPPHEYHTIKKGLLNLMRQPDRTWEAEQYLALIAGHFTQVAQTQRAPRPMARFLCERLRQRFGRSPQLAFRNGRHTDLWRRAAYPDFDKLKEKEEGGLINHALDALVLACDLPGMTALEGLNLKPKELKSWVRAVTVAAPPPGPDGVPVAPEPGRAVPGFEEILPGNYLRADLTFFNWNRKDLGVQSQDIYGWSKNENVPTKRKTALDLVAELRKQTNTSGVKKIIDTVAHPNLRQALQAANTGDKPGEQAVQALIDWLRRAIKPALDKARFSDHPGDQARRKALHDFVSGNLDGPPVTIGVKRLYPYGSGKTDLQRIDPKTGRLVHRYIADPANKALIAAYPLKKGRIRRDSPIILEVRQNDALKPQGKTLARPASGPLAGRGLGRPAPDPDQWKAELHRCLAEAGVAEYAVVAQGCVVKYEDGSEKYIRNFSTSQGFKNGFLKNIVAVRRSPFAAAETANVRLF

SEQ ID NO: 19947 - protein, 936 aa, unidentified; identical to SEQ ID NO: 19946
  REGION 1..936: note = Cas Enzyme sequence

SEQ ID NO: 19948 - protein, 1001 aa, unidentified
  REGION 1..1001: note = Cas Enzyme sequence
AALQVAVAAARRRLLQALLLDYGLLPISRDERKELGRQDPYTLRARALDGRLKPYELGRTLFHMNQRRGFKSNRLSGEEDEKERGKIAERIGKLREEIDPGTPGKRTLGEWLHRRHARHKPVRFRPESATFYPTREMYEEEFDAIRKMQEQNQTLTPSQWDALRTIIIHQRPLKPVEVGRCSLDPSEPRAHKALPLAQEFRIYQEVNNLRIFEPGHRKERPLRKDERETLIEVLLGGRDVEFAKLSKMIGIDDRSRINLASEKRKKLNGDETAKKLRKKDLFGNRWNQLPGEFQNEIVKTLLNEQYNNKLVSTAQREWGLDKETAQKLSHARLPQGTVHLGETALRLVTPELARGLRYDEAVRLHYPHHSDLSGDGQSSELPYYGEALPRYMMPVRKGDGSPEEQDHGRIGNPTVHIGLNRLRKLVNEIIKCYGKPASISIELARELKNPPEIRRMIEKQQAERQEKNEQIKSDILGAKADDTPANVRKIRLWNEQKIGCKNLCPFCGDPIPFRQALSNDTEIEHLLPFRRTADDSPANMVIAHIKCNRRKGDRSPFEAFGSESSGKYEYSGILNRARGLPGNKAWRFDENAMERYEQGRGFLDRHLNDTRYLSRIAQEYLTTICPKGKVDVVTGQLTFMLRGKWGLSPNNLLRDGESTDGRGKDRTDHRHHAIDALVIALTSRSLVQRVAKLAGRNRKARGTGIDHLLSGLPRPWDGFSHEEVRKRLANVVVSHRAEHGLAGQLHNEKAYGTIGDRTEEGEGLFSNDKYQIVTTESLEFTKRAPSKVLDAVRDARLQEALKELWAFIEKTESGTPAAKWKEFTKRAASPGELGKFDFSGAKHGVRRVRVTENLTVHPLPRKGRYKAVKPDSNAFMDVFEMPNGKWQAVTVTRLAANAPDFKKRHNELRPHPAARRIARLFAGDMVAITENGDRQIYRIQILSGQRMWLSPHNEANTDHRNRDRDDPFKLTQKSVNALRRLGFRKIHVDILGRVRDPGPRS

SEQ ID NO: 19949 - protein, 1072 aa, unidentified
  REGION 1..1072: note = Cas Enzyme sequence
MQDIKEEWVVVNKVLGLDIGISSVGWGIIDQDTGKIIAAGVRLFEEATRNANEERRGFRGSRRLKRRRTHRLERAKQLFEEFQLPLTGIGKVDPYDARYRAIYENVTREELVAALYHLVKKRGTVLDSPEEESTSGNELSTKKQLAANKKLLEQKYICEIQLERLANRHEKMRNHENRFRTEDYVKEARAILFKQRQTYKEITEEFIGKYISLIEKRREYFEGPGSEKSPTPYGSYYLDKNGKLTYTSMIDKMRGKCTYFPDKPRIAKMSFTADLFNLLSGDLNKLQINGEYLTFDDKKHLVEQFVKKGKNITLAQILKYKGASADADVSGYRKDLKTDKPTFTEFKGFKELLNIIEKNNLPKAILDDVDLLDQIVEVLTAEKSYQRREEQLQSLFSNYDNPVRNRIVDSLKESTKFTGYHALSKKVIELAMDDLWHTNKNQMQIFAEMGLEQKRLSALKKNKNIAFDDEAILSTVAKRAHREAIKIVNAVREQYGELSAIVVETAREKNSDEKRKQYTDFQKQIGKHEKEMAKLLGVKQLSDLRLSSKQHLALKLWESQDGKCIYSGKSISINEIVTNPFLFEIDHILPVSLSFDDSQANKVLCYRSENQNKGQKTPFQYFSSGKASRTFEQFKVEVLNLYKSKRITSKKKDYLLELRDIEHNEELQKEFINRNLVDTQYAMRSFSMNLRSFFKNHEIDTKVLSIRGSFTAALRRRAKLNKDRDEGYVHHAIDALIVAAIGRMPVFEFFKEFNMNEEGVVFNKETGEIIGEDQFFDHQFITFLRDLMNYESKIKFSHKVDRKVNRTMSNQTIYGTREKDGEKYYLGKTSNIYQLDKNGVAPVLKRISKNPESFLIAQHNPELFELILKIIREYSQADNPFKAYYNDHGYIMKDGKVPVKTLRYYDRKLGVHMKITDKYPGANSDVVLLSIKGLRVDIYRNQEGKYKYLGVPYHWFKQEGKNKYVLDMEKYNEEKAKDYKKIDESYEFQLSLYKNDLFSYEKQGETNFRVFRGDAMPRQNKIEVDFVHKRKEEQKEGFLAPSTLSNIVKYNVDVLGNTYKIEKENFKDTLQF

SEQ ID NO: 19950 - protein, 1045 aa, unidentified
  REGION 1..1045: note = Cas Enzyme sequence
MQKKAPIRYRLGIDLGSNSLGWAVLRLDEHDNPDYLIRIGTRIFSDGRISKTGESLAVERRNARQQRRRRDRFLRRKARLLGVLRDVGLFPPPGSRAESLKGLNPYELRSRGLTAPLEPYELGRALFHLNQRRGFKSSRKSDNKDEEKGKIATAVAALTARLAERGFKTVGEYLFDRQQKGEGTRARRTGEGLKAVYEFYPNRAMVEQELDELWSAQAIHHPAICTGVNLQKVKGVLLFQRPLRPVRPGRCSLEPSEDRAPLALPSVQNFRIQQELSNLRLREPASKSERGITTVERETLVGLMSTKATIAFAGIRKALSLPKGTTFNLEGLKRDKLLGNLTSAELSDEESLGAKWTMLTLDEQDALVSQLIDDRIPDDELLRRLISDYGLDKDHAERTLNVNLPDGYGRVSLKAIRALLPHLTEGMTYDKAAVAAGYGLLNTDGDGSKDRLPYYGSVLQRHVAFGTGNLNDPEEIREGKIANPSVHIALNQVRRVVNKLIDRYGKPTEVVLELTRDIKLGWKKAREVEREQEARQKENEALQAELQDLKISVSSDTLLKLRLFRECAGADGLTIKCVYSGEVINVARLFSPDVEIDHILPYSQTLDDSIANKVLCVTSANRAKGNQAPFEAFGHSPAGYDWKAILDRAATLARGRRRRFDEDALSRFQAEGGFLARQLTDTAYMSRVAREYVSHICPPNKVWVTTGRLTAMLRAKWGLNKLISDGEDKNRLDQRHHAIDATVIACVDRSLVHRVARAAEAAQDRQAGRLIENLDYPWATFRQGLEYALSKMIVSYRPDHSPAAALHNDTGYGSVGEALLPVGYLVKGPVQSYVRVMSLTGEKAENLREHIVDPLLAAELASIAENAGSDKKAYSAKLENFTAKLGAKRVRWREVLSVIPLRDDRSGKDTKFVKADGNYCVEIFEDGTKWASETIPTFTANQPRYVEFMKSPVYRLKTFSDRALVMRLIVNDMVLVEQDESVAVYRVQKLSGGRVVLAHHLGSGDLTRNGFKLDGIKTSLTLSAEGLRKANAKRVFVDEIGRVLG

SEQ ID NO: 19951 - protein, 1104 aa, unidentified
  REGION 1..1104: note = Cas Enzyme sequence
MQYIVALDIGVASVGFAVIDKKTETVIEAGSNIFPEASATDNQMRRGMRQARRLKRRKRTRLDDFTKLWEEYAFAIPQVQENDIVGLKVKALRESISLDELYLILYSYLKYRGISYLEDAEDTSLSGTSAYANGLKLNAKELETNYPCEIQKQRLEQVGKYRGQIQIEDAQGEKVDLSNVFTIGAYTKEIQQVLCTQKNYHSEISDEFCEDYLEIFTRKRKYYEGPGNEKSRTDYGRFTTRLDENGDYITEKNIFEKLIGKCSVYKEELRAASASYTAQEFNLLNDLNNLTINGRKLEEHEKRIIIDKVKTSNTINMRKIIADVMGEKIEEFYGARIDKSEKEIFHKMEVYNKMRKTLADIHVNIEEFSRENLDEIGYILTINTDKEAMMEAFEHANVKLSEEIKDCLISLRKTNGALFSKWHSFSLKIMKELIPEMYQQPKEQMTLLTEMGVMRGQTDKFEKNKYIPVDAADEDIFNPVVRRAVRISFKILNALMKKYGTLEEVVIEMPRDQNSEEQKKWEKERQKKNEKELAYIEKKLAAEYNILLSPTDFSNQKQLGLKLKLWNEQDGKCLYSGKTIEPEDLIKHSELFQIDHIIPRSISFDDSRNNKVLVYGEENQKKGNQTPYYYLIHANNQWSFEQYKALVMKLSKKKEYGISKKKVQNLLYSEDITKAEVLRGFINRNINDTGYAARVVLNTVQGYFRAKEINTNVKVIRGSYTYQMRVNMKLDKNREESYAHHAVDAMLIAFSQLGYEAYRKLQGEFIDFETGEILNAEKWNAQMSDEIYEQYLYGKKWSNIRTQITKAEKQVKYWYHVDHKSNRGLCNQTIRGTRTYEGKTYKINKLDIRTKEGAALFKKLAFSEKESDREKLLVYKNDKKTYENLIQIAQEYSDSNNPFVQYEKETGDCVRKYAKNHNGPRIDKLKYTDGEVGSCIDISHKYGYEKGSQKVVLESLVPYRMDVYYKKEEQTYYLVGIKQSDVKCDNGEYVIDEDAYAINLVREKMIQPGQKRGDLEALGFEFQLSFYKNDIIEYEKDGEIVRERFLSRTMPKVKNYIETKPIDRAKYEKQKLVGLSKTKMIRKYRMDILGNYYMCSRENFSKYC

SEQ ID NO: 19952 - protein, 1104 aa, unidentified
  REGION 1..1104: note = Cas Enzyme sequence
MQYIVALDIGVASVGFAVIDKKTENVIEAGSNIFPEASATDNQMRRGMRQARRLKRRKRTRLDDFTKLWEEYAFAIPQVQENDIVGLKVKALRESISLDELYLILYSYLKYRGISYLEDAEDTSLSGTSAYANGLKLNAKELETNYPCEIQKQRLEQVGKYRGQIQIEDAQGEKVDLSNVFTIGAYTKEIQQVLCTQKNYHSEISDEFCEDYLEIFTRKRKYYEGPGNEKSRTDYGRFTTRLDENGDYITEKNIFEKLIGKCSVYKEELRAASASYTAQEFNLLNDLNNLTINGRKLEEHEKRIIIDKVKTSNTINMRKIIADVMGEKIEEFYGARIDKSEKEIFHKMEVYNKMRKALAEIHVNIEEFSRENLDEIGYILTINTDKEAMMEAFEHANVKLSEEIKDCLISLRKTNGALFSKWHSFSLKIMKELIPEMYQQPKEQMTLLTEMGVMRGQTDKFEKNKYIPVDAADEDIFNPVVRRAVRISFKILNALMKKYGTLEEVVIEMPRDQNSEEQKKWEKERQKKNEKELAYIEKKLAAEYNILLSPTDFSNQKQLGLKLKLWNEQDGKCLYSGKTIEPEDLIKHSELFQIDHIIPRSISFDDSRNNKVLVYGEENQKKGNQTPYYYLIHANNQWSFEQYKALVMKLSKKKEYGISKKKVQNLLYSEDITKAEVLRGFINRNINDTGYAARVVLNTVQGYFRAKEINTKVKVIRGSYTYQMRVNMKLDKNREESYAHHAVDAMLIAFSQLGYEAYRKLQGEFIDFETGEILNAEKWNAQMSDEIYEQYLYGKKWSNIRTQITKAEKQVKYWYHVDHKSNRGLCNQTIRGTRTYEGKTYKINKLDIRTKEGAALFKKLAFSEKESDREKLLVYKNDKKTYENLIQIAQEYSDSNNPFVQYEKETGDCVRKYAKNHNGPRIDKLKYTDGEVGSCIDISHKYGYEKGSQKVVLESLVPYRMDVYYKKEEQTYYLVGIKQSDVKCDNGEYVIDEDAYAINLVREKMIQPGQKRGDLEALGFEFQLSFYKNDIIEYEKDGEIVRERFLSRTMPKVKNYIETKPIDREKYEKQKLVGLSKTKMIRKYRMDILGNYYMCSRENFSKYC

SEQ ID NO: 19953 - protein, 1346 aa, unidentified
  REGION 1..1346: note = Cas Enzyme sequence
MENTYYLGLDMGSASLGWAVTDSEYHILKKHGESLWGVRLFDSASTAEERRTFRTSRRRLDRRNWRIQILQEIFAEEISKIDPGFFLRMKESKYYPEDKRDESGNCPELPYALFVDSGFTDKDFHREFPTIYHLRKWLMETEETPDIRLLYLAFHHMIKHRGHFLLSGDISKIKKFDSTFLTLLQNVAEEELDWNLEIDSAQISAIENILKNRNLTRSAKKSQLIRLSGAKTACEKAIFTLISGGTVKLSDIFGNDDLNESERPKISFSDSGYDDYIEAVTLTLGEQFYIIESAKAVYDWSVLADILGDSVSISAAKVKVYEKHKKDLMYLKKIVRSNLSKEDYKNIFVNTDAKLNNYCAYVGMTKKNGRKVSLAGKCCSQIEFYDFLKKNVLSKIDDTVIKEYLENEINCENFLPKQINKGNSVIPYQVHLFELKSILKNMEAKIPFIRENSDKIIQLFEFRIPYYVGPLCGESAGCRGKFSWAVRKSYDKIYPWNFNDVIDTESSAEVFIRRMTNKCTYLAGEDVLPKDSLLYSKFMVLNELNNVKLNGASISPELKQKIYTDVFCRCRKVTQKKLRNYLVCEGIADRTVDITGIDGDFKASLNSFHDFKEKLTGAELNQQEKEMIILNIVLFGEDKKLLKQRLKKLFPKLTEGQMKAICTLSYKGWGKLSKKFLEEVTVPDPETGEFINIITALWKTNDNLMQLLYGPLGFMKYVEDYNSGSEKVSLDYESIENLYVSPAVKRQIWQTLKVVKEIRKCMGTDPKRIFVEMAREKQESKRTESRKKQLLDLYRNCKEEQSEIVSSLEQREDHELRRDKLYLYYTQKGRCMYSGRPIDFEKLWDNNMYDIDHIYPQSRTMDDSLDNRVLVERKENELKEDIYPINPEIQKARKTLWKSLLDGGFISKKKYERLVRTTKFDENELAGFIERQIVETRQGTKIVADILKEAFPNSTIVYVKARTVSNFRQDFELMKVREMNDLHHAKDAYLNIVVGNSYYVKFTQNAAWYIKENPGRTYNLEEMFKPKKRGRVARDIVRNGEIAWKAGEKGTIITVKKVMQKNNILVTRRSYEVKGGLFDQMIMKKGKGQIPIKSSDGRLLDINKYGGYNKATGAYFMLVKSRDKKGREIRSLEFVPLYLKNRIEQNEDAAIEYLEKDRGLKEPQIVLRKIRADTLFDVDGFKMWLSGRSGSQLIFKCANQLILSPNDEKCLKKILKFIQRRKENKNLQIYNVDGILEEDLLRLYDTFLDKLQNTMYKKRLSAQVITLTEKRNNFIKLRIEDKCIVLNEILHMFQSQSGCANLTLIGGPAKAGRIAMNSNITECKSISIINQSSSGIFEKKIDLLKL

SEQ ID NO: 19954 - protein, 1061 aa, unidentified
  REGION 1..1061: note = Cas Enzyme sequence
MANVDTASATQVWAFDLGKASLGEAIRHGNEIIHASSWLIPEDFARRGPATKPGSPANRYRAWRTREAHLAREARLREILQESGIEVLAARDPRLTREFPAKGDETCYASCLLRIQLLRGAPLAGWQIHKALHSAIQRRGYDRKPAWMTKRSERSEKSKEDSETEQRLGAYQNCLEQMAGDRTEFHFPCYLDAWRLGLWSPESPDHYNLRIDHHAAPARNRDYPDVTAIVAPRDLVEAEVRALLETAAKLVPALADKASLIIHGPGGQRYASYYPNLRIEHGLREGGSNDWLGILGQKIPRFDNRIIAKCALLPRLNVCKASIREDANGIPYPDSLLPSEVTFLLKLKNVRVQRIDKRATSLTSEEIRNLFNDPKRPPGKLDYGKKEWKNQLTAIGAVPTAGQEKIDAPKEGGRSRFSRPALQILKRLILSGESPSAAYARELAALGGNTDQRKGLVPDDLKFMLRMGDTWEGLYVPDQQHDALLRLRDEKGRDTAIQALIGSVNDPIVRHRLEIFWTRIKTLEETYGTPGEIVLEFVRDDFLGVKAKSDLQKFQNDREKARKDAREKARELNATGRAAGLKYELLKQQGGVCLYTNQGLATVHLDDLQIEHIVPRAQGGPDAVVNYVLTTLETNKEKGDRTPYQWFEAKGFAGWDAYVKRVNDRVTDLRNKKVKLLTSHNAAELVRRYTALAETAWIARLAQTLVALYFGWPIRSEEGERRITIVSGGLTARVRRLYKLNSLLHGRAPQDIDPLEWEEQCDKKNRDDDRHHALDAMVLSFIPGWARDTNKEGFFRLPKEVTRETFAQKIATVIPQNLVFAKPELDATIYGRRTLDGHDYGVSRKPLDSFVVSVDMSGKKRSIKPRKSIDTSTIVDGAIRRQLDTFLEKTPDLTLEQWDAWCANFKRGGESGPRVKKILRTITKPDALEEYADLSKDQSGQLRKGGQHRGYFIVEVAKPTKTQPDKRGYEVRPVYTHQSIHKLTKKLKEETDTHIIGFFESGCLVQINQDIHHAKTPLKPGVYRLNSIWEQGNAEITDSASKKSAPIGIAKLVAAGFRRVP

SEQ ID NO: 19955 - protein, 1404 aa, unidentified
  REGION 1..1404: note = Cas Enzyme sequence
MKKLKQMSGPYSIGFELSSTAHGFVATDPNGNVLYHGKQPVMGTRVFKEGQHAAEARMPRTSRRGIQRRRGREHEMERVFAPVISSIDPDFFIRRRMSYKLGKIRFESDPIGFSYSRLFHSFPTLAHLDVALMEADSAMDPRLIFEAVANHVVRRGHFLLENQNVSSTNSDIDTQVANYAEVLVSYFEDTLDERIELSLEALDINGNVTARELQKQFASAMCVSGDDIQKKTEKAQIKAIADLVAGYKADLTVLVPDAEKLPKVSISDGDALEEFLADSCPDSLVPVMMAAQALYTSWKLQGMLSYAPGKSLSHNQVAQHDVYGKQLRMLKDLALKYVAKQDANGNVDEDGFKDYVRFFGGPKREDGYRYDKVQVKKQDSPKNNMGYTAYNLNVLGYEEFAKRVELLFKDTDAVDDPQYKTMMEAFANHAFLRRIHTVDNAAIPYQLHAEVVNRIIDNQGRFYPWLIDAREHILKVLTSRIPYYVGPLDSTDHGKADENGTRFAWVKRLAGHEDAFVSPWNYEDHIDIDTTAELFIRRMTGECSYLDGEDVLAKNSLLYEKYCFFNELASLSFTEDGDSWMPFDAGMRRAIYDAASDGKTMTVKRIESVLQRDFFIAHPHVRGTSNPKAMSSKRSNYAYFCRLFDVKALSASDMSMAEDLVLWNTVFEDRDILRRKILKTYGDLLTEKAVDDFCHKRLSGWGKLSERLLTGIWADTASGDLCVMDVLEQGRPYGRYRGSSMNLMQILNDDVLGFKMEIKRLNDSHMQMAEGFDLNALPGSPALRRGVSQAIKVLDDIVSVAGKAPDRIYLKVTRTASNSRKGKRTAKRSDKIKQALKALDADAAADLGAAKLLRELGMFDEKEINERIYLYFHQAGKCLYTGKPIDITRIASNDYYVDHVVPLAYRKDESLDNKVLVYAEASRYKSETLLVSPAVQRKMLPFWRMLRNAGLMSERKLNALIRTEISEGMLKSIIGRQFTENSWEAKLFTAAIAAKYPGTVVIPVKAGVIGAVRSRIGIPKSLKANQFYHAHDALLAAEVGRYMELAKPAFVHNRVKYEQYMRKIKLVDEENKKAPKSQLDFFAGGFFFDRVDKDTGEVYWNKDEEVERIYRACGWKNLRVTYAAFEDGGAFWKQTIYSPREKSKLIATKSDRPAEIYGGYSSQTFANFFVYEVMKKKVKQLRFGAVPAAIASKSDPDTYNAMLEMYARGLAKTAKEKFVHIVRARVLKNTMIELYGERFRIAGEKQVYPVRQMPLAIDEMYLLKGVETIVAAGNAGASARIDFEKAAESLVGFWDLLLEKLPVNYPKLTVQLKLGSLKHPKDILAATSESEFPAIVYKIAEAEIQVMEQASGLRNMSDTKILGGNTFGGSLVFTFNKVLNDPKSKACFIDTTPAGLHEVKTKVW

SEQ ID NO: 19956 - protein, 1310 aa, unidentified
  REGION 1..1310: note = Cas Enzyme sequence
MKINGDYDKGSMKKNFWGVRLFDEGVTAEERRVNRTTRRRLRRRKNRVHYLQSFFIDEMKKIDENFFHRLTESFIVPMDKDHDRHPVFGTMEEDVAYHNQFPTIYHLRKHLADTDEQADLRLVYLALAHIMKFRGHFLIEGELSTEHASNDAVRETFKAFLHQYNQAFHLQSDDTYINPIPEDISVEAELTAKVSKSRKAESVLHKVETEKSNGTFHQFLKLMVGNQGNFKKTFSLDEDRKLDMGKEEYEEDVESLLAEIGEDYRELFLAAKDVHDAIELTGILDGAETHTKAPLSSSMIARYNEHKQDLQALKTLVKAERPDRYFDIFRNKIKDGYAGYIEGKTTEESFYKLMKKELNKVDGAEVLLKKIDEERFLRKQRTYDNGVIPHQIHLHELKSIIENQGQHYPFLLDNKEKIESLLTFRIPYYVGPLAKTKDQSEFAWIERKGHEAVRPWNIKNEINLVASAEKFIEKMTNSDTYLPDEKVLPKHSMLLQKFNVFNELTKVQYVDDQGQRRNFSSEEKQDIYQNLFKVHRTVSLKVFEDYLSNDYQLENPKVQGIEKKFNASLKTYHDLLKLGISRDTLDNEAYADRFEDLVKILTVFEDREMIRKQIEGFSDLFDQVTLKKLERRHYTGWGRLSAKLINGIKDERTQKTILDYLIEDDGPKKNINRNFMQLINDDNLSFKKTIEEARLNLESNDLKDAVDQIPGSPAIKKGILQSLKIVDEIVGIMGYEPESIVIEMARENQTTSQGQRNAKERLNNVESALKELKSDLLKKHPVDQDMLKNDRLYLYYLQNGRDMYTNQELDINKLSSYDIDHIIPRSFTTDNSIDNRVLVSSKSNRGKSDDVPSEAVVQKMKPFWTTLYRSKLISKRKFDNLTKAERGGLTDDDKAGFIKRQLVETRQITKHVASILHQRYNNPELDEPAVKIVTLKSALISQFRQAFSLYKVREINDYHHAHDAYLNAVVARLLMSIYPQLIPDFVYGEYRKTSAFKVNKATAKKQFYTNLIERFSKEDKLPDENGEIAWDKARDLAKINRVLSYHQMNVVKKIETNSGQFFDINIKAKGANNKLIPIKEHLDVTKYGGYGSPYIAYSIIFTHEKGKNAKVVNEILGINIMDRTLFEKDREKYLKDRGYVNPIFKYKVPLNTLFEFEDGKRRILTGASELQKGNQFILPRHLVNLIYYCNKYVNSQFKNVDYENYIYDHKHQFSELLNCVLEFGQKYVLSFSKVEKIRNAYNESFNQSDIKEIVASFITLMDLNKMKPSADFNFFGVKIGETRYRSTREVLTSKIIYQSVTGLYETRKEV

SEQ ID NO: 19957 - protein, 1428 aa, unidentified
  REGION 1..1428: note = Cas Enzyme sequence
LVLWYNDTTKRKPHTAYVWERKYAMKKLKQMSGPYSIGFELSSTAHGFVATDPNGNVLYHGKQPVMGTRVFKEGQHAAEARMPRTSRRGIQRRRGREHEMERVFAPVISSIDPDFFIRRRMSYKLGKIRFESDPIGFSYSRLFHSFPTLAHLDVALMESDSAMDPRLIFEAVANHVVRRGHFLLENQNVSSTNSDIDTQVANYAEVLVSYFEDTLDERIELSLEALDINGNVTARELQKQFASAMCVSGDDIQKKTEKAQIKAIADLVAGYKADLTVLVPDAEKLPKVSISDGDALEEFLADSCPDSLVPVLMAAQALYTSWKLQGMLSYAPGKSLSHNQVAQHDVYGKQLRMLKDLALKYVAKQDANGNVDEDGFKDYVRFFGGPKREDGYRYDKVQVKKQDSPKNNMGYTAYNLNVLGYEEFAKRVELLFKDTDAVDDPQYKTMMEAFANHAFLRRIHTVDNAAIPYQLHAEVVNRIIDSQGRFYPWLIDAREHILKVLTSRIPYYVGPLDSTDHGKAGENGTRFAWVKRLAGHEDAFVSPWNYEDHIDIDTTAELFIRRMTGECSYLDGEDVLAKNSLLYEKYCFFNELASLSFTEDGDSWMPFDAGMRKAIYDAASDGKTMTVKRIESVLQRDFFIAHPHVRGTSNPKAMSSKRSNYAYFCRLFDVKALSASDMSMAEDLVLWNTVFEDRDILRRKILKTYGDLLTEKAVDDFCHKRLSGWGKLSERLLTGIWADTASGDLCVMDVLEQGRPYGRYRGSSMNLMQILNDDALGFKMEIKRLNDSHMQMAEGFDLNALPGSPALRRGVSQAMKVLDDIVSVAGKAPDRIYLKVTRTASNSRKGKRTAKRSDKIKLALKALDADAAADLGAAKLLRELGMFDEKEINERIYLYFHQAGKCLYTGKPIDITRIASNDYYVDHVVPLAYRKDESLDNKVLVYAEASRYKSETLLVSPAVQRKMLPFWRMLRNAGLMSERKLNALIRTEISEGMLKSIIGRQFTENSWEAKLFTAAIAAKYPGTVVIPVKAGVIGAVRSRIGIPKSLKANQFYHAHDALLAAEVGRYMELAKPAFVHNRVKYEQYMRKIKLVDEENKKAPKSQLDFFAGGFFFDRVDKDTGEVYWDKDEEVERIYRACGWKNLRVTYAAFEDGGAFWKQTIYSPREKSKLIATKSDRPAEIYGGYSSQTFANFFVYEVMKKKVKQLRFGAVPAAIASKSDPDTYNAMLEMYARGLAKTAKEKFVRIVRARVLKNTMIELYGERFRIAGEKQVYPVRQMPLAIDEMYLLKGVETIVAAGNAGASARIDFEKAAESLVGFWDLLLEKLPVNYPKLTVQLKLGSLKHPKDILAATSESEFPAIVYKIAEAEIQVMEQASGLRNMSDTKILGGNTFGGSLVFTFNKVMNDPKSKACFIDTTPAGLHESKTKIG

SEQ ID NO: 19958 - protein, 1404 aa, unidentified
  REGION 1..1404: note = Cas Enzyme sequence
MKKLKQMSGPYSIGFELSSTAHGFVATDPNGNVLYHGKQPVMGTRVFKEGQHAAEARMPRTSRRGIQRRRGREHEMERVFAPVISSIDPDFFIRRRMSYKLGKIRFESDPIGFSYSRLFHSFPTLAHLDVALMESDSAMDPRLIFESVANHVVRRGHFLLENQNVSSTNSDIDTQVANYAEVLVSYFEDTLDERIEPSLEALDINGNVTARELQKRFASAMCVSGDDIQKKTEKAQIKAIADLVAGYKADLTVLVPDAEKLPKVSISDGDALEEFLSDSCPDSLVSVLMAAQALYTSWKLQGMLSYAPGKSLSHNQVAQYDVYGKQLRMLKNLALKYVAKQDADGNIDEDGFKDYVRFFGGPKCEDRYRYDKVQVKKQDSPKKNMGYTAYNLNVLGYEEFAKRVELLFKDTDAVNNPQYKTMMEAFANHAFLRRIHTVDNAAIPYQLHAEVVNRIIDNQGRFYPWLIDAREHILKVLTSRIPYYVGPLDSTDHGKAGENGTRFAWVKRLAGHEDAFVSPWNYEDHIDIDTTAELFIRRMTGECSYLDGEDVLAKNSLLYEKYCFFNELASLSFTEDGDSWMPFDAGMRKAIYDAASDGKTMTVKRIESVLQRDFFIAHPHVRGTSNPKAMSSKRSNYAYFCRLFDVKALSASDMSMAEDLVLWNTVFEDRDILRRKILKTYGDLLTEKAVDDFCHKRLSGWGKLSERLLTGIWADTASGDMCVMDVLEQGRPYGRYRGSSMNLMQILNDDVLGFKMEIKRLNDSHMQMAEGFDLNALPGSPALRRGVSQAMKVLDDIVSVAGKAPDRIYLKVTRTASNSRKGKRTAKRSDKIKQALKALDADAAADLGAAKLLRELGMFDEKEINERIYLYFHQAGKCLYTGKPIDITRIASNDYYVDHVVPLAYRKDESLDNKVLVYAEASRYKSETLLVSPAVQRKMLPFWRMLRNAGLMSERKLNALIRTEISEGMLKSIIGRQFTENSWEAKLFTAAVAAKYPGTVVIPVKAGVIGAVRSRIGIPKSLKANQFYHAHDALLAAEVGRYMELAKPAFVHNRVKYEQYMRKIKLVDEENKKAPKSQLDFFAGGFFFDRVDKDTGEVYWNKDEEVERIYRACGWKNLRVTYAAFEDGGAFWKQTIYSPREKSKLIATKSDRPAEIYGGYSSQRFANFFVYEVMKKKVKQLRFGAVPTAIASKSDPDTYNAMLEMYARGLAKTAKEKFVRIVRARVLKNTMIELYGERFRIAGEKQVYPVRQMPLAIDEMYLLKGVETIVAAGNAGASARIDFEKAAESLIGFWDLLLEKLPVNYPKLTVQLKLGSLKHPKDILAATSEYEFPAIVYKIAQAEIQVMEQASGLRNMSDTKILGGNTFGGSLVFTFNKVLNDPKSKACFIDTTPAGLHEVKTKIW

SEQ ID NO: 19959 - protein, 1404 aa, unidentified
  REGION 1..1404: note = Cas Enzyme sequence
MKKLKQMSGPYSIGFELSSTAHGFVATDPNGNVLYHGKQPVMGTRVFKEGQHAAEARMPRTSRRGIQRRRGREHEMERVFAPVISSIDPDFFIRRRMSYKLGKIRFESDPIGFSYSRLFHSFPTLAHLDVALMEADSAMDPRLIFEAVANHVVRRGHFLLENQNVSSTNSDIDTQVANYAEVLVSYFEDTLDERIELSLEALDINGNVTARELQKQFASAMCVSGDDIQKKTEKAQIKAIADLVAGYKADLTALVPDAEKLPKVSISDGDALEEFLSDSCPDSLVSVLMAAQALYTSWKLQGMLSYAPGKSLSHNQVAQYDVYGKQLRMLKNLALKYVAKQDADGNIDEDGFKDYVRFFGGPKCEDRYRYDKVQVKKQDSPKKNMGYTAYNLNVLGYEEFAKRVELLFKDTDAVNDPQYKTMMEAFANHAFLRRIHTVDNAAIPYQLHAEVVNRIIDNQGRFYPWLIDAREHILKVLTSRIPYYVGPLDSTDHGKAGENGTRFAWVKRLAGHEDAFVSPWNYEDHIDIDTTAELFIRRMTGECSYLDGEDVLAKNSLLYEKYCFFNELASLSFTEDGDSWMPFDAGMRKAIYDAASDGKTMTVKRIESVLQRDFFIAHPHVRGTSNPKAMSSKRSNYAYFCRLFDVKALSASDMSMAEDLVLWNTVFEDRDILRRKILKTYGDLLTEKAVDDFCHKRLSGWGKLSERLLTGIWADTASGDLCVMDVLEQGRPYGRYRGSSMNLMQILNDDVLGFKMEIKRLNDSHMQMAEGFDLNALPGSPALRRGVSQAIKVLDDIVSVAGKAPDRIYLKVTRTASNSRKGKRTAKRSDKIKQALKALDADAAADLGAAKLLRELGMFDEKEINERIYLYFHQAGKCLYTGKPIDITRIASNDYYVDHVVPLAYRKDESLDNKVLVYAEASRYKSETLLVSPAVQRKMLPFWRMLRNAGLMSERKLNALIRTEISEGMLKSIIGRQFTENSWEAKLFTAAIAAKYPGTVVIPVKAGVIGAVRSRIGIPKSLKANQFYHAHDALLAAEVGRYMELAKPAFVHNRVKYEQYMRKIKLVNEENKKTPKSQLDFFAGGFFFDRVDKDTGEVYWNKDEEVERIYRACGWKNLRVTYAAFEDGGAFWKQTIYSPREKSKLIATKSDRPAEIYGGYSSQKFANFFVYEVMKKKVKQLRFGAVPAAIASKSDPDTYNAMLEMYARGLAKTAKEKFVRIVRARVLKNTMIELYGERFRIAGEKQVYPVRQMPLAIDEMYLLKGVETIVAAGNAGASARIDFEKAAESLVGFWDLLLEKLPVNYPKLTVQLKLGSLKHPKDILAATSESEFPAIVYKIAEAEIQVMEQASGLRNMSDTKILGGNTFGGSLVFTFNKVLNDPKSKACFIDTTPAGLHEVKTKVW

SEQ ID NO: 19960 - protein, 1032 aa, unidentified
  REGION 1..1032: note = Cas Enzyme sequence
VRLFEEATRNANEERRSFRGSRRLKRRRVHRLERAKALLESAEFPLDGIGKVNPYQARYNAIYDSVSGEELAAALYHLVKRRGTVLDSPEDDDKNKNELSTKEQLKRNKRLLEGKFICEVQLERLQNKYEKMRNHENRFRTEDYVKEAKAILNQQQKFYPQISNEFINQYIDLIERRRQYYEGPGSEKSPTPYGSYYVDENGQLAYRSMIEKMRGKCTYFPEKYRMAKMSFTAELFNLLNDLNKIQIEGEYLTPEDKKYLVDHFIKKGKNVTLKQILKYKNVSEDADVRGYRVDLKTGNPLFTEFKGYKEINKVVDTNNLPKDLLDRIDVLDEIAEILTAEKSYTRREKQLGDLFTRYYSDPHIIEKMVNAFKELTTFTGYHALSKDAVMAILDDLWETNKNQMELFTEKGLEQKRFKQLAQRKNIEFDDRAILSTVAKRAHREAIKIVNEVRKRYGELDAIVVETAREKNSEEKRKMYADFQKQMGKFEKEMANLLGVKNLSELKLNAKQHLALKLWQSQDGKCIYSGKSISVNDIVDNPDLFEIDHIIPVSISFDDSQSNKVLCYHGENQKKGQRTPYQYFSSGRASRTFDQFKVDVLNLYKSKRINNKKKEYLLEMRDVKNNEELQKEFINRNLVDTQYAMRTFSMTLRTFFKTHGINTKVFSIKGSFTSALRRRAHINKDRDENYAHHAIDALIVAAIGKMPVFKFFKEFAIDDNGVIVNFDTGEILDENKFFDHAFINFIRNLKNVESKVKYSHKVDRKANRSMSNQTIYGTRKKDGEVFYLGRTPNLYQMDKKQADAVIKKIKKNPENFLLFQHNIDTFQLIQKIIDEYKNHDNPFKAFYDEHGYIMKDRKVPVKRLKYYDRKLGVHMKITDKYPNAKNDVVLLTIKGVRIDVYKNSDGHYKYLGVPYYWFKRQGNKYVLDMERYEAEKQQPYKNIDDSYEFQFSLYKNDRISYEKDGVYTERVFRGDNNPRQNIIEVDYIYKKKEERKEGLLTPSTIKNFYKYNVDVLGNTYKIEKENFKSTLQL

SEQ ID NO: 19961 - protein, 1134 aa, unidentified
  REGION 1..1134: note = Cas Enzyme sequence
MKYVIGMDIGIGSIGWSVIRSDADCKRIEDFGVRIFDPGENASDRKSNSQIRREYRSVRRVLRRRKHRKELLKAHLENIGLTTIDRINEYFKHADGDIISLRVKGLDKKLAPEEIAACLINIANRRGYRPFYENEELSQYEKTSLNKTRQFMLSGEYRTSAEMILKNEQFDSEESEYRSYRNRSGNEETVLIERKWLRDEVEKILKKQSEFYPCLNDRNTNAIKRIIFDQRDFEDGPGDKNDPFRRYTGFLESMGQCRFYPDEKRGYRATLTADTYSLVNELSQYSYVDENGCFVFDSALAHDLIASALKNAKFTKSDFNKICKAHGIVPIYGGKGKDTDISRCFKFLKTIKPILEADGFDWETVCNIDTASDPDSILNRIGIIVSENITPARRKKALKNLNILNDDSITALCNYKFGGTSSVSYKYMSGAIEAFLNGDIYGKHQASHIEETATESVKHTKLPVFDKDFEFFKNPVVFRAINESRKVINAIIEKYGSPSAINIEVGSEVSRSFANRTADKNEQTKRMKEKDAAKKAIAELLGVDIASVTSKMIDRYFLGELQGWKCLYSGKEINKEECLGGSKAYEIDHIVPFSLILDNTLNNKALVLTSENQLKKQRTPLMYLSGERRKNFIGTVNELFRAKKIKKKKYAYLLQPDLNDEKMSEWKSRNLNDMRYISRFMVGYLKENLKFDNSSKSEGRWQNVYAVKGSLTSMFRKLWLNETTWGRADKASIKAETYLDHAVDAVVIGNCLPVYVEIAQVNLRLRDIYKSNGRQFVAEYWDCFNKGVEMISRYYNIDKDTVRAFLKKSDRIPSLIPDLREEVDRRFVDHAIYSKYQKEIADHEGKDFEKPTYEEAEQAYRVSMENLYPTDLQFAHGLSMPLISCKPERKYRGEITAANPVKLREIDGKLYTLSKKEIGKIERKDIEKIYTSDTQLIAYLIELFDGAKDTATLGDIMKEKGISEIRTKNGNAIRKLTLRNICNKDFLKKEIDENNHTYLDTAKYYCVELYKDIKNQLQVQGIKRADIILQNGKLCLAPWYKQPDDYFKHVMYLQKNDYLKVYKNGKLSFCGYYRSAAGLTNSRLYFIIDNQPEDKKKYITLKLEVKKYSVDILGKIGKKEIKCGEPLSSAKVKK

SEQ ID NO: 19962 - protein, 1138 aa, unidentified
  REGION 1..1138: note = Cas Enzyme sequence
MKYVIGMDIGIGSIGWSVIRSDADCKRIEDFGVRIFDPGENASDRKSNSQIRREYRSVRRVLRRRKHRKELLKAHLENIGLTTIDRINEYFKHADGDIISLRVKGLDKKLAPEEIAACLINIANRRGYRPFYENEELSQYEKTSLNKTRQFMLSGEYRTSAEMILKNEQFDSEESEYRSYRNRSGNEETVLIERKWLRDEVEKILKKQSEFYPCLNDRNTNAIKRIIFDQRDFEDGPGDKNDPFRRYTGFLESMGQCRFYPDEKRGYRATLTADTYSLVNELSQYSYVDENGCFVFDSALAHDLIASALKNAKFTKSDFNKICKAHGIVPIYGGKGKDTDISRCFKFLKAIKPILEADGFDWETVCNIDTASDPDSILNRIGIIVSENITPARRKKALKNLNILNDDSITALCNYKFGGTSSVSYKYMSGAIDAFLNGDIYGKHQAIHIEETATESVKHTKLPVFDKDFEFFKNPVVFRAINESRKVINAIIEKYGSPSAINIEVGSEVSRSFANRTADKNEQTKRMKEKDAAKKAIAELLGVDIASVTSKMIDRYFLGELQGWKCLYSGKEINKEECLRGSKAYEIDHIVPFSLILDNTLNNKALVLTSENQLKKQQTPLMYLSGERRKNFIGTVNELFRAKKIKKKKYAYLLQPDLNDEKMSEWKSRNLNDMRHISRFMVGYLKENLKFDNSSKSEGRWQNVYAVKGSLTSMFRKLWLNETTWGRADKASIKAETYLDHAVDAVVIGNCLPVYVEIAQVNLRLRDIYKSNGRQFVAEYWDCFNKGVEMISRYYNIDKDTIRAFLKKSDRIPSLIPDLREEVDRRFVDHAIYSKYQKEIADHEGKDFEKPTYEEAEQAYRVSMENLYPTDLQFAHGLFMPLISCKPERKYRGEITAANPVKLREIDGKLYTLSKKEIGKIERKDIEKIYTSDTQLIAYLIELFDGAKDTATLGDIMKEKGISEIRTKNGNAIRKLTLRNICNKNFLKKEIDENNHTYLDTAKYYCVELYKDIKDKLRVQGIKRADIIPQNGKLCLAPWYKQPDGYFKHVMYLQKNDYLKVYENGELLFCGYYLSVKDIGNSKLYFIIDNQPGQNRKENCKSIHIKSEVKKYTVDILGKIGKKEIKCGEPLSSAKVKK

SEQ ID NO: 19963 - protein, 1037 aa, unidentified
  REGION 1..1037: note = Cas Enzyme sequence
MRYRLGLDVGTSSLGWAVLELDNTDRPSPIRLVDMGVRIYSDGRNPKDKTSLATQRRVARGMRRQRDRRLKRRARLMDDLIALGLMPTDVSERKSLEKLDPYELRAKAVEGPVSKHELGRALFHLDQRRGFKSNRKTDAAAGDDTGVIRSGVAELDRRMTQSPAKTLGAYLHNRMKRGKGTRARPDVGIYPERRHYQQEFQCIRDTQAPHQTLSNADWERLEQTIFFQRPLRPVLPGRCQFETNEYRAPKALPSTQRFRILQETSNLRIIPEVGNDRAFPQAALEQVIERLGNQKTLGFNAIAKLGELEGGERLNFDDGKRKHLQGDETAAAVIKAGWPKENWSELSLEDRDRVVELLIDVEDEAKIVQQLTTDWGLDPETALAVSRARLPEGYGSLSRKAIGRLLPLMDQGIPYYVAAKEVYGHHSNFEDGEILKKLPYYGERLTTSVVGGGDHSAETEEGRYGRFPNPTVHIGLNQIRRLINALIDQYGHPQEIAVELGREMKQTLEQKKETLSRQKADQDRNEKYRAQIEEMGAAATPDLMRRLRLWEEQGPPQARVCPYSGDPLSFEQVVRGDDLDVDHILPFSKTLDDSMSNKVLVKRVMNRRKGDRAPETAFQGDEYEAIQLRTAKWPANKAWRFRVGAMERFNKNSDFLDRQLNETRHLARATKTYLNAICPNKDTWVLTGKMTALLRARWGLNSLLGSSNQKDRTDHRHHAIDAVVQAMTDRGLLQQIARASARDDVDRVIDAVPENPITLPDLRDQVRDKVNNLIVYHKPNHLRPNRNGATTGALHNATAYGLVGAPDSNNKQLVRYRKPLASLTPEKLQETIADRALAARIADDWAKAKAAGIKWEAYTAALEKPDKERGGGLPKTGIKSVRIVEGMSATSLFSISDASGRPYKAYKTDGNAFMDVYEDAKGRWRGETVRTIDANQNGFTPEWRSLPDMRFVMRLHKDDLVAIEEGGPKNTFIVIALTGQRIVLAPHNEAGNLRNRDSDKEDPFGYLRKTAGTAKAIKMRRLKIDELGHVFDPQLPT

SEQ ID NO: 19964 - protein, 1363 aa, unidentified
  REGION 1..1363: note = Cas Enzyme sequence
MIKGDYYLGLDLGTNSVGWAVTDLEYNLLRAKGKDLWGVRLFDEAETAANRRSKRIARRRIERDKARKALLKEFFADEIEKVDPSFYMKMNESFFKLKDRSAENQQPYSLFNDFDFTDKEFHDKYKTIFHLRSDLIHSDKTFDVRLVFLAIYNMFSHRGHFLNATLDAEKNDTGFENAYVEMIEVLEEHEFGIPSNIEVDAIEEILSDNKSSRTNHFEQLLALFNVTKKDKRNCTVLRLLAGLSINLKDIYDQELDKESDKKFGFRESNYEEVIEEVYNIVDEDYKNIIEKIKMVHDAGLLSKIMIGCEYLSDARVKIYDMHQKDLKQLKALLKKYNKGAYEKLFRTIESGTYSAYVGSVNSHGKIERRQGKERGKDVLYKSIEKAIKDIPDNDKDKIEIKAKIDAEIFLEKQLTNKNGVIPNQVHSRELRAILNNAEKYLPFLSEVDNKGYSIKEKIIQLFEFQIPYYVGPLGREFNGKKGYNCWAVRKESGRVFPWNFDEKIDKNASAEEFIKRMVRKCTYFNDENTLPKNSLIYEKFMVLNEINAIRINGCRLDTETKQAIYNDLFIKGKKVTSKKIKEYLVSINKMDNESEISGIDTEWSKTLTSIAKLKGVFNGKIENNKEIIEDIIFWSTIYSGDKKLIRSKIETVYPNILNENQLKKILGFRFTGWGNLSRHFLEGIMGKDKNGNAENSIIGFLWNEQVTLQELLSQNYTFRETIDEQFLGVEKPLSSWEIEDLDDFYLSPSVKRMTWQTMKIVEEIQRVLGKSPKRIFVEMTRSGGKKERTVSRKNKLISLYKSLGKEGKEFINEIDGKDENFFNRRKVYLYYLQMGKCMYSEEVIDFHKLLNDNLYDIEHIYPQHYIKDDSIENNLVLVKKELNAGKQDKPLTSEIQADRYTFWHMLKDKGFISSEKFTRLTRRNDSFTEDELTGFINRQIVETSQASKAITQILQQSMDENCKIVFSKAKLISEFRQKFDLPKSRIVNDLHHANDAYLNIVVGNAYYVKFTGNPYKFIKNAIKNQELNENKYHLSDFYKNDIYNKNEVAWRCGEKENPTIATVKKMINKLTPIITRKVEVEHGEYFKETLNSHLESKKGIYIGQKTHNSVLSNVEEYGGKTKIKIQGYALIEYKKGNDTIRMFKAIPWLIGNIKNIDEHKLIAYIIDDLQTEDVNTDIKDLRICKKFISKNSLIKMNGAYYYLGGKTGNRIEFKNAMQFKIPLDRIEYIHKLEKANAKNNYYEVDRLHNMVITNEKNIDLYKFIVEKLRIKPFCKSRKTSLVDIFNDLFDTFKTTDISNQCIIIERILRNIKNSDAINLGPIGGGSSQGKTFVMARIDKCTELKLIQQSVTGLFKSETDLLKI

SEQ ID NO: 19965 - protein, 1372 aa, unidentified
  REGION 1..1372: note = Cas Enzyme sequence
MNSDKREDYYVGLDMGTGSLGGAVTDTQYHLLKVKGKDFWFVREYETAKSQLDRRTHRIAKRRLQRHKARIGLIRSYFAEDVLKHDPLFYIRQDNSKYYQEDKDARLTTKDSLFADPGYGDKEYHDDKEYPTIFHLRQALLRDQIKDEERYSRFLYLAIINMFEHRGHFLLNTESSDLNADMIKDVGELVMNAICGVSEYGSVTYKEIIEILEDKNISRTAKKDQIASKVDIKKSEKAQMERIKCLCGMEADARVMFELEADEKIKIAFQQAAFEDEKEEIEVAIGEDRYLIIENMKQLYDYSQLQSVLNGFDYLSDARVQMYEKHKEDLHLLKKVYRKNLDREMYDRMFRSGEEGSYCAYSNSTNSVDSLAEAKKYRRNMKKRSQKDLYDRIKKDLKEVHDADADAIRKEMELERFLPKQITGANGIIPNQVHRKELKKILENAEHHLDFLKEKDESGYTVSERILMLFSSNIPYYVGPVGSGSKTGWAKIQESGQVLPWNMEQKIDMEQTSERFITNLIRECTYLSGEKVLPKQSLLYESYCVLNEINNLRIHGKRIVPELKQDIYREVFQGARLGKKVTKKNICTYLINRGLITEESEVSGIDKEINAYLPSYGKMYGVFGERLREEAVQEIAEKIIYYGTIYGDAKAMFRKKLNQYVSDGWMTESQAKRVSGYKFKDWARLSRSMLCLSGCDKSTGEKISLIRAMWEHNLNFMELIYSEDFTFQKELEERRKALGKTLQEFQFEDLDEYYYSAPVKRMIWQAVQALKEITQIMGHNPKRIFIEMTRTEEEKGEQGRKNSREKRLLKLYESIRDERNWAAEIKNANASGKLNSKKMYLYYLQMGRDVYTGEPIDIEDLFDDSRYDIDHIYPRSLTNDNNIENNLVLVSKTINQNEKKNDYPLPEKVRTNKKVRDLWHTFHKMGFMNDEKYNRLTSTERLSEDQLAGFIARQLVETAQGAKGIAELLKAMLPGTDIVYAKARNVSDFRKEYKMLKSRLVNDYHHAQDAYLNIIVGNVYFMKFTRNPMNFVKKEARREGRNYDYNLYKMYSKDIIRNGEKAWIATSEQGPGTIRQVKETMGRNTPIITRQAFEQRGELFNLQPVGKYSANKDNYVPLKIYDEKMQDVCKYGGYTSLNPSYFIFIEHGPEKKRKKCFEVIHSYYAAQIKTEKDLIDFLLQKGYKNPRVINDGIKKNALIKYNGYFLYIIGMDARKNIEFSNATAMCLKNKYIQYVCKLEKMNKAILLSEKQKTNLHWDERITCESNLELYRELTEKHLHSIYQRHPRSIGKCLAEGEGAFKLLDIEEQVKILCDIVQYTSFQRGVFSLKVLGGPKEVGRIRISGNMTEAKECKLINYSITGMYKTEMDLLKK

SEQ ID NO: 19966 - protein, 1372 aa, unidentified
  REGION 1..1372: note = Cas Enzyme sequence
MNSDKREDYYVGLDMGTGSLGGAVTDTQYHLLKVKGKDFWFVREYETAKSQLDRRTHRIAKRRLQRHKARIGLIRSYFAEDVLKHDPLFYIRQDNSKYYQEDKDARLTTKDSLFADPGYGDKEYHDDKEYPTIFHLRQALLRDQIKDEERYSRFLYLAIINMFEHRGHFLLNTESSDLNADMIKDVGELVMNAICGVSEYGSVTYKEIIEILEDKNISRTAKKDQIASKVDIKKSEKAQMERIKCLCGMEADARVMFELEADEKIKIAFQQAAFEDEKEEIEVAIGEDRYLIIENMKQLYDYSQLQSVLNGFDYLSDARVQMYEKHKEDLHLLKKVYRKNLDREMYDRMFRSGEEGSYCAYSNSTNSVDSLAEAKKYRRNMKKRSQKDLYDRIKKDLKEVHDADADAIRKEMELERFLPKQITGANGIIPNQVHRKELKKILENAEHHLDFLKEKDESGYTVSERILMLFSSNIPYYVGPVGSGSKTGWAKIQESGQVLPWNMEQKIDMEQTSERFITNLIRECTYLSGEKVLPKQSLLYESYCVLNEINNLRIHGKRIVPELKQDIYREVFQGARLGKKVTKKNICTYLINRGLITEESEVSGIDKEINAYLPSYGKMYGVFGERLREEAVQEIAEKIIYYGTIYGDAKAMFRKKLNQYVSDGWMTESQAKRVSGYKFKDWARLSRSMLCLSGCDKSTGEKISLIRAMWEHNLNFMELIYSEDFTFQKELEERRKALGKTLQEFQFEDLDEYYYSAPVKRMIWQAVQALKEITQIMGHNPKRIFIEMTRTEEEKGEQGRKNSREKRLLKLYESIRDERNWAAEIKNANASGKLNSKKMYLYYLQMGRDVYTGEPIDIEDLFDDSRYDIDHIYPRSLTNDNNIENNLVLVSKTINQNEKKNDYPVPEKVRTNKKVRDLWHTLHKMGFMNDEKYNRLTSTEHLTDDQLAGFIARQLVETAQGAKGIAELMKAMLPGTDIVYAKARNVSDFRKEYKMLKSRLVNDYHHAQDAYLNIVVGNVYFTKFTRNPVNFVKKEARRDGRNYDYNLYKMYSKDIIRNGEIAWIATSEQGPGTIRLVKETMGRNTPVITRQAFEQQGELFNLQPVGKYSAKKDNYVPLKINDEKVQDVSKYGGYTSLNPSYFIFIEHGPEKKRKKCFEVIQSYYSARIKTEKDLIDFLVQKGYKNPKVINAGIKKNALIKYNGYFLYIIGMDARKNIEFSNATAMCLKNNYIQYVCKLEKMNKAILLSEKQKTNLHWDERITCESNLELYRELTEKHLHSIYQKHPKSIGNCLAEGEGAFKLLDIEQQVKILCDIVQYTSFQRGVFSLKVLGGPKEVGRIRISGNMTEAKECKLINYSITGMYKTEMDLLKK

SEQ ID NO: 19967 - protein, 1179 aa, unidentified
  REGION 1..1179: note = Cas Enzyme sequence
MNSDKRKDYYVGLDMGTGSLGGAVTDTQYHLLKVKEKDFWFVREYETAKSQLDRRTHRIAKRRLQRHKARIGLIRSYFAEDVLKHDPLFYIRQDNSKYYQEDKDARLTTKDSLFADPGYGDKEYHDDKEYPTIFHLRQALLRDQIKDEERYSRFLYLAIINMFEHRGHFLLNTESSDLNADMIKDVGELVMNAICGVSEYGSVTYKEIIEILEDKNISRTAKKDQIASKVDIKKSEKAQMERIKCLCGMEADARVMFELEADEKIKIAFQQAAFEDEKEEIEVAIGEDRYLIIENMKQLYDYSQLQSVLNGFDYLSDARVQMYEKHKEDLHLLKKVYRKNLDREMYDRMFRSGEEGSYCAYSNSTNSVDSLAEAKKYRRNMKKRSQKDLYDRIKKDLKEVHDADADAIRKEMELERFLPKQITGANGIIPNQVHRKELKKILENAEHHLDFLKEKDESGYTVSERILMLFSSNIPYYVGPVGSGSKTGWAKIQESGQVLPWNMEQKIDMEQTSERFITNLIRECTYLSGEKVLPKQSLLYESYCVLNEINNLRIHGKRIVPELKQDIYREVFQGARLGKKVTKKNICTYLINRGLITEESEVSGIDKEINAYLPSYGKMYGVFGERLREEAVQEIAEKIIYYGTIYGDAKAMFRKKLNQYVSDGWMTESQAKRVSGYKFKDWARLSRSMLCLSGCDKSTGEKISLIRAMWEHNLNFMELIYSEDFTFQKELEERRKALGKTLQEFQFEDLDEYYYSAPVKRMIWQAVQALKEITQIMGHNPKRIFIEMTRTEEEKGEQGRKNSREKRLLKLYESIRDERNWAAEIKNANASGKLNSKKMYLYYLQMGRDVYTGEPIDIEDLFDDSRYDIDHIYPRSLTNDNNIENNLVLVSKTINQNEKKNDYPVPEKVRTNKKVRDLWHTLHKMGFMNDEKYNRLTSTEHLTDDQLAGFIARQLVETAQGAKGIAELMKAMLPGTDIVYAKARNVSDFRKEYKMLKSRLVNDYHHAQDAYLNIVVGNVYFTKFTRNPVNFVKKEARRDGRNYDYNLYKMYSKDIIRNGEIAWIATSEQGPGTIRLVKETMGRNTPVITRQAFEQQGELFNLQPVGKYSAKKDNYVPLKINDEKVQDVSKYGGYTSLNPSYFIFIEHGPEKKRKKCFEVIQSYYSARIKTEKDLIDFLV

SEQ ID NO: 19968 - protein, 1372 aa, unidentified
  REGION 1..1372: note = Cas Enzyme sequence
MNSDKRKDYYVGLDMGTGSLGGAVTDTQYHLLKVKGKDFWFVREYETAKSQLDRRTHRIAKRRLQRHKARIGLIRSYFAEDVLKHDPLFYIRQDNSKYYQEDKDARLTTKDSLFADPGYGDKEYHDDKEYPTIFHLRQALLRDQIKDEERYSRFLYLAIINMFEHRGHFLLNTESSDLNADMIKDVGELVMNAICGVSEYGSVTYKEIIEILEDKNISRTAKKDQIASKVDIKKSEKAQMERIKCLCGMEADARVMFELEADEKIKIAFQQAAFEDEKEEIEVAIGEDRYLIIENMKQLYDYSQLQSVLNGFDYLSDARVQMYEKHKEDLHLLKKVYRKNLDREMYDRMFRSGEEGSYCAYSNSTNSVDSLAEAKKYRRNMKKRSQKDLYDRIKKDLKEVHDADADAIRKEMELERFLPKQITGANGIIPNQVHRKELKKILENAEHHLDFLKEKDESGYTVSERILMLFSSNIPYYVGPVGSGSKTGWAKIQESGQVLPWNMEQKIDMEQTSERFITNLIRECTYLSGEKVLPKQSLLYESYCVLNEINNLRIHGKRIVPELKQDIYREVFQGARLGKKVTKKNICTYLINRGLITEESEVSGIDKEINAYLPSYGKMYGVFGERLREEAVQEIAEKIIYYGTIYGDAKAMFRKKLNQYVSDGWMTESQAKRVSGYKFKDWARLSRSMLCLSGCDKSTGEKISLIRAMWEHNLNFMELIYSEDFTFQKELEERRKALGKTLQEFQFEDLDEYYYSAPVKRMIWQAVQALKEITQIMGHNPKRIFIEMTRTEEEKGEQGRKNSREKRLLKLYESIRDERNWAAEIKNANASGKLNSKKMYLYYLQMGRDVYTGEPIDIEDLFDDSRYDIDHIYPRSLTNDNNIENNLVLVSKTINQNEKKNDYPVPEKVRTNKKVRDLWHTLHKMGFMNDEKYNRLTSTEHLTDDQLAGFIARQLVETAQGAKGIAELMKAMLPGTDIVYAKARNVSDFRKEYKMLKSRLVNDYHHAQDAYLNIVVGNVYFTKFTRNPVNFVKKEARRDGRNYDYNLYKMYSKDIIRNGEIAWIATSEQGPGTIRLVKETMGRNTPVITRQAFEQQGELFNLQPVGKYSAKKDNYVPLKINDEKVQDVSKYGGYTSLNPSYFIFIEHGPEKKRKKCFEVIQSYYSARIKTEKDLIDFLVQKGYKNPKVINAGIKKNALIKYNGYFLYIIGMDARKNIEFSNATAMCLKNNYIQYVCKLEKMNKAILLSEKQKTNLHWDERITCESNLELYRELTEKHLHSIYQKHPKSIGNCLAEGEGAFKLLDIEQQVKILCDIVQYTSFQRGVFSLKVLGGPKEVGRIRISGNVTEAKECKLINYSITGMYKTEMDLLKK

SEQ ID NO: 19969 - protein, 1372 aa, unidentified
  REGION 1..1372: note = Cas Enzyme sequence
MNSDKREDYYVGLDMGTGSLGGAVTDTQYHLLKVKGKDFWFVREYETAKSQLDRRTHRIAKRRLQRHKARIGLIRSYFAEDVLKHDPLFYIRQDNSKYYQEDKDARLTTKDSLFADPGYGDKEYHDDKEYPTIFHLRQALLRDQIKDEERYSRFLYLAIINMFEHRGHFLLNTESSDLNADMIKDVGELVMNAICGVSEYGSVTYKEIIEILEDKNISRTAKKDQIASKVDIKKSEKAQMERIKCLCGMEADARVMFELEADEKIKIAFQQAAFENEKEEIEVAIGEDRYLIIENMKQLYDYSQLQSVLNGFDYLSDARVQMYEKHKEDLHLLKKVYRKNLDREMYDRMFRSGEEGSYCAYSNSTNSVDSLAEAKKYRRNMKKRSQKDLYDRIKKDLKEVHDADADAIRKEMELERFLPKQITGANGIIPNQVHRKELKKILENAEHHLDFLKEKDESGYTVSERILMLFSSNIPYYVGPVGSGSKTGWAKIQESGQVLPWNMEQKIDMEQTSERFITNLIRECTYLSGEKVLPKQSLLYESYCVLNEINNLRIRGKRIVPELKQDIYREVFQSSRMGKKVTKKNLCTYLINRGLITEESEVSGIDKEINAYLPSYGKMYGVFGERLREEAVQEIAEKIIYYGTIYGDAKSMFRKKLNQYVSDGWLTEPQAKRISGYKFKDWARISRSMLCLSGCDKSTGEKISLIRAMWEYNLNFMELIYSEDFTFQKELEERRKALGKTLQEFQFEDLDEYYYSAPVKRMIWQAVQALKEITQIMGHNPKRIFIEMTRTEEEKGEQGRKNSREKRLLKLYESIRDERNWAAEIKNANASGKLNSKKMYLYYLQMGRDVYTGEPIDIEDLFDDSRYDIDHIYPRSLTNDNNIENNLVLVSKTINQNEKKNDYPVPEKVRTNKKVRDLWHTLHKMGFMNDEKYNRLTSTEHLTDDQLAGFIARQLVETAQGAKGIAELMKAMLPGTDIVYAKARNVSDFRKEYKMLKSRLVNDYHHAQDAYLNIVVGNVYFTKFTRNPVNFVKKEARRDGRNYDYNLYKMYSKDIIRNGEIAWIATSEQGPGTIRLVKETMGRNTPVITRQAFEQQGELFNLQPVGKYSAKKDNYVPLKINDEKVQDVSKYGGYTSLNPSYFIFIEHGPEKKRKKCFEVIQSYYSARIKTEKDLIDFLVQKGYKNPRVINAGIKKNALIKYNGYFLYIIGMDARKNIEFSNATAMCLKNNYIQYVCKLEKMNKAILLSEKQKTNLHWDERITCESNLELYRELTEKHLHSIYQKHPKSIGKCLAEGEGAFKLLDIEQQVKILCDIVQYTSFQRGVFSLKVLGGPKEVGRIRISGNMTEAKECKLINYSITGMYKTEMDLLKK

SEQ ID NO: 19970 - protein, 1372 aa, unidentified
  REGION 1..1372: note = Cas Enzyme sequence
MNSDKREDYYVGLDMGTGSLGGAVTDTQYHLLKVKGKDFWFVREYESAKSQLDRRTHRIAKRRLQRHKARIGLIRSYFAEDVLKRDPLFYIRQDNSKYYQEDKDVRLTTKDSIFADPGYGDKEYHNDKEYPTIFHLRQALLRDQIKDEERYSRFLYLAIINMFEHRGHFLLNTESSDLNADMIKDVGELVMNAICGVSEYGSVTYKEIIEILEDKNISRIAKKDQIASKVDIKKSEKAQMERIKCLCGMEADARVMFEIEANEKIKIAFQQAAFEDEKEEIEATIGEDRYLIIENMKQLYDYSQLQSVLNGFDYLSDARVQMYEKHKEDLHLLKKVYRKNLDREMYDRMFRSGEEGSYCAYSNSTNSVDSLAGAKKYRRNMKKRSQKDLYDRIRKDLKEVHDADADAIRKEMELECFLPKQITGANGIIPNQVHRKELKKILENAEHHLDFLKEKDESGYTVSERILMLFSSNIPYYVGPVGSGSKTGWAKIQESGQVLPWNMEQKIDIEQTSECFITNLIRECTYLSKEKVLPKQSLLYESYCVLNEINNLRIHGKRIVPELKQDIYREVFQGSRLGKKVTKKNICAYLINRGLITEESEVSGIDKEINAYLPSYGKMYGVFGERLREEAVQKIAEKTIYYGTIYGDAKSMFRKKLNQYVSDGWMTESQAKRISGYKFKDWARLSRSMLCLSGCDKSTGEKISLIRAMWEYNLNFMELIYSEDFTFQKELEERRKALGKTLQEFQFEDLNEYYYSAPVKRMIWQAVQALKEITQIMGHNPKRIFIEMTRTEEEKGEQGRKNSREKRLLKLYESVRDERNWAAEIKNANASGELNSKKMYLYYLQMGRDVYTGEPIDIEDLFDDSRYDIDHIYPRSLTNDNNIENNLVLVSKTINQNEKKNDYPVPEKVRTNIKVRDLWYKLHKKGFMNDEKYNRLTSTERLSEDQLAGFIARQLVETAQGAKGIAELMKAMLPGTDIVYAKARNVSDFRKEYKMLKSRLVNDYHHAQDAYLNIIVGNVYFMKFTRNPMNFVKKEARRDGRNYDYNLYKMYSKDIIRNGEKAWIATSEQGPGTIRLVKETMGRNTPIITRQAFEQRGELFNLQPVGKYSAKKDNYVPLKINDEKMQDVSKYGGYTSLNPSYFIFIEHGPEKKRKKCFEVIHSYYAAQIKTEKDLIDFLLQKGYKNPRVINARIKKNALIKYNGYFLYIIGMDARKNIEFSNATAMCLKNKYIQYVCKLEKMNKAILLSEKQKKNLHWDERITCESNLELYRELTEKHLHSIYQRHPRSIGKCLADGEGAFKLLDIEEQVKLLCDIVQYTSFQRGLFSLKVLGGPKEVGRIRISGDMTEAKECKLVNYSITGMYKTEMDLLKK

SEQ ID NO: 19971 - protein, 1380 aa, unidentified
  REGION 1..1380: note = Cas Enzyme sequence
MSIYFGGFFMNSDKREDYYVGLDMGTGSLGGAVTDTQYHLLKVKGKDFWFVREYETAKSQLDRRTHRIAKRRLQRHKARIGLIRSYFAEDVLKHDPLFYIRQDNSKYYQEDKDARLTTKDSLFADPGYGDKEYHDDKEYPTIFHLRQALLRDQIKDEERYSRFLYLAIINMFEHRGHFLLNTESSDLNADMIKDVGELVMNAICGVSEYGSVTYKEIIEILEDKNISRTAKKDQIASKVDIKKSEKAQMERIKCLCGMEADARVMFELEADEKIKIAFQQAAFENEKEEIEVAIGEDRYLIIENMKQLYDYSQLQSVLNGFDYLSDARVQMYEKHKEDLHLLKKVYRKNLDREMYDRMFRSGEEGSYCAYSNSTNSVDSLAEAKKYRRNMKKRSQKDLYDRIKKDLKEVHDADADAIRKEMELERFLPKQITGANGIIPNQVHRKELKKILENAEHHLDFLKEKDESGYTVSERILMLFSSNIPYYVGPVGSGSKTGWAKIQESGQVLPWNMEQKIDMEQTSERFITNLIRECTYLSGEKVLPKQSLLYESYCVLNEINNLRIRGKRIVPELKQDIYREVFQSSRMGKKVTKKNLCTYLINRGLITEESEVSGIDKEINAYLPSYGKMYGVFGERLREEAVQEIAEKIIYYGTIYGDAKSMFRKKLNQYVSDGWLTEPQAKRISGYKFKDWARISRSMLCLSGCDKSTGEKISLIRAMWEYNLNFMELIYSEDFTFQKELEERRKALGKTLQEFQFEDLDEYYYSAPVKRMIWQAVQALKEITQIMGHNPKRIFIEMTRTEEEKGEQGRKNSREKRLLKLYESIRDERNWAAEIKNANASGKLNSKKMYLYYLQMGRDVYTGEPIDIEDLFDDSRYDIDHIYPRSLTNDNNIENNLVLVSKTINQNEKKNDYPVPEKVRTNKKVRDLWHTLHKMGFMNDEKYNRLTSTEHLTDDQLAGFIARQLVETAQGAKGIAELMKAMLPGTDIVYAKARNVSDFRKEYKMLKSRLVNDYHHAQDAYLNIVVGNVYFTKFTRNPVNFVKKEARRDGRNYDYNLYKMYSKDIIRNGEIAWIATSEQGPGTIRLVKETMGRNTPVITRQAFEQQGELFNLQPVGKYSAKKDNYVPLKINDEKVQDVSKYGGYTSLNPSYFIFIEHGPEKKRKKCFEVIQSYYSARIKTEKDLIDFLVQKGYKNPRVINAGIKKNALIKYNGYFLYIIGMDARKNIEFSNATAMCLKNNYIQYVCKLEKMNKAILLSEKQKTNLHWDERITCESNLELYRELTEKHLHSIYQKHPKSIGKCLAEGEGAFKLLDIEQQVKILCDIVQYTSFQRGVFSLKVLGGPKEVGRIRISGNMTEAKECKLINYSITGMYKTEMDLLK

SEQ ID NO: 19972 - protein, 1372 aa, unidentified
  REGION 1..1372: note = Cas Enzyme sequence
MNSDKREDYYVGLDMGTGSLGGAVTDTQYHLLKVKGKDFWFVREYETAKSQLDRRTHRIAKRRLQRHKARIGLIRSYFAEDVLKRDPLFYIRQDNSKYYQEDKDVRLTTKDSIFADPGYGDKEYHDDKEYPTIFHLRQALLRDQIKDEERYSRFLYLAIINMFEHRGHFLLNTESSDLNADMIKDVGELVMNAICGVSEYGSVTYKEIIEILEDKNISRTAKKDQIASKIDIKKSEKAQMERIKCLCGMEADARVMFEIEADEKIKIAFQQAAFEDEKEEIEVAIGEDRYLIIENMKQLYDYSQLQSVLNGFDYLSDARVQMYEKHKEDLHLLKKVYRKNLDREMYDRMFRSGEEGSYCAYSNSTNSVDSLAEAKKYRRNMKKRSQKDLYDRIKKDLKEVHDADADAIRKEMELERFLPKQITGANGIIPNQVHRKELKKILENAEHHLDFLKEKDESGYTVSERILMLFSSNIPYYVGPVGSGSKTGWAKIQESGQVLPWNMEQKIDIEQTSERFITNLIRECTYLSGEKVLPKQSLLYESYCVLNEINNLRIHGKRIVPELKQDIYREVFQGSRLGKKVTKKNICTYLINRGLITEESEVSGIDKEINAYLPSYGKMYGVFGERLREEAVQEIAEKIIYYGTIYGDAKPMFRKKLNQYVSGGWMTESEAKRISGYKFKDWARLSRSMLCLSGCDKSTGEKISLIRAMWEYNLNFMELIYSEDFTFQKELEERRKALGKNLQEFQFEDLDEYYYSAPVKRMIWQAVQSLKEITQIMGHNPKRIFIEMTRTEEEKGEQGRKNSREKRLLKLYESIRDERNWTAEIKNANASGKLNSKKMYLYYLQMGRDVYTGEPIDIEDLFDDSRFDIDHIYPRSLTNDNNIENNLVLVSKTINQNEKKNDYPVPEKVRTNKKVRDLWHTLHKMGFMNDEKYNRLTSTERLSEDQLAGFIARQLVETAQGAKGIAELMKAMLPGTDIVYAKARNVSDFRKEYKMLKSRLVNDYHHAQDAYLNIIVGNVYFMKFTRNPMNFVKTEARRDGRNYDYNLYKMYSKDIIRNGEKAWIATSEQGPGTIRLVKEMMGRNTPIITRQAFEQRGELFNLQPVGKYSAKKDNYVPLKINDEKMQDVSKYGGYTSLNPSYFIFIEHGPEKKRKKCFEVIHSYYAAQIKTEKDLIDFLLQKGYKNPRVINARIKKNALIKYNGYFLYIIGMDARKNIEFSNATAMCLKNKYIQYVCKLEKMNKAILLSEKQKTNLHWDEKITCESNLELYRELTEKHLHSIYQRHPRSIGKCLADGEGAFKLLDIEEQVKIICDIVQYTSFQRGVFSLKVLGGPKEVGRIRISGNMTEAKECKLVNYSITGMYKTEMDLLKK

SEQ ID NO: 19973 - protein, 1372 aa, unidentified
  REGION 1..1372: note = Cas Enzyme sequence
MNSDQREDYYVGLDMGTGSLGGAVTDTQYHLLKVKGKDFWFVREYETAKSQLDRRTHRISKRRLQRHKARIGLIRSYFAEDVLKHDPLFYIRQDNSKYYQEDKDVRLTTKDSIFADPGYGDKEYHDDKEYPTIFHLRQALLRDQIKDEERYSRFLYLAIINMFEHRGHFLLNTESSDLNADMIKDVGELVMNAICGVSEYGSVTYKEIIEILEDKNISRTAKKDQIASKIDIKKSEKAQMERIKCLCGMEADARVIFEIEADEKIKIAFQQAAFEDEKEEIEAAIGEDRYLIIENMKQLYDYSQLQSVLNGFDYLSDARVQMYEKHKEDLHLLKKVYRKNLDREMYDRMFRSGEEGSYCAYSNSTNSVDSLAEAKKYRRNMKKRSQKDLYDRIKKDLKEVHDADADAIRKEMELERFLPKQITGANGIIPNQVHRKELKKILENAEHHLDFLKEKDESGYTVSERILMLFSSNIPYYVGPVGSGSKTGWAKIKESGQVLPWNMEQKIDIEQTSERFITNLIRECTYLSGEKVLPKQSLLYESYCVLNEINNLRIHGKRIVPELKQDIYREVFQGSRLGKKVTKKNICTYLINRGLITEESEVSGIDKEINAYLSSYGKMYGVFGERLREEAVQEIAEKIIYYGTIYGDAKAMFRKKLNQYVSDGWMTESQAKRISGYKFKDWARLSRSMLCLSGCDKSTGEKISLIRAMWEYNLNFMELIYSEDFTFQKELEERRKALGKILQEFQFEDLDEYYYSAPVKRMIWQAVQALKEITQIMGHNPKRIFIEMTRTEEEKGEQGRKNSREKRLLKLYESIRDERNWAAEIKNANASGKLNSKKMYLYYLQMGRDVYTGEPIDIEDLFDDSRYDIDHIYPRSLTNDNNIENNLVLVSKTINQNEKKNDYPLPEKVRTDKKVRDLWHTLHKMGFMNDEKYNRLTSTERLTDDQLAGFIARQLVETAQGAKGIAELLKAMLPGTDIVYAKARNVSDFRKEYKMLKSRLVNDYHHAQDAYLNIVAGNVYFTKFTRNPMNFVKKEARRDGRNYDYNLYKMYSKDIIRNGEKAWIATSEQGPGTIRLVKETMGRNTPIITRQAFEQRGELFNLQPVGKYSAKKDNYVPLKINDEKMQDVSKYGGYTSLNPSYFIFIEHGPEKKRKKCFEVIHSYYAAQIKTEKDLIDFLLQKGYKNPRVINARIKKNALIKYNGYFLYIIGMDARKNIEFSNATAMCLKNKYIQYVCKLEKMNKAILLSEKQKTNLHWDERITCESNLELYRELTEKHLHSIYQRHPRSIGKCLADGEGAFKLLDIEEQVKILCDIVQYTSFQRGVFSLKVLGGPKEVGRIRISGNMTEAKECKLVNYSITGMYKTEMDLLKK

SEQ ID NO: 19974 - protein, 1372 aa, unidentified
  REGION 1..1372: note = Cas Enzyme sequence
MNSDKREDYYVGLDMGTGSLGGAVTDTQYHLLKVKGKDFWFVREYETAKSQLDRRTHRIAKRRLQRHKARIGLIRSYFAEDVLKRDPLFYIRQDNSKYYQEDKDVRLTTKDSIFADPGYGDKEYRDDKEYPTIFHLRQALLRDQIKDEERYSRFLYLAIINMFEHRGHFLLNTESSDLNADMIKDVGELVMNAICGVSEYGSVTYKEIIEILEDKNISRTAKKDQIASKIDIKKSEKAQMERIKCLCGMEADARVMFEIEADEKIKIAFQQAAFEDEKEEIEVAIGEDRYLIIENMKQLYDYSQLQSVLNGFDYLSDARVQMYEKHKEDLHLLKKVYRKNLDREMYDRMFRSGEEGSYCAYSNSTNSVDSLEEAKKYRRNMKKRSQKDLYDRIKKDLKEVHDADADAIRKEMELERFLPKQITGANGIIPNQVHRKELKKILENAEHHLDFLKEKDESGYTVSERILMLFSSNIPYYVGPVGSGSKTGWAKIQESGQVLPWNMEQKIDIEQTSERFITNLIRECTYLSGEKVLPKQSLLYESYCVLNEINNLRIHGKRIVPELKQDIYREVFQGSRLGKKVTKKNICTYLINRGLITEESEVSGIDKEINAYLPSYGKMYGVFGERLREEAVQEIAEKIIYYGTIYGDAKPMFRKKLNQYVSGGWMTESEAKRISGYKFKDWARLSRSMLCLSGCDKSTGEKISLIRAMWEYNLNFMELIYSEDFTFQKELEERRKALGKNLQEFQFEDLDEYYYSAPVKRMIWQAVQSLKEITQIMGHNPKRIFIEMTRTEEEKGEQGRKNSREKRLLKLYESIRDERNWTAEIKNANASGKLNSKKMYLYYLQMGRDVYTGEPIDIEDLFDDSRFDIDHIYPRSLTNDNNIENNLVLVSKTINQNEKKNDYPVPEKVRTNKKVRDLWHTLHKMGFMNDEKYNRLTSTERLSEDQLAGFIARQLVETAQGAKGIAELMKAMLPGTDIVYAKARNVSDFRKEYKMLKSRLVNDYHHAQDAYLNIIVGNVYFMKFTRNPMNFVKTEARRDGRNYDYNLYKMYSKDIIRNGEKAWIATSEQGPGTIRLVKEMMGRNTPIITRQAFEQRGELFNLQPVGKYSAKKDNYVPLKINDEKMQDVSKYGGYTSLNPSYFIFIEHGPEKKRKKCFEVIHSYYAAQIKTEKDLIDFLLQKGYKNPRVINARIKKNALIKYNGYFLYIIGMDARKNIEFSNATAMCLKNKYIQYVCKLEKMNKAILLSEKQKTNLHWDEKITCESNLELYRELTEKHLHSIYQRHPRSIGKCLADGEGAFKLLDIEEQVKIICDIVQYTSFQRGVFSLKVLGGPKEVGRIRISGNMTEAKECKLVNYSITGMYKTEMDLLKK

SEQ ID NO: 19975 - protein, 1372 aa, unidentified
  REGION 1..1372: note = Cas Enzyme sequence
MNSDKREDYYVGLDMGTGSLGGAVTDTQYHLLKVKGKDFWFVREYETAKSQLDRRTHRIAKRRLQRHKARIGLIRLYFAEDILKHDPLFYIRQDNSKYYQEDKDARLTTKDSLFADPGYGDKEYHDVKEYPTIFHLRQALLRDQIKDEERYSRFLYLAIINMFEHRGHFLLNTESSDLNAYMIKDVGELVMNAICGVSEYGSVTYKEIIEILEDKNISRTAKKDQIASKIDIKKSEKAQMERIKCLCGMEADARVMFEIEADEKIKIAFQQAAFEDEKEEIEVAIGEERYLIIENMKQLYDYSQLQSVLNGFDYLSDARVQMYEKHKEDLHLLKKVYRKNLDREMYDRMFRSGEEGSYCAYSNSTNSVDSLAEAKKYRRNMKKRSQKDLYDRIKKDLKEVHDADADAIRKEMELERFLPKQITGANGIIPNQVHRKELKKILENAEHHLDFLKEKDESGYTVSERILMLFSSNIPYYVGPVGNGSKTGWAKIQESGQVLPWNMEQKIDIEQTSEHFITNLIRECTYLSGEKVLPKQSLLYESYCVLNEINNLRIHGKRIVSELKQDIYREVFQGSRLGKKVTKKNICTYLINRGLITEESEVSGIDKEINAYLPSYGKMYGVFGERLREEAVQEIAEKIIYYGTIYGDAKPMFRKKLNQYVSGGWMTESEAKRISGYKFKDWARLSRSMLCLSGCDKSTGEKISLIRAMWEYNLNFMELIYSEDFTFQKELEERRKALGKNLQEFQFEDLDEYYYSAPVKRMIWQAVQSLKEITQIMGHNPKRIFIEMTRTEEEKGEQGRKNSREKRLLKLYESIRDERNWTAEIKNANASGKLNSKKMYLYYLQMGRDVYTGEPIDIEDLFDDSRFDIDHIYPRSLTNDNNIENNLVLVSKTINQNEKKNDYPVPEKVRTNKKVRDLWHTLHKMGFMNDEKYNRLTSTERLSEDQLAGFIARQLVETAQGAKGIAELMKAMLPGTDIVYAKARNVSDFRKEYKMLKSRLVNDYHHAQDAYLNIIVGNVYFMKFTRNPMNFVKTEARRDGRNYDYNLYKMYSKDIIRNGEKAWIATSEQGPGTIRLVKEMMGRNTPIITRQAFEQRGELFNLQPIGKYSAKKDNYVPLKINDEKMQDVSKYGGYTSLNPSYFIFIEHGPEKKRKKCFEVIHSYYAAQIKTEKDLIDFLLQKGYKNPRVINARIKKNALIKYNGYFLYIIGMDARKNIEFSNATAMCLKNKYIQYVCKLEKMNKAILLSEKQKTNLHWDEKITCKSNLELYRELTEKHLHSIYQRHPRSIGKCLADGEGAFKLLDIEEQVKIICDIVQYTSFQRGVFSLKVLGGPKEVGRIRISGNMTEAKECKLVNYSITGMYKTEMDLLKK

SEQ ID NO: 19976 - protein, 1369 aa, unidentified
  REGION 1..1369: note = Cas Enzyme sequence
DKREDYYVGLDMGTGSLGGAVTDTQYHLLKVKGKDFWFVREYETAKSQLDRRTHRIAKRRLQRHKARIGLIRSYFAEDVLKRDPLFYIRQDNSKYYQEDKDVRLTTKDSIFADPGYGDKEYHDDKEYPTIFHLRQALLRDQIKDEERYSRFLYLAIINMFEHRGHFLLNTESSDLNADMIKDVGELVMNAICGVSEYGSVTYKEIIEILEDKNISRTAKKDQIASKIDIKKSEKAQMERIKCLCGMEADARVMFEIEADEKIKIAFQQAAFEDEKEEIEVAIGEDRYLIIENMKQLYDYSQLQSVLNGFDYLSDARVQMYEKHKEDLHLLKKVYRKNLDREMYDRMFRSGEEGSYCAYSNSTNSVDSLAEAKKYRRNMKKRSQKDLYDRIKKDLKEVHDADVDAIRKEMELERFLPKQITGANGIIPNQVHRKELKKILENAEHHLDFLKEKDESGYTVSERILMLFSSNIPYYVGPVGNGSKTGWAKIQESGQVLPWNMEQKIDIEQTSEHFITNLIRECTYLSGEKVLPKQSLLYESYCVLNEINNLRIHGKRIVSELKQDIYREVFQGSRLGKKVTKKNICTYLINRGLITEESEVSGIDKEINAYLPSYGKMYGVFGERLREEAVQEIAEKIIYYGTIYGDAKPMFRKKLNQYVSGGWMTESEAKRISGYKFKDWARLSRSMLCLSGCDKSTGEKISLIRAMWEYNLNFMELIYSEDFTFQKELEERRKALGKNLQEFQFEDLDEYYYSAPVKRMIWQAVQSLKEITQIMGHNPKRIFIEMTRTEEEKGEQGRKNSREKRLLKLYESIRDERNWTAEIKNANASGKLNSKKMYLYYLQMGRDVYTGEPIDIEDLFDDSRFDIDHIYPRSLTNDNNIENNLVLVSKTINQNEKKNDYPVPEKVRTNKKVRDLWHTLHKMGFMNDEKYNRLTSTERLSEDQLAGFIARQLVETAQGAKGIAELMKAMLPGTDIVYAKARNVSDFRKEYKMLKSRLVNDYHHAQDAYLNIIVGNVYFMKFTRNPMNFVKTEARRDGRNYDYNLYKMYSKDIIRNGEKAWIATSEQGPGTIRLVKEMMGRNTPIITRQAFEQRGELFNLQPIGKYSAKKDNYVPLKINDEKMQDVSKYGGYTSLNPSYFIFIEHGPEKKRKKCFEVIHSYYAAQIKTEKDLIDFLLQKGYKNPRVINARIKKNALIKYNGYFLYIIGMDARKNIEFSNATAMCLKNKYIQYVCKLEKMNKAILLSEKQKTNLHWDEKITCESNLELYRELTEKHLHSIYQRHPRSIGKCLADGEEAFKLLDIEEQVKIICDIVQYTSFQRGVFSLKVLGGPKEVGRIRISGNMTEAKECKLVNYSITGMYKTEMDLLKK

SEQ ID NO: 19977 - protein, 1381 aa, unidentified
  REGION 1..1381: note = Cas Enzyme sequence
MSIYYGGFFMNSDKREDYYVGLDMGTGSLGGAVTDTQYHLLKVKGKDFWFVREYESAKSQLDRRTHRIAKRRLQRHKARIGLIRSYFAEDVLKRDPLFYIRQDNSKYYQEDKDVRLTTKDSIFADPGYGDKEYHDDKEYPTIFHLRQALLRDQIKDEERYSRFLYLAIINMFEHRGHFLLNTESSDLNADMIKDVGELVMNAICGVSEYGSVTYKEIIEILEDKNISRTAKKDQIASKIDIKKSEKAQMERIKCLCGMEADARVMFEIEADEKIKIAFQQAAFEDEKEEIEVAIGEDHYLIIENMKQLYDYSQLQSVLNGFDYLSDARVQMYEKHKEDLHLLKKVYRKNLDREMYDRMFRSGEEGSYCAYSNSTNSVDSLAGAKKYRRNMKKRSQKDLYDRIKKDLKEVHDADADAIRKEMELECFLPKQITGANGIIPNQVHRKELKKILENAEHHLDFLKEKDESGYTVSERILMLFSSNIPYYVGPVGSGSKTGWAKIQESGQVLPWNMEQKIDIEQTSECFITNLIRECTYLSGEKVLPKQSLLYESYCVLNEINNLSIHGKRIVPELKQDIYREVFQGSRLGKKVTKKNICAYLINRGLITEESEVSGIDKEINAYLSSYGKMYGVFGERLREEAVQEIAEKTIYYGTIYGDAKSMFRKKLNQYVSDGWMTESQAKRISGYKFKNWARLSRSMLCLSGCDKSTGEKISLIRAMWEYNLNFMELIYSEDFTFQKELEERRKALGKTLQEFQFEDLNEYYYSAPVKRMIWQAVQVLKEITQIMGHNPKRIFIEMTRTEEEKGEQGRKNSREKRLLKLYESVRDERNWAAEIKNANASGELNSKKMYLYYLQMGRDVYTGEPIDIEDLFDDSRYDIDHIYPRSLTNDNNIENNLVLVSKTINQNEKKNDYPVPEKVRTNIKVRDLWYKLHKKGFMNDEKYNRLTSTERLSEDQLAGFIARQLVETAQGAKGIAELMKAMLPGTDIVYAKARNVSDFRKEYKMQKSRLVNDYHHAQDAYLNIIVGNVYFMKFTRNPMNFVKKEARRDGRNYDYNLYKMYSKDIIRNGEKAWIATSEQGPGTIRLVKETMERNTPIITRQAFEQRGELFNLQPVGKYSAKKDNYVPLKINDEKMQDVSKYGGYTSLNPSYFIFIEHGPEKKRKKCFEVIHSYYAAQIKTEKDLIDFLLQKGYKNPRVINARIKKNALIKYNGYFLYIIGMDARKNIEFSNATAMCLKNKYIQYVCKLEKMNKAILLSEKQKKILHWDERITCESNLELYRELTEKHLHSIYQRHPRSIGKCLADGEGAFKLLDIEEQVKLICDIVQYTSFQRGLFSLQVLGGPKEVGRIRISGDMTEAKECKLVNYSITGMYKTEMDLLKK

SEQ ID NO: 19978 - protein, 1340 aa, unidentified
  REGION 1..1340: note = Cas Enzyme sequence
MGEEYFLGLDMGTGSLGWAVTDDKYQILRRHGNALWGVRLFETANTAEERRMFRTNRRRLDRQGWRIKILQELFAEEICRVDPGFYLRMKESKYYPEDKRDANGECPALPYALFADAQYTDKDYHREFPTIYHLRKMLMETETTPDIRLVYLAFHHMMKHRGHFLLSGDISQVTEFRNTFLQMIANIKSEELDFSLEIEETQMGQIEAVLKDHKLTRSEKKRRLTQILKPATACEKAIFTLLSGGTVKLSDIFGKAELDEGERPKISFADNGYDDYSASVEADLGEQYYIIESAKAVYDWSVLSDILGDSVSISDAKVKLYEKHKKDLAYLKKVVRENLPREVYNQVFVNTDEKLCNYCAYIGMAKKNGRKVALEGKRCTREEFESFLRKKIVNKIEDKEIQKYLSEEIEKGTFLPRQVTKDNGVIPYQIHLYELRKIIDNLSPRMPFIRDNGDKIIQLFTFRIPYYVGPLGKGEGSEKFSWAVRRTDEAIYPWNFKDVIDVEASAEKFICRMTNKCTYLYGEDVLPKDSPLYSKFMVLNELNNLKLDGQSVSVELKQRIYQELFCHTRKVTQKKLVSYLVREGITGKNVEISGIDGDFKASLTAYHDFKEKLTGVELSQQEQEEIVRNIVLFGEDKKLLKQRLEGRFPQLTQKQISVIATLSYKGWGRLSREFLENITVPAPGTGEVWNIITALWETNDNLMQLLYGEYGFQTEIECFNAKEKKKSLSYETIEESYVSPSVKRQIWQTLQVVKELKKVMRGDPKRVFIEMARENQESKRTESRKKTLLDLYKNCKKEEPEWIAELTEHLEKLDDSQLRKDKLFLYYTQKGRCMYSGERIELEDLWDNTRYDIDHIYPQSKTMDDSVDNRVLVKKEYNAKKTDVYPIAADIRGKMSPFWKKLLDNKLISKKKYDRLVRTEELTPEELAGFIDRQLVETRQSTKVVAEILKEAFSDTEIVYVKAGNVSNFRHMFDIVKVRELNDLHHAKDAYINIVVGNAYYVKFNKNAAWFIKENPGRSYNLKRMFDYDIRRNNEVAWLAGSTGTISQVKNMVSKNHILVTRKSYEVTGGLFDQQLMKKGKGQVPVKTSDERLGNIEKYGGYNKASGAYFMLVKSKNKKGEEQRTIEYVPIYLKHYIEESKENALDYLKNERKLKEPEILLAKIKMDTLFRVNGFYMWLSGRTGKQLVFKGANELLLEEPETLLLKKITKYTQRRKENKELKLTEWDNITDEELLALYDVFIEKLNHSVYAVRLGTQGKTLSEKRPAFEKLSMEEKCIVLSEVLHLFQCQSGSANLKLIEGPASAGILYLNSNISDAGEILIINQSPSGIFEKRIDLLRL

SEQ ID NO: 19979 - protein, 1341 aa, unidentified
  REGION 1..1341: note = Cas Enzyme sequence
MEKDYYLGLDMGSASVGWAVTDDQYHILRAHGKALWGTRLFESANTAEDRRINRTARRRLKRRNQRIEWLQEIFAEEIAEKDSGFFRRMKESRYWAEDKRDENGNCPEMPYLLFIDKEFTDKEYHEKFPTIYHLRKYLMTTEETPDIRLVYLAFHHMMKHRGHFLLNGSIEEIREFRTTFDQFLEVVRNEEMGFDGEITEETYHDIEKILKNVNLTRSAKKTTLIKLLKVTRVKEKELLALISGCTVKLSNIFNDKSLDETERPKISFADAGFDDYEVELKNNLNERYYIIESAKAVYDWAALADILNKYSSISEAKVALYEKHHKDLQHLKKIVKEDISIEAYKEIFTDTSGKYKNYCAYIGTVNINGKKKDFEGKKCTKEDFYAYLKKSIIERINDSEKTNWLKKELETGNFLPKQSTGANSVIPYQIHLYELNAIITNLQERIPLLKREEDKIRQIFTFRVPYYVGPLNGISIDGKKTNWVKRKEGKIYPWNFTDIVDEEVSAERFIRRMTNKCTYLIHEDVLPKYSLLYSKFEVLNELNNVRLNGELLSVELKQKIYEEVFQRYRKVTQKKFKRYLLIEGKIDENTVITGIDGDFKGSLTAYHDFKEKLTDAHLSEREKEEIILNVTLFGDARSLLRKRIGKICPQLTDKQKESLSNLSYRGWGRLSKKFLNGIAISVQGEEEWTIIKTLWGTQDNLSQLLSAKYTFRNEVEKENGQLENKEISYETIKELNISPSVKRQVWQALLIVKEICKIQKTLPKRVFVEVAKEKTNSGRTESRKKRLLDLYKYCSKYEKELYDENLQSKLEKCQEADLRSDRLFLYYTQMGRCMYTGLPIDLDELWNNQKYDIDHIYPQSKTMDDSIDNRVLVKRILNLEKTDVYPIQADIREKCRGFWKALKNAGFISEEKYKRLTRATEFEPAELAGFISRQLVENRQTTKVVASILKQAMPDTEIVYVKARTVSEFRHKFNFIKVRDMNDLHHAKDAYLNIVVGNTYLVKFTKSPVNFIENHSNRSYNLKKLFTYGEVERNGEIAWISGENGTIGTVRNIMKKNNILVTRRVHEATGGLFDQQLMKKGKGQVPVKGSDERLCDIEKYGGYNKEAGAYFVLVESDEKKGKKKRTIEYVPIRLKKQLENNRKALENYLQEQRKLINPIVLLDKIKIDSLFQVGGFFMWLSGRTGNQLLFKCANQLILSTEDEATLKKVVKFVNRRKENKEIKIYESDKLNEEMLGQLYNTFLYKVQNSVYGNRLGEQAKTLSSKKEKFDELQIEEKCVVLYEILHMFQCQSVASDLKLIEGPGKAGILVLNSNITKCKNICVINQSPTGIYEKVIDLQKL

SEQ ID NO: 19980 - protein, 944 aa, unidentified
  REGION 1..944: note = Cas Enzyme sequence
DDLEKTEWLKQELEAGNFLPKQTTGENSVVPYQVHLYELNAMISNLEDKIPLFKKDGEKIRKIFTFRIPYYVGPLNGISVNGKTTNWAERKAGKIYPWNFSDMINEEISAERFIRRMTNKCTYLDHEDVLPKYSLLYSKFDVLNELNNVRVNGEVLSVEWKQRIYVDVFQRYRKVTQKKLKDYLRKEGLISENAVITGIDGDFKGSLTAYHDFKEKLTGVILNEKEKEEIILNITLFGDARSLLKKRLEKICPQLTDRQKESLSNLSYRGWGRLSEKFLSGITSPALAGEEWTIIRALWETQDNLSQLLGSKYLFRKAVEKENGELEKQEITYQSVKELCISPAVKRQVWQTLLIVKEICKIKGNPPKRVFLEVAREKTNSGRTESRKKRLQEFYKYCRTHEKELYDEKIQGELENSSDADLRSDKLFLYYTQMGRCMYTEERIDINELWDNQKYDIDHIYPQSKTMDDSIDNRVLVKRTANQEKTDIYPIQAKIRESRRAFWKQLQLAGLISLEKYKRLTRATEFEPGELADFISRQLVENRQTTKVVADILKQALPETEIVYVKARTVSDFRRRFEFVKIREMNDLHHAKDAYLNVVVGNTYLIKFTKSPVNFIESHSNRSYNLKKLFTDGKVERNGEIAWVSGKNGTIGTVRAVMKKNNILVTRRVHEATGGLFDQQLMKKGKGQIPIKGSDNRLQNIAKYGGYNKEAGAYFVLVESDDKKGQKKRTIEYIPIRLKKQVEESKEKLCRYLIEEKELINPVVLLDKIRFDSLFQIDGFFMCVTARQAKQLVLKGAIQLVLSPQNEVVLKKVIKFINRRKENKEVKVYKSDNLDSTMLNALYDEFAYKLNNTVYSNRLGGLGKKILAKKDKFNSLEIEEKCQVLYEILHIFQCNRISADLKLIDEKAGGVLTMSKNISSYENVCIVNQSPTGIYEQVIDLQNL

SEQ ID NO: 19981 - protein, 1367 aa, unidentified
  REGION 1..1367: note = Cas Enzyme sequence
VEQKVCYADFFLLSVMREDSGMEKDYYLGLDLGTGSVGWAVTNANYEVLRAHGKALWGVRLFDTANTAEERRIFRTSRRRLDRRNRRIELLQELFSEEINQIDAGFYLRMKESKYMPEDKRDSNGECPQLPYALFIDKDFNDKDYHKQFPTIYHLRYWLMTTEETPDIRLVYLALHHMMKHRGHFLLSGDIESVREFKNTFSQFIQCLQDEELDFNLEISDDKYVMIENLLKNHTMTKSAKKTQLIKLLGAHTPCEKAVLNMISGGTVKLSDLFTDAEYDNLERSKLSFSESTYDDYSGTLESDLEEHFIVIEKAKMVYDWSVLVDILGDYQSISEAKIAIYEKHKKDLEYLKKLVKEKFDAKRYRDIFVITDEKTANYCAYIGMTKKNGKKIALEGKQCSKSDFYQYLRKNVLNELGDDADAQYLKNELDKETFLPKQVTKDNSVIPYQVHLYELNQILDNLSPRLPILQKTGEKIRQIFTFRIPYYVGPLNGITQNGQRTNWAVRKNTENGKAEKIYPWNFDEVIDIEASAEQFIRRMTNKCTYLIHEDVLPKYSLLYSKYVVLNELNNLRLDGEPIDVALKQEIYNNVFEKYRKVTQKKLKDYLVREGHLSREKAAKLDITGIDGDFKGSLTAYHDFKEKLTGCNLSQTDKENIILNITLFGEDKKLLKQRLSALYPQFTDKQKAALCSLQYSGWGRLSKTFLEGIAAPAPETGEAWTIIRTMWETNDNLMQVLSEKYQFAEAIEAENGKNEIQGISYELVEQLYVSPSVKRQIWQTLQIVKELCKVMEKPPKRIFVEMAREKAESKRTESRKKVLIDLYKKCKDEERTWIEELSNTQDTRFRSDKLYLYYTQKGRCMYSGEPIELENLWDNNQYDIDHIYPQSKVMDDSLDNRVLVKKTYNAEKTDVYPIRADIREKMKAFWKSLLAGGFISKEKYNRLIRSNEFEPSELAGFIQRQLVETRQSTKAVASILKQILPDTEIVYVKAKIVSNFRQDFQLPKVREMNDLHHAKDAYLNVVVGNAYYTKFTKDAVWFIRHNPGRTYNLKRMFTSCDIERNGETAWKAGENGTICIVKKTMNKNNILVTRRSYEVKGGLFDQQLMKKGKGQVPIKGNDERLKIEKYGGYNKATGTYFMLVESEDKKGNKIRTIEFVPLYLSSEIEANDSYAVRYLMQDRELRNPKILLPKIKIDSLFKVDGFYMWLSGRTGNQLIFKGANQLILSAKDAGVLKKVLKFVSRQKENKNLKLVAFDELDTADLIGLYDTFLDKIQNTVYGIRLKAQESTLIEKREEFCDLTDEDKCIVLSEILHMFQCQSGAADLKLIHGPGHAGVLVLNNNITKCKQISIINQSPTGIYEQEIDLMKL

SEQ ID NO: 19982 - protein, 1372 aa, unidentified
  REGION 1..1372: note = Cas Enzyme sequence
MNSDKREDYYVGLDMGTGSLGGAVTDTQYHLLKVKGKDFWFVREYETAKSQLDRRTHRIAKRRLQRHKARIGLIRSYFAEDILKHDPLFYIRQDNSKYYHEDKDVRLTTKDSIFADPGYGDKEYLDDKEYPTIFHLRQALLRDQIKDEERYSRFLYLAIINMFEHRGHFLLNTESSDLNADMIKDVGELVMNAICGVSEYGSVTYKEIIEILEDKNISRTAKKDQIASKIDIKKSEKAQMERIKCLCGMEADARVMFEIEADEKIKIAFQQAAFEDEKEEIEAVIGEDRYLIIENMKQLYDYSQLQSVLNGFDYLSDARVQMYEKHKEDLHLLKKVYRKNLDREIYDRMFRSGEEGSYCAYSNSTNSVDSLAEAKKYRRNMKKRSQKDLYDRIKKDLKEVHDADADAIRKEMELERFLPKQITGANGIIPNQVHRKELKKILENAEHHLDFLKEKDESGYTVSERILMLFSSNIPYYVGPVGSGSKTGWAKIQESGQVLPWNMEQKIDIEQTSERFITNLIRECTYLSGEKVLPKQSLLYESYCVLNEINNLRIHGKRIVPELKQDIYKEVFQGFRLGKKVTKKNICTYLINRGLITEESEVSGIDKEINAYLPSYGKMYGVFGERLREEAVQEIAEKIIYYGTIYGDAKSMFRKKLNQYVSDGWMTEYQAKRISGYKFKDWARLSRSMLCLSGCDKSTGEKISLIRAMWEYNLNFMELIYREDFTFQKELEERRKALGKTLQEFQFEDLDEYYYSAPVKRMIWQAVQALKEITQIMGHNPKRIFIEMTRTEEEKGEQGRKNSREKRLLKLYESIRDERNWAAEIKNANASGKLNSKKLYLYYLQMGRDVYTGEPIDIEDLFDDSRYDIDHIYPRSLTNDNNIENNLVLVSKTINQNEKKNDYPVPEKIRRNKKVRNLWHTLHKMGFMNDEKYNRLTSTERLSEDQLAGFIARQLVETAQGAKGIAELMKAMLPGTDIVYAKARNVSDFRKEYKMLKSRLVNDYHHAQDAYLNIVVGNVYFMKFTRNPMNFVKTEARRDGRNYDYNLYKMYSKDIIRNGEKAWIATSEQGPGTIRLVKETMGRNTPIITRQAFEQRGELFNLQPVGKYSAKKDNYVPLKINDEKMQDVSKYGGYTSLNPSYFIFIEHGPEKKRKKCFEVIHSYYAAQIKTEKDLIDFLLQKGYKNPRVINARIKKNALIKYNGYFLYIIGMDARKNIEFSNATAMCLKNKYIQYVCKLEKMNKAILLSEKQKTNLHWDEKITCESNLELYRELTEKHLHSIYQRHPRSIGKCLADGEGAFKLLDIEEQVKIICDIVQYTSFQRGVFSLKVLGGPKEVGRIRISGNMTEAKECKLVNYSITGMYKTEMDLLKK

SEQ ID NO: 19983 - protein, 1365 aa, unidentified
  REGION 1..1365: note = Cas Enzyme sequence
MEQKGYYLGLDMGTSSVGWAVTDNEYHLLRKKGKDMWGIREFEPAETAAERRSHRIDRRRRQREKARIGLLREYFADAIMQVDKDFFIRLDNSKYFMEDKDQKLHSVNGIFDDSNYKDADYYRNYPTIFHLRKALLDIDNSKKVFDVRLVYLAVLNMFKHRGHFLLSTTDGGMSEVQIEEMYQSVIEGFNQDYGYALECQPFEHVLSIISDREIGRKRKYEKMAELFDVAKSNKKAHEFLKCMCGLKVNANIIFGVDAEGKIDVCFHDFSYADEISNLMEQLGDEKYAVIEQMKDIYDYAILAGIIKKGQEYLSPVRVDIYNKHHEDLKLLKELYRKYKTQKEYDEMFRSNGDGSYSAYVNSTNSSVESKKYRRNMKGRKSEDLYTAIKKAFKDYAEDEKVQYIFTQMENEQFLPKQLTGANGVIPNQVHRKELARILQNAQQYLPFLQEIDESGLTVTERILQLFSFQIPYYVGPLGKQSKTGWVKRKEEGTILPWNINEKIDMKATSEEFISRLIRSCTYLTDEKVMPKASLTYERYCALNEINNIRIDGERIDTQLKQSIYIACFCEGKKVTKKKLCNHLIAQGVITSEEQVTGIDSTINSSLSSYGKMYKIFGDKLKEDQYWNIAEDIIYWGTVFADSREMFKEHLQQYIEQGVLESEEVKRILGYKFKDWGRYSKALLELQGCDKTTGEMISINRAMWDYSMNFMELINSDEFTFKDELIQKKTKAVKLLADFEYEDLKDYYFSAPVKRMIWQTILVVREIEHVMGYAPAKIFVEMTRNDEEKGDKGRKASRGKQLLEAYKTIKNTEIHNWKKEIMEAEGNGKLRSKKLYLYYMQMGRDMYTGEEIDLARLFDDNLYDIDHIYPRHYVKDDSILNNLVLVNKAANEHLKKDLYPIPDKITSNTKVRELWNTLHHCKLINDEKYSRLISKTPFTEKQMGDFIARQLVQTSQGTKGIAELLQQLMPESRMVYAKASNVSEFRKRNGFVKSRLVNDFHHAQDAYLNIVVGNVYDTKFTQNPWNFIKKEYAKDKEANHYNLDKMFAWDVVRGDETAWIAEKKDCKGTIDTVRRMMKKNTPLMTRMSFEQHGTLYNVNPISHYETKCENYVGVKHGRLSDVTRYGGYSTLTPAYFIFIEVKKGKKKIKIFESVPLYYSQQIRSENDLKEYCSDILGYSEVRIIINKINKHSLLKLNGYFLYLVGFDNRKNVEMKNATPLLLDQNCIDYLKKVEKAKERLEMNKEKEYIGDEITKQKNHELYDVIKNQHMCSIFINCPKPIGVTLDKGKKKFVQLSIEEQIKLLTNIVSYTATDLKSRTFSLEMLGGAKEVGRIRISGNMTEAKELLLIDKSVTGLYEKSKDLLSL

SEQ ID NO: 19984 - protein, 1087 aa, unidentified
  REGION 1..1087: note = Cas Enzyme sequence
MEQLGDEKYAVIEQMKDIYDYAILAGIIKKGQEYLSPVRVDIYNKHHEDLKLLKELYRKYKTQKEYDEMFRSNGDGSYSAYVNSTNSSVESKKYRRNMKGRKSEDLYTAIKKAFKDYAEDEKVQYIFTQMENEQFLPKQLTGANGVIPNQVHRKELARILQNAQQYLPFLQEIDESGLTVTERILQLFSFQIPYYVGPLGKQSKTGWVKRKEEGTILPWNINEKIDMKATSEEFISRLIRSCTYLTDEKVMPKASLTYERYCALNEINNIRIDGERIDTQLKQSIYIACFCEGKKVTKKKLCNHLIAQGVITSEEQVTGIDSTINSSLSSYGKMYKIFGDKLKEDQYWNIAEDIIYWGTVFADSREMFKEHLQQYIEQGVLESEEVKRILGYKFKDWGRYSKALLELQGCDKTTGEMISINRAMWDYSMNFMELINSDEFTFKDELIQKKTKAVKLLADFEYEDLKDYYFSAPVKRMIWQTILVVREIEHVMGYAPAKIFVEMTRNDEEKGDKGRKASRGKQLLEAYKTIKNTEIHNWKKEIMEAEGNGKLRSKKLYLYYMQMGRDMYTGEEIDLARLFDDNLYDIDHIYPRHYVKDDSILNNLVLVNKAANEHLKKDLYPIPDKITSNTKVRELWNTLHHCKLINDEKYSRLISKTPFTEKQMGDFIARQLVQTSQGTKGIAELLQQLMPESRMVYAKASNVSEFRKRNGFVKSRLVNDFHHAQDAYLNIVVGNVYDTKFTQNPWNFIKKEYAKDKEANHYNLDKMFAWDVVRGDETAWIAEKKDCKGTIDTVRRMMKKNTPLMTRMSFEQHGTLYNVNPISHYETKCENYVGVKHGRLSDVTRYGGYSTLTPAYFIFIEVKKGKKKIKIFESVPLYYSQQIRSENDLKEYCSDILGYSEVRIIINKINKHSLLKLNGYFLYLVGFDNRKNVEMKNATPLLLDQNCIDYLKKVEKAKERLEMNKEKEYIGDEITKQKNHELYDVIKNQHMCSIFINCPKPIGVTLDKGKKKFVQLSIEEQIKLLTNIVSYTATDLKSRTFSLEMLGGAKEVGRIRISGNMTEAKELLLIDKSVTGLYEKSKDLLSL

SEQ ID NO: 19985 - protein, 1349 aa, unidentified
  REGION 1..1349: note = Cas Enzyme sequence
MKKNEKYYVGFDIGTNSTGWAVTDDTYKLFKCNGHKMWGVRLFDEAETAENRRMHRASRRRLQRRNARIELLQELFAEEICKVDPGFYQRLEDSKFYIEDKKIAEKYTLFIGTEYNDKDYYRQFPTIYHLRAALIKGKKEYDVRLVYLAIHHILKNRGHFLYEGDKFDTSSLDDSIHEVFENSDVNTNDVELTDELLKKIKDIILNVKLTKTDKKKELKNLFGKSKQLESIFGLAIGTKESLENLFGTSEYKELENDITKISFSEKIYEEEREKYEEVLEDRIILIDTLKKIYDTVLLSGIKKEGLSLSESKVELYNKHKKELAALKKIIKSYSTEEYKRFFSEKDADLANYKNYIGDGDKKCGREDFYNSLKSLLNKVEDTPEKKYILEEIKLEKYLPLQRIKENSAIPYQVHQEELKLILDNASTYLNFLNQTDGKLSVKDKIINIMTFRIPYYVGPLNTFHAGKKNGFAWAIKKSNERITPWNFENIIDLEASHDKFIQNMTNKCTYIKGKNVIPKNSLLYSEFTLLNELNNIRCNGEKLPVSIRNKIIDNFFKKSDKRGKVTVSMISQLLRCEGECEENVTITGIDNEVKADLKSYRDFKSILGDDFNYEMVEDIIRWITLYTNEPKSIKKRINDKYADMLNCTQINKICKLKYNGWGRFSKEFLTEIICDEFTDYSSGEVGSIITAMRNTTNNLMQLLSNDHDYMKQIEEENDLLYNPDEEISHDMLDELYVSPGVKRMIWQTILIMEEIKKVMGKDPEKIFIETIRSNKAEKKRTDTRKKKLLELYSSCKDEIKDWPKEIQSRSDGSLRSKKLYLYYLQMGKCLYSGEEINLDKLMSGEDYDIDHIYPRSKTKDDSFDNLALVKRSLNNEKGDTYPISNVIQAKMKDTWDFLYKKGFISHKKYERLIRKEEFGANELADFINRQIVETSQSSKAVAQIMQRLYSDSNIIYVKAENVSDFRNEMKYIKVREINDLHHAKDAYLNIVVGNVFDTKFTRSPINYVKEAGFREYNLNRMYDLKVERAGYTAWDGRNGRCKKIVDSQMKCNDVRITKRVATQKGELFDLTIYKKDIAKPDSYIGTKTSDPRLCDVTKYGGYRKISIAYLIPYTCDMINKKGVRKSIRRLIGIPVYLANNIKTPQELSEFIFKHVPAKHGETIENLKIINTKLRIGSLIKYNGFYYYVGGRTEDNFYADSAIQLLLDEDDEKYIKEIIKFTNIQKGDKEIKAERFSDFITKENNIKLYDVLVNKMNTNIYMQAKDNKYDVFMEDKMRSKFCNLLIEEQIKILLNMLNLLNNKISTYDFKSLGFGVGRRKIGFNIANAKEFKLINQSITGLFENNIDLLS

SEQ ID NO: 19986 - protein, 1345 aa, unidentified
  REGION 1..1345: note = Cas Enzyme sequence
EKYYVGFDIGTNSTGWAVTDDTYKLFKCNGHKMWGVRLFDEAETAENRRMHRASRRRLQRRNARIELLQELFAEEICKVDPGFYQRLEDSKFYIEDKKIAEKYTLFIGTEYNDKDYYRQFPTIYHLRAALIKGKKEYDVRLVYLAIHHILKNRGHFLYEGDKFDTSSLDDSIHEVFENSDVNTNDVELTDELLKKIKDIILNVKLTKTDKKKELKNLFGKSKQLESIFGLAIGTKESLENLFGTSEYKELENDITKISFSEKIYEEEREKYEEVLEDRIILIDTLKKIYDTVLLSGIKKEGLSLSESKVELYNKHKKELAALKKIIKSYSTEEYKRFFSEKDADLANYKNYIGDGDKKCSREDFYNSLKSLLNKVEDTPEKKYILEEIKLEKYLPLQRIKENSAIPYQVHQEELKLILDNASTYLNFLNQTDGKLSVKDKIINIMTFRIPYYVGPLNTFHAGKKNGFAWAIKKSNERITPWNFENIIDLEASHDKFIQNMTNKCTYIKGKNVIPKNSLLYSEFTLLNELNNIRCNGEKLPVSIRNKIIDNFFKKSDKRGKVTVSMISQLLRCEGECEENVTITGIDNEVKADLKSYRDFKSILGDDFNYEMVEDIIRWITLYTNEPKSIKKRINDKYADMLNCTQINKICKLKYNGWGRFSKEFLTEIICDEFTDYSSGEVGSIITAMRNTTNNLMQLLSNDHDYMKQIEEENDLLYNPDEEISHDMLDELYVSPGVKRMIWQTILIMEEIKKVMGKDPEKIFIETIRSNKAEKKRTDTRKKKLLELYSSCKDEIKDWPKEIQSRSDGSLRSKKLYLYYLQMGKCLYSGEEINLDKLMSGEDYDIDHIYPRSKTKDDSFDNLALVKRSLNNEKGDTYPISNVIQAKMKDTWDFLYKKGFISHKKYERLIRKEEFGANELADFINRQIVETSQSSKAVAQIMQRLYSDSNIIYVKAENVSDFRNEMKYIKVREINDLHHAKDAYLNIVVGNVFDTKFTRSPINYVKEAGFREYNLNRMYDLKVERAGYTAWDGRNGRCKKIVDSQMKCNDVRITKRVATQKGELFDLTIYKKDIAKPDSYIGTKTSDPRLCDVTKYGGYRKISIAYLIPYTCDMINKKGVRKSIRRLIGIPVYLANNIKTPQELSEFIFKHVPAKHGETIENLKIINTKLRIGSLIKYNGFYYYVGGRTEDNFYADSAIQLLLDEDDEKYIKEIIKFTNIQKGDKEIKAERFSDFITKENNIKLYDVLVNKMNTNIYMQAKDNKYDVFMEDKMRSKFCNLLIEEQIKILLNMLNLLNNKISTYDFKSLGFGVGRRKIGFNIANAKEFKLINQSITGLFENNIDLLS

SEQ ID NO: 19987 - protein, 1142 aa, unidentified
  REGION 1..1142: note = Cas Enzyme sequence
MSKALAAAIVGLKADMAHIFFVGAEVPEGVATGIYLSNDEQVEAFEAVLPDEGRALFEAMQAVYSSYVLQEILSSKPGEGISANKVEDYNRYGEDLRLLKSLVKQYAPSKYDEFFRGAFCSPTPRHPQKYVYDKYGKDQIKGYTRYNEVRKMKYGDFKKEVESLFKGTAAMDDPRYLAMMERFGSERFLRRLKTSDNGAIPFQLHREEMRAIIDNQAKYYPFLQQERKKLESLVSFRIPYYVGPLTTKNARMTADGKLRFAWVERQEGREGERVYPWNWEEVVDKDRSAAAFIQRMTSTCTYLYGEPVLPKCSLLYEEYCVLNELNGAKLTQDGDREHRLDCKDRIEAVEQLFRHGRVTYKKMEEWLRKRGVSNPHVFGGQGETGFESKMSSYIFFAKDVFNVDEIPEFDYPMIEEIIFWSTLFEDRGIFREKLKRNYGDRLTDEQIRKIVHKRFAGWGKLSKKLLCEVKAETDCGPRSIMDVLREGNPNSDKPSRAMVLMEVLHDDNLGFEKLIDARNRERMSDMGMSLEELPGSPALRRSVNQALSIVDEIAGIAGHAPANIFIEVTRDEDPRKKGSRTKRRYDDLKEKLATLKQEAPEWWSSNVSRELADRAKANADLSEKLTLYFMQGGKSLYSGKPLEIERLSEYQVDHIIPQTYIKDDSFENKALVLSSENQSKSDQLLLSDEVRRKMRPYWNALHDAGLIGDKKYRNLLRENVSEQQMKGFIARQLVETSQILKVVQSFLGETYPNTRVMPVKAALSLELRHEIGLVKCREANDFHHAHDALLTSEMGRFILKRHAAMYENPIGYTHVVRSFVRAESGQAKRGKMPGSASFVVASFMRSGFDEETGELFRDDWSAEWEISRLKRYFNYRQCFISRMPEETSGTFWDATVYSPRDAGKNMTLPLKKGLDAEKYGSYSSERFAYFFIYKAKKKDKEVIEFAPVPVHVASVVGRKQEALIEFAKELSSSSELEFEELVRAKIYKYQLVEFDDSRMYLTGAKAVKNATQFAFSSEEMMALKEINESDGLVNENILEEIFHSIVRSLEQYSPKLMGLLGVAEWADDFTSVSYDDKVNLIKGLIAIGNGKTDRVDLRSVGRGKCAGNMQPAFSSLLTKGSGITFIDQSVTGMFERRTHIGL

SEQ ID NO: 19988 - protein, 1371 aa, unidentified
  REGION 1..1371: note = Cas Enzyme sequence
MNLRNVESYQVGLDIGTGSVGWAVLDDKGDLCRFKGKPAWGSRVFPTAETAAEARVHRGQRRRYDRRRQRIDLLQRFFADEVAKVDPGFFIRLNQARLHPEDRDPAHADYRWPLFNGADFTEADYYKRFPTIYHLRAYLIKSDEKADIRLVYLALHNIVKHRGNFLHQDNPALSAKNANMGDAVDELCRALEEWCEAHDIDCACDAAALEKALVDTSLRSAEKRERVEATLGVEKAYKKLAKAVSGAMVGYAAEFAHVFLTEAEGSKFALSNDEKVESYACPDEGRDLFEALRAVYSSYVLMGILSEARGETLSFCKMGEYERYRRELETLKSLVRTYGPERYDEFFRGPSYEGTHDYDPGRAQGYTKYNLGTSKLSHEDFLKEVQKLLKDIGAQADERYADVERAIEAGTFLRRLKTSDNGTIPYQLHLEEMDAIIERQAAFYPFLAQEKDKLKSLVSFRIPYYVGPLTQKNAARDGKGETRFAWSSRKSGMEDARVYPWNWEDVIDKDRSAEDFIRRMTGTCTYLKGEPVLARCSLDYELFCVLNELAGARWTQDGDKSYRFDAADRLGIVEDLFKKRKRVTYEAAEKWLARTHGPEGGKSAGGAYHVSGGQGEDAFESQLSSHYDFCKILGVGELSDADAAMAEDIILWNTVFEDRSILKRKIKLAYGDRLGDAQVRKLCQKRYTGWGRLSGELLRGLRSDTDNGPKTIMDILLEGDPNHAQRMGAAMNLMEILHDDLLEFQVKIDERNRERALAVGGMSVDEVTGSPALRRGINQALRVVDEIAGIAGKPPAHIYVEVTRDEDARNKGRRTTSRYRALDAALSSIKAQCADVYAELKERDPRALDDERLMLYFMQCGKCMYSGDALDINKLQTYQVDHILPQSYVKDDSFENKVLVRPDTNQRKGDTLLLDERLIARMRGFWRTLRDAELIGEKKFNNLTRTSVSDEQMKKFVSRQLVETGQMVKQVQQLLQARYPESEVQPVKAGVSHQLRVGCALAKSREINDFHHAHDAYLACQVGRFVQYRHSAVYSEPVKMAAVVKQFIKKQAEDYRRTRELPGSDGFIASSFMTPGFDVKTGEVFRDAWDAGAEIDRIRRCFDYKDCFISRMPEETHGAFWDATIYSPRAAGKTLNLPLKKGLDPRKYGSYSREQFAYFFVYEAVKPKKKQRVLEFAPVPVRVASALASDPDALEDYARGLAEAEGLEFCCIRRRKVYKYQQIIVGDSQLYVTGKKEVRNARQFAFSQEETELICRIERGEGCSENELLGMLRSLQAKYARFAPRLGQMMQVADLMPSFVEAGEVERRQVLLSLVSIAAAHTNMIDLSAMGGSKCAGCMRVSFSKELTAGTVCFVDSSVTGMFERRETIGL

SEQ ID NO: 19989 - protein, 1381 aa, unidentified
  REGION 1..1381: note = Cas Enzyme sequence
MRRYVNSEEKKMKNANKVTGKYYLGFDIGTNSVGWAVTDENYNLCKFKKKSMWGIRLFEDAKTAEERRGQRASRRRLQRRKQRIDLLQEIFAEEINKVDETFFIRLNESRLHLDDKTVSEKHPLFIGSEYSEKEYYREYPTIFHLRKELMESSEPHDIRLVYLAIHHILKNRGHFLIDGELSKANSFDAAFYQMKEVLCNELDLEIDGENTTEVERTLRDRNISKSDKVKLLAALLAMNQNETESKETKKKIENICKLLAGNKGDISKIFGQTPEGVEKTSFSFGEADYDESIRPNLEESIPDQCFVIDSIKALYDWNVLADILNGQTYLSCAKVNQYETHKNNLKELKLLVNRYCSREEYKRFFKSAVEKANYSNYIGSAKQGNKIIDVKRCAEEDFYKELKILLSKIEPEEADRELYERIKREAEEGSLLPLQRNKDNSVVPNQVHKAELALILENAGSYLGFLNEKDEDGLSPAEKIIELFSFRIPYYVGPLSDRHKDRGSNAWIVRKAEGRILPWNFDEKVDREKSNEAFIERMTNKCTYLLGKDVVAKNSLIYSRFMVLNELNNLSVCGNKISVQVKQDIYRELFQRHTKVSKKMLLQYCREKMMNKDLEEEDLSGFDGDFKAKLSSYLDFEKKVFGAKMEEDRIRKITEDIIRWKTIYGDDGKMLQAVVEKEYPGELDSDQLKAVKQFRYSGWGNFSEEFLNGIVGTEKPTGQMFTIIEALWQTNCNLMQLLSKNFTFMEEIEKHNRELAGQITDISYDKLVKDLYISPANKRAVWQTVRIAEEVKKIMGCEPAKIFVEMARGGEKEKKRTISRKKKLLELYAACKKDARDWNREIEDRDEREFNSDKLYLYYTQMGRCMYSGERIDLHELMSANSKWDIDHIYPQSKVKDDSLDNRVLSLKKINNEKGNKPLSRDIQQSQQKWWTELLQLEFITKKKYDRLMHRGELSEEELSGFINRQLVETRQSTKAAAELLGRMYNNSKVVYVKAPLVSQFRKDDLNILKSRLANDYHHAKDAYLNIAVGNVYNEKFTDNPLRWIEKHAGENYSINRVFDYDIVAGDGAPVWAAPLRDEKNKLRKNEVGEKYGGTIDVIRKTVKRNDVLYTEHTYCGKGELFNATIAKKDGGAEIPLKAGLQTGKYGGYKSPNTSYFAAIEFDGKKGERVKNIMEVPVYIANILLHDIDAYIRYCETVKGLKNVKILRPCIKKNALISVDGYPMRIRGANEKNILLKNNLQPIFGRHEETVRRIEKYVEKNQEFEVDEKFDGLNEANLTDLYDDITEKLCGPYVERPSNQGEYLMENREKFLNISLKEKAKLLAQMIKLVRCDTETKADLRSIGASKNAGVISVNKNTLGGKRLILINQSVTGLFENRIEL

SEQ ID NO: 19990 - protein, 1370 aa, unidentified
  REGION 1..1370: note = Cas Enzyme sequence
MKNANKVTGKYYLGFDIGTNSVGWAVTDENYNLCKFKKKSMWGIRLFEDAKTAEERRGQRASRRRLQRRKQRIDLLQEIFAEEINKVDETFFIRLNESRLHLDDKTVSEKHPLFIGSEYSEKEYYREYPTIFHLRKELMESSEPHDIRLVYLAIHHILKNRGHFLIDGELSKANSFDAAFYQMKEVLCNELDLEIDGENTTEVERTLRDRNISKSDKVKLLAALLAMNQNETESKETKKKIENICKLLAGNKGDISKIFGQTPEGVEKTSFSFGEADYDESIRPNLEESIPDQCFVIDSIKALYDWNVLADILNGQTYLSCAKVNQYETHKNNLKELKLLVNRYCSREEYKRFFKSAVEKANYSNYIGSAKQGNKIIDVKRCAEEDFYKELKILLSKIEPEEADRELYERIKREAEEGSLLPLQRNKDNSVVPNQMHKAELALILENAGSYLGFLNEKDEDGLSPAEKIIELFSFRIPYYVGPLSDRHKDRGSNAWIVRKAEGRILPWNFDEKVDREKSNEAFIERMTNKCTYLLGKDVVAKNSLIYSHFMVLNELNNLSVCGNKISVQVKQDIYRELFQRHTKVSKKMLLQYCREKMMNKDLEEEDLSGFDGDFKAKLSSYLDFEKKVFGAKMEEDRIRKITEDIIRWKTIYGDDGKMLQAVVEKEYPGELDSDQLKAVKQFRYSGWGNFSEEFLNGIVGTEKPTGQMFTIIEALWQTNCNLMQLLSKNFTFMEEIEKHNRELAGQITDISYDKLVKDLYISPANKRAVWQTVRIAEEVKKIMGCEPAKIFVEMARGGEKEKKRTISRKKKLLELYAACKKDARDWNREIEDRDEREFNSDKLYLYYTQMGRCMYSGERIDLHELMSANSKWDIDHIYPQSKVKDDSLDNRVLSLKKINNEKGNKPLSRDIQQSQQKWWTELLQLEFITKKKYDRLMHRGELSEEELSGFINRQLVETRQSTKAAAELLGRMYNNSKVVYVKAPLVSQFRKDDLNILKSRLANDYHHAKDAYLNIAVGNVYNEKFTDNPLRWIEKHAGENYSINRVFDYDIVAGDGAPVWAAPLRDEKNKLRKNEVGEKYGGTIDVIRKTVKRNDVLYTEHTYCGKGELFNATIAKKDGGAEIPLKAGLQTGKYGGYKSPNTSYFAAIEFDGKKGERVKNIMEVPVYIANILLHDIDAYIRYCETVKGLKNVKILRPCIKKNALISVDGYPMRIRGANEKNILLKNNLQPIFGRHEETVRRIEKYVEKNQEFEVDEKFDGLNEANLTDLYDDITEKLCGPYVERPSNQGEYLMENREKFLNISLKEKAKLLAQMIKLVRCDTETKADLRSIGASKNAGVISVNKNTLGGKRLILINQSVTGLFENRIEL

SEQ ID NO: 19991 - protein, 1433 aa, unidentified
  REGION 1..1433: note = Cas Enzyme sequence
MNDNTTPTQNTLRTEQQTQKPYYLGLDMGTSSLGFAVTDRYYNVIRKRGRHLWGIRLFEEAKTSAATRQFRTARRRRKREKERVRFLQEVFCAALDEKDPGFLQRLDDSFFYPEDKRTEQKYSLFNDPDFNDVDFHKRFPSIYHLRNHLIKNDSEQDVRFVYLALLHIMKNRGHFLYPGGEYNPDQQYDACYASFAEACNTLFGDACFPEVETELKEVLTKTDIPRSTKQKQILGIFESSGYDLPNKQMSELTKLLAGLKCNFQKLFDDEELEDADTKDCELTKDYDAARPNVEESIGAERIELIDSAYALFNWMRLSAILGEHDLLSEAKVAVYEKHKRDLRRLKNVVKSLIALDQEAIRASAKSENDFNKPHIYARIFNISQDNLTNYVAYAGHYGKRGRKKKLAYRNRNQADFLKLLKNELKPYNEIPQVKELINEIEKGDFMPLIVGTDNGTIPRQIVGAELKIILQNASTYLDFLDKETCNKIQQIFEFRIPYYVGPLNPAHRFDKDNGRYAWVVRKEHGKVYPWNIQEKVDLEKSAEVFIERMTRNCSELTGEKALPKQSLLYAEFMMLNIVNAINIKGVRLDNKTRQGLIEDLFRNSNAPKRVTRKRVRDWLKSEGYEFKDADLGGFDLDIPVHLTALHDYRKLTTTNTDIDMNDMENIVRIITLFPDDSAMIRRRLKADYGDSMTEEDLKFLSSRRYKDWGRLSEKLLAGIKGVSDKDYNKTIIEMMREEPLLLMELLSNNYSFSDQIKEINRATSPQSLDISHSILDDYMASPAVKRMIWQTLLVYKDIEKIMGGPPEKIFVEVTRGDLNPKQRTQSRKRQLEELYKSCKEDADDWNIELRKLLENEEETVLDSKHLFLYYLQQGRCAYSDETIDIKDLSTNRYDIDHIYPRSLTKDDSIHNNLVLVKAELNRAKGDRPSVPREYQEKAGKLWTRLLHQGFMSREKYNRLSRVTPLTDSELAGFINRQLVETSQTIKIVTDILERVLGDQTRLVYVKSNHVRDFRYRDFRCSDNEPDKEDLEFVKCREINDIHHAKDAYLNIVVGNVLDEKFTKDPKQFLANAQVDKYGNRYNLARLYDFDLSYRKKDLGLAWKAGKDGTIATVKKVMARNDVLYTEQSVIRTGELFDQQIIKASKVSSSEGKMPIKGSAPGREPKDDNPYLNITRYGAYNKVSVAHYALVEVEIGGRIERIIEPVPLALRMQIRNQLDQGETILTDYFKSALSTKHVRIIIQELPFNSVLEIDGYRCRIRGKTGNAYRYESHIQAYFSPETEKQIAQVINCTRLTTIDKYNNKSMSEEDKSKIDELCRNRLAGIDLARLSKEVLNRLRTGPWNKATQLHRLAEKLEDRLSLFDAQITYENCYAFSQLLSTMSCHAQLFDLRCFGLSKSEGIRQFNKKLNNTGTYFLITQSPSGFYENAIDLWG

SEQ ID NO: 19992 - protein, 1433 aa, unidentified
  REGION 1..1433: note = Cas Enzyme sequence
MNDNTTPTQNTLRTEQQTQKPYYLGLDMGTSSLGFAVTDRYYNVIRKRGRHLWGIRLFEEAKTSAATRQFRTARRRRKREKERVRFLQEVFCAALDEKDPGFLQRLDDSFFYPEDKRTEQKYSLFNDPDFNDVDFHKRFPSIYHLRNHLIKNDSEQDVRFVYLALLHIMKNRGHFLYPGGEYNPDQQYDACYASFAEACNTLFGDACFPEVETELKEVLTKTDIPRSTKQKQILGIFESSGYDLPNKQMSELTKLLAGLKCNFQKLFDDEELEDADTKDCELTKDYDAARPNVEESIGAERIELIDSAYALFNWMRLSAILGEHDLLSEAKVAVYEKHKRDLRRLKNVVKSLIALDQEAIRASAKSENDFNKPHIYARIFNISQDNLTNYVAYAGHYGKRGRKKKLAYRNRNQADFLKLLKNELKPYNEIPQVKELINEIEKGDFMPLIVGTDNGTIPRQIVGAELKIILQNASTYLDFLDKETCNKIQQIFEFRIPYYVGPLNPAHRFDKDNGRYAWVVRKEHGKVYPWNIQEKVDLEKSAEVFIERMTRNCSELTGEKALPKQSLLYAEFMMLNIVNAINIKGVRLDNKTRQGLIEDLFRNSNAPKRVTRKRVRDWLKSEGYEFKDADLGGFDLDIPVHLTALHDYRKLTTTNTDIDMNDMENIVRIITLFPDDSAMIRRRLKADYGDSMTEEDLKFLSSRRYKDWGRLSEKLLAGIKGVSDKDYNKTIIEMMREEPLLLMELLSNNYSFSDQIKEINRATSPQSLDISHSILDDYMASPAVKRMIWQTLLVYKDIEKIMGGPPEKIFVEVTRGDLNPKQRTQSRKRQLEELYKSCKDDADDWNIELRKLLENEEETVLDSKHLFLYYLQQGRCAYSDETIDIKDLSTNRYDIDHIYPRSLTKDDSIHNNLVLVKAELNRAKGDRPSVPREYQEKAGKLWTRLLHQGFMSREKYNRLSRVTPLTDSELAGFINRQLVETSQTIKIVTDILERVLGDQTRLVYVKSNHVRDFRYRDFRCSDNEPDKEDLEFVKCREINDIHHAKDAYLNIVVGNVLDEKFTKDPKQFLANAQVDKYGNRYNLARLYDFDLSYRKKDLGLAWKAGKDGTIATVKKVMARNDVLYTEQSVIRTGELFDQQIIKASKVSSSEGKMPIKGSAPGREPKDDNPYLNITRYGAYNKVSVAHYALVEVEIGGRIERIIEPVPLALRMQIRNQLDQGETILTDYFKSALSTKHVRIIIQELPFNSVLEIDGYRCRIRGKTGNAYRYESHIQAYFSPETEKQIAQVINCTRLTTIDKYNNKSMSEEDKSKIDELCRNRLAGIDLARLSKEVLNRLRTGPWNKATQLHRLAEKLEDRLSLFDAQITYENCYAFSQLLSTMSCHAQLFDLRCFGLSKSEGIRQFNKKLNNTGTYFLITQSPSGFYENAIDLWG

SEQ ID NO: 19993 - protein, 1433 aa, unidentified
  REGION 1..1433: note = Cas Enzyme sequence
MNDNTTPTQNTLRTEQQTQKPYYLGLDMGTSSLGFAVTDRYYNVIRKRGRHLWGIRLFEEAKTSAATRQFRTARRRRKREKERVRFLQEVFCAALDEKDPGFLQRLDDSFFYPEDKRTEQKYSLFNDPDFNDVDFHKRFPSIYHLRNHLIKNDSEQDVRFVYLALLHIMKNRGHFLYPGGEYNPDQQYDACYASFAEACNTLFGDACFPEVETELKEVLTKTDIPRSTKQKQILGIFESSGYDLPNKQMSELTKLLAGLKCNFQKLFDDEELEDADTKDCELTKDYDAARPNVEESIGAERIELIDSAYALFNWMRLSAILGEHDLLSEAKVAVYEKHKRDLRRLKNVVKSLIALDQEAIRASAKSENDFNKPHIYARIFNISQDNLTNYVAYAGHYGKRGRKKKLAYRNRNQADFLKLLKNELKPYNEIPQVKELINEIEKGDFMPLIVGTDNGTIPRQIVGAELKIILQNASTYLDFLDKETCNKIQQIFEFRIPYYVGPLNPAHRFDKDNGRYAWVVRKEHGKVYPWNIQEKVDLEKSAEVFIERMTRNCSELTGEKALPKQSLLYAEFMMLNIVNAINIKGVRLDNKTRQGLIEDLFRNSNAPKRVTRKRVREWLKSEGYEFKDADLGGFDLDIPVHLTALHDYRKLTTTNTDIDMNDMENIVRIITLFPDDSAMIRRRLKADYGDSMTEEDLKFLSSRRYKDWGRLSEKLLAGIKGVSDKDYNKTIIEMMREEPLLLMELLSNNYSFSDQIKEINRVTSPQSLDISHSILDDYMASPAVKRMIWQTLLIYKDIEKIMGGPPEKIFVEVTRGDLNPKQRTQSRKRQLEELYKSCKEDADDWNIELRKLLENEEETALDSKHLFLYYLQQGRCAYSDEPIDIAMLHTGHYDVDHIYPRSLTKDDSIHNNLVLVKAELNRDKRQSLSVPKSYQEKAGRLWTRLLHQGFMSREKYNRLSRVTPLTDSELAGFINRQLVETSQTIKIVTDILERVLGDQTRLVYVKSNHVRDFRYRDFRCSDNEPDKEDLEFVKCREINDIHHAKDAYLNIVVGNVLDEKFTKDPKQFLANAQVDKYGNRYNLARLYDFDLSYRKKDLGLAWKAGKDGTIATVKKVMARNDVLYTEQSVIRTGELFDQQIIKASKVSSPEGKMPIKGSAPGREPKDDNPYLNITRYGAYNKVSVAHYALVEVEIGGRIERIIEPVPLALRMQIRNQLDQGETILTDYFKSALSTKHVRIIIQELPFNSVLEIDGYRCRIRGKTGNAYRYESHIQAYFSPKTEKQIAQVINCTRLTTIDKYNNKSMSEEDKSKIDELCRNRLAGIDLARLSKEVLNRLRTGPWNKATQLHRLAEKLEDRLSLFDAQITYENCYAFSQLLSTMSCHAQLFDLRCFGLSKSEGIRQFNKKLNNTGTYFLITQSPSGFYENAIDLWG

SEQ ID NO: 19994 - protein, 1407 aa, unidentified
  REGION 1..1407: note = Cas Enzyme sequence
MQEEYFIGLDVGTNSVGWAVTDTQYNLLKCNGKSLWGARLFDPAQSAADRRSFRTARRRQKRSQQRLQWLEEVFSPEISKIDPAFFQRLKLSKYDSNDKARLNGGRPVGKHIIFSGPDYTDRDFYKTYPTIYHLRYALMTEERAFDARLVFLALHHIFKHRGHFLFDGLNISQNSAGQVESASSETDDFSRNFTGPGALKESLARLNAWLENYAFSASQSQNADDCKSVAHRLFDIEACNTAAVLSDILTDKALRINQKHEALLKKLDIPKNAKQLNSILKLAAGGTVKLKDLYGEEIEDEKTSVCLKDDWEQLEPKLKETPEEKIQLIICVKQIYDWALLAGILGGETSISAAKIRLYEKHRSDLKQLKRIIRQTGGCELYNEVFRKNNDTLNNYPAYSGHGASKHQCSYDEFKSYLKKALSQLSQTEEISLINAQLDNGEFLPKQVTKDNGVIPHQLHEMELRRILEKAAAYLPFLNETHSSGLTRSQEIIRMFLFRIPYYVGPLNENSPYSWITRTSQGRIYPWNFEEKVNLEKCAESFITRMTAKCSYTRQDVLPKNSLLYSRFAALNQLNNLRINGQKPPVEIKQKIFNEHLVLSKGRNIKSYLLSEGLIEQDWILSGIDGDIRSELASTRAFKWLLERPGGKAAAENLIKRITLFKEDKKLLEGYIARTYSGLLNKDERQKVMNMKFDGWGRLSKEFLTQIYHIDKTTGECMNILDALWKTNDNLMELLSRRYTFSSALEEYIKANSDKISYTLQDYLVQSYAPPAIRRAVRQAIAIAGEIGQILKRPPKRIFIETTRGEGDKSPTSSRKERLLDLYKKCGEEANPLFQSLSGRTDAELRRDKLYLYYTQLGKCMYSGESIEITELETNYDIDHIYPQSVTKDDSLDNRVLVKRTLNAKKGDSYPLSDEVRGKMREYWAMLNDKKLISDKKYARLTRRTPLTDEELAGFISRQLVETSQSAKLIAELLQQRFSSGATQIVYVKAGCVSSFRQDMRIDSQERQRQSGQCAKNEHTRQDPVFIKCREVNHLHHAKDAYLNIIAGNVYHTKFTANPYNFISQARKERQANSQNIKGSYGYSLNTVFDFDVARNGEMAWKAGENGSIATVRRTMLKNNVLFTRLPYEQKGGFFDQTFMPKGKGQFPIKREMVNNGDIDAAVKKYGGYNNLSGAYFFLAEHQNNKKRVRSIESVYLVYRGLYESDPVKYCETVLGLKQPQIIIPKIRIDSLLKMDGSRIHISGRTNDSIRYKNANQLILSPQWNAYIKGIVKYLERCRIARKNLEITSFDRITAQENLTLYQLFLDKLRVPQYAALYPTPLKELEARREKFAALEIKAQCEVLVQILNLFACTSDKMNLKLLGGKENMGIVQRTKNLKADSDMRLIHQSVTGVFEKEIDLLTVQPI

SEQ ID NO: 19995 - protein, 1347 aa, unidentified
  REGION 1..1347: note = Cas Enzyme sequence
MQRKDRYFLGLDIGTESVGWAVTTPDYKLVKRNGKALWGVRLFDEAQTAEERRGYRVARRRIERRAQRLKWLQEVFAPEIGKVDPGFFQRLQESKFLEEDKKGTVPLGKYTLFADKEYTDKEYHKQFPTVYHLRKALIEQTETFDVRLVYLAVHHIMKYRGHFLYGDLPLETISLENGLERLSGTMEERLGKTMTVQDMDLLKQTLISRSLKKVQRKKQLAQLFSVSKEDGACFAVVELLAGGKVSLNDLYEREVSNEEISKISLEDEFDSVEDKLISALGDDMELILAVKEIYDWTRLETMRDGEQYLSFAKVKAYEKHHKDLERLKAAIRTWGDRELYREVFHQAKDKRDNYPAYAGMDAANYRCDYDAFRKYIKNKLKGLGGEDPEIQNILDELEQGTFLPKQTSKDNGVIPHQLHEAELVKILERASSYLPFLKETDASGLTKMEQIHEMFRFRIPYYVGPLDSRSKHSWVVRKNEKIYPWNFDQVVDLEECRRGFITRMTAKCGYIGEDVLPKSSLLYTKFMVLNELNKLRINGKGVPVETKQRIYQDLFLEGKKVTGARLRSYLALGKEDEITGFDQDVKADLAPWKHYAWLLTRPGGMEAAEEIIRHITLFGEDRKLLQRWLKKTYGSLITGEEQKKALAFRCSGWGRLSGRFLTGIYHTDPNTGEAWSIMDMLWRTNDNLMELLSGRYTFTQSVEEYRKEKMGKQSMTLQDYLDESYASPSIKRAIHQVVAIVGEIEGIMKCPPDRIFLEMARGGGEKGKRTVSRKAELVQLYQKCGEEADGLFEQLSQEEDGKLRRDKLYLYYTQMGKCMYSGEAIDLSRLDSDYDIDHIYPQSKTKDDSIQNRVLVKRELNSAKGDKYPIAQDVREKMRPFWTMLEKKGFLSKEKYQRLIRATSFTVEEQAGFINRQLVETRQSSKIVAELLQRRFGEKTQLVYVKAGNVSSFRQDQRLTLGGEQKQASQCKGEKTVQDPLFVKCREINDYHHAKDAYLNIVVGNVYYVKFTRNPVNFLREKDARYSLNRMFDYDVQRGGERAWTAGPEGSIATVRHAMGKNNILFTRRASEEKGKYFDQMIVAKGKGQMPIKSGDPRMDIGKYGGYNKLTGAYFALVEHTDKKKRVRSLETVLLIHKGLYETDPEEYCRKILGLKEPKVLISKVKINSLLSFDGFRMHISGRTGVRIIYKNANPLVMAPQWHQYVKGISKYMERCKTAGQELPITSFDKLTAEENRQLYQLLREKLENPLYRIKFETAARTFRENEERFAALTVADQCRILLQMLNLFANNAASADLKLLNGKIGIGILLTSKKVSTYAESRICLIHQSVTGFFEQEVDLLAEELS

SEQ ID NO: 19996 - protein, 1344 aa, unidentified
  REGION 1..1344: note = Cas Enzyme sequence
MGVDYYLGLDIGTDSVGWAVTDENYQIIKRKGKALWGVRLFDSAKTAEERRSYRTARRRIERRKQRLNWLQEQFSCEVAKKDPGFFIRLRESKFLEEDKIGDFPMGKHILFSDSNYCDKDYYRQYPTIYHLRKALIENPGPFDVRLVYLAIHHIMKNRGHFLYGDLDVGSISLDSGFRRLNRAMEAEFDTAFIQPDMMQLREILISRTDKIRQRKKRLAEIFKLSKEDEICQAIADLLAGAKVSLDTIFGEGTANDEPKKISLEDDFGEIEDRLTAMLGDRMELILAAKEIYDWALLETMRNGEKYLSSAMVKIYEKHERDLKLLKKTVKSLGTPALYKEIFHESREKLNNYTAYSGKDAKNNSCGYEDFRKYLSSALKPWKENKEVEYILAQLEQGDFLPKQVSKNNGVIPHQLHEMELVKILENASKYLPFLLEKDQSGLTKAEQIHKMFCFRIPYYVGPLDSRSEHSWVVRSNETIYPWNFEQVVNLEACRQNFIRRMTAKCSYIGEDVLPKSSLLYSKYMVLNIINKLKINGRGITVEQKQGIYRGLFLSGKKVSAAKLRNYLQLERSDELGGFDGEIKADLAPWKHFDWLLKRPGGYEAAEDIILHLTLFGEDRSLLRKWISRKYGTILSAEEQKQALSFRCSGWGRLSKIFLTELYHTDANTGEAFSLIDMLWNTNLNLMELLGSQYSFGEEVSKYRRKAAGEMGKNLNAYLEESYASPAIKRSIHQTIAIVSELQGILKAAPKRIFVEMAREQGEKGKRTISRKSALMELYKKCGEDSSPLFQALSDEAEGNLRRDKLYLYYTQMGKCMYSGEPIELGNLDNGYDIDHIYPQSKTKDDSINNRVLVKRELNAAKSDQYPLAKDIRQKMRPFWMSLESKGLITKEKLERLVRSTDFTLEEQAGFIARQLVETRQSCKVVAELLQRRFGEQTEIVYVKAGNVSSFRQDQRLTEDGRQLQAGSCKVLRTVQDPLFVKCREINDFHHAKDAYLNIVVGNVYHVKFTKNPANFLRQMEAKYSLNRMFDFDLSRNGETAWICGEAGSIETVRHMMAKNNILLTRRAAEESGGLFDQQIVSQGKGQTPVKSSDPRMAGGHYGQYNRLKGAFFCLVEHTEKKKRVRSLEAVYLMHRDLYIKDPERYCREVLSLKEPKIIIPRIKINSLISYNGFRMHISGRTGSRIILKNANPLVLEPLWNQYVKNISKYLERCAAAKQDLEITRFDGIAEAENISLYNKLKSKLENSLYVIKYETVSKTLAESEYDFQKLSCSDQCRVLIQILNLFANNASIADLKLLNGKSGVGILRISKNIAPENDNKIILIHQSVTGFYEQEIDLASCGQP

SEQ ID NO: 19997 - protein, 1384 aa, unidentified
  REGION 1..1384: note = Cas Enzyme sequence
MDKYYIGLDIGTDSVGWAVTDENYNLVRKNSKALWGIRLFDEAQKAEERRTFRTGRRRLERRKQRMQWLKEAFADEIAKVDPAFFQRLRESSFEEADKRSDDGSMLGKYILFNDKNYTDKDLKDKFPTIYHLRKALVESDEPFDIRMVYLAIHHIMKYRGHFLYEMSIDDMDPDSGESNGGASAFEECMVKLNDAVRACREEYDISDDDSDSSADVSEYSDFCPADRTVYDKIKEALTDKKYKGKKQKQAAIEEALKPDKSDKLSTEVIKLICGMNTSIKKLYGDGVEVEKDETICLEGNFESTEQKISEAIGSDKMALILAAKGIYDWALMETMISGEKYISDAMVKKYDKHCSDLAKLKSAVKATGDHKLYYEIFRSKDPKCNNYGAYVGSGTEHRCTYEDFMKFLKNRLSPYQDDPNVSEQIRSILSEVEEKTFLPKQTSKDNGVIPHQLNGVELKKILEHASKYLPFLNEKDSSGLTKAEQIMQMFEFRVPYYVGPLNPKSSHAWVSRSDEKIYPWNFDKVVNLEESNERFIERMTAKCSYTGDDVLPKSSLLYTKYMVLNELNNLTVNGHAISVADKQKIYNEVCMSGKKTTQRKIRTCLGLSEDDMIGGIDQDLKADLAPWAYYRHILERDGGYDMVENIIRHITIFGDDKKLLKRWISKDYGNVLSDKDMAYALNFKCNSWGRLSKSLLDDAEKVYHEDPQTGECLSIIDMLWRTNDNLMELLSNKYSFSTHLNEYLAKKADGHAVTLQDYLTESYASPALKRAINQTMRIVSEIVKIMRHEPAKVFVEMARGGGVKNERTVSRKAALMKLYDNCKNDCGKLYEQLEGCDDGSLRRDKLYLYFTQLGKCMYSGEPIDLSRLDSDYDIDHIYPQSKIKDDSLSNRVLVKRELNAHKADEYPLKWEVRERMRGFWAMLRAKELISKEKYERLTRSTPLGSDELAAFVARQLVETRQSTKIIANWLEQIYSDTDVIYVKAGNVSSFRQEQRITDDGTQIQACYCKNIETKQDPLFVKCRDINDFHHARDAYLNIVVGNVYDTQFTKDPRNFFRSDRDSFNLNNLYKHNVSRGDTTAWIADGNKSIETVRNTMRKNNILVTRMSFEVGGGLFDQQLLKRKNGQAMVKSSDERMTIDKRGGYNKIAGAYFALIEHMDGKKKVRSIEPVYIMHKELYETDQKRYFKEALDIDLLRVLIPKIRKDALIELDGYKLNISSRSGDKLVTKNANRLIIDPKWNQYVKDITKYLGKCKPGLADPEITTFDGITAEQNIELYDLLVAKLASKPYCAKLNDIANKIRAGKDKYIELTIPNQCRVIQQILKRFSNSASGIDLTLIGCARQAAILSLGTNINSLRGHSLYLINQSPTGFYEERIDLLSEDLK

SEQ ID NO: 19998 - protein, 1384 aa, unidentified
  REGION 1..1384: note = Cas Enzyme sequence
MDKYYIGLDIGTDSVGWAVTDENYNLVRKNSKALWGIRLFDEAQKAEERRTFRTGRRRLERRKQRMQWLKEAFADEIAKVDPAFFQRLRESSFEEADKRSDDGSMLGKYILFNDKNYTDKDLKDKFPTIYHLRKALVESDEPFDIRMVYLAVHHIMKYRGHFLYDMSIDDMDPDSGESNGGASAFEECMVKLNAAVRACREEYDISDDDSDSSADVSEYSDFCPADRTVYDKIKEALTDKKYKGKKQKQAAIEEALKPDKSDKLSTEVIKLICGMNTSIKKLYGDGVEVEKDETICLEGNFESTEQKISEAIGSDKMALILAAKGIYDWALMETMISGEKYISDAMVKKYDKHCSDLAKLKSAVKATGDHKLYYEIFRSKDPKCNNYGAYVGSGTEHRCTYEDFMKLLKNRLSPYQDDPNVSEQIRSILSEVEEKTFLPKQTSKDNGVIPHQLNGVELKKILEHASKYLPFLNEKDSSGLTKAEQIMQMFEFRVPYYVGPLNPKSSHAWVSRSDEKIYPWNFDRVVNLEESNERFIERMTAKCSYTGDDVLPKSSLLYTKYMVLNELNNLTVNGHAISVADKQKIYNEVCMSGKKTTQRKIRTCLGLSEDDMIGGIDQDLKADLAPWAYYRHILERDGGYDMVENIIRHITIFGDDKKLLKRWISKDYGNVLSDKDMAYALNFKCNSWGRLSKSLLDDAEKVYHEDPQTGECLSIIDMLWRTNDNLMELLSNKYSFSTHLNEYLAKKADGHAVTLQDYLTESYASPALKRAINQTMRIVSEIVKIMRHEPAKVFVEMARGGGVKNERTVSRKAALMKLYDNCKNDCGKLYEQLEGCDDGSLRRDKLYLYFTQLGKCMYSGEPIDLSRLDSDYDIDHIYPQSKIKDDSLSNRVLVKRELNADKADEYPLKWEVRERMRGFWAMLRAKELISKEKYERLTRSTPLGSDELAAFVARQLVETRQSTKIIANWLEQIYSDTDVIYVKAGNVSSFRQEQRITDDGTQIQACYCKNIETKQDPLFVKCRDINDFHHARDAYLNIVVGNVYDTQFTKDPRNFFRSDRDSFNLNNLYKHNVSRGDTTAWIADGNKSIETVRNTMRKNNILVTRMSFEVGGGLFDQQLLKRKNGQAMVKSSDERMTIDKRGGYNKIAGAYFALIEHMDGKKKVRSIEPVYIMHKELYETDQKRYFKEALDIDLLRVLIPKIRKDALIELDGYKLNISSRSGDKLVTKNANRLIIDPKWNQYVKDITKYLGKCKPGLADPEITTFDGITAEQNIELYDLLVAKLASKPYCAKLNDIANKIRAGKDKYIELTIPNQCRVIQQILKRFSNSASGIDLTLIGCARQAAILSLGTNINSLRGHSLYLINQSPTGFYEERIDLLSEDLK

SEQ ID NO: 19999 - protein, 1395 aa, unidentified
  REGION 1..1395: note = Cas Enzyme sequence
MKAMQEDYFIGLDVGTDSVGWAASDTNYNLLKCNQKALWGVRLFDEAHSAAERRSFRTSRRRLERSRQRLDWLQEIFSEEIAKKDPAFFQRLQASKYDAEDKETFSGRPLGKHILFADAEYTDKDFFSDYPTIYHLRHALMSRKGPFDVRLVYLALHHILKHRGHFLFENLGEEQSNDGQEHTHDEKPAFISPEALREGLERVNGYLEAHAFSMDLPDDKEYRDDVPEQLFEIKQDTLEIFEGVLTDKTLSVSQKHKKLLEGLNISKTQTKLNNILKLMTGGTVKLKDLYDEETEGELKSICLKKDWEQNQAKLAETLGERLELILGIKQIYDYSLLSEILGKEASLSAAKIKLFEKHREDLKRLKKLIRGANEPALYKEIFRTARKDLNNYPAYSGHGSANYQCSYDDFRSYLKKSLSGLPESEELSMISAELDSGEFLPKQVTKDNGVIPHQVHEYELKRILENASAYLPFLNETDSSGLTRREQIIRMFQFRIPYYVGPLNNNSPFGWAVRKEDKIYPWNFQEVVDLEKCAENFITRMTAKCSYTGKDVLPKASLLYSRFTALNELNNLRINGEKPPVEIKQKIYNECLLQGKGRNISSYLLSEGLIKKEDKLSGIDGNIKTTLASWRALGWLLERPKGKEAAEDIIRQITLFNEDKKLLERYLTKNYADLLSKEELNKVMHMKFDGWGRLSKEFLTQIYHVDKNTGEYMNIMDALWNTNDNLMELLSGSYSFKEGLEEFRLNEWEEIGYTLKDYLDQSYASPSIRRAIRQSINIIGEIEQITKRPPKRIFIETTREEREKKRTDSRRDALLELYKNCQEEAGPLFQSLEARSDGELRRDKLYLYYTQLGKCMYSGESINLSELDANYDIDHIYPQSLTKDDSLNNRVLVKRVLNANKKDVFPLSSEIRNKMQSFWAMLNSKGLISEKKYARLTRHTPLSEEELSGFINRQLVETSQSAKLIAELLKKRYEAAQTEIVYVKAGNVSSFRQDQRIDSYGNQKQAGQCTRNEETKQDPVFTKCREVNDFHHAKDAYLNIVVGNVYHIKFTSNPLNFIRQAKKNAGKDQADSSKGGYGYSLNHTFDFDVERNGEKAWTAGNNGSIAAVRRTMTKNNILFTRFAHEEKGGFFDQTLMPKKKGQFPIKSNMSIEKYGGYNKLKGACFCLVEHTNKKKRVRSIETIYIVNRQLYESSPVKYCEEILGLEQPRIILPKIRIDSLFSIDGSRVHISGRSEDKIIYKNANQLILAPHWNAYIKGIAKYLERCRAARKTLAITPFDGINSQDNIALYQLLLEKLHVKQYAVVYRAPLEALEKGFEKFTSLAVNEQCEVLVQILNLFTCKAVKMNLKLLGGKENMGIITRAKNLNTGSNLKLIHQSVTGIFEREVDLMAVDAE

SEQ ID NO: 20000 - protein, 929 aa, unidentified
  REGION 1..929: note = Cas Enzyme sequence
EIYRKIKDGVFLPKLRSSENGVIPYQLNRQELVQILKQASRYLPFLNDVDSDGFSVSEKIIKTFEFRVPYYVGPVSDRAGHHWAVRFQGKENEKIYPWNFEQVVDLERSAAGFMEKLVGRCTYTGEPVLPKDSLLYSEFMLLNEVNLIKINGKSLPVDVKKQLVQDLFYHSSKKVTKKGIVHYLTSKGLMTQSDELTGVDDRIKSTLRSYHDFKDILKRTGDRDMVENIIRSILVFGNDLTMLRRWLKNNTHDLTEEEIRRICNLRSKYKEWGRLSRTFLTEIYSPDESGEAKTIMDYLRDTNCNLMQLLSNQYQFADQAKAHFDALMGNGQTLSQRLDDLYVAPAVRRSIRQTLRIVDEIVDIEHSVPKKIFIEMARDNAQEVKKSRTESRKDKLIALYRACHEDSGELFQQLEQEEDSHLRSDKLFLYYTQFGKCMYSGEPIDLESLMRGELFDIDHIFPQSKVKDNSLDNRVVVINTLNREKGNIYPIQGEIRRKMQPFWAMLKSKGMISEKKYDRLAKLTEEELFSFVARQLVETRQSTKALATILQEIYGEPVRLVYSKAGNVSDFRQQFDLVKCRDVNDLHHAKDAYLNIVVGNVYDTKFTEQFFHNIKKERYSLKKIFEFDTPGAWDKTESIKTVKKYMAKNNVLVTWMPHEVTGALFDLQLVSAGKGQLSKKQGMEISKYGGYNKLTGAYFCVVEHTDKKKKRVRTIEPVFLYQKATYERDPIAYCKNVLGLCDPIMIVPKVHIDALVEVNGSRLLVTSRSSNQIILKHTYQLTIGAEMEQYIKAISKYHERCLAKKEELPITKFDGVSEEKNLELYRLFADKCDTGAYQSCFSVFSTIGTELRKYESKFVGMSMWEQIKILLEALKAFRCNAVYGNFEPLSGKKTRGRVEMNKKISALSSAYLINQSVTGLYEHKIDLLK

SEQ ID NO: 20001 - protein, 1170 aa, unidentified
  REGION 1..1170: note = Cas Enzyme sequence
LSAINAYFSDDELSEDNKRTLPLAKYAEIADVLKNRKTGKNAREAQLKKICDVDKADKTALAVIRCIVGKKVDLKDLFGENHSVAKEKLCFDDTDFDKNYETLQLQLNDEEAAFVDAMKAVYDWAMLAEVLNGNTYLSLAMIERYRIHAEHLKMLKSYIKSECPERYAQTFRRNSNNNYAAYVGSDRGRDFKHCTREDFYKYLRSFVKDEQILQLIERGEFLPKLRTSVNGVIPYQVHRAELVTILKNAEDNFPFLKEEQDGFTVAQKIIKLLEFRIPYYVGPLSSAHESKNPKKGFYWAVKNPGFERTKITPWNFDKIIDRDASEDKFISRMTNKCTYLLGEDVLPKSSLLYSEFTFRNELNNLCFKDNRLSEKAREEIFKYATEHKRVTLSGIGKLLEEKNLIECGEGKPENFSGTDGDFHSSLSSLITIKRVLGENFDRDMAEQIILWATLTPDKDRLVRRVKSHYSLPDDVLKKIKGLSFSGWGRLSEKFLTDIWAADDDGVRTNIIEAMKSTGANLMELLSAKYGFSDAIKEFNADLNPSPNVEYSDVDELYCSPSVKRAIWRTICLVREIEKINGCPPKRIFVEMARGATKEQKGKRTTSRKEQIKALFKDIHDNERDWVAEIESQPDNLFSSDKMFMYYMQMGKCAYSGENIPLTDVFNTNLYDIDHIYPQSKIKDDSLDNRVLCKKEYNQDIKKDVYPVSKEIRDKMRDIWAVWLDKKLISKEKYKRLTRSTPLTEAELSDFIDRQLVETRQSTKAVATLLKRMYPDSEIVYSKAGNVADFKEKVNNDYKKHDKPELSIVKIRELNDLHHAKDAYLNIVVGNVYFTKFNRNAAIFFKKNNIDSYNLKRLFDYDLPGAWKVSEKERILQTARKNTCRVVQFVSEERGQLFNDNISPQDTVTKGFVPIKANGPISDMYKYGGYTKVARAYFSLVLSSGNKGKQTITLEAIPIYIDLLGENAVNDYVKNVTGDKNATRLIDKIKMNSLLKIDSTYCYLIGKADERRVLLCNANQFIISDEDAAYLKKISRFCEKNKKAEGRLTADEQHDGLTKEKNLEFYRMLVKRLEEKPYCLLPMPDSTTLLKSKENVFVMLNIEEQCSVIMEIMHFFQCNSVESDLTLLGGKKTGKVRRSKTIDPDEEILLIYQSPTGFYQKTISLTGFYKA

SEQ ID NO: 20002 - protein, 971 aa, unidentified
  REGION 1..971: note = Cas Enzyme sequence
TTKKDKLNNYVAYSKNKLRSGDYCCSQESFCKYLISQFPEMKNTQGYENMCFEIENSTFLSPLTGTSNSVIPHQLNLSELEKILENASSYLSFLNTKDEDGLSVADKIISTFKFRIPYYVGPLSEKSPNHWIVRSKEKIYPWNFHKTVDTKRSAENFIINLIGRCTYTGEYVLPKDSLLYSEYCLRNEINLLRINGKELPRTVMDELYETLFVSSNKKVTKKTIKDFLLIKGYIINTDELSGIDDTIKTKLKSYHDLKNILLKTSNPELVEEIIQRILVFGDDKRMLRQWLVENCRMLDKKDIDYVCRLKYKDWGRFSKRFLTEIYHTDKSGKAFSIMDMLRTNNMNLMQLLSSDYNFLEEAEKVRKENSSQDYSLQKRIDEMYLSPAVRRSVRQALKIVDEIVDIKKCAPKKIFIEVARGSREEMKNKRTTSRKNKLIELYQACKEDSNPLFEQLCNEEENRLRSDKLYLYYTQLGKCMYSGEIIDFSSLATENSKYDIDHIFPRSRVKDDSLDNRVLVKAELNREKTNTYPVDNIIRERMHSFWKMLKEKGFISDKKFTKLQRQTPLTDKELSEFVARQIVETQQSTKAVASLMKDMYKDTRIVYSKAGNVSDFRHKYEFIKCRDINNLHHAKDAYLNIVVGNVYDTKFTDNFFKNISGENYSLNKVFEFDTPSAWDAGGSSIKTVKHYMGKNNILVTRMAREGRGKLYDLTVLPAGKGQHSINENLEIEKYGGYNNVYGAYFIVVEHTSKKKRIRTIESVLLCDKPLYEKNPTEYCVKKLALEDPEIIVPIIRMDSLLEINGSRRVITGRSNVQLIYKHTYELAIDTIHEQYIKNISKYVDRCSGLKKELDITEFDKISAEENMELYSWFIKKLGANVYRPLFSNVLNYLNKCGNVFESLNMLEQCKVLLEILKTFKCDRQVSNLSSLCGKSSVGTILTSKNLSNMDSAYLINQSPTGLYEVKVNLLK

SEQ ID NO: 20003 - protein, 950 aa, unidentified
  REGION 1..950: note = Cas Enzyme sequence
DYCCSQESFCKYLISQFPEMKNTQGYENMCFEIENSTFLSPLTGTSNSVIPHQLNLSELEKILENASSYLSFLNTKDEDGLSVADKIISTFKFRIPYYVGPLSEKSPNHWIVRSKEKIYPWNFHKTVDTKRSAENFIINLIGRCTYTGEYVLPKDSLLYSEYCLRNEINLLRINGKELPRTVMDELYETLFVSSNKKVTKKTIKDFLLIKGYIINTDELSGIDDTIKTKLKSYHDLKNILLKTSNPELVEEIIQRILVFGDDKRMLRQWLVENCRMLDKKDIDYVCRLKYKDWGRFSKRFLTEIYHTDKSGKAFSIMDMLRTNNMNLMQLLSSDYNFLEEAEKVRKENSSQDYSLQKRIDEMYLSPAVRRSVRQALKIVDEIVDIKKCAPKKIFIEVARGSREEMKNKRTTSRKNKLIELYQACKEDSNPLFEQLCNEEENRLRSDKLYLYYTQLGKCMYSGEIIDFSSLATENSKYDIDHIFPRSRVKDDSLDNRVLVKAELNREKTNTYPVDNIIRERMHSFWKMLKEKGFISDKKFTKLQRQTPLTDKELSEFVARQIVETQQSTKAVASLMKDMYKDTRIVYSKAGNVSDFRHKYEFIKCRDINNLHHAKDAYLNIVVGNVYDTKFTDNFFKNISGENYSLNKVFEFDTPSAWDAGGSSIKTVKHYMGKNNILVTRMAREGRGKLYDLTVLPAGKGQHSINENLEIEKYGGYNNVYGAYFIVVEHTSKKKRIRTIESVLLCDKPLYEKNPTEYCVKKLALEDPEIIVPIIRMDSLLEINGSRRVITGRSNVQLIYKHTYELAIDTIHEQYIKNISKYVDRCSGLKKELDITEFDKISAEENMELYSWFIKKLGANVYRPLFSNVLNYLNKCGNVFESLNMLEQCKVLLEILKTFKCDRQVSNLSSLCGKSSVGTILTSKNLSNMDSAYLINQSPTGLYEVKVNLLK

SEQ ID NO: 20004 - protein, 1272 aa, unidentified
  REGION 1..1272: note = Cas Enzyme sequence
EEASGAAERRSSRAARRRLARRKQRMLILELLFSEEIAKVDPNFFVRLRESFLKTDDRSTDARYSLFNDKNYTDKDYLKQFPTIYHLRSELIHSKEKHDIRLVYLALHHIMKKRGHFLYEADGNVTEKSLVEYIDELNYFLSSEYGYELDFEDKEKYALVLEKNDINVTQKKKLLREKLGAQQEQQEYNPLVLSDLLAGATVKFSDLFCDDELKNTEVKSISLKNDIDAVFESLTAAIGERIELILNCKIVFDAARLSQILGGNTYISDAKIQLYNKNKNDLAKLKEYIKTNYPQKYKEVFTTKKDKLNNYVAYSKNKLRSGDYCCSQESFCKYLISQFPEMKNTQGYENMCFEIENSTFLSPLTGTSNSVIPHQLNLSELEKILENASSYLSFLNTKDEDGLSVADKIISTFKFRIPYYVGPLSEKSPNHWIVRSKEKIYPWNFHKTVDTKRSAENFIINLIGRCTYTGEYVLPKDSLLYSEYCLRNEINLLRINGKELPRTVMDELYETLFVSSNKKVTKKTIKDFLLIKGYIINTDELSGIDDTIKTKLKSYHDLKNILLKTSNPELVEEIIQRILVFGDDKRMLRQWLVENCRMLDKKDIDYVCRLKYKDWGRFSKRFLTEIYHTDKSGKAFSIMDMLRTNNMNLMQLLSSDYNFLEEAEKVRKENSSQDYSLQKRIDEMYLSPAVRRSVRQALKIVDEIVDIKKCAPKKIFIEVARGSREEMKNKRTTSRKNKLIELYQACKEDSNPLFEQLCNEEENRLRSDKLYLYYTQLGKCMYSGEIIDFSSLATENSKYDIDHIFPRSRVKDDSLDNRVLVKAELNREKTNTYPVDNIIRERMHSFWKMLKEKGFISDKKFTKLQRQTPLTDKELSEFVARQIVETQQSTKAVASLMKDMYKDTRIVYSKAGNVSDFRHKYEFIKCRDINNLHHAKDAYLNIVVGNVYDTKFTDNFFKNISGENYSLNKVFEFDTPSAWDAGGSSIKTVKHYMGKNNILVTRMAREGRGKLYDLTVLPAGKGQHSINENLEIEKYGGYNNVYGAYFIVVEHTSKKKRIRTIESVLLCDKPLYEKNPTEYCVKKLALEDPEIIVPIIRMDSLLEINGSRRVITGRSNVQLIYKHTYELAIDTIHEQYIKNISKYVDRCSGLKKELDITEFDKISAEENMELYSWFIKKLGANVYRPLFSNVLNYLNKCGNVFESLNMLEQCKVLLEILKTFKCDRQVSNLSSLCGKSSVGTILTSKNLSNMDSAYLINQSPTGLYEVKVNLLK

SEQ ID NO: 20005 - protein, 1352 aa, unidentified
  REGION 1..1352: note = Cas Enzyme sequence
MKQDYYIGLDMGTESVGWAVTDVDYNLIKKRGQDYWGVYLFDEAQTAQGRRAFRTNRRRLARVRHRLNLLQELFDSEISAKDFGFFYRLENSKYFDEDKPEIARGKFLLFNDKDFGDKEYYKNYPTIFHLRNALRTQEIKDVRLLYLAVHHILKNRGHFLFGEQDFNVNDASDVSGEFEKINRFLSENDGAGFDREKIPEIFETLCNENLAKRERKEKILELAGNSKNKLLGEAVNAVVGLNFSLSKMFGEDRDFQGENKMSFTDSSFEEKLAKARMALDDDEADFLETLKKVQSVASLHNILHGKEFISEAKTEAYETHRRDLSELKKYVRENCPEKYALVFRRQVKKGKKNTSGADENEKDDKKVNNYAAYIGMDKGKGFEKCKKEDFYAFLKKEIGINDESLLAKIDEGIFLPKQISAENCDIPYQVHLAELKAILANAENYFPFLKQKDENCEMTVSEKIISLMKFRVPYYVGPFTDKETRFSWMIKKEGLSTQKITPWNFDDVVDRDASEKKFIERMTNFCTYLTGEKVLPASSFLYSEYAFLNELNNLKVNGTKDLRVKNILFDFAKTNKKLTLKKCCEQLVKNGLLPEGSKARDVFSGTDGDFKNSLSSYIDFKRIIGDKADLYRDMCEKIILWITVISDKERLVKIIKDKYGTVLSDEEIKGLKALNYTKWGRLSEKLLDGIFETDSEGEVGNVSIIEKMRTDTENFMELLSNKHNYKRAIELANSESIVDERVTYRAVEELYCSPAVKRSIWSALKIVREIVKVQGHSPKKIFVETTREKPDVTRKGQRTVSRKQQLLDKYRENLRNETELIKKIEETEDSKFNSDKLFFYFTQMGKDAYTGEKIEFDDVFKTEKYDIDHIYPRSKIKDDSLDNRVLVRRKINQSVKKDSYPLSAEIRNRMEGLWRQLRDKKLISDEKFYRLTRSTPLTEKECGDFINAQLIATSQSAKAAIQLLKRMLPESEIVYSKAGNVNEFKKRLEFVKIRELNDLHHAKDAYFNIVVGNVFNTKFNHNPAVFQRSNGTGNYDFERLYDFDITNAWKKGDENRIRSVAEKNTCRVVRFSKTEKGQFYDATIYPAGKNDKLAPVKGKAPLNDTSKYGGYDKETTAYFMLVKSRDKKKKDKTLLSLECVTVLADKNFRTAEDKLKYCEKELGLKEPEILIEKIKLNTLFKINGSYAWIRGRTNDRLVLCNANQLWLDNGSAKELKKISNHFRDVKKYNNKDLPVREEEFSKEQNLALYDLFTEKLGGKIYAGLPVQGQIKNLEKGRDKFEALELKDQLFVLMEILKFMQCNSMTSNIKLIGGAENAGKNRISKLIQDSDVKMIFCSPTGYFCKVVDFKRFL

SEQ ID NO: 20006 - protein, 1350 aa, unidentified
  REGION 1..1350: note = Cas Enzyme sequence
MKQDYYIGLDMGTESVGWAVTDVDYNLVKKRGQDYWGVYLFDEAKTAQGRRASRTNRRRLARVRHRLNLLQELFDSEISAKDFGFFYRLENSKYFDEDKPEIARGKFLLFNDKDFGDKEYYKNYPTIFHLRNALRTQEIKDVRLLYLAVHHILKNRGHFLFGEQDFKVNDASDVSGEFEKINRFLRENDGAELDREKIPEIFETLCNVDLAKRERKEKILKLSGNSKNKLLGEALNAVVGLEFSLSKMFGEDRDFQDIKKMSLANSSFEEDFAKAKMALDDDEADFLETLKKVQSIASLCNILHGKEFISQAKTETYETHRRDLSELKKYVRENCPEKYALVFRRQAKKVNKNTSGADENEKDDKKVNNYAAYIGMDKGKGFAKCKKEEFYAFLKKEIGIKDESILAKIDEGVFLPKQISAENCDIPYQVHLAELKAILANAENYFPFLKQKDENCEMTVSEKIISLMKFRVPYYVGPFTDKETGFSWMIKKEGLSTQKITPWNFDDVVDKDASEQKFIERMTNFCTYLTGEKVLPASSFLYSEYAFLNELNNLKVNGTKDLRVKNILLDYAKTKKKLTLKKCCEQLVKNGLLPEGSKARDVFSGTDGDFKNSLSSYIDFKKIIGDKADLYRDMCEEIISWITVISDKERLVKIIKDKYGTVLSDEEIKGLKALNYTKWGRLSAKLLDGIFETDSEGEVGNVSIIEKMRTDTENFMELLSNKHNYKRAIELANSESIVDERVTYRAVDELYCSPAVKRSIWSALKIVSEIKKVQGYSPKKIFVETTREKPDGARKGQRTESRKQKLLDKYRENLRNEKELIKKIEETEDSKFNSDKLFFYFTQMGKDAYTGEKIEFDDVFKTEKYDIDHIYPRSKIKDDSLDNRVLVRRKINQSVKKDSYPLSAEIRNRMEGLWRQLRDKKLISEEKFYRLTRSTPLTEEECGDFIKAQLVATSQSAKAAIQLLKRMLPESEIVYSKAVNVNEFKNRLKFVKIRELNDLHHAKDAYFNIVVGNVFNTKFNHNPAVFQRSNGTGNYDFERLYDFDITNAWKKGDENRIRSVAEKNTCRVVRFSKTEKGQFYDATIYPAGKNDKLAPVKGKAPLNDTSKYGGYDKETTAYFMLVKSRDKKKKDKTLLSLECVTVLADKNFRTAEDKLKYCEKELGLKEPEILIEKIKLNTLFKINGSYAWIRGRTGDRLELCNANQLWLDNGSAKELKKISNHFRDVKKYKDLPVREEEISKEQNLALYDLFTEKLGGKIYAGLSIKGQIENLEKGRDKFEALELKDQLFVLMEILKFMQCNSMTSNIKLIGGAENAGKNRISKLIQDSDVKMISCSPTGYFCKVVDFKRFL

SEQ ID NO: 20007 - protein, 1354 aa, unidentified
  REGION 1..1354: note = Cas Enzyme sequence
MKQDYYIGLDMGTESVGWAVTDVDYNLIKKRGQDYWGVYLFDEAQTAQGRRAFRTNRRRLARVRHRLNLLQELFDSEISAKDFGFFYRLENSKYFDEDKPEIARGKFLLFNDKDFGDKEYYKNYPTIFHLRNALRTQEIKDVRLLYLAVHHILKNRGHFLFGEQDFNVNDASDVSGEFEKINRFLSENDGAGFYREKIPEIFETLCNENLAKRERKEKILELAGNSKNKLLGEAVNAVVGLNFSLSKMFGEDRDFQGENKMSFTDSSFEEKLAKARMALDDDEADFLETLKKVQSVASLHNILHGKEFISEAKTEAYETHRRDLSELKKYVRENCPEKYALVFRRQVKKGKKNTSGADENEKDDKKVNNYAAYIGMDKGKGFAKCKKEEFYAFLKKEIGIKDESILAKIDEGVFLPKQISAENCDIPYQVHLAELKAILANAENYFPFLKQKDENCEMTVSEKIISLMKFRVPYYVGPFTDKETGFSWMIKKEGLSTQKITPWNFDDVVDKDASEQKFIERMTNFCTYLTGEKVLPASSFLYSEYAFLNELNNLKVNGTKDLRVKNILFDFAKTKKKLTLKKCCEQLVKNGLLPEGSKARDVFSGTDGDFKNSLSSYIDFKRIIGDKADLYRDMCEEIILWITVISDKKRLEKLIKSNYGTVLSDEEIKGLKALNYTKWGRLSKKLLDGIFETDSEGEVGNVSIIEKMRTDTENFMELLSNRHNYKRAIDLANSESVEDKNVTYRAVEELYCSPAVKRSIWSALKIVSEIKKVQGYSPKKIFVETTREKPDGTRKGKRTVSRKQRLLDVYRKNLRNEKELIKKIEETEDSKFNSDEDKLFFYFTQMGKDAYTGEKIELDDLSKTEIYDIDHIYPRSKIKDDSLDNRVLTRKKINQGVKQDIYPLPAEIRNKMEGLWRQLKDKKLISEEKFYRLTRSTPLTEKECGDFINAQLVATSQSAKAAIQLLKRMLPESEIVYSKAGNVNEFKNRLKFVKIRELNDLHHAKDAYFNIVVGNVFNTKFNHNAAVFLRNNGTGNYDLKRLYDFDITNAWKAGDENRIRSVAEKNTCRVVRFSKTEKGQFYDATIYPAGKNDKLAPVKGKAPLNDTSKYGGYDKETTAYFMLVKSRDKKKKDKTLLSLECVTVLADKNFRTAEDKLKYCEKELGLKEPEILIEKIKLNTLFKINGSYAWIRGRTNDRLVLCNANQLWLDNGSAKELKKISNHFRDVKKYNNKDLPVREEEFSKEQNLALYDLFTEKLGGKIYAGLPVQGQIKNLEKGRDKFEALELKDQLFVLMEILKFMQCNSMTSNIKLIGGAENAGKNRISKLIQDSDVKMISCSPTGYFCKVVDFKRFL

SEQ ID NO: 20008 - protein, 1350 aa, unidentified
  REGION 1..1350: note = Cas Enzyme sequence
MKQDYYIGLDMGTESVGWAVTDVDYNLVKKRGQDYWGVYLFDEAKTAQGRRAFRTNRRRLARVRHRLNLLQELFDSEISAKDFGFFYRLENSKYFDEDKPEIARGKFLLFNDKDFGDKEYYKNYPTIFHLRNALRTQEIKDVRLLYLAVHHILKNRGHFLFGEQDFKVNDASDVSGEFEKINRFLRENDGAELDREKIPEIFETLCNVDLAKRERKEKILKLSGNSKNKLLGEALNAVVGLEFSLSKMFGEDRDFQDIKKMSLANSSFEEDFAKAKMALDDDEADFLETLKKVQSIASLCNILHGKEFISQAKTETYETHRRDLSELKKYVRENCPEKYALVFRRQAKKVNKNTSGADENEKDDKKVNNYAAYIGMDKGKGFAKCKKEEFYAFLKKEIGIKDESILAKIDEGVFLPKQISAENCDIPYQVHLAELKAILANAENYFPFLKQKDENCEMTVSEKIISLMKFRVPYYVGPFTDKETGFSWMIKKEGLSTQKITPWNFDDVVDKDASEQKFIERMTNFCTYLTGEKVLPASSFLYSEYAFLNELNNLKVNGTKDLRVKNILLDYAKTKKKLTLKKCCEQLVKNGLLPEGSKARDVFSGTDGDFKNSLSSYIDFKKIIGDKADLYRDMCEEIISWITVISDKERLVKIIKDKYGTVLSDEEIKGLKALNYTKWGRLSAKLLDGIFETDSEGEVGNVSIIEKMRTDTENFMELLSNKHNYKRAIELANSESIVDERVTYRAVDELYCSPAVKRSIWSALKIVSEIKKVQGYSPKKIFVETTREKPDGARKGQRTESRKQKLLDKYRENLRNEKELIKKIEETEDSKFNSDKLFFYFTQMGKDAYTGEKIEFDDVFKTEKYDIDHIYPRSKIKDDSLDNRVLVRRKINQSVKKDSYPLSAEIRNRMEGLWRQLRDKKLISEEKFYRLTRSTPLTEEECGDFIKAQLVATSQSAKAAIQLLKRMLPESEIVYSKAVNVNEFKNRLKFVKIRELNDLHHAKDAYFNIVVGNVFNTKFNHNAAVFLRNNGTGNYDLKRLYDFDITNAWKAGDENRIRSVAEKNTCRVVRFSKTEKGQFYKVTICPAGKNDKLAPIKGNGPLNDTSKYGGYDKETTAYFMLVKSRDKKKKDKTLLSLECVTVLADKNFRTAEDKLKYCEKELGLKEPEILIEKIKLNTLFKINGSYAWIRGRTGDRLELCNANQLWLDNGSAKELKKISNHFRDVKKYKDLPVREEEISKEQNLALYDLFTEKLGGKIYAGLSIKGQIENLEKGRDKFEALELKDQLFVLMEILKFMQCNSMTSNIKLIGGAENAGKNRISKLIQDSDVKMISCSPTGYFCKVVDFKRFL

SEQ ID NO: 20009 - protein, 1352 aa, unidentified
  REGION 1..1352: note = Cas Enzyme sequence
MKQDYYIGLDMGTESVGWAVTDVDYNLIKKRGQDYWGVYLFDEAQTAQGRRAFRTNRRRLARVRHRLNLLQELFDSEISAKDFGFFYRLENSKYFDEDKPEIARGKFLLFNDKDFGDKEYYKNYPTIFHLRNALRTQEIKDVRLLYLAVHHILKNRGHFLFGEQDFNVNDASDVSGEFEKINRFLSENDGAGFDREKIPEIFETLCNENLAKRERKEKILELAGNSKNKLLGEALNAVVGLEFSLSKMFGEDRDFQDIKKMSLANSSFEEDFAKAKMALDDDEADFLETLKKVQSVASLHNILHGKEFISEAKTEAYETHRRDLSELKKYVRENCPEKYALVFRRQVKKGKKNTSGADENEKDDKKVNNYAAYIGMDKGKGFAKCKKEEFYAFLKKEIGIKDESILAKIDEGVFLPKQISAENCDIPYQVHLAELKAILANAENYFPFLKQKDENCEMTVSEKIISLMKFRVPYYVGPFTDKETGFSWMIKKEGLSTQKITPWNFDDVVDKDASEQKFIERMTNFCTYLTGEKVLPASSFLYSEYAFLNELNNLKVNGTKDLRVKNILLDYAKTNKKLTLKKCCEQLVKNGLLPEGSKAQDVFSGTDGDFKNSLSSYIDFKRIIGDKADLYRDMCEEIILWITVISDKKRLEKLIKSNYGTVLSDEEIKGLKALNYTKWGRLSKKLLDGIFETDSEGEVGNVSIIEKMRTDTENFMELHSNRHNYKRAIDLANSESVEDKNVTYRAVEELYCSPAVKRSIWSALKIVSEIKKVQGYSPKKIFVETTREKPDGTRKGKRTVSRKQQLLDKYRENLRNETELIKKIEETEDSKFNSDKLFFYFTQMGKDAYTGEKIEFDDVFKTEKYDIDHIYPRSKIKDDSLDNRVLVRRKINQSVKKDSYPLSAEIRNRMEGLWRQLRDKKLISDEKFYRLTRSTPLTEKECGDFINAQLIATSQSAKAAIQLLKRMLPESEIVYSKAGNVNEFKKRLEFVKIRELNDLHHAKDAYFNIVVGNVFNTKFNHNAAVFLRNNGTGNYDLKRLYDFDITNAWKAGDENRIRSVAEKNTCRVVRFSKTEKGQFYDATIYPAGKNDKLAPVKGKAPLNDTSKYGGYDKETTAYFMLVKSRDKKKKDKTLLSLECVTVLADKNFRTAEDKLKYCEKELGLKEPEILIEKIKLNTLFKINGSYAWIRGRTNDRLVLCNANQLWLDNGSAKELKKISNHFRDVKKYKNKDLPVRDKEISKEQNLALYDLFTEKLGGKTYAGLPFKKQIKCLEKGRDKFEALELKDQLFVLMEILKFMQCNNMTSNLTLIDGKSRAGANYISKYIQDSDVKMISCSPTGYFCKVVDFKRFL

SEQ ID NO: 20010 - protein, 1352 aa, unidentified
  REGION 1..1352: note = Cas Enzyme sequence
MKQDYYIGLDMGTESVGWAVTDVDYNLVKKRGQDYWGVYLFDEAKTAQGRRAFRTNRRRLARVRHRLNLLQELFDSEISAKDFGFFYRLENSKYFDEDKPEIARGKFLLFNDEDFGDKEYYKNYPTIFHLRNALRTQEIKDVRLLYLAVHHILKNRGHFLFGEQDFNVNDASDVSGEFEKINRFLSENDGAGFDREKIPEIFETLCNENLAKRERKEKILELAGNSKNKLLGEAVNAVVGLNFSLSKMFGEDRDFQGENKMSFTDSSFEEKLAKARMALDDDEADFLETLKKVQSVASLHNILHGKEFISEAKTEAYETHRRDLSELKKYVRENCPEKYALVFRRQVKKGKKNTSGADENEKDDKKVNNYAAYIGMDKGKGFEKCKKEDFYAFLKKEIGINDESLLAKIDEGIFLPKQISAENCDIPYQVHLAELKAILANAENYFPFLKQKDENCEMTVSEKIISLMKFRVPYYVGPFTDKETRFSWMIKKEGLSTQKITPWNFDDVVDRDASEKKFIERMTNFCTYLTGEKVLPASSFLYSEYAFLNELNNLKVNGTKDLRVKNILFDFAKTSKKLTLKKCCEQLVKNGLLPEGSKARDVFSGTDGDFKNSLSSYIDFKKIIGDKADLYRDMCEEIISWITVISDKERLVKIIKDKYGTVLSDEEIKGLKALNYTKWGRLSAKLLDGIFETDSEGEVGNVSIIEKMRTDTENFMELLSNKHNYKRAIELANSESIVDERVTYRAVDELYCSPAVKRSIWSALKIVREIVKVQGHSPKKIFVETTREKPDGARKGQRTESRKQKLLDKYRENLRNEKELIKKIEETEDSKFNSDKLFFYFTQMGKDAYTGEKIEFDDVFKTEKYDIDHIYPRSKIKDDSLDNRVLVRRKINQSVKKDSYPLSAEIRNRMEGLWRQLRDKKLISEEKFYRLTRSTPLTEEECGDFIKAQLVATSQSAKAAIQLLKRMLPESEIVYSKAGNVNEFKKRLEFVKIRELNDLHHAKDAYFNIVVGNVFNTKFNHNPAVFQRSNGTGNYDFERLYDFDITNAWKKGDENRIRSVAEKNTCRVVRFSKTEKGQFYDATIYPAGKNDKLAPVKGKAPLNDTSKYGGYDKETTAYFMLVKSRDKKKKDKTLLSLECVTVLADKNFRTAEDKLKYCEKELGLKEPEILIEKIKLNTLFKINGSYAWIRGRTNDRLVLCNANQLWLDNGSAKELKKISNHFRDVKKYNNKDLPVREEEFSKEQNLALYDLFTEKLGGKIYAGLPVQGQIKNLEKGRDKFEALELKDQLFVLMEILKFMQCNNMTSNLTLIDGKSRAGANYISKYIQDSDVKMISCSPTGYFCKVVDFKRFL

SEQ ID NO: 20011 - protein, 1352 aa, unidentified
  REGION 1..1352: note = Cas Enzyme sequence
MKQDYYIGLDMGTESVGWAVTDVDYNLVKKRGQDYWGVYLFDEAKTAQGRRAFRTNRSRLARVRHRLNLLQDLFDSEISAKDFGFFYRLENSKYFDEDKPEIARGKFLLFNDEDFGDKEYYKNYPTIFHLRNALRTQEIKDVRLLYLAVHHILKNRGHFLFGEQDFNVNDASDVSGEFEKINRFLSENDGAGFYREKIPEIFETLCNENLAKRERKEKILELAGNSKNKLLGEAVNAVVGLNFSLSKMFGEDRDFQGENKMSFTDSSFEEKLAKARMALDDDEADFLETLKKVQSVASLHNILHGKEFISEAKTEAYETHRRDLSELKKYVRENCPEKYALVFRRQAKKVNKNTSGADENEKDDKKVNNYAAYIGMDKGKGFAKCKKEEFYAFLKKEIGIKDESILAKIDEGVFLPKQISAENCDIPYQVHLAELKAILANAENYFPFLKQKDENCEMTVSEKIISLMKFRVPYYVGPFTDKETGFSWMIKKEGLSTQKITPWNFDDVVDKDASEQKFIERMTNFCTYLTGEKVLPASSFLYSEYAFLNELNNLKVNGTKDLRVKNILLDYAKTNKKLTLKKCCEQLVKNGLLPEGSKAQDVFSGTDGDFKNSLSSYIDFKRIIGDKADLYRDMCEEIILWITIISDKERLVKIIKDKYGTVLSDEEIKGLKALNYTKWGRLSAKLLDGIFETDSEGEVGNVSIIEKMRTDTENFMELLSNKHNYKRAIELANSESIVDEKVTYRAVEELYCSPAVKRSIWSALKIVREIVKVQGHSPKKIFVETTREKPDGARKGQRTESRKQRLLDKYRENLRNEKELIKKIEGTEDSKFNSDKLFFYFTQMGLDAYTGEKIEFDDVFKTEKYDIDHIYPRSKIKDDSLDNRVLTGKKINQGVKQDIYPLPAEIRNRMEGLWRQLKDKKLISEEKFYRLTRSTPLTEKECGDFINAQLVATSQSAKAAIQLLKRMLPESEIVYSKAGNVNEFKKRLEFVKIRELNDLHHAKDAYFNIVVGNVFNTKFNHNAAVFLRNNGTGNYDFERLYDFDITNAWKKGDENRIRSVAEKNTCRVVRFSKTEKGQFYDATIYPAGKNDKLAPVKGKAPLNDTSKYGGYDKETTAYFMLVKSRDKKKKDKTLLSLECVTVLADKNFRTAEDKLKYCEKELGLKEPEILIEKIKLNTLFKINGSYAWIRGKTNDRLVLCNANQLWLDNGSAKELKKISNHFRDVKKYNNKDLPVREEEFSKEQNLALYDLFTEKLGGKIYAGLPVQGQIKNLEKGRDKFEALELKDQLFVLMEILKFMQCNNMTSNLTLIDGKSRAGANYISKYIQDSDVKMISCSPTGYFCKVVDFKRFL

SEQ ID NO: 20012 - protein, 1352 aa, unidentified
  REGION 1..1352: note = Cas Enzyme sequence
MKQDYYIGLDMGTESVGWAVTDVDYNLVKKRGQDYWGVYLFDEAKTAQGRRAFRTNRRRLARVRHRLNLLQELFDSEISAKDFGFFYRLENSKYFDEDKPEIARGKFLLFNDEDFGDKEYYKNYPTIFHLRNALRTQEIKDVRLLYLAVHHILKNRGHFLFGEQDFNVNDASDVSGEFEKINRFLRENDGAGFYREKIPEIFETLCNENLAKRERKEKILELAGNSKNKLLGEAVNAVVGLNFSLSKMFGEDRDFQGENKMSFTDSSFEEKLAKARMALDDDEADFLETLKKVQSVASLHNILHGKEFISEAKTEAYETHRRDLSELKKYVRENCPEKYALVFRRQVKKGKKNTSGADENEKDDKKVNNYAAYIGMDKGKGFAKCKKEEFYAFLKKEIGIKDESILAKIDEGVFLPKQISAENCDIPYQVHLAELKAILANAENYFPFLKQKDENCEMTVSEKIISLMKFRVPYYVGPFTDKETRFSWMIKKEGLSTQKITPWNFDDVVDRDASEQKFIERMTNFCTYLTGEKVLPASSFLYSEYAFLNELNNLKVNGTKDLRVKNILFDFAKTNKKLTLKKCCEQLVKNGLLPEGSKARDVFSGTDGDFKNSLSSYIDFKRIIGDKADLYRDMCEEIILWITIISDKERLVKIIKDKYGTVLSDEEIKGLKALNYTKWGRLSAKLLDGIFETDSEGEVGNVSIIEKMRTDTENFMELLSNKHNYKRAIELANSESIVDEKVTYRAVEELYCSPAVKRSIWSALKIVREIVKVQGHSPKKIFVETTREKPDGARKGQRTESRKQRLLDKYRENLRNEKELIKKIEGTEDSKFNSDKLFFYFTQMGLDAYTGEKIEFDDVFKTEKYDIDHIYPRSKIKDDSLDNRVLTGKKINQGVKQDIYPLPAEIRNRMEGLWRQLKDKKLISEEKFYRLTRSTPLTEKECGDFINAQLVATSQSAKAAIQLLKRMLPESEIVYSKAGNVNEFKKRLEFVKIRELNDLHHAKDAYFNIVVGNVFNTKFNHNAAVFLRNNGTGNYDFERLYDFDITNAWKKGDENRISSVAEKNTCRVVRFSKTEKGQFYDATIYPAGKNDKLAPVKGKAPLNDTSKYGGYDKETTAYFMLVKSRDKKKKDKTLLSLECVTVLADKNFRTAEDKLKYCEKELGLKEPEILIEKIKLNTLFKINGSYAWIRGRTNDRLVLCNANQLWLDNGSAKELKKISNHFRDVKKYNNKDLPVREEEFSKEQNLALYDLFTEKLGGKIYAGLPVQGQIKNLEKGRDKFEALELKDQLFVLMEILKFMRCNSMTSNIKLIGGAENAGKNRISKLIQDSDVKMISCSPTGYFCKVVDFKRFL

SEQ ID NO: 20013 - protein, 1354 aa, unidentified
  REGION 1..1354: note = Cas Enzyme sequence
MKQDYYIGLDMGTESVGWAVTDVDYNLIKKRGQDYWGVYLFDEAQTAQGRRAFRTNRRRLARVRHRLNLLQELFDSEISAKDFGFFYRLENSKYFDEDKPEIARGKFLLFNDKDFGDKEYYKNYPTIFHLRNALRTQEIKDVRLLYLAVHHILKNRGHFLFGEQDFNVNDASDVSGEFEKINRFLRENDGAELDREKIPEIFETLCNVDLAKRERKEKILKLSGNSKNKLLGEALNAVVGLEFSLSKMFGEDRDFQGENKMSFTDSSFEEKLAKARMALDDDEADFLETLKKVQSVASLHNILHGKEFISEAKTEAYETHRRDLSELKKYVRENCPEKYALVFRRQVKKGKKNTSGADENEKDDKKVNNYAAYIGMDKGKGFAKCKKEEFYAFLKKEIGIKDESILAKIDEGVFLPKQISAENCDIPYQVHLAELKAILANAENYFPFLKQKDENCEMTVSEKIISLMKFRVPYYVGPFTDKETGFSWMIKKEGLSTQKITPWNFDDVVDKDASEQKFIERMTNFCTYLTGEKVLPASSFLYSEYAFLNELNNLKVNGTKDLRVKNILFDFAKTKKKLTLKKCCEQLVKNGLLPEGSKAQDVFSGTDGDFKNSLSSYIDFKRIIGDKADLYRDMCEEIILWITVISDKKRLEKLIKSNYGTVLSDEEIKGLKALNYTKWGRLSKKLLDGIFETDSEGEVGNVSIIEKMRTDTENFMELLSNRHNYKRAIDLANSESVEDKNVTYRAVEELYCSPAVKRSIWSALKIVSEIKKVQGYSPKKIFVETTREKPDGTRKGKRTVSRKQRLLDVYRKNLRNEKELIKKIEETEDSKFNSDEDKLFFYFTQMGKDAYTGEKIELDDLSKTEIYDIDHIYPRSKIKDDSLDNRVLTRKKINQGVKQDIYPLPAEIRNKMEGLWRQLKDKKLISEEKFYRLTRSTPLTEKECGDFINAQLVATSQSAKAAIQLLKRMLPESEIVYSKAGNVNEFKNRLKFVKIRELNDLHHAKDAYFNIVVGNVFNTKFNHNAAVFLRNNGTGNYDLKRLYDFDITNAWKAGDENRIRSVAEKNTCRVVRFSKTEKGQFYDATIYPAGKNDKLAPVKGKAPLNDTSKYGGYDKETTAYFMLVKSRDKKKKDKTLLSLECVTVLADKNFRTAEDKLKYCEKELGLKEPEILIEKIKLNTLFKINGSYAWIRGRTNDRLVLCNANQLWLDNGSAKELKKISNHFRDVKKYNNKDLPVREEEFSKEQNLALYDLFTEKLGGKIYAGLPVQGQIKNLEKGRDKFEALELKDQLFVLMEILKFMRCNNMTSNLTLIDGKSRAGANYISKYIQDSDVKMISCSPTGYFCKVVDFKRFL

SEQ ID NO: 20014 - protein, 1354 aa, unidentified
  REGION 1..1354: note = Cas Enzyme sequence
MKQDYYIGLDMGTESVGWAVTDVDYNLVKKRGQDYWGVYLFDEAKTAQGRRAFRTNRRRLARVRHRLNLLQELFDSEISAKDFGFFYRLENSKYFDEDKPEIARGKFLLFNDEDFGDKEYYKNYPTIFHLRNALRTQEIKDVRLLYLAVHHILKNRGHFLFGEQDFNVNDASDVSGEFEKINRFLSENDGAGFYREKIPEIFETLCNENLAKRERKEKILELAGNSKNKLLGEAVNAVVGLNFSLSKMFGEDRDFQGENKMSFTDSSFEEKLAKARMALDDDEADFLETLKKVQSVASLHNILHGKEFISEAKTEAYETHRRDLSELKKYVRENCPEKYALVFRRQVKKGKKNTSGADENEKDDKKVNNYAAYIGMDKGKGFAKCKKEEFYAFLKKEIGIKDESILAKIDEGVFLPKQISAENCDIPYQVHLAELKAILANAENYFPFLKQKDENCEMTVSEKIISLMKFRVPYYVGPFTDKETGFSWMIKKEGLSTQKITPWNFDDVVDKDASEQKFIERMTNFCTYLTGEKVLPASSFLYSEYAFLNELNNLKVNGTKDLRVKNILFDFAKTKKKLTLKKCCEQLVKNGLLPEGSKAQDVFSGTDGDFKNSLSSYIDFKRIIGDKADLYRDMCEEIILWITVISDKKRLEKLIKSNYGTVLSDEEIKGLKALNYTKWGRLSKKLLDGIFETDSEGEVGNVSIIEKMRTDTENFMELLSNRHNYKRAIDLANSESVEDKNVTYRAVEELYCSPAVKRSIWSALKIVSEIKKVQGYSPKKIFVETTREKPDGTRKGKRTVSRKQRLLDVYRKNLRNEKELIKKIEETEDSKFNSDEDKLFFYFTQMGKDAYTGEKIELDDLSKTEIYDIDHIYPRSKIKDDSLDNRVLTRKKINQGVKQDIYPLPAEIRNKMEGLWRQLKDKKLISEEKFYRLTRSTPLTEKECGDFINAQLVATSQSAKAAIQLLKRMLPESEIVYSKAGNVNEFKNRLKFVKIRELNDLHHAKDAYFNIVVGNVFNTKFNHNAAVFLRNNGTGNYDLKRLYDFDITNAWKAGDENRIRSVAEKNTCRVVRFSKTEKGQFYDATIYPAGKNDKLAPVKGKAPLNDTSKYGGYDKETTAYFMLVKSRDKKKKDKTLLSLECVTVLADKNFRTAEDKLKYCEKELGLKEPEILIEKIKLNTLFKINGSYAWIRGRTNDRLVLCNANQLWLDNGSAKELKKISNHFRDVKKYNNKDLPVREEEFSKEQNLALYDLFTEKLGGKIYAGLPVQGQIKNLEKGRDKFEALELKDQLFVLMEILKFMQCNSMTSNIKLIGGAENAGKNRISKLIQDSDVKMISCSPTGYFCKVVDFKRFL

SEQ ID NO: 20015 - protein, 1353 aa, unidentified
  REGION 1..1353: note = Cas Enzyme sequence
MKQDYYIGLDVGTESVGWAVTDVDYNLVKKRGQDYWGVYLFDEAKTAQGRRAFRTNRRRLARVRHRLNLLQELFDSEISAKDFGFFYRLENSKYFDEDKPEIARGKFLLFNDKDFGDKEYYKNYPTIFHLRNALRTQEIKDVRLLYLAVHHILKNRGHFLFGEQDFNVNDASDVSGEFEKINRFLSENDGAGFDREKIPEIFETLCNENLAKRERKEKILELAGNSKNKLLGEAVNAVVGLNFSLSKMFGEDRDFQGENKMSFTDSSFEEKLAKARMALDDDEADFLETLKKVQSVASLHNILHGKEFISEAKTEAYETHRRDLSELKKYVRENCPEKYALVFRRQVKKGKKNTSGADENEKDDKKVNNYAAYIGMDKGKGFEKCKKEDFYAFLKKEIGINDESLLAKIDEGIFLPKQISAENCDIPYQVHLAELKAILANAENYFPFLKQKDENCEMTVSEKIISLMKFRVPYYVGPFTDKETRFSWMIKKEGVISTQKITPWNFDDVVDRDASEKKFIERMTNFCTYLTGEKVLPASSFLYSEYAFLNELNNLKVNGTKDLRVKNILFDFAKTNKKLTLKKCCEQLVKNGLLPEGSKARDVFSGTDGDFKNSLSSYIDFKKIIRDKADLYRDMCEEIILWITLISDKKRLENLIKSKYGTVLSDEEIKGLKALNYTKWGRLSEKLLDGIFETDSEGEVGNVSIIEKMRTDTENFMELLSNKHNYKRAIELANSESIVDEKVTYRAVDELYCSPAVKRSIWSALKIVREIVKVQGHSPKKIFVETTREKPDGARKGQRTVSRKQKLLDKYRENLRNETELIKKIEETEDSKFNSDKLFFYFTQMGKDAYTGEKIEFDDVFKTEKYDIDHIYPRSKIKDDSLDNRVLVRRKINQSVKKDSYPLPAEIRSSMEGLWSQLRDKKLISDEKFYRLTRSTPLTEEECGNFIKAQLVATSQSAKAAIQLLKRMLPESEIVYSKAGNVNEFKKRLEFVKIRELNDLHHAKDAYFNIVVGNVFNTKFNHNPAVFQRSNGTGNYDFERLYDFDITNAWKKGDENRIRSVAEKNTCRVVRFSKTEKGQFYDATIYPAGKNDKLAPVKGKAPLNDTSKYGGYDKETTAYFMLVKSRDKKKKDKTLLSLECVTVLADKNFRTAEDKLKYCEKELGLKEPEILIEKIKLNTLFKINGSYAWIRGRTNDRLVLCNANQLWLDNGSAKELKKISNHFRDVKKYNNKDLPVREEEFSKEQNLALYDLFTEKLGGKIYAGLPVQGQIKNLEKGRDKFEALELKDQLFVLMEILKFMQCNSMTSNIKLIGGAENAGKNRISKLIQDSDVKMIFCSPTGYFCKVVDFKRFL

SEQ ID NO: 20016 - protein, 1347 aa, unidentified
  REGION 1..1347: note = Cas Enzyme sequence
MKQDYYIGLDMGTESVGWAVTDVDYNLVKKRGQDYWGVYLFDEAKTAQGRRAFRTNRRRLARVRHRLNLLQELFDSEISAKDFGFFYRLENSKYFDEDKPEIARGKFLLFNDEDFGDKEYYKNYPTIFHLRNALRTQEIKDVRLLYLAVHHILKNRGHFLFGEQDFNVNDASDVSGEFEKINRFLSENDGAGFYREKIPEIFETLCNENLAKRERKEKILELAGNSKNKLLGEAVNAVVGLNFSLSKMFGEDRDFQGENKMSFTDSSFEEKLAKARMALDDDEADFLETLKKVQSVASLHNILHGKEFISEAKTEAYETHRRDLSELKKYVRENCPEKYALVFRRQVKKGKKNTSGADENEKDDKKVNNYAAYIGMDKGKGFAKCKKEEFYAFLKKEIGIKDESILAKIDEGVFLPKQISAENCDIPYQVHLAELKAILANAENYFPFLKQKDENCEMTVSEKIISLMKFRVPYYVGPFTDKETGFSWMIKKEGLSTQKITPWNFDDVVDKDASEQKFIERMTNFCTYLTGEKVLPASSFLYSEYAFLNELNNLKVNGTKDLRVKNILFDFAKTKKKLTLKKCCEQLVKNGLLPEGSKAQDVFSGTDGDFKNSLSSYIDFKRIIGDKADLYRDMCEEIILWITVISDKKRLEKLIKSNYGTVLSDEEIKGLKALNYTKWGRLSKKLLDGIFETDSEGEVGNVSIIEKMRTDTENFMELLSNRHNYKRAIDLANSESVEDKKVTYRAVEELYCSPAVKRSIWSALKIVSEIKKVQGYSPKKIFVETTREKPDGARKGQRTVSRKQQLLDKYRENLRNETELIKKIEETEDSKFNSDKLFFYFTQMGKDAYTGEKIEFDDVFKTEKYDIDHIYPRSKIKDDSLDNRVLVRRKINQGVKQDIYPLSAEIRNRMEGLWRQLRDKKLISDEKFYRLTRSTPLTEKECGDFINAQLIATSQSAKAAIQLLKRMLPESEIVYSKAGNVNEFKKRLEFVKIRELNDLHHAKDAYFNIVVGNVFNTKFNHNPAVFQRSNGTGNYDFERLYDFDITNAWKKGDENRIRSVAEKNTCRVVRFSKTEKGQFYDATIYPAGKNDKLAPVKGKAPLNDTSKYGGYDKETTAYFMLVKSRDKKKKDKTLLSLECVTVLADKNFRTAEDKLKYCEKELGLKEPEILIEKIKLNTLFKINGSYAWIRGRTNDRLVLCNANQLWLDNGSAKELKKISNHLKYNKDLPVREEEFSKEQNLALYDLFTEKLGGKIYAGLPVQEQIKNLEKGRDKFEALELKDQLFVLMEILKFMQCNNMTSNLTLIDGKSRAGANYISKYIQDSDVKMISCSPTGYFCKVVDFKRFL

SEQ ID NO: 20017 - protein, 1354 aa, unidentified
  REGION 1..1354: note = Cas Enzyme sequence
MKQDYYIGLDMGTESVGWAVTDVDYNLVKKRGQDYWGVYLFDEAKTAQGRRAFRTNRRRLARVRHRLNLLQELFDSEISAKDFGFFYRLENSKYFDEDKPEIARGKFLLFNDEDFGDKEYYKNYPTIFHLRNALRTQEIKDVRLLYLAVHHILKNRGHFLFGEQDFNVNDASDVSGEFEKINRFLSENDGAGFYREKIPEIFETLCNENLAKRERKEKILKLSGNSKNKLLGEALNAVVGLEFSLSKMFGEDRDFQGENKMSFTDSSFEEKLAKARMALDDDEADFLETLKKVQSVASLHNILHGKEFISEAKTEAYETHRRDLSELKKYVRENCPEKYALVFRRQVKKGKKNTSGADENEKDDKKVNNYAAYIGMDKGKGFAKCKKEEFYAFLKKEIGIKDESILAKIDEGVFLPKQISAENCDIPYQVHLAELKAILANAENYFPFLKQKDENCEMTVSEKIISLMKFRVPYYVGPFTDKETGFSWMIKKEGLSTQKITPWNFDDVVDKDASEQKFIERMTNFCTYLTGEKVLPASSFLYSEYAFLNELNNLKVNGTKDLRVKNILFDFAKTKKKLTLKKCCEQLVKNGLLPEGSKAQDVFSGTDGDFKNSLSSYIDFKRIIGDKADLYRDMCEEIILWITVISDKKRLEKLIKSNYGTVLSDEEIKGLKALNYTKWGRLSKKLLDGIFETDSEGEVGNVSIIEKMRTDTENFMELLSNRHNYKRAIDLANSESVEDKNVTYRAVEELYCSPAVKRSIWSALKIVSEIKKVQGYSPKKIFVETTREKPDGTRKGKRTVSRKQRLLDVYRKNLRNEKELIKKIEETEDSKFNSDEDKLFFYFTQMGKDAYTGEKIELDDLSKTEIYDIDHNYPRSKIKDDSLDNRVLVRRKINQGVKQDIYPLPAEIRNKMEGLWRQLKDKKLISEEKFYRLTRSTPLTEKECGDFINAQLVATSQSAKAAIQLLKRMLPESEIVYSKAGNVNEFKNRLKFVKIRELNDLHHAKDAYFNIVVGNVFNTKFNHNAAVFLRNNGTGNYDLKRLYDFDITNAWKKGDENRIRSVAEKNTCRVVRFSKTEKGQFYDATIYPAGKNDKLAPVKGKAPLNDTSKYGGYDKETTAYFMLVKSRDKKKKDKTLLSLECVTVLADKNFRTAEDKLKYCEKELGLKEPEILIEKIKLNTLFKINGSYAWIRGKTNDRLVLCNANQLWLDNGSAKELKKISNHFRDVKKYNNKDLPVREEEFSKEQNLALYDLFTEKLGGKIYAGLPVQGQIKNLEKGRDKFEALELKDQLFVLIEILKFMQCNNMTSNLTLIDGKSRAGANYISKYIQDSDVKMISCSPTGYFCKVVDFKRFL

SEQ ID NO: 20018 - protein, 1327 aa, unidentified
  REGION 1..1327: note = Cas Enzyme sequence
MDKDYYIGLDMGTDSVGWAVTDTDYNLLKARGRDMWGSYLFDPAETAAARRGFRTARRRTARTRQRLNLLQDLFAAEIEKIDPTFFIRLNNSSLFMEDKDERLDTANILFADNGYTDKDYFKAFPTIYHLRAYLLDGKVSDIRFLYLAVHHIIKNRGHFLFEGQNFDVGDTETVKTAFEKVNQIFSENDVPGELVLCDIDKALDVLKDKRIGKKDKVRQLKELLHVGKDKTLSAAINAITGCTASLKDLYNTEEDLGDANKFCFADGAFDENKLPAIEAAVGFDEAELVRQLKTIYDWSVLCEILGDEKYISKAKIQIYKRHAEDLLELKTYIRENCPEKYALTFRHNKENNYAAYIGMDKRKGYKKCNREEFYAFLKKTVGVSGDILEKIEAGEFMPKQVSNANGVIPYQVHLLELHQILLNAARYFPFLSERSDGFSVSEKIEMLMTFRIPYYVGPLNTDSGFAWVKKYAGQERVSVTPWNFDKVVDRDASEQGFIRRMTNKCTYLKGEDVLPESSFLYSEFVFLNELNNLKINGIKDPQAKALIYEYAKTHKKITLKKCHELLVNNGILRPDSKKDEVFSGLDGDFKKSLGSYVDFRNIIGDKADTHSEMCEEIILWITLTSDKNRLVKKIKQKYGNILTDEEIKRIKGLNYTKWGRLSKKLLTGIYGYADSDGAVLSIIESMRLTNENFMSLMSAGYGFRSAIDEYNAAAAPSGNVTYGTVQELYCSPSVKRAIWRSIELVREIIKIFGRAPKKIFIEMAREVNDDTRKGRRTVSRKQQLIDLYKNLREESRDWIAEIENTPDMKFNRDRLVLYYRQLGRSMYSGNSIRLEDVFNKNVCDIDHIYPQSKIKDDSLDNKVLVFKTENAAKTDVYPISADIRNRMRGFWTELKNKGLISERKYERLTRSVPLTTDELSDFISRQLVETRQSTKAAAQLLKQMLPDTEIVYAKAGNANDFKDENEIIKVRELNNLHHAKDAYINIVVGNVYNTKFGHDASVYFRSHNTDSYNIKYLYTKDIPGAWRVADKYRIIKTVKKNTCRVVRFTSNGHGQLFNATIKTAGANDNLIPLKANGAISDTSKYGGYDSATTAYFMLVRSKGKKDKTLLSLEAVPIYADLQFAGDIDRKIAYCVEKLGLCSPEILIDNIKLNTLFCLDGSYAYIRGKTNKQIKLCNANELILDEQNTAYLKNISNYFRDKKKLNRSELPVGDKINGEDNLKLYDALIAKLSSKVYSGLNISGQAPMLSEKRDKFIELTLENQCKVLWEVLKLMQCNSTSSDFLLIGGSANTGIVVNNKNIQDQTVKMIYQSPTGYYRRVIDFSEFL

SEQ ID NO: 20019 - protein, 1350 aa, unidentified
  REGION 1..1350: note = Cas Enzyme sequence
MKSRREQDYYLGLDIGTESVGYAVTDENYNILKFNGKNMWGSRLFDEAQTAAERRTFRSGRRRLQRRAWRIQLLQELFSEEISKVDQSFFVKMKESPLILTDKTNGQKYTLFNDDDYSDIDYYSEFPTIYHLRKALLMEDRKFDVRLLYLAVHHIVKHRGHFLFQGSVNNATSFHSVFDNLKICLRDEFEIELECHSEEKIAEILKDKKKSKRDKYNEIFNELDADKSNKQIKSIVTLISGMKAKVADIFADESLLEIDKPSISFSESSYETLRVELEDVLGERCGVIDIIKCVYDWAILADILADGEINGKSYLSVAKVNLYDKHKEDLRILKQLFKENNKVYKEFFVDEGKSNYCAYVGFVNSNGSKKNIKRCNREDFIKNLKNQLGKIEKTVSNQSEYEFIEQEIQADTILPVQISKDNGVIPYQVQEMELKDILAKAEKYMPFLSEKDANGLSVSDKIVEIFKFRVPYYVGPLNGYNNTNSWMVRKSDGKITPWNFDNKVDKDASAEKFIRKMTNKCTYLVGEDVLPKHALLYEEFNVLNELNNIKIGANKMNVELKKDIIENLFKKKKKVTGKNLREYLKCEGLINDDEEITGFDINFKSSMSSYLDFKKILGDKIDNYSVKMMVEQIILWITVYGDEISILKRVIRKQYDDNQISDEEIKKVSRLKYQGWGRLSRKFLDAIEGADKETGEIRTIIGALRDTQDNLMQLLGQKYTFLETIENINNKNMKEISTISYKDIVEDIAASPSIKRAVWQVILISEEIRKIMGKEPAKIFVEVARGTGEKKRTVSRKDRLISLYESCKDESKDWKQELEQRPEDDFQSIKLYLYYTQMGRCMYSGESIDLSRLSDANVYDRDHIYPQSKTKDDSLDNLVLVKRELNAKKSNGMISSDIQNKMHVFWKELLNKGFISQEKYYRLMRKDSLTDEELASFINRQLVEARQSSKIVIGLFNRMYPNSKVAYVKANLVSDFKNMDNVKITKVRSLNDYHHAKDAYLNIVVGNVYYEKFTNNPLQWLKKNRNAEYSLNQMFNYDLIKNDKVIWKRGNDGTLKVVLKNINKRDIQYTQQVITNKGGLFNQQLVSKDENASMPVKKGRDVNIYGGYKSITPAFFTLIESEDKKGNKQRSIESVPLFMKNQFLNDSNSCMEYFENVYGLKNPKVVISQIRKNAYLIIDDFPVLLRGSTGKQLKLQCAVQLIVSQEQERYLKKLEKYIQKNSQRKDKKQNLPITEYDALTKESNIRIYDMFIDKLTNTIYSKRPANPVDKLKTKKELFEQLSVEIQCVVLNEILHLFQCKPIVADLSIIKEASSTGSIQKNKIISSSNNVIMVNQSVTGLFRQEIDLLKI

SEQ ID NO: 20020 - protein, 968 aa, unidentified
  REGION 1..968: note = Cas Enzyme sequence
LGKIEKTVSNQSEYEFIEQEIQADTILPIQVSKDNGVIPYQVQEIELKDILAKAEKYMPFLSVKDADGLSVSDKIIKIFEFRVPYYVGPLNSYNNTNSWMVRKSDGKITPWNFDNKVDKDASAEKFIRKMTNKCTYLIGEDVLPKHALLYEEFNVLNELNNVKIGANKMNVELKKDIIENLFKKKKKVTGRNLREYLKSEGLINDDEEITGFDINFKSSMSSYLDFKKILGDKIDNYSVKIMVEQIILWITVYGDEISILKRVIRKQYDDNQISDEEIKKVSRLKYQGWGRLSRKFLGEIEGADKETGEIRTVIGALRDTQDNLMQLLGQKYTFSETIENINNKNMKEIATISYKDIVEDIAASPSIKRAVWQVILISEEIRKIMGKEPAKIFVEVARGAGEKKRTVSRKDRLISLYESCKDESKDWKKELEQRPEDDFHSIKLYLYYTQMGRCMYSGEPIDLSRLSDANVYDRDHIYPQSKTKDDSLDNLVLVKRELNAKKSNGMISSEIQKDRHGFWKELLNKGFISQEKYYRLMRKDSLTDEELASFINRQLVEARQSSKIVIGLFNRMYPDSKVAYVKANLVSDFKNMDNVKITKVRSLNDYHHAKDAYLNIVVGNVYFEKFTNNPLQWLKKNRNAEYSLNQMFNYDLIKNDKVIWKRGNNGTLRDVLKNINKRDIQYTQQVTTIKRGQNGGLFNQQLVGKDENASMPVKKGRDVNIYGGYKSITPAFFTLIESEDKKGNKQRSIESVPLFMKNQFLNDSNSCMEYFENVYGLKNPKVVISQIRKNTYLIIDDFPVLLRGSTGKQLILQCAVQLMVSQEQERYLKKLEKYIQKNSQRKDKKQNLPVTEYDGLTQESNIRIYDTFIDKLTNTIYSKRPANPVDKLKNKREIFEQLSVECQCIVLNEILHLFQCKPIMGADLSMLGEAKATGIITKNKIISTCNNVIIVNQSVTGLFKQETDLLNI

SEQ ID NO: 20021 - protein, 1350 aa, unidentified
  REGION 1..1350: note = Cas Enzyme sequence
MESRREQDYYLGLDIGTESVGYAVTDENYNILKFNGKNMWGSRLFDEAQTAAERRTFRSGRRRLQRRAWRIQLLQELFSEEISKVDQSFFVKMKESPLILTDKTNGQKYTLFNDDDYSDIDYYSEFPTIYHLRKALLMEDRKFDVRLLYLAVHHIVKHRGHFLFQGSVNNATSFHSVFDNLKICLRDEFEIELVCHSEEKIAEILKDKKKSKRDKCNEIFNELNVDKSNKQIKSIVTLITGMKAKVADIFADESLLEIDKPSISFSESSYETLRVELEDVLGERCGVIDIIKCVYDWAILADILDDGEINGKSYLSVAKVNLYDKHKEDLRILKQLFKENHKVYKEFFVDEGKSNYCAYVGFVNSNGNKKNIKRCNREDFIKNLKGQLGKIEKTVSNQSEYEFIEQEIQADAILPIQVSKDNGVIPYQVQEIELKDILAKAEKYMPFLSVKDADGLSVSDKIVKIFEFRVPYYVGPLNSYNNTNSWMVRKSDGKITPWNFDNKVDKDASAEKFIRKMTNKCTYLIGEDVLPKHALLYEEFNVLNELNNVKIGANKMNVELKKDIIENLFKKKKKVTGRNLREYLKSEGLINDDEEITGFDINFKSSMSSYLDFKKILGDKIDNYSVKMMVEQIILWITVYGDEISILKRVIRKQYDDNQISDEEIKKVSRLKYQGWGRLSRKFLDAIEGADKETGEIRTIIGALRDTQDNLMQLLGQKYTFLETIENINNKNMKEISTISYKDIVEDIAASPSIKRAVWQVILISEEIRKIMGKEPAKIFVEVARGTGEKKRTVSRKDRLISLYESCKDESKDWKKELEQRPEDDFQSIKLYLYYTQMGRCMYSGEPIDLSRLSDANVYDRDHIYPQSKTKDDSFDNLVLVKRELNAKKSNGMISTDIQNKMHGFWKELLNKGFISQEKYYRLMRKDTLTDEELASFINRQLVEARQSSKIVIGLFNRMYPNSKVAYVKANLVSDFKNMDNVKITKVRSLNDYHHAKDAYLNIVVGNVYYEKFTNNPLQWLKKNRNAEYSLNQMFNYDLIKNDKVIWKRGNDGTLKVVLKNINKRDIQYTQQVITNKGGLFNQQLVSKDENASMPVKKGRDVNIYGGYKSITPAFFTLIESEDKKGNKQRSIESVPLFMKNQFLNDSNSCMEYFENVYGLKNPKVVISQIRKNAYLIIDDFPVLLRGSTGKQLKLQCAVQLIVSQEQERYLKKLEKYIQKNSQRKDKKQNLPITEYDALTKESNIRIYDMFIDKLTNTIYSKRPANPVDKLKTKKELFEQLSVEIQCVVLNEILHLFQCKPIVADLSIIKEASSTGSIQKNKIISSSNNVIMVNQSVTGLFRQEIDLLKI

SEQ ID NO: 20022 - protein, 1355 aa, unidentified
  REGION 1..1355: note = Cas Enzyme sequence
MKSRREQDYYLGLDIGTESVGYAVTDENYNILKFNGKNMWGSRLFDEAQTAAERRTFRSGRRRLQRRAWRIQLLQELFSEEISKVDQSFFVKMKESPLILTDKTNGQKYTLFNDDDYSDIDYYSEFPTIYHLRKALLMEDRKFDVRLLYLAVHHIVKHRGHFLFQGSVNNATSFHSVFDNLKICLRDEFEIELVCHSEEKIAEILKDKKKSKRDKCNEIFNELNVDKSNKQIKSIVTLISGMKAKVADIFDDESLLEIDKPSISFSESSYETLRVELEDVLGERCGVIDIIKCVYDWAILADILDDGEINGKSYLSVAKVNLYDKHKEDLRILKQLFKENHKVYKEFFVDEGKSNYCAYVGFVNSNGNKKNIKRCNREDFIKNLKGQLGKIEKTVSNQSEYEFIEQEIQADTILPIQVSKDNGVIPYQVQEIELKDILAKAEKYMPFLSVKDADGLSVSDKIVKIFEFRVPYYVGPLNSYNNTNSWMVRKSDGKITPWNFDNKVDKDASAEKFIRKMTNKCTYLIGEDVLPKHALLYEEFNVLNELNNVKIGANKMNVELKKDIIENLFKKKKKVTGRNLREYLKSEGLINDDEEITGFDINFKSSMSSYLDFKKILGDKIDNYSVKIMVEQIILWITVYGDEISILKRVIRKQYDDNQISDEEIKKVSRLKYQGWGRLSRKFLGEIEGADKETGEIRTVIGALRDTQDNLMQLLGQKYTFSETIENINNKNMKEIATISYKDIVEDIAASPSIKRAVWQVILISEEIRKIMGKEPAKIFVEVARGAGEKKRTVSRKDRLISLYESCKDESKDWKKELEQRPEDDFHSIKLYLYYTQMGRCMYSGEPIDLSRLSDANVYDRDHIYPQSKTKDDSLDNLVLVKRELNAKKSNGMISSEIQKDRHGFWKELLNKGFISQEKYYRLMRKDSLTDEELASFINRQLVEARQSSKIVIGLFNRMYPDSKVAYVKANLVSDFKNMDNVKITKVRSLNDYHHAKDAYLNIVVGNVYFEKFTNNPLQWLKKNRNAEYSLNQMFNYDLIKNDKVIWKRGNNGTLRDVLKNINKRDIQYTQQVTTIKRGQNGGLFNQQLVGKDENASMPVKKGRDVNIYGGYKSITPAFFTLIESEDKKGNKQRSIESVPLFMKNQFLNDSNSCMEYFENVYGLKNPKVVISQIRKNTYLIIDDFPVLLRGSTGKQLILQCAAQLMVSQEQERYLKKLEKYIQKNSQRKDKKQNVPVTEYDGLTQESNIRIYDTFIDKLTNTIYSKRPANPVDKLKNKREIFEQLSVECQCIVLNEILHLFQCKPIMGADLSMLGEAKATGIITKNKIISTCNNVIIVNQSVTGLFKQETDLLNI

SEQ ID NO: 20023 - protein, 1355 aa, unidentified
  REGION 1..1355: note = Cas Enzyme sequence
MKSRREQDYYLGLDIGTESVGYAVTDENYNILKFNGKNMWGSRLFDEAQTAAERRTFRSGRRRLQRRAWRIQLLQELFSEEISKVDQSFFVKMKESPLILTDKTNGQKYTLFNDDDYSDIDYYSEFPTIYHLRKALLMEDRKFDVRLLYLAVHHIVKHRGHFLFQGSVNNATSFHSVFDNLKICLRDEFEIELVCHSEEKIAEILKDKKKSKRDKCNEIFNELNVDKSNKQIKSIVTLITGMKAKVADIFDDESLLEIDKPSISFSESSYETLRVELEDVLGERCGVIDIIKCVYDWAILADILDDGEINGKSYLSVAKVNLYDKHKEDLRILKQLFKENHKVYKEFFVDEGKSNYCAYVGFVNSNGNKKNIKRCNREDFIKNLKGQLGKIEKTVSNQSEYEFIEQEIQADTILPIQVSKDNGVIPYQVQEIELKDILAKAEKYMPFLGVKDADGLSVSDKIIKIFEFRVPYYVGPLNSYNNTNSWMVRKSDGKITPWNFDNKVDKDASAEKFIRKMTNKCTYLIGEDVLPKHALLYEEFNVLNELNNVKIGANKMNVELKKDIIENLFKKKKKVTGRNLREYLKSEGLINDDEEITGFDINFKSSMSSYLDFKKILGDKIDNYSVKIMVEQIILWITVYGDEISILKRVIRKQYDDNQISDEEIKKVSRLKYQGWGRLSRKFLGEIEGADKETGEIRTVIGALRDTQDNLMQLLGQKYTFSETIENINNKNMKEIATISYKDIVEDIAASPSIKRAVWQVILISEEIRKIMGKEPAKIFVEVARGAGEKKRTVSRKDRLISLYESCKDESKDWKKELEQRPEDDFHSIKLYLYYTQMGRCMYSGEPIDLSRLSDANVYDRDHIYPQSKTKDDSLDNLVLVKRELNAKKSNGMISSEIQKDRHGFWKELLNKGFISQEKYYRLMRKDSLTDEELASFINRQLVEARQSSKIVIGLFNRMYPDSKVAYVKANLVSDFKNMDNVKITKVRSLNDYHHAKDAYLNIVVGNVYFEKFTNNPLQWLKKNRNAEYSLNQMFNYDLIKNDKVIWKRGNNGTLRDVLKNINKRDIQYTQQVTTIKRGQNGGLFNQQLVGKDENASMPVKKGRDVNIYGGYKSITPAFFTLIESEDKKGNKQRSIESVPLFMKNQFLNDSNSCMEYFENVYGLKNPKVVISQIRKNTYLIIDDFPVLLRGSTGKQLILQCAVQLMVSQEQERYLKKLEKYIQKNSQRKDKKQNLPVTEYDGLTQESNIRIYDTFIDKLTNTIYSKRPANPVDKLKNKREIFEQLSVECQCIVLNEILHLFQCKPIMGADLSMLGEAKATGIIKKNKIISTCNNVIIVNQSVTGLFKQETDLLNI

SEQ ID NO: 20024 - protein, 927 aa, unidentified
  REGION 1..927: note = Cas Enzyme sequence
VQEIELKDILAKAEKYMPFLGVKDADGLSVSDKIIKIFEFRVPYYVGPLNSYNNTNSWMVRKSDGKITPWNFDNKVDKDASAEKFIRKMTNKCTYLIGEDVLPKHALLYEEFNVLNELNNVKIGANKMNVELKKDIIENLFKKKKKVTGRNLREYLKSEGLINDDEEITGFDINFKSSMSSYLDFKKILGDKIDNYSVKIMVEQIILWITVYGDEISILKRVIRKQYDDNQISDEEIKKVSRLKYQGWGRLSRKFLGEIEGADKETGEIRTVIGALRDTQDNLMQLLGQKYTFSETIENINNKNMKEIATISYKDIVEDIAASPSIKRAVWQVILISEEIRKIMGKEPAKIFVEVARGAGEKKRTVSRKDRLISLYESCKDESKDWKKELEQRPEDDFHSIKLYLYYTQMGRCMYSGEPIDLSRLSDANVYDRDHIYPQSKTKDDSLDNLVLVKRELNAKKSNGMISSEIQKDRHGFWKELLNKGFISQEKYYRLMRKDSLTDEELASFINRQLVEARQSSKIVIGLFNRMYPDSKVAYVKANLVSDFKNMDNVKITKVRSLNDYHHAKDAYLNIVVGNVYFEKFTNNPLQWLKKNRNAEYSLNQMFNYDLIKNDKVIWKRGNNGTLRDVLKNINKRDIQYTQQVTTIKRGQNGGLFNQQLVGKDENASMPVKKGRDVNIYGGYKSITPAFFTLIESEDKKGNKQRSIESVPLFMKNQFLNDSNSCMEYFENVYGLKNPKVVISQIRKNTYLIIDDFPVLLRGSTGKQLILQCAVQLMVSQEQERYLKKLEKYIQKNSQRKDKKQNLPVTEYDGLTQESNIRIYDTFIDKLTNTIYSKRPANPVDKLKNKREIFEQLSVECQCIVLNEILHLFQCKPIMGADLSMLGEAKATGIIKKNKIISTCNNVIIVNQSVTGLFKQETDLLNI

SEQ ID NO: 20025 - protein, 1331 aa, unidentified
  REGION 1..1331: note = Cas Enzyme sequence
MKKKYGNYYLGLDIGTNSVGWAVTDEKYNILKSHGKAMWGIRLFEEGKTAEERRLHRSARRRQDRKVQRIKLLQELFAEEIAKADPGFYLRLEESKFWSDDKTVNQRNTLFNDKNYKDRDFYREYPTIYHLRKALIEGKKEFDVRLVYLGIHHILKKRGHFLFEGKTTDAIADFEEIFADLKRYCKEENISSMECEDIEILKNVLKDTSTTITSKKSQLNKLLDAETKQEKALFALLAGATVKLSELYNDDELNSENVTKICFKNGAYDEKQEEVESILGERAELIQKAKIIYDWAILEETRKGERFLSMAKVKSYEEHKKDLYLLKQAIKEYCPEKYKLILSDSSQKNNYAAYVGNSNGEKIKRCIQEDLCKFLEKIFKDYHLDESYNNMIFKIKNRTFLPKQITGDNSVIPYQLNKQELHVILENASKYLTFLNEIDDTGFSVSEKIEKILEFRIPYYVGPLNDQHKDSGNCWIKKKQGMENEKILPWNFEKIVDRSGSAERFIRKMTNKCTYLIGADVLPKNSLLYSRFMLLNELNNIKINKEPIKTEIKNRAIDDLFKKHKKVTIKNFKKWLYTEVGYYEDAEITGIDGDFKASLASYIDFQKILGKMMGDEMVEELILWIVLFGDDKTILKQRIIEKYSDQLTEKEIQQICKLKYSGWGRLSRELLTEIYIPDKETGEKINIISMMQNYSLNMMQLLSRKYGFIDGIQEYNQNQVSEKQEISIDMLDDLYVSPAIKRSVWQTLQIVKEIEKVIGHEPKRIFIEMARGGEINKTRKSSRKNKLLELYENHEEDRDWIEEIGSRDESDYRSDRRYLYYTQMGRCMYSGEKIPLKDLYKKNIYDIDHIYPRSKVKDDSLDNRVLVKRQLNKDKGDDYPISPDIQKERHNLWKTLLMKNFISKKKYERLTRKTEFSDDELADFISRQVVETRQSTKAVANILKRQFEDSEIVYVKAGNVADFRHDKKMIKVREVNDYHHAKDAYLNIVVGNVYFTKFTKDPRNFLNEPSGKNYSMKRIYDFDVIRNGEVAWKRGKTGTIATVRKVMQKNNILFTRYATENKGGFFDQMPVKAGKGQMPLKTTDERLKNIERYGGYNKISGAYFSLIEHEDKKGKRIRTIEYVPVYMAEQFRCDKGVQKEYCTKNLGLKNPKILIPKIKINTLFEVDGFRMHLTGRTGAQLIFQGAMQLVLGEELETYLKKVCKIHKQNPGFKISEWDGITKEQNLLLYDTLLSKLENTKYKVRLSAQIDNLKQAREKFIKLSLEKQSEVLYQELFLFACNVVTADLSLIGGSKYSGKTLISNKMTNYTEAKIIHQSITGLFENEVDLLKL

SEQ ID NO: 20026 - protein, 1292 aa, unidentified
  REGION 1..1292: note = Cas Enzyme sequence
MEKLCGEGKTAEERRLHRAARRRQDRKVQRTKLLQELFAEKIAEIDPEFYLRLEESKFWSDDKTVNQRNTLFNDKNYKDRDFYREYPTIYHLRKALIEGKKEFDVRLVYLGIHHILKKRGHFLFEGETTDAIADFEEIFADLKRYCKEENISSMECEDIEILKNVLKDTSTTITSKKSQLNKLLDAETKQEKALFALLAGATVKLSELYNDDELNSENVTKICFKNGAYDEKQEEVESILGERAELIQKAKIIYDWAILEETRKGERFLSMAKVKSYEEHKKDLYLLKQVIKEYCPEKYKLILSDSSQKNNYAAYVGNSNGEKIKRCTQEDLCKFLEKIFKDYHLDESYNNMIFKIKNRTFLPKQITGDNSVIPYQLNKQELHVILENASKYLTFLNEIDDTGFSVSEKIEKILEFRIPYYVGPLNDQHKDSGNCWIKKKQGMENEKILPWNFEKIVDQSGSAERFIRKMTNKCTYLIGADVLPKNSLLYSRFMLLNELNNIKINKEPIKTEIKNRAIDELFKKHKKVTIKNFKKWLYTEVGCYKDVEVTGIDGDFKASLASYIDFQKIIGKTMDDEMVEELILWIALFGDDKKILKQRIIEKYSDYLTEKEIQRICKLKYSGWGRLSRELLTEIYIPDKETGEKINIITMMQNYSLNMMQLLSRKYGFVDGIEEYNQNQVSEKQEISIDMLDDLYVSPAIKRSVWQTLQIVKEIEKVTGHEPKRIFIEMARGGEVNKTRKSSRKSKLLELYENHEEDRDWIAEIGSRDESDYRSDRRYLYYTQMGRCMYSGEKIPLKDLYDKNIYDIDHIYPRSKVKDDSLDNRVLVKRQLNKDKGDDYPISPDIQKERHNLWKTLLMKNFISKKKYERLTRKTEFSDDELADFISRQVVETRQSTKAVANILKRQFEDSEIVYVKAGNVADFRHDKKMIKVREVNDYHHAKDAYLNIVVGNVYFIKFTKDPRNFLNEPSGKNYSMKRIYDFDVIRNGEVAWKRGKTGTIATVRKVMQKNNILFTRYATENKGGFFDQMPVKAGKGQMPLKTTDERLKNIERYGGYNKISGAYFSLIEHEDKKGKRIRTIEYVPVYMAEQFRCDKGVQKEYCTKNLGLKNPKILIPKIKINTLFEVDGFRMHLTGRTGAQLIFQGAMQLVLGEELETYLKKVCKIHKQNPGFKISEWDGITKEQNLLLYDTLLSKLENTKYKVRLSAQIDNLKQAREKFIKLTLEKQSEVLYQELFLFACNVVTADLSLIGGSKYSGKTLISNKMTNYTEAKIIHQSITGLFENEVDLLKL

SEQ ID NO: 20027 - protein, 937 aa, unidentified
  REGION 1..937: note = Cas Enzyme sequence
  REGION 9..16: note = misc_feature - Xaa can be any naturally occurring amino acid
MQKNTFHFXXXXXXXXDETGLSVSEKIIALFTFTIPYYVGPLGQQHLGKECAHGWVERKEKGTVYPWNFEQKVDLKASAEHFIERMVKHCTYLSDEQALPKQSLLYEKFQVLNELNNLKIRGEKISVELKQQIYQDVFEHTGKKVSMKQLENYLKLNGLLEKDEKDAVTGIDGGFHSYLSSLGKFIGILGEEAHYGKNQNMMEKIIFWGTVYGQDKKFLRERLSEVYGDRLSKEQIRRITGMKFEGWGRLSKEFLLLEGASREEGEIRTLIRSLWETNENLMGLLSERYTYSEEVREKTLECEKSLSEWTIEDLEGMYLSAPVKRMVWQTLLIVKELEKVLGCAPRRIFVEMAREDAEKGRRTESRKQKLQNLYKAIKKEEIDWKKEIDEKTEQAFRSKKLYLYYLQKGRCMYTGESIRFEDLMNDNLYDIDHIYPRHFVKDDSLEQNLVLVKKEKNAHKSDVFPIEVDIQKKMSPFWKELKERGFISEEKYMRLTRRYGFSEEEKAGFINRQLVETRQGTKSITEILGQAFPDVDIIFSKASNVSEFRHIYGLYKVRSINDFHHAHDAYLNIVVGNTYHVKFTKNPLNFIREAEKNPQNAENKYNMNRMFDWTVKRGNETAWIASSDKEAGSIKIVKAILAKNTPLVTKRCAEAHGGITRKATIWNKNKAAGSGYIPVKMNDARLLDVTKYGGLTSVSASGYTLLEYDVKGKKIRSLEAIPIYLGRVSELTNEAILKYFEKVLIEENKGKEIIELRICKKFIPRESLVRYNGYYYYLGGKSVEQIVLKNATQMAYSEEETCYIKKIEKAIEKTYYEEVDKNKNVILTKTRNNAMYDKFIIKYQNSIYQNQSGAMKNSIIGKRNEFLTLSLEKQCRILKALVEYFRTGDIIDLRELGGSSQAGKVAMNKKIMGASELVLISQSPTGLFQQEIDLLKI

SEQ ID NO: 20028 - protein, 1369 aa, unidentified
  REGION 1..1369: note = Cas Enzyme sequence
MKEKMEYYLGLDMGTNSVGWAVTDKEYRLMRAKGKDLWGVRLFERANTAEERRAYRINRRRRQREVARIGILKELFADEIAKVDANFFARLDDSKYYLDDRQENNKQKYAIFADKDYTDKEYFSQYPTIFHLRKELIMSDQPHDVRLIYLALLNMFKHRGHFLNKTLGTSESSESFFDMYQRLAVCADEEGIKLPETVDLKKLEQILGARGCSRKATLEHISEIMGINKKNKPVYSLMQMICGLDTKMIDLFGQKIDEEHKKISLSFRTSNYEEMAEEVRNTIGDDAFELILTAKEMHDFGLLAEIMKGYSYLSEARVAVYEEHRKDLAKLKAVFKQYDHKAYDEMFRIMKNGTYSAYVGSVNSFGKIERRTVKTSREELLKNIKKILIGFPEDDATVQEFLGKIDSDTLLQKQLTASNGVIPNQVHAKEMKVILKNAEKYLPFLSERDETGLSVSEKIIALFTFTIPYYVGPLGQQHLGKECAHGWVERKEKGTVYPWNFEQKVDLKASAEHFIERMVKHCTYLSDEQALPKQSLLYEKFQVLNELNNLKIRGEKISVELKQQIYRDVFEHTGKKVSMKQLENYLKLNGLLEKDEKDAVTGIDGGFHSYLSSLGKFIGILGEEAHYDKNQNMMEKIIFWGTVYGQDKKFLRERLSEVYGDRLSKEQIRRITGMKFEGWGRLSKEFLLLEGAFREEGEIRTLIRSLWETNENLRGLLSERYTYSEEVREKTLECEKSLSEWTIEDLEGMYLSAPVKRMVWQTLLIVKELEKVLGCDPRRIFVEMAREDAEKGRRTESRKQKLQNLYKAIKKEEIDWKREIDEKTEQAFRSKKLYLYYLQKGRCMYTGESIRFEDLMNDNLYDIDHIYPRHFVKDDSLEQNLVLVKKEKNAHKSDVFPIEADIQKKMSPFWKELKERGFISEEKYMRLTRRYGFSEEEKADFINRQLVETRQGTKSITEILGQAFPNVDIIFSKASNVSEFRHIYGLYKVRSINDFHHAHDAYLNIVVGNTYHVKFTKNPLNFIREAEKNPQNAENKYNMNRMFDWTVKRGNETAWIASSDKEAGSIKIVKAILAKNTPLVTKRCAEAHGGITRKATIWNKHKAAGSGYIPVKMNDARLLDVTKYGGLTSVSASGYTLLEYDVKGKKIRSLEAIPIYLGRVSELTNEAILKYFEKVLIEENKGKEITELRICKKFIPRESLVRYNGYYYYLGGKSVEQIVLKNATQMAYSEEETCYIKKIEKAIEKTYYEEVDKNKNVILTKTRNNAMYDKFIIKYQNSIYQNQSGAMKNSIIEKRNEFLTLSLEKQCRILKALVEYFRTGDIIDLRELGGSSQAGKVAMNKKIMGASELVLISQSPTGLFQQEIDLLKI

SEQ ID NO: 20029 - protein, 1369 aa, unidentified
  REGION 1..1369: note = Cas Enzyme sequence
MKEKMEYYLGLDMGTNSVGWAVTDKEYRLMRAKGKDLWGVRLFERANTAEERRAYRINRRRRQREVARIGILKELFADEIAKVDANFFARLDDSKYYLDDRQENNKQKYAIFADKDYTDKEYFSQYQTIFHLRKELIMSDQPHDVRLIYLALLNMFKHRGHFLNKTLGTSESLESFFDMYQRLAVCADGEGIKLPETVDLKKLEQILGARGCSRKATLEHISEIMGINKKNKPVYSLMQMICGLDTKMIDLFGQKIDEEHKKISLSFRTSNYEEMAEEVRNMIGDDAFELILTAKEMHDFGLLAEIMKGYSYLSEARVAVYEEHRKDLAKLKAVFKQYDHKAYDEMFRIMKNGTYSAYVGSVNSFGKIERRTVKTSREELLKNIKKILTGFPEDDATVQEFLGKIDSDTLLQKQLTASNGVIPNQVHAKEMKVILKNAEKYLPFLSERDETGLSVSEKIIALFTFTIPYYVGPLGQQHLGKECAHGWVERKEKGTVYPWNFEQKVDLKASAEHFIERMVKHCTYLSDEQALPKQSLLYEKFQVLNELNNLKIRGEKISVELKQQIYQDVFEHTGKKVSMKQLENYLKLNGLLEKDEKDAVTGIDGGFHSYLSSLGKFIGILGEEAHYGKNQNMMEKIIFWGTVYGQDKKFLRERLSEVYGDRLSKEQIRRITGMKFEGWGRLSKEFLLLEGASREEGEIRTLIRSLWETNENLMGLLSERYTYSEEVREKTLECEKSLSEWTIEDLEGMYLSAPVKRMVWQTLLIVKELEKVLGCAPRRIFVEMAREDAEKGRRTESRKQKLQNLYKAIKKEEIDWKKEIDEKTEQAFRSKKLYLYYLQKGRCMYTGESIRFEDLMNDNLYDIDHIYPRHFVKDDSLEQNLVLVKKEKNAHKSDVFPIEVDIQKKMSPFWKELKERGFISEEKYMRLTRRYGFSEEEKAGFINRQLVETRQGTKSITEILGQAFPDVDIIFSKASNVSEFRHIYGLYKVRSINDFHHAHDAYLNIVVGNTYHVKFTKNPLNFIREAEKNPQNAENKYNMNRMFDWTVKRGNETAWIASSDKEAGSIKIVKAILAKNTPLVTKRCAEAHGGITRKATIWNKNKAAGSGYIPVKMNDARLLDVTKYGGLTSVSASGYTLLEYDVKGKKIRSLEAIPIYLGRVSELTNEAILKYFEKVLIEENKGKEIIELRICKKFIPRESLVRYNGYYYYLGGKSVEQIVLKNATQMAYSEEETCYIKKIEKAIEKTYYEEVDKNKNVILTKTRNNAMYDKFIIKYQNSIYQNQSGAMKNSIIGKRNEFLTLSLEKQCRILKALVEYFRTGDIIDLRELGGSSQAGKVAMNKKIMGASELVLISQSPTGLFQQEIDLLKI

SEQ ID NO: 20030 - protein, 1361 aa, unidentified
  REGION 1..1361: note = Cas Enzyme sequence
MKEKMEYYLGLDMGTNSVGWAVTDKEYRLMRAKGKDLWGVRLFERANTAEERRAYRINRRRRQREVARIGILKELFADEIAKVDANFFARLDDSKYYLDDRQENNKQKYAIFADKDYTDKEYFSQYPTIFHLRKELIMSDQPHDVRLIYLALLNMFKHRGHFLNKTLGTSESSESFFDMYQRLAVCADEEGIKLPETVDLKKLEQILGARGCSRKATLEHISEIMGINKKNKPVYSLMQMICGLDTKMIDLFGQKIDEEHKKISLSFRTSNYEEMAEEVRNTIGDDAFELILTAKEMHDFGLLAEIMKGYSYLSEARVAVYEEHRKDLAKLKAVFKQYDHKAYDEMFRIMKNGTYSAYVGSVNSFGKIERRTVKTSREELLKNIKKILIGFPEDDATVQEFLGKIDSDTLLQKQLTASNGVIPNQVHAKEMKVILKNAEKYLPFLSERDETGLSVSEKIIALFTFTIPYYVGPLGQQHLGKECAHGWVERKEKGTVYPWNFEQKVDLKASAEHFIERMVKHCTYLSDEQALPKQSLLYEKFQVLNELNNLKIRGEKISVELKQQIYRDVFEHTGKKVSMKQLENYLKLNGLLEKDEKDAVTGIDGGFHSYLSSLGKFIGILGEEAHYDKNQNMMEKIIFWGTVYGQDKKFLRERLSEVYGDRLSKEQIRRITGMKFEGWGRLSKEFLLLEGAFREEGEIRTLIRSLWETNENLRGLLSERYTYSEEVREKTLECEKSLSEWTIEDLEGMYLSAPVKRMVWQTLLIVKELEKVLGCDPRRIFVEMAREDAEKGRRTESRKQKLQNLYKAIKKEEIDWKKEIDEKTEQAFRSKKLYLYYLQKGRCMYTGESIRFEDLMNDNLYDIDHIYPRHFVKDDSLEQNLVLVKKEKNAHKSDVFPIEADIQKKMSPFWKELKERGFISEEKYMRLTRRYGFSEEEKADFINRQLVETRQGTKSITEILGQAFPNVDIIFSKASNVSEFRHIYGLYKVRSINDFHHAHDAYLNIVVGNTYHVKFTKNPLNFIREAEKNPQNAENKYNMNRMFDWTVKRGNETAWIASSDKEAGSIKIVKAILAKNTPLVTKRCAEAHGGITRKATIWNKHKAAGSGYIPVKMNDARLLDVTKYGGLTSVSASGYTLLEYDVKGKKIRSLEAIPIYLGRVSELTNEAILKYFEKVLIEENKGKEITELRICKKFIPRESLVRYNGYYYYLGGKSVEQIVLKNATQMAYSEEETCYIKKIEKAIEKTYYEEVDKNKNVILTKTRNNAMYDKFIIKYQNSIYQNQSGAMKNSIIEKRNEFLTLSLEKQCRILKALVEYFRTGDIIDLRELGGSSQAGKVAMNKKIMGASELVLISQSPTGLFQ

SEQ ID NO: 20031 - protein, 1369 aa, unidentified
  REGION 1..1369: note = Cas Enzyme sequence
MKEKMEYYLGLDMGTNSVGWAVTDKEYRLMRAKGKDLWGVRLFERANTAEERRAYRINRRRRQREVARIGILKELFADEIAKVDANFFARLDDSKYYLDDRQENNKQKYAIFADKDYTDKEYFSQYPTIFHLRKELIMSDQPHDVRLIYLALLNMFKHRGHFLNKTLGTSESSESFFDMYQRLAVCADEEGIKLPETVDLKKLEQILGARGCSRKATLEHISEIMGINKKNKPVYSLMQMICGLDTKMIDLFGQKIDEEHKKISLSFRTSNYEEMAEEVRNTIGDDAFELILTAKEMHDFGLLAEIMKGYSYLSEARVAVYEEHRKDLAKLKAVFKQYDHKAYDEMFRIMKNGTYSAYVGSVNSFGKIERRTVKTSREELLKNIKKILIGFPEDDATVQEFLGKIDSDTLLQKQLTASNGVIPNQVHAKEMKVILKNAEKYLPFLSERDETGLSVSEKIIALFTFTIPYYVGPLGQQHLGKECAHGWVERKEKGTVYPWNFEQKVDLKASAEHFIERMVKHCTYLSDEQALPKQSLLYEKFQVLNELNNLKIRGEKISVELKQQIYRDVFEHTGKKVSMKQLENYLKLNGLLEKDEKDAVTGIDGGFHSYLSSLGKFIGILGEEAHYDKNQNMMEKIIFWGTVYGQDKKFLRERLSEVYGDRLSKEQIRRITGMKFEGWGRLSKEFLLLEGAFREEGEIRTLIRSLWETNENLRGLLSERYTYSEEVREKTLECEKSLSEWTIEDLEGMYLSAPVKRMVWQTLLIVKELEKVLGCDPRRIFVEMAREDAEKGRRTESRKQKLQNLYKAIKKEEIDWKKEIDEKTEQAFRSKKLYLYYLQKGRCMYTGESIRFEDLMNDNLYDIDHIYPRHFVKDDSLEQNLVLVKKEKNAHKSDVFPIEADIQKKMSPFWKELKERGFISEEKYMRLTRRYGFSEEEKADFINRQLVETRQGTKSITEILGQAFPNVDIIFSKASNVSEFRHIYGLYKVRSINDFHHAHDAYLNIVVGNTYHVKFTKNPLNFIREAEKNPQNAENKYNMNRMFDWTVKRGNETAWIASSDKEAGSIKIVKAILAKNTPLVTKRCAEAHGGITRKATIWNKHKAAGSGYIPVKMNDARLLDVTKYGGLTSVSASGYTLLEYDVKGKKIRSLEAIPIYLGRVSELTNEAILKYFEKVLIEENKGKEITELRICKKFIPRESLVRYNGYYYYLGGKSVEQIVLKNATQMAYSEEETCYIKKIEKAIEKTYYEEVDKNKNVILTKTRNNAMYDKFIIKYQNSIYQNQSGAMKNSIIEKRNEFLTLSLEKQCRILKALVEYFRTGDIIDLRELGGSSQAGKVAMNKKIMGASELVLISQSPTGLFQQEIDLLKI

SEQ ID NO: 20032 - protein, 1213 aa, unidentified
  REGION 1..1213: note = Cas Enzyme sequence
MKSKEKFAKIAGNYYVGLDIGTDSVGYAVTDKSYELLKYKGEPMWGSHLFDAANQCAERRGFRTSRRRLDRVQFRVHLIDTIFAKEISKIDPDFYIRKQESRLYLEDKSTQDKYVYFNDENFNERDYYQKYPTIHHLILDLMTSDEKKDLRLINIAIDWLVAHRGHFLSEVSVDHVDELKEFNSIYEDFISCFDLLDIDRPWADTDIEEFGTILKKKRVTEKESALTKLLFGDGKPPKASEDSDIDVKTLIKFISGRKVKLSELFPKLELEEEKSVQISDEVDEYIALVDDYSELIIKIAAMYEWSVLSDILGTSTYISEAKVKIYDKHKKDLAELKSFVKRNRPKQYNKIFRDSDEKLTNYTAYSYNVSSVKPGQKLPNKKCSIDDFYAFLKKELNLNDIENTYEDELDKNYLKGILAEMDTKDFMPKQVITDNRVIPYQLYYVELRAILDKAQKYYPFLSEKDSDGISKVDKVFSVFKFRIPYYVGPLRKDNSKYAWIERKAGTIYPWNFDTMVDEDKSEQNFIDRMTNTCSYIPGNTVLPKYSLLYSKFMVLNEINNLKVNEVPISVEAKQFIFNELFCRYAKVSKKKIEEALVTNNFMQKGDILSGVDITIKSSLKSRNDFRRLLSEGVLTEADIEKIVERSTYTEDKCRFKNWLKASYPDLSEDDLKYISKLKYKDFGRLSHFLLSELEGCDKETGEAGTIMHFLWTTNDNLMQLLSEKYTFNEEISNLRNDYYSKHKLNLEDQLEEMGISNAVKRPVIRTMAVLKDVTSTIGSAPKKVFVEMARGPEEKGKRTLSRKEQILELYKNVEADTVKLRKELEAMGEEANNKLQKDSLFLYYTQLGRCMYTDEPIDLVKLQKNSEMYDIDHIYPQSKVKDDSILNNKVLVLKEENGRKSDTYPLSSEIRAKQRNFWERLKKAGLITEEKFSRLIRNTPFSDDEKMGFINRQLVETRQSTKAVTQIINLYYPETEVVFVKARLASDFRNEFLWPKSRIINDLHHAKDAYLNVVVGNVYHEKFTKKWFNINDSYNLKTDKFFTRDVKHGDEYIWKADESLVKVKNTFKKNNIHLTRYAYCSKGGLFDQMPVKKAAGLTPLKSGLDTEKYGGYNKVAASFYVLARYNKGKKKEITFIPVELMYSDRFMNDNAFAVEYTEKFLMSIQTKKVDGIEFLLDKRPIKIKSELSFDDIEYGLMESQIMVDKFYLVMPPH

SEQ ID NO: 20033 - protein, 1391 aa, unidentified
  REGION 1..1391: note = Cas Enzyme sequence
MENIQYYIGLDVGTNSVGWAVTDTSYNLLRAKGKDMWGARLFEKANTAAERRTKRTSRRRSEREKARKAMLKELFADEINKVDPSFFIRLEESKFFLDDRSENNRQRYTLFNDATFTDKDYYEKYKTIFHLRSDLINSDEKFDVRLVFLAILNLFSHRGHFLNASLKGDGDIQGMDVFYNDLYEFCVEFEIDLPQISNIDNFEKILSQKGKSRTKILEELSEELSISKKEKIKYAILKLICGMKIKVADIYSDEDIQDEDKKKDFGFRESNYEERALEVKEIIGDEYFDLVERAKSVHDMGVLSNIIGNFKYLCEARVEAYDNHHKDLLKIKELLKKYDKKAYTDMFRKMTDKNYSAYVGSVNSNIAKERRSVDNRKIEDLYEYIKKIALKNISDDNEDKIEILKKIETGEFLKKQLTASNGVIPNQLQSRELRAILKKAESYLPFLKEKGKKNLTISEMIIQLFEFQIPYYVGPLDKNPKKDKNANSWAVIPSGGKILPWNFEDKVDVKASAEEFIKKMLRKCTYLSEEHTLPKQSLLYEKFMVLNEINNIKVDGEKISVEAKQRIYKDLFMKGKKVSQKAIKQELISLNIMNKDSVLSGIDTVCNAYLSSIAKFRGVFDEDVNNQSIIDMVEDIIFWGTIYSDEKKFVKEKIEEKYGDKIDKDKIKRILGFKFSNWGNLSKSFLELEGADVGTGEVRSIIQSLWETNFNLMELLSSRFTYMDELEKRVKKLEKALNQWTIEDLDDMYLSSPVKRMIWQSMKIVDEIQTVIGYAPKRIFVEMTRSEGEKVRTKSRKDRLKELYNGIKEDSKQWVKELDSKDESYFRSKKMYLYYLQKGRCMYSGEVIELDKLMDDNLYDIDHIYPRSFVKDDSLDNLVLVKKEINNRKQNDPITPQIQAICQGFWKILHDQGFISNEKYSRLTRKTQEFSDEEKLSFINRQIVETGQATKCMAQILQKSMGEDVDVVFSKARLVSEFRHKFNLFKSRLINDFHHANDAYLNIVVGNSYFVKFTRNPANFIKDARKNPDNPAYKYHMDRFFERDVKSKSEVAWIGQSEGNAGTIAIVKKTMAKNSPLITKKVEEGHGKITKETIVGVKEIKFGRNKVEKVDKTPKKPNLQAYRPIKTSDERLCNILRYGGRTSISISGYCLVEYVKKRKTIRSLEAIPVYLGRKDSLSEEKLLNYFRYNLNDGGKDSVSDIRLCLPFISTNSLVKIDGYLYYLGGKNDDRIQLYNAYQLKMKKEEVEYIRKIEKAVSMSKFDEIDREKNPVLTEEKNIELYNKIQDKFENTVFSKRMSLVKYNKKDLSFGDFLKNKKSKFEEIDLEKQCKVLYNIIFNLSNLKEVDLSDIGGSKSTGKCRCKKNITNYKEFKLIQQSITGLYSCEKDLMTI

SEQ ID NO: 20034 - protein, 1382 aa, unidentified
  REGION 1..1382: note = Cas Enzyme sequence
MENIQYYIGLDVGTNSVGWAVTDTSYNLLRAKGKDMWGARLFDEAKTAVERRTKRTSRRRSEREKARKAMLKELFADEINKIDPSFFIRLEESKFFLDDRSENNRQRYTLFNDATFTDKDYYEKYKTIFHLRSDLINSDEKFDVRLVFLAILNLFSHRGHFLNASLKGDGDIQGMDVFYNDLYETCEEFEIDLPQISNIDNFEKILSQKGKSRTKILEELAEEMSISKKDKTKYAILKLICGMKIKVGDIYADEDIQDEDKKKDFGFRESNYEERALEVKEIIGDEYFDLVERVKAVHDMGLLSNIIGNSKYLCEARVEAYENHHKDLLKIKELLKKYDKKAYTDMFRKMTDKNYSAYVGSVNSNIAKERRSVDNRKVEDLYEYIKKIALKNIPDDNEDKIEILKKIETGEFLKKQLTASNGVIPNQLQSRELRAILKKAESYLPFLKEKGEKNLTVSERIIQLFEFQIPYYVGPLDKNPKKDKNANSWAVIPSGGKILPWNFEDKVDVKASAEEFIKKMLRKCTYLSEEHTLPKQSLLYEKFMVLNEINNIKVDGEKISVEAKQKIYKDLFMKGKKVSQKAIKQELISLNIMNKDSVLSGIDTVCNAYLSSIAKFRGVFDEDVNNQSIIDMVEDIIFWGTIYSDEKKFVKEKIEEKYGDKIDKDKIKRILGFKFSNWGNLSKSFLELEGADTGTGEVRSIIQSLWETNFNLMELLSSRFTYMDELEKRVKKLEKPLSEWTIEDLDDMYLSSPVKRMIWQSMKVVDEIQTVIGYAPKRIFVEMTRSEGEKVRTKSRKDRLKELYKGIKEDSKQWVKELDSKDESYFRSKKMYLYYLQKGRCMYSGEVIELDKLMDDNLYDIDHIYPRSFVKDDSLDNLVLVKKEINNRKQNDPITPQIQASCQGFWKILHDQGFISNEKYSRLTRKTQEFSDEEKLSFINRQIVETGQATKCMAQILQKSMGEDVDVVFSKARLVSEFRHKFDLFKSRLINDFHHANDAYLNIVVGNSYFVKFTRNPANFIKDARKNPDNPAYKYHMDRFFERDVKSKNEVAWIGQSEGNAGTIAIVKKTMAKNSPLITKKVEEGHGSITNETIVGVKKIKFGRSKGEKTDKIPKKINVKAYQPIKTNDERLCNILRYGGRTSISTSGYCLVEYVKKKKTVRSLEAIPVYLGRKDSLTEEKLLNYFNYILNDGGKDSVSDIRICLPFIPMNSLIKINGYLYYLGGKTGEQIYIYNAQQLKMKKEEVEYIRKIEKAVSLSKFDEIDREKNPVLTEERNIDLYEKIQKKIEKTVYKHRLTSIENSLIDGKQKFVNLDFEKQCKILNSILYNLTKTFKADLRDIGGSENSGGCLCSKNINNYKEFKLIQQSITGLYSCEKDLMTI

SEQ ID NO: 20035 - protein, 1382 aa, unidentified
  REGION 1..1382: note = Cas Enzyme sequence
MENKQYYIGLDVGTNSVGWAVTDTSYNMLRAKGKDMWGARLFEKANTTAERRTKRTSRRRSEREKARKAILKELFADEINKIDSSFFIRLEESKFFLDDRSENNRQRYTLFNDATFTDKDYYEKYKTIFHLRSALINSDEKFDVRLVFLAILNLFSHRGHFLNASLKGDGEIQGMDVFYNDLYEACEEFEIDLPQISNINNFEKILSQKGKSRTKILEELSEELSISKKEKIKYAILKLICGMKIKVADIYSDEDIQDEDKKKDFGFRESNYEERALEVKEIIGDEYFDLVERAKSVHDMGVLSNIIGNFKYLCEARVEAYDNHHKDLLKIKELLKKYDKKAYTDMFRKMTDKNYSAYVGSVNSNIAKERRSVDNRKIEDLYEYIKKIALKNISDDNEDKIEILKKIETGEFLKKQLTASNGVIPNQLQSRELRAILKKAESYLPFLKEKGEKNLTISEMIIQLFEFQIPYYVGPLDKNPKKDKNANSWAVIPSGGRILPWNFEDKVDVKASAEEFIKKMLRKCTYLSEEYTLPKQSLLYEKFMVLNEINNIKVDGEKISVEAKQRIYKDLFMKGKKVSQKAIKQELISLNIMNKDSVLSGIDTVCNAYLSSIAKFRGVFDEDVNNQSIIDMVEDIIFWGTIYSDEKKFVKEKIEEKYGDKIDKDKIKRILGFKFSNWGNLSKSFLELEGADVGTGEVRSIIQSLWETNFNLMELLSSRFTYMDELEKRVKKLEKALNQWTIEDLDDMYLSSPVKRMIWQSMKIVDEIQTVIGYAPKRIFVEMTRSEGEKVRTKSRKDRLKELYNNIKEDSKQWVKELDAKDESYFRSKKMYLYYLQKGRCMYSGEVIELDKLMDDNLYDIDHIYPRSFVKDDSLDNLVLVKKEINNRKQNDPITPQIQASCQGFWKILHDQGFISNEKYSRLTRKTQEFSDEEKLSFINRQIVETGQATKCMAQILQKSMGEDVDVVFSKARLVSEFRHKFNLFKSRLINDFHHANDAYLNIVVGNSYFVKFTRNPANFIKDARKNPDNPAYKYHMDRFFERDVKSKSEVAWIGQSEGKAGTIAIVKKTMAKNSPLITKKVEEGHGKITNETIVGVKEIKFGRGKGEKSDKTPKKPNVEAYRPIKINDSRLCNILRYGGRGSISSSGYCLVEYTKKKKTIRSLEAIPVYLGRKDILREEKLLEYLKNILNNEGKDTATDIRICLLFIPMNSLIKIDGYLYYLGGKTGEQIYIYNAQQLKMKKEEAEYIRKIEKAVSLSKFDEIDREKNSVLTKEKNIELYDKIQDKIENTVYNKRLSSIEGILKEGKAKFVELDVEKQCKILNSVLNNITNTMKVDLREIGGSVNSGTCRCSKNITNYKEFKLIQQSITGLYSCEKDLMMI

SEQ ID NO: 20036 - protein, 1382 aa, unidentified
  REGION 1..1382: note = Cas Enzyme sequence
MENIQYYIGLDVGTNSVGWAVTDTSYNLLRAKGKDMWGARLFEKANTAAERRTKRTSRRRSEREKARKAMLKELFADEINKVDPSFFIRLEESKFFLDDRSENNRQRYTLFNDATFTDKDYYEKYKTIFHLRSDLINSDEKFDVRLVFLAILNLFSHRGHFLNASLKGDGDIQGMDVFYNDLYEFCVEFEIDLPQISNIDNFEKILSQKGKSRTKILEELSEELSISKKEKIKYAILKLICGMKIKVADIYSDEDIQDEDKKKDFGFRESNYEERALEVKEIIGDEYFDLVERAKSVHDMGVLSNIIGNFKYLCEARVEAYDNHHKDLLKIKELLKKYDKKAYTDMFRKMTDKNYSAYVGSVNSNIAKERRSVDNRKIEDLYEYIKKIALKNISDDNEDKIEILKKIETGEFLKKQLTASNGVIPNQLQSRELRAILKKAESYLPFLKEKGKKNLTISEMIIQLFEFQIPYYVGPLDKNPKKDKNANSWAVIPSGGKILPWNFEDKVDVKASAEEFIKKMLRKCTYLSEEHTLPKQSLLYEKFMVLNEINNIKVDGEKISVEAKQRIYKDLFMKGKKVSQKAIKQELISLNIMNKDSVLSGIDTVCNAYLSSIAKFRGVFDEDVNNQSIIDMVEDIIFWGTIYSDEKKFVKEKIEEKYGDKIDKDKIKRILGFKFSNWGNLSKSFLELEGADVGTGEVRSIIQSLWETNFNLMELLSSRFTYMDELEKRVKKLEKALNQWTIEDLDDMYLSSPVKRMIWQSMKIVDEIQTVIGYAPKRIFVEMTRSEGEKVRTKSRKDRLKELYNNIKEDSKQWVKELDAKDESYFRSKKMYLYYLQKGRCMYSGEVIELDKLMDDNLYDIDHIYPRSFVKDDSLDNLVLVKKEINNRKQNDPITPQIQASCQGFWKILHEQGFISNEKYSRLTRKTQEFSDEEKLSFINRQIVETGQATKCMAQILQKSMGEDVDVVFSKARLVSEFRHKFDLFKSRLINDFHHANDAYLNIVVGNSYFVKFTRNPANFIKDARKNPDNPAYKYHMDRFFERDVKSKSEVAWIGQSEGNAGTIAIVKKTMAKNSPLITKKVEEGHGKITNETIVGVKEIIFGRKKVEKSDKTPKKPNVEAYRPIKINDSRLCNILRYGGRGSISSSGYCLVEYTKKKKTIRSLEAIPVYLGRKDILREEKLLEYLKNILNNEGKDTATDIRICLLFIPMNSLIKIDGYLYYLGGKTGEQIYIYNAQQLKMKKEEAEYIRKIEKAVSLSKFDEIDREKNSVLTKEKNIELYDKIQDKIENTVYNKRLSSIEGILKEGKAKFVELDVEKQCKILNSILNNITNTMKVDLREIGGSVNSGTCRCSKNITNYKEFKLIQQSITGLYSCEKDLMTI

SEQ ID NO: 20037 - protein, 1110 aa, unidentified
  REGION 1..1110: note = Cas Enzyme sequence
MKRALEVKEIIGDDHFELIERAKAVHDMGLLANIIGNSKYLCEARVEAYENHHKDLLKIKELLKKYDKKAYNDMFRKMTDKNYSAYVGSVNSNIAKERRSVDKRKIEDLYKYIEDTALKNIPDDNKDKIEILEKIKLGEFLKKQLTASNGVIPNQLQSRELRAILKKAENYLPFLKEKGEKNLTVSEMIIQLFEFQIPYYVGPLDKNPKKDNKANSWAVIPSGGRILPWNFEDKVDVKGSRKEFIKKMVRKCTYLSEEHSLPKQSLLYEKFMVLNEINNIKIDGEKISVEAKQKIYNDLFMKGKKVSQKDIKKELISLNIMDKDSVLSGTDTVCNAYLSSIGKFTGVFKEEINKQSIVDMIEDIIFLKTVYGDEKRFVKEEIVEKYGDRLDDVRLKRILGFKFSNWGNLSKSFLELEGADVGTGEVRSIIQSLWETNFNLMELLSSRFTYMDELEKRVKKLEKALSEWTIEDLDDMYLSSPVKRMIWQSMKIVDEIQTVIGYAPKRIFVEMTRSEGEKVRTKSRKDRLKELYNNIKEDSKQWVKELDAKDESYFRSKKMYLYYLQKGRCMYSGEVIELDKLMDDNLYDIDHIYPRSFVKDDSLDNLVLVKKDINNRKQNDPITPQIQASCQGFWKVLHDQGFISNEKYSRLTRKTQEFSDEEKLSFINRQIVETGQATKCMAQILQKSMGEDVDVVFSKARLVSEFRHKFNLFKSRLINDFHHANDAYLNIVVGNSYFVKFTRNPANFIKDARKNPDNPAYKYHMDRFFERDVKSKSEVAWIGQSEGNAGTIAIVKKIMSKNSPLITKKVEEGHGAITNETIVGVKEIIFGRKKVEKSDKTPKKPNVEAYRPIKINDSRLCNILRYGGRGSISSSGYCLVEYTKKKKNIRSLEAIPVYLGRKDILREEKLLEYLKNILNNEGKVTATDIRICLPFIPMNSLIKIDGYLYYLGGKTGEQIYIYNAQQLKMKKEEAEYIRKIEKAISLSKFDEIDREKNSVLTKEKNIELYDKIQDKIGNTVYNKRLSSIEGILKEGKAKFVELDVEKQCKILNSVLNNITNTMKVDLREIGGSVNSGTCRCSKNITNYKEFKLIQQSITGLYSCEKDMMTI

SEQ ID NO: 20038 - protein, 1392 aa, unidentified
  REGION 1..1392: note = Cas Enzyme sequence
MDNKKEYYIGLDMGTNSVGWAVTDTEYNLMRAKGKDLWGVRLFTEAQPAVNRRTKRVQRRRIEREKARKAMLKLFFSDAIDAVDPGFFQRLDESFLQYEDRSDSNKQMNALFNDGGYIDFDYYNEYPTIFHLRKALLHEDREFDVRLVYLAILNMFSHRGHFLNTNMSSDDDRDNNFDSAWRELIDAFETSQLSNNKEINNISALLDTTKYTEIKQIIGDRGKTRSSKFDALRDLLDVPKSEKHICAVLKLVCGLKVTVKEILSNIENPSVEPEGLKVSTSFTDSNLEENLDKIQEVLEDEYFDVILKAKSVYEICLLSSILGNNKYLSDSRVEMYERHKQDLQDLKSLLAEYDKYAYEKIFRTMDVGSYSAYVGSMNSHGNKIRRLGTTSANSGTAKEELYKLVKKVLNNSVPENNVLKVRILDKIEKDSFLEKQLTSNNGVIPNQVHTIELKRILSNAEIYLKFLQDIDEDGLSVKDKIIQLFEFQIPYYVGPLGREFNGVKGYNNWAVRTEEGLKPGVKIMPWNFDKYIDKTASAAEFIKRMLRKCSYMSDEYTLPKHSLAYEKFMVLNEINNIKIDNERISVKAKQGIYNDLFATGNKVSRDKIKEYLVKHNDARDDVEITGLSDETCTTKLASLGKFRAIFGDDVFKQSNKDIIEDIIYWSTIYNGDRKIIREKIEGKYPNTFNKKQLNKILGFKFEGWGNLSKKFLELQGTSKVNGEIDSVIGFMWNKQENLMELLSDNYTFTSQLNGMMNDTIKPLSSWKIEDLEDMYLSPSVKRMVWQTMKIVDELQSVIGYAPKRVFVEVTRGDGEKKRTTSRKQKLIDLYKSIKGEAKDWIKEIENRDESAFKSIKLFLYYMQQGMCMYSGEKIDLDNLMNDNLYDLDHIYPQHFTKDDSIHNNLVLVKKEFNARKSDMPITKEIQAKMHGKWKALLDGKFITSEKYARLTRHSYAFSDDEKAGFINRQLVETSQATKAITKIFSQAFDNNTKIVFSKARLVSDFRQKFELPKSRVLNCYHHANDAYLNIVVGNSYYVKFEGNPARFIKESKGKEEEKKYKYHLSKFFENTVQNKNEVAWSVEEGNNTITTVKRTMAKYSPLVTYKTEEGKGEYFKETIYPKSKAKPIVYTGLKSKNTPLNDVKKYGGKTAIGTSGYCFVKYTEKNKEVRKFETLPIYLGSSRTLTVERIQEYLKESYLEKGMIQAAETVEVLIKFVPQKTELVLDGHTYTIGGSTGDMMYINGIVQVKLSKDYVKYFQKLEKAKETNDYSEIDKLGNRVITQQKNAELIDIILDKMEKEIFQNRKCSTYETINEGRDKFKTLDINKQVTILIDVINNIYGSKQSVDLTLIGGKSNVGMCRAGRKISNCNEAKLHFFSCTGIYVKEIDLLKI

SEQ ID NO: 20039 - protein, 984 aa, unidentified
  REGION 1..984: note = Cas Enzyme sequence
MDNKKEYYIGLDMGTNSVGWAVTDTEYNLMRAKGKDLWGVRLFTEAQPAVNRRTKRVQRRRIEREKARKAMLRLFFSDAIDAVDSGFFQRLDESFLQYEDRSDSNKQMNALFNDGSYTDLDYYNEYPTIFHLRKALLHEDREFDVRLVYLAILNMFSHRGHFLNTNMSSDDDRDNNFDGAWRELIDAFETFQLSNDKEINNISALLDTSKYLEIKQIIGDRGKTRSSKFDALRDLLGVPKSEKHTCAVLKLVCGLKVTVKELLSNIENPSVDSEGLKVSISFTDSNLEENLDKIQEVLEDEYFDVILKAKSVYEICLLSSILGNNKYLSDSRVEMYERHRLDLQDLKSLLAEYDKDAYEKIFRTMDVGSYSAYVGSVNSHGNKIRRLGTTSASSGTAKEELYKLVKKVLNNSVPEDNVVKARILDKIEKDCFLEKQLTSNNGVIPNQVHAIELKRILSNAEKHLEFLNDVDEEGLSVKDKIIKLFEFQIPYYVGPLGREFNGKKGYNNWAVRTEEGLKPGVKIMPWNFDKYIDRTASAEEFIKRMLRKCSYISGEYTLPKHSLTYEKFMVLNEINNIKIDNERISVEAKQGIYNDLFTRGNKVSKKKIKEYLVKHNFARDDVEITGLSDETCTTKLASLGKFRSIFGDVDKQSNKDIIENIIYWSIIYSGDRKIIKEKIEEKYPNLFDKKQLNKILGFKFEGWGNLSRKFLEQQGTSKVTGEINSILGFMWDGQENLMELLSDNYTFTEQLGGMADNTIRPLSDWKIEDLEDMYLSPSVKRSVWQTMKIVDELQSVIGYAPKRVFVEVTRGDGEKERTTSRKQKLIDLYKSIKGEAKDWIKEIEDRDENAFKSRKLFLYYMQQGMCMYSGERIDLHNLMNDSIYDIDHIYPRHFTKDDSIHNNLVLVKRQLNADKSDMPITKEIQTKMHGRWKALLAGGFISSEKYARLTRNSYTFSDEEKAGFINRQLVETSQATKAITRIFS

SEQ ID NO: 20040 - protein, 1141 aa, unidentified
  REGION 1..1141: note = Cas Enzyme sequence
VCGLKVTVKEILSNIENPSVEPEGLKVSTSFTDSNLEENLDKIQEVLEDEYFDVILKAKSVYEICLLSSILGNNKYLSDSRVEMYERHGQDLQDLKSLLSEFDKDAYEKIFRTMDVGSYSAYVGSVNSHGNKIRRLGTTSASSGTAKDELYKLVKKVLNNSVPEDNVVKARILDKIDKDCFLEKQLTSNNGVIPNQVHTIELKCILSNAEKYLKFLQDIDEDGLSVKDKIIQLFEFQIPYYVGPLGREFNGVKGYNNWAVRTEEGLKPGVKVMPWNFDKYIDRTASAEEFIKRMLRKCSYLADEYTLPKHSLAYEKFMVLNEINNIKIDNERISVEAKQGIYNDLFTLGNKVSKKKIKEYLAKHNYARDDVEITGLSDETCTTKLASLDKFRAIFGDDVFKQSNKDIIEDIIYWSTIYSGDRKIIREKIEDRYPNTFDKKQLNKILGFKFEGWGNLSKKFLELQGTSKVTGEIDSIIGFMWNGQENLMELISDNYTFTSQLNGMMNDTIKPLSSWKIEDLKDMYLSPSVKRMVWQTMKIVDELQSVIGYAPKRVFVEVTRGDGEKKRTTSRKQKLIDLYKSIKGEAKDWIKEIENRDESAFKSRKLFLYYMQQGMCMYSGEKIDLDNLMNDNLYDLDHIYPQHFTKDDSIHNNLVLVKKEFNARKSDMPITKEIQAKMHGKWKALLEGKFITSEKYARLTRHSYAFSDDEKAGFINRQLVETSQATKAITRIFSQAFDNNTKIVFSKARLVSDFRQKFELPKSRVLNCYHHANDAYLNIVVGNSYYVKFEGNPARFIKDSKGKENDKKYKYHLSKFFENTVQNKNEIAWSVEEGNNTINTVKRTMAKYSPLVTYKTEEGKGEYFKETIYPKSKAKPLVYTGLKTKNTPLNDVTKYGGKTAIGTSGYCFVKYTEKNKEVRKFETLPIYLGSSKTLTVERIQEYLKESYMEKGMIQAAETIEVLIKFVPQKTEIVLDNHLYTMGGSSQGNMYINSNVQLKLAFEYIKYMHKLEKAVVLRDYSEVDQNGCMVINEEKNFNLYKILLEKMSSNVYSSKKNPIISTIEKGIDSFKTLSIDRQVNMLLDVVNNLYGKKQTVDLEKIGGSKYSGMCLCNREISKYSEAKLVFSSTTGIYAKLVDLLKI

SEQ ID NO: 20041 - protein, 1392 aa, unidentified
  REGION 1..1392: note = Cas Enzyme sequence
MDNKKEYYIGLDMGTNSVGWAVTDTEYNLMRAKGKDLWGVRLFTEAQPAVSRRTKRVQRRRIEREKARKAMLRLFFSDAIDAVDPGFFQRLEESFLQYEDRSDSNKQMNALFNDGGYTDLDYYNEYPTIFHLRKALLHEDREFDVRLVYLAILNMFSHRGHFLNTNMSSDDDRDNNFDSAWRELIDAFETSQLSNNKEINNISALLDTAKYPEIKQIIGDRGETRSSKFDALRDLLDVPKSEKHICAVLKLVCGLKVTVKEILSNIENPSVEPEGLKVSISFTDSNLEENLDKIQEVLEDEYFDVILKAKSAYEICLLSSILGNNKYLSDSRVEMYERHRQDLQDLKSLLAEYDKDAYEKILRTMDVGSYSAYVGSVNSHGNKIRRLGTTSANSGTAKEDLYKLVKKVLNNSVPEDNEVKAKILDKIDKECLLEKQLTSNNGVIPNQVHTIELKRILSNAERYLKFLQDIDEDGLSIKEKIIQLFEFQIPYYVGPLGREFNGVKGYNNWAVRTEEGLKPGVKVMPWNFDKYIDRTASAEEFIKRMLRKCSYMADEYTLPKHSLSYEKFMVLNEINNIKIDNERISVEAKQGIYNDLFTSGNKVSKKKIKEYLVKHNYARGGVEITGLSDETCTTKLASLGKFRAIFGDDVLKQSNKDIIEDIIYWSTIYSGDRKIIREKIEDKYPNTFDKKQLNKILGFKFEGWGNLSKKFLELQGTSKVTGEIDSIIGFMWNGQDNLMELLSDNYTFTSQLNGMMDDTIKPLSSWKIEDLEDMYLSPSVKRMVWQTMKIVDELQSVIGYAPKRVFVEVTRGDGEKERTTSRKQKLIDLYKSIKGEAKEWIKEIENRDESAFKSRKLFLYYMQQGMCMYSGEKIDLQNLMNDNLYDLDHIYPQHFTKDDSIHNNLVLVKKEFNARKSDMPITKGIQAKMHGKWKALLEGKFITSEKYARLTRHSYAFSDDEKAGFINRQLVETSQATKAITRIFSQAFDNNTKIVFSKARLVSDFRQKFELPKSRVLNCYHHANDAYLNIVVGNSYYVKFEGNPARFIKESKGKENDKKYKYHLSKFFENTVQNKNEIAWSVEEGNNTINTVKRTMAKYSPLVTYKTEEGKGEYFKETIYPKSKAKPLVYTGLKTKSTPLNDVTKYGGKTAIGTSGYCFVKYTEKNKEVRKFETLPIYLGSSRTLTVERIQEYLKESYMEKGMIQAAETIEVLIKFVPQKTEIVLDGYTYTIGGSTGDMMYINGIVQVKLSKDYVKYFQKLEKAKETNDYSEIDKLGNRVITQQKNAEHIDIILDKMEKEIFQNRKCSTYETINEGRDKFKTLDINKQVTILIDVINNIYGSKQSVDLTLIGGKSNVGMCRAGRKMSNCNEAKLRFFSCTGIYVKEIDLLKI

SEQ ID NO: 20042 - protein, 1354 aa, unidentified
  REGION 1..1354: note = Cas Enzyme sequence
MTKEYYLGLDMGTSSLGWAVTDTDYNLLRAKGKDLWGVRLFNEANSSAERRLFRTSRRRRQREQVRIGYLRAFFANEINKIDEGFYQRLDDSKYHIEDKNDKQPFTLFAGTEFNDKDYYLNYPTIFHLRKELIESTEPHDVRLIFLAILNMFKHRGHFLNTNLSEDGIGDISNTYHELSNRVREYMDKELPADDLVAILEDILPSKSYSNSRKVDIILEKANINKSTDKSFVEMIKLICGLQGKLSIIFDNDEFEEENVKFSIGFRDGNYEEKESQAEDMLSEESFEILLLLKQIHDWGVLADIMKSEDKSYKYLSEARVASYEKHKNDLRILKKLIKNYAPNEYNHLFRVMEDNNYSAYVGSVNYKHNKIDNHNRRGAKCNTEDFYKLIKKIITNISDCEEKTYIMNEIEKGSFLPKQIISSNGVIPNQLHKAELKAILTNAEKYLDFLNEKDETGYSISEKIVKLFEFQIPYYIGPLLNSNNGNGWCVRKDNNALGAITPWNFNDKIDEKATAEKFIEKMVNHCTYINGETVLPKNSLLYEKFMLLNELNNLKINQEDISVELKQNLFNDIFMKGKKVKSDTIREYLYNNGYIDKDVEIEITGIDKDFTNTLANYAKFARVFDVETLTYEQEQIAEKIIFWSTVYGDSKKFLKEKIKENYGDTLSVEQIKRILDFKFKDWGRLSKQFLELEGEDKSTCEIDTIISMMWNKNYNLMELLSNNFTYLKEIEKKSNKLDKTLMQIKYEDLDELYISAPVKRMVWQTILVIKDLYKVLKKEPKKIFVEMARDVDAPKERKDSRKKKFAMLYKNCKDDGRNWSKEITDTDERDFRSKKLYLYYTQKGRCMYTGEIIELSQLFNDNLYDIDHIYPRHYVKDDSIENNLVLVKKEKNAHKSDVFPIENTIRSSRYAWWKSLKDRGFITEEKFKRLTRNYEFTSEEKAAFISRQIVETRQGTKVICNLFEKTFDKTEVIYVKAGNVSAFRQKYDLIKCREINDFHHANDAYLNIVVGNTYNVKFTKNPINFIKEYNKAPDKHPYHMYKIFDYTVKRGEEVAWNTKDNYSISIVKKMMKKNTPLITRMNYEVHGKLYKVNICSAKVAKKDVYLPIKQSNSALIDVTKYGGYTSYTGTYYFLVEHILKDKIIRTIEEIPLFLINKLKTKEQLEEYCKNELHYVNPSVRLNNIKAQSLIKVDGYYLYLTGRSNTSLMVSNGIQLKLSYIDSLYIKRLYNEYKKQTYLVDEYFNEINNIKIYDILLNKFSSNIYTNKPNSIGNKLKGLRSEFCKLSVDNQVYIIIEILKLFQKQNDGVNLKAIGLSNRSGVMTINKKINEKKEFTLINQSPTGLFEKKIDLLTV

SEQ ID NO: 20043 - protein, 1354 aa, unidentified
  REGION 1..1354: note = Cas Enzyme sequence
MYYGGIDLGTSSVGWALTDVNYNLIRQKGKDLWGVRLFDEANTSQERRIHRVSRRRRAREVARIGMVKSYFAEAIEAVDAGFYQRLEESKYHRDEKASESKYAIFADDDFTDKEYYQKYPTIYHLRKKLLESDETQDVRLVYLAVLNLFKNRGHFLNSYIAEDGKEESFSELYSVFWNSIPEELAMVFPEVIDVQKVEEILSSKVYSRTVATEKLAEVLQVSKTNNKSSYEIVKMLCGLSGKLANIFAKEVLGEVYENKNLDFRGDSYEEIIGGLSEILPGEYIDMLECAKAVHDKGVLGSILKDYTYLSQARVAIYDKHAEDLRRLRVVVKKYCPECYDDYFRVMSIDNYSGYIGSVCSGKEKIRRGGHDAKKEAYKSFWKKTTELLSTMPEDDADVMYLKGELQKDTLLPKQKTKENSVIPNQVHLKELKKILSNVEGYLPFLKDVDESGLTVKERIIRLYQFQIPYYVGPLHINAGEEGNKWVVRKENGKVLPWNLEDKVDMAETRKAFIERMVRHCTYLSGKNVLPKGSLLYERFMVLNELNNVKVNGCKLPLEVKQQVYEELFAKGKKVTLKTFCTYLYNCGVIDKVDTEMISGIDGGFNHTLTSYARFCSVFGDKMKLYKYQKMAEELIFTATVYSNDKTLMKELIAKKYGNPEDEVYISKEQEKKILGFKWMDWGRLSKEFLELKGCSKEDGIEISLIQAMWECDCNLMEALSDKFTFGIKLLDMKEGREKLLSDFTYEDLQDSYLSAPVKRMTWQTILVLKELCHVMGEAPGKLFVEMPRTEGEKGKRTASRKQQLIELYKKCKEESHDWISEIDGYTEDQLRSKKLYLYYTQQGRCMYTGNAISLGDLLSNNGRYDIDHIYPRHFVKDDSLENNLVLVEKESNAYKSDTYPIDADTRNARYRLWKSLKDDDFISEEKYKRLTRSWEFSEEELAGFINRQIVETGQATKCVAHLLEELLPETEVVYVKAGNVSDFRREMNLLKTRSVNEFHHAQDAYLNIVVGNVYNTKFTKNPINFVVNYKKDSAKYRYHMCKMFEYDVKRDAVMAWTAGEKGSIVTVKKMMGKNTPLLTKRTYEAHGGIADQTLYSAKVANANNYIPLKAMDERMGDVTKYGGFSSVSGTYYFLVEHEKKKKVVRTIEQMPLYLKDALATSEEALRQYCVNRLGLQNPIIRLMKIPMKALVKRNGYWLRIAGRTGNQLYADNAVSMCLNLHWINYIYDMERFLEFGKTEDGKHSISYERNIQLYEEILEKHLNGIFSNKPNEIGNKLNNSHSAFEKLSIKEQVKVLLELLKATQYQNLRVEAKEIDLKMSPIKISNDVLGQDEFLLINQSVTGIYTSVIDLRTV

SEQ ID NO: 20044 - protein, 1357 aa, unidentified
  REGION 1..1357: note = Cas Enzyme sequence
MGKKEYFLGLDLGTSSVGWAVTDNQYQLMRAKGKDLWGVRLFDEAETAAGRRANRVARRRRQRETARIGLLKEYFADAIAEIDSSFYERLEESKYHFEDKKIQDKYSIFADKDYTDKDYYKQYPTIYHLRMELINSTETHDVRLVYLALLNMFKHRGHFLNAGLKAEERNSGIQEGYLALTTIANEQYGLELPETVDIVQLEEVLSRKDISRSKMAEEAAGLLDISKSKNKREYEVVKGICGLAVSITTLLDVKELDENHKKVQISFRDAGYDEKLAEISQLIEEQDMELIDTIKQLHDIGLLANVMKGSRYLSEARIKDYEKHKKDLGLLKKVIRQYAPEKYDEMFREMQPGSYSAYVNSVNSDNSKPLRRNVKGRKQEDLYKSIKALLKDVDECEEKTYILREIESEAFLPKQLTASNGVIPNQVHVIEMKKILENAEGYLPFLKEKDDSGLTVSERIIELFRFQIPYYVGPLNLQHADKKEGHAWAVRKKQGKVLPWNINEMIDMKQTSEEFISNMVRRCTYISGERAVPKDSLLYQRFCVLNELNNLRIRGEKPSVELKQRIYEDLFMKGKRVTQKQLYNYLIGCGILELGEMDAISGIDKDFKNALSSYGKFAGVFEADIKLDRTKDMVEQIIFWGTVYGNDKTFLKERIRECFGDRITEEQLKRIAGFKFHDWGKLSRKFLELSGRDKSTGEVLPLISMMWERNCNLMELLSDEYTYAEELKKQSVDAEKVLGEMKYEDLDELYLSNPVKRMVWQTILILQELEGVLGGCPSRIFIEMPREDGEKGKRTDSRRQKLAELYKGCKIDGRNWVKELDRWSDQELRSKKLYLYYLQQGRCMYTGEPIDLDDLFNDNLYDIDHIYPRHFVKDDSIENNLVLVKKEENAYKSDNLIKNSIYKARRAWWRSLLTDDMQSKFITREKYNRLVNREPFSDDQLAGFISRQIVETRQGTKAVAHLFENMFPDSEVVYVKAGNVSSFRQDRKLLKCRSVNDFHHAQDAYLNIVVGNTYFVKFTKNPRNFIKEYRRNPDKNKYHLCKIFDSTVLRNGEIAWLAGEKNGNPGTIATVCKMMAKNSPLITRMNFEAHGQISEATLYGAQTAKAESYIPLKAGNSRLQDVTKYGGFGSVRVTYFFLVEHEKKGKRIRTLEAMPLYLRDKIGDDIELLNQYCEEELHLMKPDVRIARIKIQSLIRRNGYLMHISGKTNQQLTVRNAVPLCLNQVWVTYIKKLEKTVDIDYVNDAVTKEKNIELYKIMIDKHKNSIFSKKPNAIGDKLQKGLEKFISLSLLEQSNVLMQILQLTQLSNMGADLSSIGAAKKTGITFISKVISDTEEFVLINQSPAGLYESEIDLKTI

SEQ ID NO: 20045 - protein, 1358 aa, unidentified
  REGION 1..1358: note = Cas Enzyme sequence
MENQKDYYIGLDMGTNSLGWAVADTEYHLLRAKGKDLWGVRTFEEAETAVEKRTNRVSRRRRQREKARIGMVKELFSEEILKKDPGFYHRLEESKFRKEDRSDENRQPYALFADTGYTDQEYFAQYPTIFHLRKELLESTEPHDVRLVYLAVLNMFHHRGHFLNDGDMNLSDERGLQEQVDALHDLAVDANIQFPEALTASLLEEILDKKDISRTEKKEQLLARSGIEKDNKPMVELVKLLCGLSAKWSALFEELGASEMGKKSFGFRDSGLEEKLLELEKELSDESLQLLEQAKTVHDIYLLNNLRKGCTYLSQARVMEYEKHHADLKLLQSLVQKYCPKEYDNFFRKMGEDNYSAYVGSVNSKFQKARRCIERDGKPLAKADFYKSVKSLLGKMPEDDENVKQILMDMENDNFLPKQLTASNGVIPNQLHAAELKKILQNAATYLPFLNETDETGLSVKEKIEQLFSFQLPYYVGPVNTYHKGKGGTAWAVRLKQGRVLPWNLNEMVDLNESRKEFIERMVRHCTYLNDERVLPKNSLLYEKYMVLNELNNLKIRNEKPSVELKQSIYTELFMKGKKVTLRVLTDFLVARGIINKGEDAIRGIDGGFQTYLSSIGKFAGVLGERVYEWDMQKVMEDLIFWGTVYSNDKKVVGECLDEKYPGLFSAQEKKRILGFKFKDWGRLSKAFLELEGTSKADGEVMTIIRRLWESNDNLMQLLSDEYTYQEELNKRMSSIYGSIDEMEYEDLNGMYLSAPVKRMVWQTILVLKDLRKVLPNEPKRIFVEMARGEDKKKERKLSRKQKFLDLYKDCATEEKWLLDKLESTSEAQLRSKKLYLYYLQKGRDLYTGDVIELEDLFADNLYDIDHIYPRHFVKDDNIDNNLVLVKKEKNAHKSDHYPLEADIQKKQYGLWKSLHDAGFMNDEKFHRLTRREEFSDGELTGFIARQLVETHQGTKIMTQILREAFPNTEIVFPKGGNVSEFRKKFDLLKVRNVNDFHHAHDAYLNIVVGNLYYLKFTRNPANFIRSYRENNTKYNYNLGKMFERDVIRGEEVAWIAPKDENNNTGTIATVKNVLKKNTPLMTRMTMEGHGGIAKQTVYSAKKAKLENYLPLKTADPRLRDVTKYGGVSNITTAYFFAVEHTKGKKRIRTIEMVPIYLKPYVEKSEEQMLAYCEEMLGLKEPRICVKKINLQSLIKVDGYFLNITGRSEKRLTVRNAVPLCLRQEWMNYVKLLNGLEEKNLKASEVPEITREKNIELFEILCEKHKNGIYSKKPVSITEKIPLWSEIFKNAGIEAQIEAILELLKLTECACNAMNAEQLKFKASTMKVGNNISSTDEFLLINQSPSGLFEDVIDLKTV

SEQ ID NO: 20046 - protein, 1343 aa, unidentified
  REGION 1..1343: note = Cas Enzyme sequence
MKKEYFIGIDMGTSTVGWAAVDTEYHLLRAKGKDLWGIREFDEAKNAAERRTKRISRRRREREVARLGLLKEMFHDEISKVDPGFFERLNESMYNPEEKRVQSKYSLFADKLYSDVDYYKEFPTVFHLRKALIEGTAKKDVRLVYLAIANMFHHRGHFLSAGLSMDGRIESVGEVYKNFAELAFRIEANFDFSLEIDEHELERILSDKNTSRTQKTLQLADFFGVDKKDKATYEVLKAVAGQSFKPCLILNDPELNDEELKKLSFSFKDDVTEPMEKLEASIDPEYMELFYQMKKLHDAGLLSNIMRGQNYLSFARVNEYEKHKEDLRILKDYIGKYLPDHYDEMFREMKDGNYSAYVGSTNDGEKKRRNVKGNKRDDLYDTIKKLLKNSPEHIQKDYILSEIEKETFLPKQLTSANGVIPNQVHATELKAILNAAEKDFEFLREKDETGFNVSEKILKLFTFQIPYYVGPLNGKSSHAWVERSYDEKVYPWNFEKVVDTRKTSEKFIERMVRHCTYLKGERVLPKTSLLYERFMVLNELNNLKVNEEKITVEQKQMIFNDLFLSGKKVTGTRLTNYIIDQGWMDKNSTISGFDGDFKNTMTSYGKLYGIFGEDLKKDSVRKMAEDIIFWGTIYGDDKKFYASVLDEHLSDVLGKKELQRLKGMKFKDWGNLSREFLELSGCSKEDGELLPLIEMMWNTNYNLMELMSERFTYRDELKKRVEETRNHLKDFGIEDLEGMYLSAPVKRMVWQTYLVLKEVTDVIGYAPKRIFVEMTRNDGEKNTRTVSRKKQLEELYKACKKDEFAKELYEELKGTDERSLRQKKLYLYYTQKGRCMYTGEVIELSDLMNQNLYDIDHIYPRHFVKDDSIHNNLVLVRKEVNNHKQDRYPIEDSIFYSQKDMWKSLYDQKFITAEKYKRLTSRTPFTEEQMAGFINRQLVETAQGTKALAETMKNLFDSTEIVYVKSGLVADFRHDTKMYKSRLVNDFHHAQDAYLNVVVGNTYHIKFTKDPKNFIHSYLQNTENEKYHMDKVFRYDVSRNGETAWIARGENKTIKTVETVMKRNTPLLTRMNFEAHGAFYDETRYGKDAAKEDTYVPLKTNDERLKDILKYGGFNKAAGAYFFLVEHTEKKKRIRTLEVMPIYLKNKYGYSKEAMELYCKEELGLVDPDVRITKIKYQSLLKINGYLVHLSGKSGNKLVLRNAVSMILDHRWINYSKKLENISEKGYVEKEITAENNVEFYRILTNKMTQSIFAKRPNYMGEKLQKRMEDFVRLNIEDQAKVLLQILNLTKIGTVKADLTTIGESANAGVMTSAKKISECQQFSLIHQSSAGLFETEIDLLTV

SEQ ID NO: 20047 - protein, 1374 aa, unidentified
  REGION 1..1374: note = Cas Enzyme sequence
MGTEKTYYLGLDMGTNSLGWAVTDQNYHILRAKGKDLWGVRLFDEASTSVERRNFRVSRRRRQREVARIGVLRELFSDEIEKIDPGFFLRLDESKFFVEDRSENNKQKYGLFADKLFSDVEYYEKYPTIFHLRKELIESSEPHDVRLVYLALVNMFKHRGHFLNSSLGIEGKNGSIGEAYQTFVQTAKEMEVEFPEGLSDKCLEEILSSSDSRKKKSERLFAELGLTKKQKREGQLVNLMCGLKGRLSDLFPYKEYDEEHKKLAFSFQDSDYEEKEIMLQEILDEDEVELIQAVKEIHDSGMLAGIMKGYSYLSMARVASYEKHKTDLKVLKFVLKKYNAKEYFEMFRNENAKTGSYSAYIGSVNYHGTYRRGLDGGKQEDLYKRIKKTVEKFPQNDAEVRYILSEIEKENFLPKQLTASNGVIPNQVHAREMKAVLWQAQQYLPFLQEKDERGLSVSDKILQLFMFQIPYYVGPLGQQYKDEKGYNVWAERKEAGKVYPWNFTEKIDTKKSAEKFIQRMVRHCTYLSGETALPKQSLVYEKYQVLNELNNLRIRGERISVSLKQELYHELFETGKKVSMNRLTNYLIQNGIIEKEEKEIAISGIDSGFQNSLSSLGKFKGVFGEAVYSDEYKKMMEDIIFWGTVYGDGRKLLKEKVEETYGTQLSDAQKKRIYGFKFSGWGRLSKEFLTMSGASKEDGEIKGLLQAMWDTNCNLMELLSDRFTYRDTLNEMVETAEKPLSEWTIEDLDEMYLSAPVKRMVWQTIRVVEELQRVLGCPPKRIFIEMTRLGGEKGKRTISRQKKLLELYKALGKEGKSWSEELNGTSDNRLRIKKLYLYYLQMGKCMYTGENIELDQLMNDNLYDIDHIYPRHFIKDDNIGNNLVLVKKEKNAHKSDSFPIENEIRTKMMPYWKMLREKGFLTEEKYNRLTRKTAFSDEEKATFISRQLVETSQGTKAITQIFRQAFSDSEIVFSKASVVSDFRKKFNCYKVRCVNNYHHAHDAYLNIVVGNTYRVKFTVNPLNFVKEAKKNPNSDENRYNMDRIFDWNVRRNGEVAWIAQTKENPGSIQTVKKYLGKNSPLMTRMAHEKHGGLTQKATIWSARKAVSGNTDAYIPVKMKDARLADVTKYGGATSIAVAGYTLVEYEVAGKMVRSLEALPIYLGGSDKLTEEQMVEYFTKILQMENKKKQVTNVRICKKMIPSGSLIKYNGFYYYLAGKTGNQIVILSAVQLCLSAEQIIYAKKIEKACVSGDFEEKDKHGKMIISKEKNQKMYDLFIQKYKDSIFSKKNGSIGSTIMNGRTVFIEISVENQCKVLQQVFLNFQSGIGVDLTTIGGSNRSGITYLNKKVSNVEELKLIDQSVTGIFSSEMNLLTI

SEQ ID NO: 20048 - protein, 1248 aa, unidentified
  REGION 1..1248: note = Cas Enzyme sequence
FHLRKELLESEEPHDVRLVYLALLNMFKHRGHFLNSSLQIEGENSNIAESYQMFVDTLKDEELDFPEQVSGERLQEIFRSSDSRKKKVENLLAEMNLSKKQKREIQFVNLICGLKGKLSELFPDKEYDEEQKKLAFSFRDSDYEDKENTIQELLDESEMNMIYAVKAVHDSGVLSGIMNGERYLSVARVASYEKHKKDLQILKDVLKKYDTKEYFEMFRNESAKSESYSAYVGSVKYHGTFRRGLSGGKQEDLYKHIKKVLGKFPQDDEGVTYILEEIETESFLPKQLTASNGVIPNQVHAREMLAILKHAELYLPFLQEKDDTGLSVSEKILKLFMFQIPYYVGPLGQEYKDKKGYNVWAERKEPGKIYPWNFEEKIDVKKSAEKFIGRMVRRCTYLSGEQALPKQSLLYEKFRVLNELNNLRIRGEKIPVSLKQEIYHDLFGDGKKVSMTRLTNYLLQNGVISSEEKDSCISGIDGGFHNSLSSVGKFKGVFGDTVHTDEHRKMIEDIIFWGTVFGDGKKLLKEKVEEVYGNQLTEAQKKRIFGFKFSGWGRLSKAFLTMEGASKDDEEIKGLIQAMWDTNCNLMELLSDRFTYKDKLNEMVTTAEKPLCEWKIEDLDEMYLSAPVKRMVWQTIRVVDEVQQIMGCPPKRIFVEMTRSDGEKGKRTVSRQKKLVDLYKALGKEGKTWSEELNNTPEGQFRIKKLYLYYLQMGKCMYTGESIELEPLMNDNHLYDIDHIYPRHFIKDDNISNNLVLVKKERNAHKSDSFPIEPEIRNKMMPFWKSLRKKGFLTEEKYNRLTRMSAFTDEEKAAFISRQLVETSQGTKAITQIFEQAFANSEIVFSKASVVSAFRQKFDCYKVRCVNNYHHAHDAYLNIVAGNTYRVKFTSNPLNFIKEAKKNPNSRENRYNMDKIFEWDVTRNGETAWVAQTKEHPGTIQLVKKYLNKNSPLITKLAHEKHGGITQKVTIFSAKKAESGNTDAYIPVKMNDPRLADVTKYGGLMSVAVAGYTLVEYKVAGKTVRSLEALPIYLGGSKNLTEEQMVEYFSNVLQQENKKKVVSDVNIRKKMIPMGALIKYNGFYYYLGGKTNADMYIRDAVQVCFAPKDMEYIKKVDKAVSNNDYSEKDNGVGTTVLTKEKNVSLYKNICEKYALTIFKKKKGTIKTIVQKGKEVFEHDLTIEEQCIVLRNLMLNFQTGDSVDLHLIKGSAATGTMQLNKKVSNAEELKLIDQSVTGVFSREIDLLTI

SEQ ID NO: 20049 - protein, 1240 aa, unidentified
  REGION 1..1240: note = Cas Enzyme sequence
LLESEEPHDVRLVYLALLNMFKHRGHFLNSSLQIEGENSNIAESYQMFVDTLKDEELDFPEQVSGERLQEIFRSSDSRKKKVENLLAEMNLSKKQKREIQFVNLICGLKGKLSELFPDKEYDEEQKKIAFSFQDSDYEDKENTIQELLDESEMNMIYAVKAVHDSGVLSGIMNGERYLSVARVASYEKHKKDLQILKDILKKYDTKEYFEMFRNESAKSENYSAYVGSVKYHGTFRRGLSGGKQEDLYKHIKKVLGKFPQDDEGVTYVLEEIETESFLPKQLTASNGVIPNQVHAREMLAILKHAELYLPFLQEKDDTGLSVSEKILKLFMFQIPYYVGPLGQEYKDKKGYNVWAERKEPGKIYPWNFEEKIDVKKSAEKFIGRMVRRCTYLSGEQALPKQSLLYEKFQVLNELNNLRIRGEKIPVSLKQEIYHDLFGDGKKVSMTRLTNYLLQNGVISSEEKDSCISGIDGGFHNSLSSVGKFKGVFGDTVHTDEHRKMIEDIIFWGTVFGDGKKLLKEKVEEVYGNQLTEAQKKRIFGFKFSGWGRLSKAFLTMEGASKDNGEIKGLIQAMWDTNCNLMELLSERFTYKDKLNEMVTTAEKPLCEWKIEDLDEMYLSAPVKRMVWQTIRVVDEVQQIMGCPPKRIFVEMTRSDGEKGKRTVSRQKKLVDLYKALGKEGKIWSEELNNTPEGQFRIKKLYLYYLQMGKCMYTGESIELEPLMNDNHLYDIDHIYPRHFIKDDNISNNLVLVKKERNAHKSDSFPIEPEIRNKMMPFWKSLRKKGFLTEEKYNRLTRMSAFTDEEKAAFISRQLVETSQGTKAITQIFKQAFADSEIVFSKASVVSAFRQKFDCYKVRCVNDYHHAHDAYLNIVAGNTYRVKFTSNPLNFIKEAKKNPNSRENRYNMDKTFEWDVMRNGETAWVAQSNENPGTIQLVKKYLNKNSPLITKMVYEKHGGITQKATIWSAKKAESGNTDAYIPVKMNDPRLADVTKYGGVATIAVAGYTLLEYKAGGKTVRSLEALPIYLGGSKNLTEEQMVEYFSNILQQENKEKVVSDVIIRKKMIPSGSLIKYNGFYYYLAGKTGNRIVLISAVQLCLPMDTMLYIKKIEKACSTGNFEEKDKNGKQVLSKQQNEFVYELIIEKYQQSIFKKKVGAIGDTIIEKREKFAEISLEEQCKVLMQIFLNFQSGIGVDLTSVDGSNKSGVTYLNKKIMNAQELKLIDQSVTGVFSREIDLLTI

SEQ ID NO: 20050 - protein, 1131 aa, unidentified
  REGION 1..1131: note = Cas Enzyme sequence
LSELFPDKEYDEEQKKIAFSFQDSDYEDKENTIQELLDESEMNMIYAVKAVHDSGVLSGIMNGERYLSVARVASYEKHKKDLQILKDVLKKYDTKEFFEMFRNESAKSESYSAYVGSVKYHGTFRRGLSGGKQEDLYKHIKKVLGKFPQDDEGVTYILEEIETESFLPKQLTASNGVIPNQVHAREMLAILKHAELYLPFLQEKDDTGLSVSEKILKLFMFQIPYYVGPLGQEYKDKKGYNVWAERKEPGKIYPWNFEEKIDVKKSAEKFIGRMVRRCTYLSGEQALPKQSLLYEKFQVLNELNNLRIRGEKIPVSLKQEIYHDLFGDGKKVSMTRLTNYLLQNGVISSEEKDSCISGIDGGFHNSLSSVGKFKGVFGDTVHSDEHRKMIEDIIFWGTVFGDGKKLLKEKVEEIYGNQLTEAQKKRIFGFKFSGWGRLSKAFLTMEGASKDDREIKGLIQAMWDTNCNLMELLSERFTYKDKLNEMVTTAEKPLCEWKIEDLDEMYLSAPVKRMVWQTIRVVDEVQQIMGCPPKRIFVEMTRSDGEKGKRTVSRQKKLVDLYKALGKEGKIWSEELNNTPEGQFRIKKLYLYYLQMGKCMYTGESIELEPLMNDNHLYDIDHIYPRHFIKDDNISNNLVLVKKERNAHKSDSFPIEPEIRNKMMPFWKSLRKKGFLTEEKYNRLTRMSAFTDEEKAAFISRQLVETSQGTKAITQIFEQAFANSEIVFSKASVVSAFRQKFDCYKVRCVNNYHHAHDAYLNIVAGNTYRVKFTSNPLNFVKEAKKNPNSRENRYNMDKIFEWDVTRNGETAWVAQTKENPGTIQLVKKYLNKNSPLITKLAHEKHGGITQKVTIFSAKKAESGNTDAYIPVKMNDPRLSDVTKYGGVTTIAVAGYTLLEYKAGGKTVRSLEALPIYLGGSKNLTEEQMVEYFSNVLQQENKKKVVSDVNIRKKMIPMGALIKYNGFYYYLGGKTNADMYIRDAVQVCFAPKDMEYIKKVDKAVSNNDYSEKDNGVGTTVLTKEKNVSLYKNICEKYALTIFKKKKGTIKTIVQKGKEVFEHDLTIEEQCIVLRNLILNFQTGDSVDLHLIKGSAATGTMKLNKKVSNAEELKLIDQSVTGVFSREIDLLTI

SEQ ID NO: 20051 - protein, 1374 aa, unidentified
  REGION 1..1374: note = Cas Enzyme sequence
METKFTYYLGLDMGTDSLGWAVTDSSYHILRAKGKDLWGVRLFPSAETSVERRTYRVNRRRRQREVARIGALKELFADEIEKVDPGFFVRLDESKFHMEDRSENNKQKYGLFADKLFSDAGYYKKYPTIFHLRKELLESEEPHDVRLVYLALLNMFKHRGHFLNSSLQIEGENSNIAESYQMFVDTLTDEDLDFPEQVSGERLQEIFRSSDSRKKKVENLLAEMNLSKKQKREIQFVNLICGLKGKLSELFPDKEYDEEQKKIAFSFQDSDYEDKENTIQELLDESEMNMIYAVKAVHDSGVLSGIMNGERYLSVARVASYEKHKKDLQILKDILKKYDTKEYFEMFRNESAKSESYSAYVGSVKYHGTFRRGLSGGKQEDLYKHIKKVLGKFPQDDEGVTYILEEIETESFLPKQLTASNGVIPNQVHAREMLAILKHAELYLPFLQEKDDTGLSVSEKILKLFMFQIPYYVGPLGQEYKDKKGYNVWAERKASGKIYPWNFEDKIDVKKSAEKFIGRMVRRCTYLSGEQALPKQSLLYEKFQVLNELNNLRIRGEKIPVSLKQEIYHDLFGDGKKVSMTRLTNYLLQNGVISGEEKDSCISGIDGGFHNSLSSVGKFKGVFGDTVHTDEHRKMIEDIIFWGTVFGDGKKLLKEKVEEVYGNQLTEAQKKRIFGFKFSSWGRLSKAFLTMEGASKDDGEIKGLIQAMWDTNCNLMELLSDRFTYKDKLNEMVTTAEKPLCEWKIEDLDEMYLSAPVKRMVWQTIRVVDEVQQIIGCPPKRIFVEMTRSDGEKGKRTVSRQKKLVDLYKALGKEGKTWSEELSDTPESQFRIKKLYLYYLQMGKCMYTGEAIELEQLMNDNLYDIDHIYPRHFIKDDNISNNLVLVKKEKNAHKSDSFPIEPEIRNKMMPFWKSLRKKGFLTEEKYNRLTRMSAFTDEEKAAFIGRQLVETSQGTKAITQIFEQAFANSEIVFSKASVVSAFRQKFDCYKVRCVNNYHHAHDAYLNIVAGNTYRVKFTSNPLNFIKEAKKNPNSRENRYNMDKIFEWDVTRNGETAWVAQTKEHPGTIQLVKKYLNKNSPLITKMVYEKHGGITQKATIWSAKKAESGNTDAYIPVKMNDPRLADVTKYGGVTTIAVAGYTLLEYKAGGKTVRSLEALPIYLGGSKKLTEEQMVEYFSNVLQQENKEKVVLDVIIRKKMIPSGSLIKYNGFYYYLAGKTGDRIILISAVQLCLPMDTMLYIKKIEKACSTGNFEEKDKNGKQVLSKQQNEFVYELIIQKYQQSIFKKKVGAIGDTIIEKREKFAEISLEEQCKVLMQIFLNFQSGIGVELKIIEGGKKSGVTYLNKKVMNVQELKLIDQSVTGVFSREIDLLTI

SEQ ID NO: 20052 - protein, 1229 aa, unidentified
  REGION 1..1229: note = Cas Enzyme sequence
YLALLNMFKHRGHFLNSSLQIEGENSNIAEAYQMFVDTLKDEELDFPEQVSGERLQEIFRSSDSRKKKVENLLAEMNLSKKQKREIQFVNLICGLKGKLSELFPDKEYDEEQKKIAFSFQDSDYEDKENTIQELLDESEMNMIYAVKAVHDSGVLSGIMNGERYLSVARVASYEKHKKDLQILKDVLKKYDIKEYFEMFRNESAKSESYSAYVGSVKYHGTFRRGLSGGKQEDLYKHIKKVLGKFPQDDEGVTYILEEIETESFLPKQLTASNGVIPNQVHAREMLAILKHAELYLPFLQKKDDTGLSVSEKILKLFMFQIPYYVGPLGQEYKDKKGYNVWAERKEPGKIYPWNFEEKIDVKKSAEKFIGRMVRRCTYLSGEQALPKQSLLYEKFQVLNELNNLRIRGEKIPVSLKQEIYHDLFGDGKKVSMTRLTNYLLQNGVISSEEKDSCISGIDGGFHNSLSSVGKFKGVFGDTVHTDEHRKMIEDIIFWGTVFGDGKKLLKEKVEEIYGNQLTEAQKKRIFGFKFSGWGRLSKAFLTMEGASKDDREIKGLIQAMWDTNCNLMELLSERFTYKDKLNEMVTTAEKPLCEWKIEDLDEMYLSAPVKRMVWQTIRVVDEVQQIMGCPPKRIFVEMTRSDGEKGKRTVSRQKKLVDLYKALGKEGKIWSEELNNTPEGQFRIKKLYLYYLQMGKCMYTGESIELEPLMNDNHLYDIDHIYPRHFIKDDNISNNLVLVKKERNAHKSDSFPIEPEIRNKMMPFWKSLRKKGFLTEEKYNRLTRMSAFTDEEKAAFISRQLVETSQGTKAITQIFEQAFANSEIVFSKASVVSAFRQKFDCYKVRCVNNYHHAHDAYLNIVAGNTYRVKFTSNPLNFIKEAKKNPNSRENRYNMDKIFEWDVTRNGETAWVAQTKENPGTIQLVKKYLNKNSPLITKLAHEKHGGITQKVTIFSAKKAESGNTDAYIPVKMNDPRLSDVTKYGGVTTIAVAGYTLLEYKAGGKTVRSLEALPIYLGGSKNLTEEQMVEYFSNVLQQENKKKVVSDVNIRKKMIPMGALIKYNGFYYYLGGKTNADMYIRDAVQVCFAPKDMEYIKKVDKAVSNNDYSEKDNGVGTTVLTKEKNVSLYKNICEKYALTIFKKKKGTIKTIVQKGKEVFEHDLTIEEQCIVLRNLMLNFQTGDSVDLHLIKGSAATGTMKLNKKVSNAEELKLIDQSVTGVFSREIDLLTI

SEQ ID NO: 20053 - protein, 1374 aa, unidentified
  REGION 1..1374: note = Cas Enzyme sequence
METKFTYYLGLDMGTDSLGWAVTDSSYHILRAKGKDLWGVRLFPAAETSVDRRTYRVNRRRRQREVARIGALKELFADEIEKVDPGFFVRLDESKFHMEDRSENNKQKYGLFADKLFSDAEYYKKYPTIFHLRKELLESEEPHDVRLVYLALLNMFKHRGHFLNSSLQIEGENSNIAESYQMFVDTLKDEELDFPEQVSGERLQEIFRSSDSRKKKVENLLAEMNLSKKQKREIQFVNLICGLKGKLSELFPDKEYDEEQKKIAFSFRDSDYEDKENTIQELLDESEMNMIYAVKAVHDSGVLSGIMNGERYLSVARVASYEKHKKDLQILKDVLKKYDTKEYFEMFRNESAKSESYSAYVGSVKYHGTFRRGLSGGKQEDLYKHIKKVLEKFPQDDEGVTYILEEIETESFLPKQLTASNGVIPNQVHAREMLAILKHAELHLPFLQEKDDTGLSVSEKILKLFMFQIPYYVGPLGQEYKDKKGYNVWAERKEPGKIYPWNFEEKIDVKKSAEKFVGRMVRRCTYLSEEQALPKQSLLYEKFQVLNELNNLRIRGEKIPVSLKQEIYHDLFGDGKKVSMTRLTNYLLQNGVISGEEKDSCISGIDGGFHNSLSSVGKFKGVFGDTVHTDEHRKMIEDIIFWGTVFGDGKKLLKEKVEEVYGNQLTEAQKKRIFGFKFSGWGRLSKAFLTMEGASKDDGEIKGLIQAMWDTNCNLMELLSDRFTYKDKLNEMVTTAEKPLCEWEIEDLDEMYLSAPVKRMVWQTIRVVDEVQQIMGCPPKRIFVEMTRSDGEKGKRTVSRQKKLIDLYKALGKEGKNWSEKLSHTSESQFRIKKLYLYYLQMGKCMYTGETIELDQLMNDNLYDIDHIYPRHFIKDDNISNNLVLVKKEKNAHKSDSFPIEPEIRNRMMPFWKSLRKKGFLSEEKYNRLTRMSAFTDEEKAAFISRQLVETSQGTKAITQIFKQAFSDSEIVFSKASVVSAFRQKFDCYKVRCVNDYHHAHDAYLNIVAGNTYRVKFTSNPLNFIKEAKKNPDKKENRYNMDKIFEWDVTRNGETAWVAQSNENPGTIQLVKKYLNKNSPLITKMVYEKHGGITQKATIWSAKKAESGNTDAYIPVKMNDPRLADVTKYGGVTTIAIAGYTLLEYKAAGKTVRSLEALPIYLGGSKNLTEEQMMEYFSNVLQQENKKKVVSDVKIRKKMIPGGSLIKYNGFYYYLAGKTGNQIILISAVQLCLPMDTMLYIKKIEKACSIGNFEEKDKNGKQVLSKQQNEFVYEFIIQKYQQSIFKKKIGAMGVTIIEKREKFAEISLEKQCKVLMQIFLNFQSGIGVDLNLLKGGNRAGITLFSKKISNAEEIKLIYQSVTGVFSREIDLLTI

SEQ ID NO: 20054 - protein, 1376 aa, unidentified
  REGION 1..1376: note = Cas Enzyme sequence
METKFTYYLGLDMGTDSLGWAVTDSSYHILRAKGKDLWGVRLFPAAETSVDRRTYRVNRRRRQREVARIGALKELFADEIEKVDPGFFIRLDESKFHMEDRSENNKQKYGLFADKLFSDAEYYKKYPTIFHLRKELLESEEPHDVRLVYLALLNMFKHRGHFLNSSLQIEGENSNIAESYQMFVDTLKDEELDFPEQVSGERLQEIFRSSDSRKKKVENLLAEMNLSKKQKREIQFVNLICGLKGKLSELFPDKEYDEEQKKIAFSFRDSDYEDKENTIQELLDESEMNMIYAVKAVHDSGVLSGIMNGERYLSVARVASYEKHKKDLQILKDILRKYDTKEYFEMFRNESAKSESYSAYVGSVKYHGTFRRGLSGGKQEDLYKHIKIVLGKFPQDDEGVAYILEEIEAESFLPKQLTASNGVIPNQVHAREMLAILKHAELYLPFLKKKDDTGLSVSEKILKLFMFQIPYYVGPLGQEYKDKKGYNVWAERKASGKIYPWNFEDKIDVKKSAEKFIGRMVRRCTYLSGEQALPKQSLLYEKFQVLNELNNLRIRGEKIPVSLKQEIYHDLFGDGKKVSMTRLTNYLLQNGVISSEEKDSCISGIDGGFHNSLSSVGKFKGVFGDTVQTDEHRKMIEDIIFWGTVFGDGKKLLKEKVEEVYGNQLTEAQKKRIFGFKFSGWGRLSKAFLTMEGASKDDGEIKGLIQAMWDTNCNLMELLSDRFTYKDKLNEMVTTAEKPLCEWKIEDLDEMYLSAPVKRMVWQTIRVVDEVQQIMGCPPKRIFVEMTRSDGEKGKRTVSRQKKLVDLYKALGKEGKTWSEELNNTPESQFRIKKLYLYYLQMGKCMYTGEAIELEQLMNDNLYDIDHIYPRHFIKDDNIGNNLVLVKKEKNAHKSDSFPIEPEIRNKMMPFWKSLRKKGFLSEEKYNRLTRMSAFTDEEKAAFISRQLVETSQGTKAITQIFEQAFTNSEIVFSKASVVSAFRQKFDCYKVRCVNNYHHAHDAYLNIVAGNTYRVKFTSNPLNFIKEAKKNPNSRENRYNMDKIFEWDVTRNGETAWVAQTKENPGTIQLVKKYLNKNSPLITKLAHEKHGGITQKVTIFSAKKAESGNTDAYIPVKMNDPRLSDVTKYGGVTTIAVAGYTLLEYKAGGKTVRSLEALPIYLGGSKNLTEEQMVEYFSNVLQQENKKKVVSDVNIRKKMIPMGALIKYNGFYYYLGGKTNADMYIRDAVQVCFAPKDMEYIKKVDKAVSNNDYSEKDNGVGTTVLTKEKNVSLYKNICEKYALTIFKKKKGTIKTIVQKGKEVFEHDLTIEEQCIVLRNLMLNFQTGDSVDLHLIKGSAATGTMKLNKKVSNAEELKLIDQSVTGVFSREIDLLTI

SEQ ID NO: 20055 - protein, 1348 aa, unidentified
  REGION 1..1348: note = Cas Enzyme sequence
MEQNYYLGLDMGTSSLGWAVTDEKYQLLRKKGKDLWGVRLFSEAETAAARRSHRVSRRRREREKARIAYLKEVFAEEINKKDPGFFQRLEDSKYYEEDKREHQPFALFADSGYTDKEYYKDFPTIFHLRKALLEADKDGKEYDVRLVYLAILNMFKHRGHFLNATLDEKSGGNLDEYIDKLYKDLYEYFDIKKIDISEIKNILSSKDLSNTGRLESLLDIFELSKGKNKRETEIFKLVCGLKGKLSKIFGEDSFSEELVNFSMSFRDSNYDEEIITLEDNLSEEYFEMVMNLKQIHDWSVLENIMNGQAYISQARVLAYEKHEKDLKILKSFFKKNSMTEYNKMFRQMNDNNYSSYVGSVNYKNESIRRGSKCNSEEFFKSILKAIKEWDDCEEKIYIEDEIEKGTFLPKQITTSNGVIPNQVHKKELKKILTNAEIYLPFLSSKDESGLTVSERIVEMFSFQIPYYVGPISYSLDEKATTHRNNVWSVRKESGRVYPWNFEKKIDIKKSSENFISNLINHCTYLNGESVLPKNSLLYEKFMVLNELNNLKVNEQKISVETKQDIYNKLFKKGKKVTAKAIVKYLKENGLVDNSDEPALTGIDGDFTNRLANYKKFLEIFETDTLTYEQEQIAENIIYYSTIYGDSKKFLEERIRELYGEVLNEKQIKRILGLKFKDWGRFSRELLELAGKDKNKDKVCSIISKMWNDNYNFMELMSKARFTYVDEIEKRTKKIEKTLSDIQYEDLEELYISAPVKRMIWQTVLVLKELVEIIGYPPERIFVEMTRYTGAKERKDSRKSNLLSLYDNCKKEERDWKKEIKSRETSTYRSDKLYLYYTQKGKCMYCGEQIELENLFDKNLYDKDHIYPRHFVKDDSVQNNLVLSHKECNGEKEDIFPIKSSIRIAMRGMWNYLREGGFITQEKYNRLIRSEEFTDEELSNFIARQIVETGQGTKIITNILKQTFKQTDIVYVKPMNVTDFRHKFELLKCREVNEFHHAHDAYLNIVVGNVYYTKFTSNPMNFIKDYKKNPEKYRYHMDHMFKYPVARNGKTAWITKGGESIKMVRSAMNKNTPLVTRMNYEKHSRKKGGITDQNICSAKKAKVNSYLPIKTTEERLKNVERYGGYGSITIKYFFLVEHRKGKKKIRTIEGYPAYLNDSIENLEEYCVKVLGYEMPEIKLAKIKIKSLFKINGFYYYLNAKSGNRIVWGNAVQLKMGQEDVEYIRKLSKVNEEYISEQITCEKNVELYEKLVKKYSEGVYSKRAHAVTESLAKAKNKFEMLSIKDQVRVLLEMVNYSKDSVSKINLSKLGLSANAGECKINKEISVFEECKLINQSVTGLYENEIDLLTV

SEQ ID NO: 20056 - protein, 1323 aa, unidentified
  REGION 1..1323: note = Cas Enzyme sequence
MKNNGNNLQQGNYYLGLDVGTSSVGWAVTDTEYNVLKFKGKSMWGARLFDEASTAEDRRIHRGNRRRLARRKYRLLLLEQLFEKEIRKIDDNFFVRLHESNLWADDKSKPSKFLLFNDTNFTDKDYLKKYPTIYHLRRDLIHNPTEHDIRLVFLALHHLIKYRGHFIYDNSANGDVKTLDEAVTDFEEYLNENDIEFEIENKKEFINVLSDKHLTKKEKKISLKKLYGEITDSENINISVLIEMLSGSSISLSNLFKDIEFDGKQNLSLDSDIEETLNDVVDILGDNIDLLIHAKEVYDIAVLTSSLGKHKYLCDAKVELFEKNKKDLMILKKYIKKNHPEDYKKIFSSPTEKKNYAAYSQTNSENVCSQEEFCLFIKPYIKDMAKSENEDEVRIAKEVEDKSFLTKLKGTNNSVVPYQIHERELNQILKNIVGYLPFMNDEQDDISVADKIKLIFKFKIPYYVGPLNTKSTRSWVYRSDEKIYPWNFSNVVDLDKTAHEFMNRLIGRCTYTNDPVLPMDSLLYSKYNVLNEINPIKVNGKAIPVEVKQAIYTDLFENSKKKVTRKSIYIYLLKNGYIEKEDIISGVDIEIKAKLKSHHDFAQIMEENKCTPDEIEKIIKGILVYSDDKSMLRRWLKNNIKGLSDNDIKYLAKLNYKEWGRLSKTLLTDIYTINPEDGEACNILDIMWNTNATLMEILNNKKYQFKQNIEDYKAENYDVKQSLHEELDDMYISPAVRRSIWQALRIVDEIVDIKKSAPKKIFIEMAREKKSAMKKKRTESRKDALLELYKSCKSQADSFYDEELFEKLSNESNSRLRRDQLYLYYTQMGRSMYSGKRIDFDKLINDKNTYDVDHIYPRSKIKDDSITNRVLVEKDINGEKTDIYPISEDIRQKMQPFWKILKEKGLINEEKYKRLTRNYELTDDELSSFVARQLVETQQSTKALATLLQKEYPSAKIVYSKAVNVSEFRNRKDKELPKFREINDLHHAKDAYLNIVVGNVYDTKFTEKFFLNIRNENYSLKRVFDFNVAGAWDAKGSTFDTVKKYMAKNNPIVTFAPYEVKGELFDQQIVPKGKGQFPIKQGKDIEKYGGYNKLSGAFLFAVEYDGKKSRERSLETVFVKDIDFYKENPKKYCEQILGLSNVKIINHRILLGSLLNINGDKRIIKGRTGDRYVCQHVYQLVINDEYSKYLKDIAKYLQEPNDKNMERAVNLGISKDTNIKIYTIFKNKLLDTPYNRVLGSLSNAIRENEGHFKSMDLLDQCSILLQVLASFRCTREISNLEKLNGKKQVGTIYLSQKLPSNGTFVLVHQSVTGLFEKEVDLLK

SEQ ID NO: 20057 - protein, 1323 aa, unidentified
  REGION 1..1323: note = Cas Enzyme sequence
MKNNGNNLQQGNYYLGLDVGTSSVGWAVTDTDYNVLKFRGKSMWGARLFDEASTAEERRTHRGNRRRLARRKYRLLLLEQIFEKEIRKIDDNFFVRLHESNLWADDKSKPSKFLLFNDTNFTDKDYLKKYPTIYHLRSDLIHNSTEHDIRLVFLALHHLIKYRGHFIYDNSANGDVKTLEEAVTDFERYLNENDIEFKIENKKEFIDVLSDKHLTKKEKKTKLKKLYGDITDSEIINISVLIEMLSGSSISLSNLFKDIEIDGKQKLSLDSDIEETLNDVVDILGDNIDLLIHAKEVYDIAVLTSSLGKHKYLCDAKVELFEKNKKDLMILKKYIKKNHPEDYKKIFSSPTEKKNYAAYSQTNSENVCSQEEFCLFIKPYIKDMAKSENEDEVRIAKEVEDKSFLTKLKGTNNSVVPYQIHERELNQILKNIVGYLPFMNDKQEEISVVDKIKLIFKFKIPYYVGPLNTKSTRSWVYRSDEKIYPWNFSNVVDLDKTAHEFMNRLIGRCTYTNDPVLPMDSLLYSKYNVLNEINPIKVNGKAIPVEVKQAIYTDLFENSKKKVTRKSIYIYLLKNGYIEKEDIISGVDIEIKAKLKSHHDFAQIMEENKCTPDEIEKIIKGILVYSDDKSMLRRWLKNNIKGLSDNDIKYLAKLNYKEWGRLSKTLLTDIYTINPEDGEACNILDIMWNTNATLMEILNNKKYQFKQSIEEYKAENYDVKQSLHEELDDMYISPAARRSIWQALRIVDEIVDIKKSAPKKIFIEMAREKKSAMKKKRTESRKDALLALYKSCKSQADGFYDEELFEKLSNESNSRLRRDQLYLYYTQMGRSMYSGKRIDFDKLINDKNTYDIDHIYPRSKIKDDSITNRVLVEKDINGEKTDIYPISEDIRQKMQPFWKILKEKGLISEEKYKRLSRNYELTDDELSSFVARQLVETQQSTKALATLLQKEYPSAKIVYSKAGNVSEFRNRKGKELPKFREINDLHHAKDAYLNIVVGNVYDTKFTEKFFKNIRNENYSLKRVFDFNVAGAWDAKGSTFDTVKKYMAKNNPIITFTPYEVKGELFDQQIVPKGKGQFPIKQGKDIDKYGGYNKLTGSFLVAVEHTNKKSRVKTLETVYLKDINLYNKNPLKYCKEVLGLIDPCIIYPKIMIGSLFNIDNRKIVITGRSGNRFVCHHTYQLSINDEYARYLKNLAKYLEEEPEGDCDREASLSIRSEKNLEMYYFIKNKLGTKTYSSVLLSLKNSVDDFEINFRKLTIHDQCEVLRQLLKAFKCNRETSNIEKLNKVKQAGIIIISNSITNSKSFKLIHQSITGLFEKEVDLLK

SEQ ID NO: 20058 - protein, 1327 aa, unidentified
  REGION 1..1327: note = Cas Enzyme sequence
MEGQMKNNGNNLQQGNYYLGLDVGTSSVGWAVTDTEYNVLKFKGKSMWGARLFDEASTAEDRRIHRGNRRRLARRKYRLLLLEQLFEKEIRKIDDNFFVRLHESNLWADDKSKPSKFLLFNDTNFTDKDYLKKYPTIYHLRRDLIHNPTEHDIRLVFLALHHLIKYRGHFIYDNSANGDVKTLDEAVTDFEEYLNENDIEFKIGNRKEFINVLSDKHLTKKEKKISLKKLYGEIADSENINISVLIEMLSGSSISLSNLFKDIEFDGKQNLSLDSDIEETLNDVVDILGDNIDLLIHAKEVYDIAVLTSSLGKHKYLCDAKVELFEKNKKDLMILKKYIKKNHPDDYKKIFSSPTEKKNYAAYSQTNSENVCSQEEFCLFIKPYIKDMAKSENEDEVRIAKEVEDKSFLTKLKGTNNSVVPYQIHERELNQILKNIVGYLPFMNDKQEDISVVDKIKLIFKFKIPYYVGPLNTKSTRSWVYRSDEKIYPWNFSNVIDLDKTAHEFMNRLIGRCTYTNDPVLPMDSLLYSKYNVLNEINPIKVNGKAIPVEVKQAIYTDLFENSKKKVTRKSIYIYLLKNGHIEKEDIISGVDIEIKAKLKSHHDFAQIMEENKCAPEEIEKIIKGILVYSDDKSMLRRWLKNNIKGLSDNDIKYLAKLNYKEWGRLSKTLLTDIYTINPEDGEACSILDIMWNTNATLMEILNNKKYQFKQNIEDYNAENYDVKQSLHEELYDMYISPAARRSIWQALRIVDEIVDIKKSAPKKIFIEMAREKKSTMKKKRTESRKDVLLELYKSCKSQADGFYDEELFEKLSNESNSRLRRDQLYLYYTQMGRSMYSGKRIDFDKLVNDKNTYDIDHIYPRSKIKDDSITNRVLVEKDINGEKTDIYPISEDIRQKMQPFWKILKEKGLINEEKYKRLTRNYELTEEELSAFIARQLVETQQSTKALATLLQKEYSSAKIVYSKAVNVSEFRNRKDKELPKFREINDLHHAKDAYLNIVVGNVYDTKFTEKFFLNIRNENYSLKRVFDFNVAGAWDAKGSTFDTVKKYMAKNNPIVTFAPYEVKGELFDQQIVPKGKGQFPIKQGKDIEKYGGYNKLSGAFLFAVEYKGKKTRERSLETVYIKDVDLYLKDPIYYCESILGLKEPRIIKTKILMGSLFSINNKKLVITGRSGKQYVCHHNYQLSISDKDAQYLKDIAKYLQEEPEGNIERQNVLNITTINNMKLFDVLCTKFNSNIYENVLSSLKNDVNEGREKFNGLDILEQCKILLQLLKAFKCNRESSNLEKLNNKKQAGVIVIPHIFTTCNVFKIVNQSITGLFEQEVDLLK

SEQ ID NO: 20059 - protein, 1324 aa, unidentified
  REGION 1..1324: note = Cas Enzyme sequence
MKNNGNNLQQGNYYLGLDVGTSSVGWAVTDTEYNVLKFKGKSMWGARLFDEASTAEDRRIHRGNRRRLARRKYRLLLLEQLFEKEIRKIDDNFFVRLHESNLWADDKSKPSKFLLFNDTNFTDKDYLKKYPTIYHLRRDLIHNPTEHDIRLVFLALHHLIKYRGHFIYDNSANGDVKTLDEAVTDFEEYLNENDIEFKIGNRKEFINVLSDKHLTKKEKKISLKKLYGEITDSENINISVLIEMLSGSSISLSNLFKDIEFDGKQNLSLDSDIEETLNDVVDILGDNIDILIHAKEVYDIAVLTSSLGKHKYLCDAKVELFEKNKKDLMILKKYIKKNHPDDYKKIFSSPTEKKNYAAYSQTNSENVCSQEEFCLFIKPYIKDMAKSENEDEVRIAKEVEDKSFLTKLKGTNNSVVPYQIHERELNQILKNIVGYLPFMNDKQEDVSVVDKIKLIFKFKIPYYVGPLNTKSTRSWVYRSDEKIYPWNFSNVIDLDKTAHEFMNRLIGRCTYTNDPVLPMDSLLYSKYNVLNEINPIKVNGKAIPVEVKHAIYTDLFENSKKKVTRKSIYIYLLKNGHIEKEDIISGVDIEIKAKLKSHHDFAQIMEENKCTPEEIEKIIKGILVYSDDKSMLRRWLKNNIKGLSDNDIKYLAKLNYKEWGRLSKTLLKDIYTINPEDGEACNILDIMWNTNATLMEILNNKKYQFKQNIEDYKVENYDVKQSLHEELDDMYISPAARRSIWQALRIVDEIVDIKKSAPKKIFIEMAREKKSTMKKKRTESRKDILLELYKSCKSQADGFYDEELFEKLSNESNSRLRRDQLYLYYTQMGRSMYSGKRIDFDKLINDKNTYDIDHIYPRSKIKDDSITNRVLVEKDINGEKTDIYPISEDIRQKMQPFWKILKEKGLINEEKYKRLTRNYELTEEELSAFVARQLVETQQSTKALATLLQKEYPSAKIVYSKAVNVSEFRNRKDKELPKFREINDLHHAKDAYLNIVVGNVYDTKFTEKFFLNIRNENYSLKRVFDFNVAGAWDAKGSTFDTVKKYMAKNNPIITFAPYEVKGELFDQQIVPKGKGQFPIKQGMDIEKYGGYNKRKAAYLIEVDHLERKKRIRTLEPVYIKDIKSYIENPLKYCEKILGLIEPNIIKSKILMGCIYNVDGKVIVLKGLTDSRIAYHHTYQLVLDQNHTLYLKNIFKYIQENEKNDDLERAKILDINSINNLELFDYLREKIANSIYSSILISVFKVIAKNRVKFGKLSVLEQCKVLKQIIFAFRCNLVPSDLRDINGSEKTGKLKMSRLISKHKKFMLIHQSVTGLFEKEVDLLK

SEQ ID NO: 20060 - protein, 1345 aa, unidentified
  REGION 1..1345: note = Cas Enzyme sequence
MKNNQNDKRRGDYYLGLDVGTDSAGWAVTDKDYNLLKCNGKQMWGARLFSEANSAADRRTARTSRRRLERRKQRLNLLEMLLNNDIAKLDPSFFVRFHDSNLWAEDKHDTSCKYSLFNDSSYTDKDYLKEYPTIYHLRSELIHSSEPHDIRLVYLALHHILKSRGHFLYENSNNPEGKTLEEATMDLVQLLKDNDIEFSPNNRASFAEALISSEGITHKKEELANAYGESEKDEEAYVDLSSLIDLLSGASVKLDKLFNDPELKEADLKVVSLKEDLDSKFDQLSEELEDRIEVILTAKEVYDVARLGQVLGGNRYISDAKVALFNKNKKDLSILKRYVKKNCPEKYKDIFNEQKDVKNYAAYSRYKTDSRCTQEEFCTFISKKVGGMKVSDDPEEQRVYEEISNKVFLTKLKGTENGLIPFQLNLKELVKILDNASGYWNALNEKGSDGITIKDKIIALFTFKIPYYVGPLNKNAKHYWAVRTDERIYPWNFTDVVDEKKTAENFIKNLIGKCTYTGEDVLPMNSLLYSEYAVLNEINNIKVNGKEIPVEVKKSIYNDLFLESSKKVTKKKIYNYLLANGYIEKMDEISGVDDEIKSNLKSWHDFRNIIEKTKDTQQVESIIERVLVFGKDKKMLKTWLKDNTHGLDNDDYKMIMRLNYKDWGRLSREFLEDIYHVDSDGEAFNIITMLRDTNQNLMMLLSSHYQFAEKADEYRHDHFSVGESLHERLEEMYIAPAVRRSIWQTMRVVDEIVDIEKSAPKKIFIEMARTSSKEMEKKRTISRKNVLMQLYASCKKQESELYGKLQSETDQSLRRDKLYLYYTQMGRCMYSGDPIDLDKLLHDDTTYDIDHIFPRSRIKDDSLDNRVLVKSKLNRDKTNDYPLSDDVRKRMESFWKMLSEKKLISTEKYSRLIRNYPLTDEELSSFVARQLTVTQQSTKALAEILNQSYPSAKIVYSKAGNVSEFRQKYEIPKFRDVNDMHHAKDAYLNIVVGNVYSTKFTDQFFKNIHSENYSLNRVFEFSTPSAWTAPSKEKMEQYQIRLKNKDINAHDILDGTFKTVYKYVYKNTPIVTFAQFQTKGVLFDLTIKGKNKGQQPIKKNLDISKYGGYNNRYAAYYFIAEFNDTHILIRKILPVYIDSLKEYETNPLNYCANILNLNEPKIVIPKLRANSLLELNGVRYRFTGRSNESIICQHDYQLAIDDKHAKYLKLLNKNLISMKLSKGNITDYNNDISIEKNTLMFDWMVEKLLTNTYQCVFSGIVSKIVDKKPTFLTLDVISQAVVLTEMLKLFKCNSLSSNLQKIGLGSNVGKMNRNSKISSYSTAYLINQSATGLFEVKQDLLESCK

SEQ ID NO: 20061 - protein, 1345 aa, unidentified; identical to SEQ ID NO: 20060
  REGION 1..1345: note = Cas Enzyme sequence

SEQ ID NO: 20062 - protein, 1351 aa, unidentified
  REGION 1..1351: note = Cas Enzyme sequence
MVNKPYYIGLTVGPEYAAYAVTNESYNLEKFKGQDMWGIYKFKEAETSADRTVFRSSRKNIKKEKKRINLLKAYFYDEIMKVDKNFFIRLDNSSFFPEDKEKALNGSRNILFDDDNYKDVDYYNQFPTIYHLRSFLANSKEKADIRLVYLAVSNIMKHRGNFYTKNLEDTSNSVKDIYLNICQLASQSDIHLDEKADIDKLMEILLNPAINNKTKAILAAQTVKALTKQETALIKLMCGLKIKLVDMFPELADSLEESDKKASISFSDNNYLDNVDSIEKLAGEDNFALVSAVKELYDAVIIQNIIQGHKFISDAKMASYEKHMNDLKLLKSVLRNNVTSKEFNKFFRSEEPGTYAAYVKSNNSDRKRTRRGSDKGRTQDDLYSSIKKLLSKADENDSDAEYILDEISKGTFLPKQRITDNKLIPNQLYATELKAILDNAAQYYDFLNEKDESGLTVSERILSVFTFTMPYFVGPTSEYNSRGWAVRKEAGAVMPWNLEEKVDIKESAKNFIENMVGKCTYLSGERVLPKASLLYEKYAVLNEVNNIRVDGEKLPVEVKQEIVNGKLMAGKKLTKKQIHSFLVKKGIADMDSLITGIDEKLNNTMSSHKFFTEVFGTLDKDTEIMAEDIILWSTIYGTSKTYVKEQIENKYPSKLIAEQMKKVLNFKSNDWGRLSAEFLNMRGSNKETDERISVIDLMWNENINLMELINDERYDFMSVIKEKSKKEVKSIFTFEYDDLNELYATAAQKRSIWAAVKIVREIIKIKGYAPESIFLDTRKMRPKDKKDRKSRLIDLYKGLKDVSKEWKETMINRIDECDKDGSLKSKRVYLYFLQMGKDIYTWEDINFNVVKTTGDNIYNIDHIYPKHFVKDESLDNIVLTNSEFNKEEKKDIYPVPDKIYEAMHENWLILRKNGFMSAEKLARLSDRHPMSDEKRASFIEKSYIQATSSTKMLAEVFNSIFNKDTKIIYAKTQEIADFRKQYGFAKATIYNDHYLAKDAYLNIVVGNVWYTKFTLSPIWFIEKEYRTGKSEYNLNRMYDFDVVRNDRVAWIAERNKKDIPGTIAIVNKIMARNTPLTVTKTTEGHGGLTNATISKASKAKPGIYLPLKSNIRYSDVTKYGGKTSIKTAYAFLVEHTDKKKGRVRTLYTIPLYLAFNVKNREDIEKYCIEELGLIEPNVRISKIMANSELEIDGYSYLLGGKSVSQFHVANNVPMIFNQEWQTYISKIEKYINAKVVDRAVTVEKNLELYNEILSKHKTDIFLKKKLPVYNMLLTDREKFEKLVLEEQMQILCQILMLTRMGTNLANLSLLGEGSSIGTMNISCNISNYKSAVLVERSITGLYKKRIDLLEV

SEQ ID NO: 20063 - protein, 1351 aa, unidentified
  REGION 1..1351: note = Cas Enzyme sequence
MVNKPYYIGLTVGPEYAAYAVTNESYNLEKFKGQDMWGIYKFKEAETSADRTVFRSSRKNIKKEKKRINLLKAYFYDEIMKVDKNFFIRLDNSSFFPEDKEKALNGSRNILFDDDNYKDVDYYNQFPTIYHLRSFLANSKEKADIRLVYLAVSNIMKHRGNFYTKNLEDTSNSVKDIYLNICQLASQSDIHLDEKADIDKFMEILLNLAINNKTKAILAAQTVKALTKQETALIKLMCGLKIKLVDMFPELADSLEESDKKASISFSDNNYLENVDSIEKLAGEDNFALVSAVKELYDAVIIQNIIQGHKFISDAKIASYEKHMNDLKLLKSVLRNNVTSKEFNKFFRSEEPGTYAAYVKSNNSDGKRTRRGSDKGRTQDDLYSSIKKLLSKADENDSDAEYILDEISKGTFLPKQRITDNKLIPNQLYATELKAILDNAAQYYDFLNEKDESGLTVSERILSVFTFTMPYFVGPTSEYNSRGWAVRKEAGAVMPWNLEEKVDIKESAKNFIENMVGKCTYLSGERVLPKASLLYEKYAVLNEVNNIRVDGEKLPVEVKQEIVNGKLMAGKKLTKKQIHSFLVKKGIADMDSLITGIDEKLNNTMSSHKFFTEVFGTLDKDTEIMAEDIILWSTIYGTSKTYVKEQIENKYPSKLTAEQMKKVLNFKSNDWGRLSAEFLNMRGSNKETDERISVIDLMWNENINLMELINDERYDFMSVIKEKSKKEVKSIFTFEYDDLNELYATAAQKRSIWAAVKIVREIIKIKGYAPESIFLDTRKMRPKDKKDRKSRLIDLYKGLKDVSKEWKETMINRIDECDKDGSLKSKRVYLYFLQMGKDIYTWEDINFNVVKTTGDNIYNIDHIYPKHFVKDESLDNIVLTNSEFNKEEKKDIYPVPDKIYEAMHENWLILRKNGFMSAEKLARLSDRHPMSDEKRASFIEKSYIQATSSTKMLAEVFNSIFNKDTKIIYAKTQEIADFRKQYGFAKATIYNDHYLAKDAYLNIVVGNVWYTKFTLSPIWFIEKEYRTGKSEYNLNRMYDFDVVRNDRVAWIAERNKKDIPGTIAIVNKIMARNTPLTVTKTTEGHGGLTNATISKASKAKPGIYLPLKSNIRYSDVTKYGGKTSIKTAYAFLVEHTDKKKGRVRTLYTIPLYLAFNVKNREDIEKYCIEELGLIEPNVRISKIMANSELEIDGYSYLLGGKSVSQFHVANNVPMIFNQEWQTYISKIEKYINAKVVDRAVTVEKNLELYNEILSKHKTDIFLKKKLPVYNMLLTDREKFEKLVLEEQMQILCQILMLTRMGTNLANLSLLGEGSSIGTMNISCNISNYKSAVLVERSITGLYKKRIDLLEV

SEQ ID NO: 20064 - protein, 1330 aa, unidentified
  REGION 1..1330: note = Cas Enzyme sequence
MKNFNNDYYTGFDIGTDSVGYAVADTDYNLCKFKGNAMWGVDLFEESNSAAERRTLRSARRRGLRKRNRIEWLQMLFDEEISKVDNAFFQRLKESCLYLDDKSSNVPYAVFADGNYTDKEFHTDYPTIYHLRKELIKSSQPHDIRLVYLALHHIIKHRGHFLFDNMGSDFESESSFETLFDDLKLYLKEEYEIEFECNDSLRFSEILKDKTMKKTAKSSESYKLFGYSKRNNPYETALIDLMCGRKVKFFDMFGDKSFDSEEVNGITFESGYDDNENTYRDLLQEKFELIEKAKAVYDWAILADILNGEKYISFAKVKTYEEHSSDLKILKKFVKERCKPLYDEIFRITKDKLDNYTAYCGKYKENGRNGVIQYRTNQADFCKYLKKKFEKLDKTGYEEMFDKIENGTFMPKIVVKDNGVIPMQVNRSELKAILKNASTYLEFLNKKDENGISVSDKIVKIFEFRIPYYVGPLNNHSLKSWLVRSDEKIYPWNFDSVVDIEQSAENFINNLTSKCTYLPTKDVIPKNSILYSAFTVLNELNNLRLDGKKPDVSLKQAIFNDLFMTHKKVRRKDLLNYLKSEKGVTPDITGIDGDFKSSMRSAIEMSQFNLTDSEKEDAIKAITVFGDDKKLLRKRLKRQLGSKLSDEDIMRISKLKYKDWGRLSKEFLTEVYNVDKNTGELQFNIIHALWQTNDNLMELLGSKYGFEQSRQNYLDGIQTRQSLEKMVENLYISPAVKRPVYQSLKIMHEINKIQGHAPKKIFVEMTRKDGVKGDKGRKESRKTKLVDLYKKCGEDSGELWESLEKTPDDEFKRDRLYFYYTQFGKCMYTGEQINLSELYNQNIYDVDHIFPRSKVKDDSLDNRVLVKKQVNAHKDNTYPLDSSIREKMKGFWYLLMDKGLISKKKYERLTRATPLSDSELSDFIARQIVETSQSTKAVASLFKELYPDTEIVYVKASLVSEFRDESRGFGFLKCREVNDFHHAKDAYLNIVVGNVYNERCTHNKSIFIKGLQTKTYSLNKMFSFNTPNAWSIDDNKSIKIVRKTMNKNNIRFTRYALTRNGGLFKMNPLKKGSGQVSLKQNSPLSDISKYGGYDKPASSYFSFVKYEGKKGKEMRQLVAIDSYIKARYEANPEKYLSENLGLKNPVVLIPVVKYNACIEIDGFRMHISSKSNGGKKIVYKPAMQLTVSYDTEKYIRNVVKLNSMPENYNITERDKVSTDENLKLFDILIFKMTETILKVKFGDMGVKIASHRDAFEKLDVRKQCFVLAEILKIIHSNVVTGDLTLIGEAKKAGVVSTNSVLSEIKGVKSIYLVHQSVTGLFEKKIDLLHM

SEQ ID NO: 20065 - protein, 1330 aa, unidentified
  REGION 1..1330: note = Cas Enzyme sequence
MEQGTKRGDYYLGLDMGTDSVGWAVTDMDYRIPKFKGNAMWGVRLFDESNTAEERRLFRISRRRTQRRRERLDLLEMLFDGPVSTKDPAFFQRLRESDLYAEDKTTNTPFAVFADPDYTDTDYHRQFSTIYHLRNTLLHENGPYDVRLVFLAVHHIIKNRGHFLFDSLGEAQNFGSIYGAFRDYLQEEYECAVECTDEKAFGAVLKDKSLSKSRKTAAAAELFGVTKKSAPQLYACLALACGATVKLKDLFNDDTLAEAEKPSIAFTGSYEDNEPEYQSLLEERFDLVVRIKALYDWAILDEILVGHQYLCEAKVATYEQHKTDLQRLKTYVKTYRSELYKKIFKLSSKDDNYVAYSGHIKENGHTGVLEKTCNQEAFCAYLKKTLGDNEDPAYVDMFAAIENGTFMPKQVSKDNGVIPMQLQKKELEGILDRAQRYLPFLTEKDDTGLTVREKIISLCEHRIPYYVGPLNKHSKKAWIVRKEGKIYPWNFDQVVDLDRSAEAFIENLTSKCTYLPQYDVIPKYSLLYTKFMVLNELNNLTLDGQRVKVKLKQEIYRDLFEKRGKVTGKGLKNYLQSRGIAYEVMGGFDENFKASLKPWQDLAPYDLTYDEKEEVVRLITIFGDDKRLLKKRLRDLFGDRLTETERGKLARLKYTGWSRLSREFLTQVACTDKNTGEVTNIISALWDTNLNLMQLLYSEDYVPTFGEQVAACNRFDKDVSLRQMVEDLYVSPKVKRPIYQSLLIAREIEKIQKCPPKKIFIEVARGEEKKERKKSRKAQLLELYQSCKKKYADLYAQLEGTEEDRLRSDKLYLYYTQMGRCMYTGEHIDLNSLLSGNVYDIDHIFPRSKVKDDSLNNRVLVKKVDNAKKTDVYPLDRETQAKMHGFWQLLLSKNLISKVKYQRLIRTTPLTDEELGAFISRQLVETRQSTKAVAQIMEQLYDKEQTEIVYVKAALASDFRHTYDMLKCREVNDFHHAKDAYLNVVVGNVYNVRCTHNLRNFIRGLQENGSRGYSMNAMFKWDIPGAWVAEDGELQKTQTKSLKIVKQMMAKNNIRYTRYAFCQHGGLFDQMPVKKGKGQIPLKQDGPKSDMAKYGAYNKAMSKYFALVSYSDKKGKEVRQLVPIDAVTEKAYLADPDEYVSSYVGAPAKVLIPCIKYNACLSFDGFRMHLSKKSGNQLGYKPAMQLVLSYEQEKYVRNITKYLSQNKDRPLNKYDGITPDKNIALFDTLVDKMNHSVLSLRFGDMGAKIADKREVFCALSSEEQCVVVAEILKILHANVMIGDLTLIKLAKNAGRLYTNMKLSEIKGVTSVKLIHQSITGLFEQQVELLP

SEQ ID NO: 20066 - protein, 1330 aa, unidentified
  REGION 1..1330: note = Cas Enzyme sequence
MEQGTKRGDYYLGLDMGTDSVGWAVTDMDYRIPKFKGNAMWGVRLFDESNTAEERRLFRISRRRTQRRRERLDLLEMLFDGPVSTKDPAFFQRLRESDLYAEDKTTNTPFAVFADPDYTDTDSHRQFPTIYHLRNALLHENGPYDVRLVFLAVHHIIKNRGHFLFDSLGEAQNFGSIYGAFRDYLQEEYECAVECTDEKAFGAVLKDKSLSKSRKTAAAAELFGVTKKSAPQLYACLALACGATVKLKDLFNDDTLAEAEKPSIAFTGSYEDNEPEYQSLLEERFDLVVRIKALYDWAILDEILAGHQYLCEAKVATYEQHKTDLQRLKTYVKTYRSELYKKIFKLSSKDDNYVAYSGHIKENGHTGVLEKTCNQEAFCAYLKKTLGDNEDPAYADMFAAIENGTFMPKQVSKDNGVIPMQLQKKELEGILDRAQGYLPFLTEKDETGLTVREKIISLCEHRIPYYVGPLNKHSKKAWIVRKEGKIYPWNFDQVVDLDRSAEAFIENLTSKCTYLPQYDVIPKYSLLYTKFMVLNELNNLTLDGQRVKVKLKQEIYRDLFEKRGKVTGKGLKNYLQSRGIAYEVMGGFDENFKASLKPWQDLAPYDLTYDEKEEVVRLITIFGDDKKLLKKRLRDLFGDRLTETERGKLARLKYTGWSRLSREFLTQVVCTDKDTGEVTNIISALWDTNLNLMQLLYSADYMPTFGEQVAACNQFDKDVSLRQMVEDLYVSPKVKRPIYQSLLIAREIEKIQKCPPKKIFIEVARGEEKKERKKSRKAQLLELYQSCKKEYADLYAQLEGTEEDRLRSDKLYLYYTQMGRCMYTGEHIDLNSLLSGNVYDIDHIFPRSKVKDDSLNNRVLVKKVDNAKKTDVYPLDRETQAKMHGFWQLLLSKNLISKVKYQRLIRTTPLTDEELGAFISRQLVETRQSTKAVAQIMEQLYDKEQTEIVYVKAALASDFRHTYDMLKCREVNDFHHAKDAYLNVVVGNVYNVRCTHNLRNFIRGLQENGPRGYSMNAMFKWDIPGAWVAEGGELQKTHTKSLKIVKQMMAKNNIRYTRYAFCQHGGLFDQMPVKKGKGQIPLKQDGPKSDMAKYGAYNKAMSKYFALISYLDKKDKEVRQLVPIDAVTEKAYLADPDGYVSSYVGAPAKVLIPCVKYNACLSFDGFRMHISQKSGNQLGYKPAMQLVVSYEQEEYVRNITKYLSQNKDRPLNKYDGISAEENVALFDALVDKMSNSILSLRFGDMGAKIANKREVFCALTPEEQCVVLAEVLKILHDNVMMGDLTLIGLAKNAGKLQTNVKLSEIKGVTSVKLIHQSITGLFEQQVELLP

SEQ ID NO: 20067 - protein, 1332 aa, unidentified
  REGION 1..1332: note = Cas Enzyme sequence
MEQGTKRGDYYLGLDMGTDSVGWAVTDMDYRIPKFKGNAMWGVRLFDESNTAEERRLFRISRRRTQRRRERLDLLEMLFDGPVSTKDPAFFQRLRESDLYAEDKTTNTPFAVFADPDYTDTDYHRQFPTIYHLRNALLHEDGPYDVRLVFLAVHHIIKNRGHFLFDSLVEAQNFGSIYGAFRDYLQEEYECAVECTDEKAFGAVLKDKSLSKSRKTAAAAELFGVTKKSAPQLYACLALACGATVKLKDLFNDDTLAEAEKPSIAFTGSYEDNEPEYQSLLEERFDLVVRIKALYDWAILDEILAGHQYLCEAKVATYEQHKTDLQRLKTYVKTYRSELYKKIFKLSSKDENYVAYSGHIKENGHTGVLEKTCNQEAFCAYLKKTLGDNGDPAYADMFAAIENGTFMPKQVSKDNGVIPMQLQKKELEGILDRAQRYLPFLTEKDETGLTVREKIISLCKHRIPYYVGPLNKHSKKAWIVRKEGKIYPWNFDQVVDLDRSAEAFIENLTSKCTYLPQYDVIPKYSLLYTKFMVLNELNNLTLDGHRVEVKLKQEIYRNLFEKRGKVTGKGLKNYLQSRGIAYEVMGGFDENFKASLKPWQDLAPYDLTYDEKEEVVRLITIFGDDKKLLKKRLRDLFGDRLTETERGKLARLKYTGWSRLSREFLTQVACTDKNTGEVTNIISALWDTNLNLMQLLYSADYKPTFGEQVTACNQFDKAVSLRQMVEDLYVSPKVKRPIYQSLLIAREIEKIQKCPPKKIFIEVARGEEKKERKKSRKAQLLELYQSCKKEYADLYAQLEGTEEDRLRSDKLYLYYTQMGRCMYTGEHIDLNSLLNGNVYDIDHIFPRSKVKDDSLNNRVLVKKVDNEKKTDVYPLDRETQAKMHGFWQLLLSKNLISKVKYQRLIRTTPLTDEELGAFISRQLVETRQSTKAVAQIMEQLYDKEQTEIVYVKAALASDFRHTYDMLKCREVNDFHHAKDAYLNVVVGNVYNVRCTHNLRNFIRGLQENGSRGYSMNAVFKWDIPGAWVAENGELQETQTKSLKIVKQMMAKNNIRYTRYAFCQHGGLFDQMPVKKGKGQIPLKQDGPKSDMAKYGAYNNAKSKYFTLVSYSDKKGKEVRQLVPIDAVTEKAYLADPDGYVSSYVGAPAKVLIPCIKYNACLSFDGFRMHLSSKSGGGSTLVYKPAMQLVLSYEQEKYVRNVTKYLSQNKDRPLNKYDGISAEENIALFNALVDKMNHSILSLRFGSIGEKISGKAERFIVLSAEDQCVVLSEMLKILHANVMSGDLTKIGLAGKAGIVTTNSKISDIKGVDSVTLIHQSITGLFEQQIELLP

SEQ ID NO: 20068 - protein, 1332 aa, unidentified
  REGION 1..1332: note = Cas Enzyme sequence
MEQGTKRGDYYLGLDMGTDSVGWAVTDMDYRIPKFKGNAMWGVRLFDESNTAEERRLFRISRRRTQRRRERLDLLEMLFDGPVSTKDPAFFQRLRESDLYAEDKITNTPFAVFADPDYTDTDYHRQFPTIYHLRNALLHEDGPYDVRLVFLAVHHIIKNRGHFLFDSLGEAQNFGSIYGAFRDYLQEEYECAVECTDEKAFGAVLKDKSLSKSRKTAAAAELFGVTKKSAPQLYACLALACGATVKLKDLFNDDTLAEAEKPSIAFTGSYEDNEPEYQSLLEERFDLVVRIKALYDWAILDEILAGHQYLCEAKVATYEQHKTDLQRLKTYVKTYRSELYKKIFKLSSKDENYVAYSGHIKENGHTGVLEKTCNQEAFCAYLKKTLGDNGDPAYADMFAAIENGTFMPKQVSKDNGVIPMQLQKKELEGILDRAQRYLPFLTEKDETGLTVREKIISLCEHRIPYYVGPLNKHSKKAWIVRKEGKIYPWNFDQVVDLDRSAEAFIENLTSKCTYLPQYDVIPKYSLLYTKFMVLNELNNLTLDGHRVEVKLKQEIYRNLFEKRGKVTGKGLKNYLQSRGIAYEVMGGFDENFKASLKPWQDLAPYDLTYDEKEEVVRLITIFGDDKKLLKKRLRDLFGDRLTETERGKLARLKYTGWSRLSREFLTQVACTDKNTGEVTNIISALWDTNLNLMQLLYSADYKPTFGEQVTACNQFDKAVSLRQMVEDLYVSPKVKRPIYQSLLIAREIEKIQKCPPKKIFIEVARGEEKKERKKSRKAQLLELYQSCKKEYADLYAQLEGTEEDRLRSDKLYLYYTQMGRCMYTGEHIDLNSLLNGNVYDIDHIFPRSKVKDDSLNNRVLVKKVDNEKKTDVYPLDRETQAKMHGFWQLLLSKNLISKVKYQRLIRTTPLTDEELGAFISRQLVETRQSTKAVAQIMEQLYDKEQTEIVYVKAALASDFRHTYDMLKCREVNDFHHAKDAYLNVVVGNVYNVRCTHNLRNFIRGLQENGSRGYSMNAVFKWDIPGAWVAENGELQETQTKSLKIVKQMMAKNNIRYTRYAFCQHGGLFDQMPVKKGKGQIPLKQDGPKSDMAKYGAYNNAKSKYFTLVSYSDKKGKEVRQLVPIDAVTEKAYLADPDGYVSSYVGAPAKVLIPCIKYNACLSFDGFRMHLSSKSGGGSTLVYKPAMQLVLSYEQEKYVRNVTKYLSQNKDRPLNKYDGISAEENIALFNALVDKMNHSILSLRFGSIGEKISGKAERFIVLSAEDQCVVLSEMLKILHANVMSGDLTKIGLAGKAGIVTTNSKISDIKGVDSVTLIHQSITGLFEQQIELLP

SEQ ID NO: 20069 - protein, 1332 aa, unidentified
  REGION 1..1332: note = Cas Enzyme sequence
MEQGTKRGDYYLGLDMGTDSVGWAVTDMDYRIPKFKGNAMWGVRLFDESNTAEERRLFRISRRRTQRRRERLDLLEMLFDGPVSTKDPAFFQRLRESDLYAEDKTTNTPFAVFADPDYTDTDYHRQFPTIYHLRNALLHEDGPYDVRLVFLAVHHIIKNRGHFLFDSLGEAQNFGSIYGAFRDYLQEEYECAVECTDEKAFGAVLKDKSLSKSRKTAAAAELFGVTKKSAPQLYACLALACGATVKLKDLFNDDTLADAEKPSIAFTGSYEDNEPEYQSLLEERFDLVVRIKALYDWAILDEILAGHQYLCEAKVATYEQHKTDLQRLKTYVKTYHSELYKKIFKLSSKDENYVAYSGHIKENGHTGVLEKTCNQEAFCAYLKKTLGDNGDPAYVDMFAAIENGTFMPKQVSKDNGVIPMQLQKKELEGILDRAQRYLPFLTEKDETGLTVREKIISLCEHRIPYYVGPLNKHSKKAWIVRKEGKIYPWNFDQVVDLDRSAEAFIENLTSKCTYLPQYDVIPKYSLLYTKFMVLNELNNLTLDGHRVEVKLKQEIYRNLFEKRGKVTGKGLKNYLQSRGIAYEVMGGFDENFKASLKPWQDLAPYDLTYDEKEEVVRLITIFGDDKKLLKKRLRDLFGDRLTETERGKLARLKYTGWSRLSREFLTQVACTDKNTGEVTNIISALWDTNLNLMQLLYSADYKPTFGEQVTACNQFDKAVSLRQMVEDLYVSPKVKRPIYQSLLIAREIEKIQKCPPKKIFIEVARGEEKKERKKSRKAQLLELYQSCKKEYADLYAQLEGTEEDRLRSDKLYLYYTQMGRCMYTGEHIDLNSLLNGNVYDIDHIFPRSKVKDDSLNNRVLVKKVDNEKKTDVYPLDRETQAKMHGFWQLLLSKNLISKVKYQRLIRTTPLTDEELGAFISRQLVETRQSTKAVAQIMEQLYDKEQTEIVYVKAALASDFRHTYDMLKCREVNDFHHAKDAYLNVVVGNVYNVRCTHNLRNFIRGLQENGSRGYSMNAVFKWDIPGAWVAENGELQETQTKSLKIVKQMMAKNNIRYTRYAFCQHGGLFDQMPVKKGKGQIPLKQDGPKSDMAKYGAYNNAKSKYFTLVSYSDKKGKEVRQLVPIDAVTEKAYLADPDGYVSSYVGAPAKVLIPCIKYNACLSFDGFRMHLSSKSGGGSTLVYKPAMQLVLSYEQEKYVRNVTKYLSQNKDRPLNKYDGISAEENIALFNALVDKMNHSILSLRFGSIGEKISGKAERFIVLSAEDQCVVLSEMLKILHANVMSGDLTKIGLAGKAGIVTTNSKISDIKGVDSVTLIHQSITGLFEQQIELLP

SEQ ID NO: 20070 - protein, 1332 aa, unidentified
  REGION 1..1332: note = Cas Enzyme sequence
MEQGTKRGDYYLGLDMGTDSVGWAVTDMDYRIPKFKGNAMWGVRLFDESNTAEERRLFRISRRRTQRRRERLDLLEMLFDGPVSTKDPAFFQRLRESDLYAEDKTTNTPFAVFADPDYTDTDYHRQFPTIYHLRNALLHEDGPYDVRLVFLAVHHIIKNRGHFLFDSLGEAQNFGSIYGAFRDYLQEEYECAVECTDEKAFGAVLKDKSLSKSRKTAAAAELFGVTKKSAPQLYACLALACGATVKLKDLFNDDTLADAEKPSIAFTGSYEDNEPEYQSLLEERFDLVVRIKALYDWAILDEILAGHQYLCEAKVATYEQHKTDLQRLKTYVKTYHSELYKKIFKLSSKDENYVAYSGHIKENGHTGVLEKTCNQEAFCAYLKKTLGDNGDPAYVDMFAAIENGTFMPKQVSKDNGVIPMQLQKKELEGILDRAQRYLPFLTEKDETGLTVREKIISLCEHRIPYYVGPLNKHSKKAWIVRKEGKIYPWNFDQVVDLDRSAEAFIENLTSKCTYLPQYDVIPKYSLLYTKFMVLNELNNLTLDGHRVEVKLKQEIYRNLFEKRGKVTGKGLKNYLQSRGIAYEVMGGFDENFKASLKPWQDLAPYDLTYDEKEEVVRLITIFGDDKKLLKKRLRDLFGDRLTETERGKLARLKYTGWSRLSREFLTQVACTDKNTGEVTNIISALWDTNLNLMQLLYSADYKPTFGEQVTACNQFDKAVSLRQMVEDLYVSPKVKRPIYQSLLIAREIEKIQKCPPKKIFIEVARGEEKKERKKSRKAQLLELYQSCKKEYADLYAQLEGTEEDRLRSDKLYLYYTQMGRCMYTGEHIDLNSLLNGNVYDIDHIFPRSKVKDDSLNNRVLVKKVDNEKKTDVYPLDRETQAKMHGFWQLLLSKNLISKVKYQRLIRTTPLTDEELGAFISRQLVETRQSTKAVAQIMEQLYDKEQTEIVYVKAALASDFRRTYDMLKCREVNDFHHAKDAYLNVVVGNVYNVRCTHNLRNFIRGLQENGSRGYSMNAVFKWDIPGAWVAENGELQETQTKSLKIVKQMMAKNNIRYTRYAFCQHGGLFDQMPVKKGKGQIPLKQDGPKSDMAKYGAYNNAKSKYFTLVSYSDKKGKEVRQLVPIDAVTEKAYLADPDGYVSSYVGAPAKVLIPCIKYNACLSFDGFRMHLSSKSGGGSTLVYKPAMQLVLSYEQEKYVRNVTKYLSQNKDRPLNKYDGISAEENIALFNALVDKMNHSILSLRFGSIGEKISGKAERFIVLSAEDQCVVLSEMLKILHANVMSGDLTKIGLAGKAGIVTTNSKISDIKGVDSVTLIHQSITGLFEQQIELLP

SEQ ID NO: 20071 - protein, 1332 aa, unidentified
  REGION 1..1332: note = Cas Enzyme sequence
MEQGTKRGDYYLGLDMGTDSVGWAVTDMDYRIPKFKGNAMWGVRLFDESNTAEERRLFRISRRRTQRRRERLDLLEMLFDGPVSTKDPAFFQRLRESDLYAEDKTTNTPFAVFADPDYTDTDYHRQFPTIYHLRNALLHEDGPYDVRLVFLAVHHIIKNRGHFLFDSLGEAQNFGSIYGAFRDYLQEEYECAVECTDEKAFGAVLKDKSLSKSRKTAAAAELFGVTKKSAPQLYACLALACGATVKLKDLFNDDTLAEAEKPSIAFTGSYEDNEPEYQSLLEERFDLVVRIKALYDWAILDEILAGHQYLCEAKVATYEQHKTDLQRLKTYVKTYRSELYKKIFKLSSKDENYVAYAGHIKENGHTGVLEKTCNQEAFCAYLKKTLGDNGDPAYADMFAAIENGTFMPKQVSKDNGVIPMQLQKKELEGILDRAQRYLPFLTEKDETGLTVREKIISLCEHRIPYYVGPLNKHSKKAWIVRKEGKIYPWNFDQVVDLDRSAEAFIENLTSKCTYLPQYDVIPKYSLLYTKFMVLNELNNLTLDGHRVEVKLKQEIYRNLFEKRGKVTGKGLKNYLQSRGIAYEVMGGFDENFKASLKPWQDLAPYDLTYDEKEEVVRLITIFGDDKKLLKKRLRDLFGDRLTETERGKLARLKYTGWSRLSREFLTQVACTDKNTGEVTNIISALWDTNLNLMQLLYSADYKPTFGEQVTACNQFDKAVSLRQMVEDLYVSPKVKRPIYQSLLIAREIEKIQKCPPKKIFIEVARGEEKKERKKSRKAQLLELYQSCKKEYADLYAQLEGTEEDRLRSDKLYLYYTQMGRCMYTGEHIDLNSLLNGNVYDIDHIFPRSKVKDDSLNNRVLVKKVDNEKKTDVYPLDRETQAKMHGFWQLLLSKNLISKVKYQRLIRTTPLTDEELGAFISRQLVETRQSTKAVAQIMEQLYDKEQTEIVYVKAALASDFRHTYDMLKCREVNDFHHAKDAYLNVVVGNVYNVRCTHNLRNFIRGLQENGSRGYSMNAVFKWDIPGAWVAENGELQETQTKSLKIVKQMMAKNNIRYTRYAFCQHGGLFDQMPVKKGKGQIPLKQDGPKSDMAKYGAYNNAKSKYFTLVSYSDKKGKEVRQLVPIDAVTEKAYLADPDGYVSSYVGAPAKVLIPCIKYNACLSFDGFRMHLSSKSGGGSTLVYKPAMQLVLSYEQEKYVRNVTKYLSQNKDRPLNKYDGISAEENIALFNALVDKMNHSILSLRFGSIGEKISGKAERFIVLSAEDQCVVLSEMLKILHANVMSGDLTKIGLAGKAGIVTTNSKISDIKGVDSVTLIHQSITGLFEQQIELLP

SEQ ID NO: 20072 - protein, 1330 aa, unidentified
  REGION 1..1330: note = Cas Enzyme sequence
MEQGTKRGDYYLGLDMGTDSVGWAVTDMDYRIPKFKGNAMWGVRLFDESNTAEERRLFRISRRRTQRRRERLDLLEMLFDGPVSTKDPAFFQRLRESDLYAEDKTTNTPFAVFADPDYTDTDYHRQFPTIYHLRNALLHEDGPYDVRLVFLAVHHIIKNRGHFLFDSLGEAQNFGSIYGAFRDYLQEEYECAVECTDEKAFGAVLKDKSLSKSRKTAAAAELFGVTKKSAPQLYACLALACGATVKLKDLFNDDTLAEAEKPSIAFTGSYEDNEPEYQSLLEERFDLVVRIKALYDWAILDEILAGHQYLCEAKVATYEQHKTDLQRLKTYVKTYRSELYKKIFKLSSKDENYVAYSGHIKQNGHTGVLEKTCNQEAFCAYLKKTLGDNGDPAYADMFAAIENGTFMPKQVSKDNGVIPMQLQKKELEGILDRAQRYLPFLTEKDETGLTVREKIISLCEHRIPYYVGPLNKHSKKAWIVRKEGKIYPWNFDQVVDLDRSAEAFIENLTSKCTYLPQYDVIPKYSLLYTKFMVLNELNNLTLDGQRVEVKLKQEIYRDLFEKRSKVTGKGLKNYLQSRGIAYEVMGGFDENFKASLKPWQDLAPYDLTYDEKEEVVRLITIFGDDKKLLKKRLRDLFGDRLTETERGKLARLKYTGWSRLSREFLTQVACTDKNTGEVTNIISALWDTNLNLMQLLYSEDYMPTFGERVAACNQFDKDVSLRQMVEDLYVSPKVKRPIYQSLLIAREIEKIQKCPPKKIFIEVARGEEKKERKKSRKAQLLELYQSCKKEYADLYAQLEGTEEDRLRSDKLYLYYTQMGRCMYTGEHIDLNSLLSGNVYDIDHIFPRSKVKDDSLNNRVLVKKVDNAKKTDVYPLDRETQAKMHGFWQLLLSKNLISKVKYQRLIRTTPLTDEELGAFISRQLVETRQSTKAVAKIMEQLYDKEQTEIVYVKAALASDFRHTYDMLKCREVNDFHHAKDAYLNVVVGNVYNVRCTHNLRNFIRGLQENGSRSYSMNAMFKWDIPGAWVAEDGELQKTQTKSLEIVKQMMAKNNIRYTRYAFCQHGGLFDQMPVKKGKGQIPLKQDGPKSDMAKYGAYNKAMSKYFALVSYLDKKGKEVRQLVPIDAVTEKAYLADPDGYVSSYVGTPAKVLIPCIKYNACLSFDGFRMHLSKKAGNQLGYKPGVQLVLSYGQEKYVRNITKYLSQNKDRPLNKYDGISVEENVALFDALMGKMNNSIFSLRFGDMGVKISNKREVFLALPPEEQCVVLAEILKILHANVMCGDLTNIKLAKTAGALVSNMKLSEIKGVTSVKLIHQSITGLFEQQIELLP

SEQ ID NO: 20073 - protein, 1330 aa, unidentified
  REGION 1..1330: note = Cas Enzyme sequence
MEQGTKRGDYYLGLDMGTDSVGWAVTDMDYRIPKFKGNAMWGVRLFDESNTAEERRLFRISRRRTQRRRERLDLLEMLFDGPVSTKDPAFFQRLRESDLYAEDKATNTPFAVFADTDYTDTDYHRQFPTIYHLRNALLHEDGPYDVRLVFLAVHHIIKNRGHFLFDSLGEAQNFGSIYGAFRDYLQEEYECAVECTDEKAFGAVLKDKSLSKSRKTAAAAELFGVTKKSAPQLYACLALACGATVKLKDLFNDDTLADAEKPSIAFTGSYEDNEPEYQSLLEERFDLVVRIKALYDWAILDEILAGHQYLCEAKVATYEQHKTDLQRLKTYVKTYRSELYKKIFKLSSKDDNYVAYSGHIKENGHTGVLEKTCNQEAFCAYLKKTLGDNGDPAYADMFAAIENGTFMPKQVSKDNGVIPMQLQKKELEGILDRAQRYLPFLTEKDETGLTVREKIISLCEHRIPYYVGPLNKHSKKAWIVRKEGKIYPWNFDQVVDLDRSAEAFIENLTSKCTYLPQYDVIPKYSLLYTKFMVLNELNNLTLDGQRVKVKLKQEIYRDLFEKRGKVTGKGLKNYLQSRGIAYEVMGGFDENFKASLKPWQDLAPYDLTYDEKEEVVRLITIFGDDKKLLKKRLRDLFGDRLTETERGKLARLKYTGWSRLSREFLTQVACTDKNTGEVTNIISALWDTNLNLMQLLYSADYMPTFGEQVAACNQFDKDVFLRQMVEDLYVSPKVKRPIYQSLLIAREIEKIQKCPPKKIFIEVARGEEKKERKKSRKAQLLELYQSCKKEYADLYAQLEGTEEDRLRSDKLYLYYTQMGRCMYTGEHIDLNSLLSGNVYDIDHIFPRSKVKDDSLNNRVLVKKVDNAKKTDVYPLDRETQAKMHGFWQLLLSKNLISKVKYQRLIRTTPLTDEELGAFISRQLVETRQSTKAVAKIMEQLYDKEQTEIVYVKAALASDFRHTYDMLKCREVNDFHHAKDAYLNVVVGNVYNVRCTHNLRNFIRGLQENGSRSYSMNAMFKWDIPGAWVAEDGELQKTQTKSLEIVKQMMAKNNIRYTRYAFCQHGGLFDQMPVKKGKGQIPLKQDGPKSDMAKYGAYNKAMSKYFALVSYLDKKGKEVRQLVPIDAVTEKAYLADPDGYVSSYVGTPAKVLIPCIKYNACLSFDGFRMHLSKKAGNQLGYKPGVQLVLSYGQEKYVRNITKYLSQNKDRPLNKYDGISVEENVALFDALMGKMNNSIFSLRFGDMGVKISNKREVFLALPPEEQCVVLAEILKILHANVMCGDLTNIKLAKTAGALVSNMKLSEIKGVTSVKLIHQSITGLFEQQIELLP

SEQ ID NO: 20074 - protein, 1330 aa, unidentified
  REGION 1..1330: note = Cas Enzyme sequence
MEQGTKRGDYYLGLDMGTDSVGWAVTDMDYRIPKFKGNAMWGVRLFDESNTAEERRLFRISRRRTQRRRERLDLLEMLFDGPVSTKDPAFFQRLRESDLYAEDKTTNTPFAVFADPDYTDTDYHRQFPTIYHLRNTLLHENGPYDVRLVFLAVHHIIKNRGHFLFDSLGEAQNFGSIYGAFRDYLQEEYECAVECTDEKAFGAVLKDKSLSKSRKTAAAAELFGVTKKSAPQLYACLALACGATVKLKDLFNDDTLAEAEKPSIAFTGSYEDNEPEYQSLLEERFDLVVRIKALYDWAILDEILAGHQYLCEAKVATYEQHKTDLQRLKTYVKTYRSELYKKIFKLSSKDDNYVAYSGHIKENGHTGVLEKTCNQEAFCAYLKKTLGDNGDPAYADMFAAIENGTFMPKQVSKDNGVIPMQLQKKELEGILDRAQRYLPFVTEKDETGLTVREKIISLCEHRIPYYVGPLNKHSKKAWIVRKEGKIYPWNFDQVVDLDRSAEAFIENLTSKCTYLPQYDVIPKYSLLYTKFMVLNELNNLTLDGQRVEVKLKQEIYRDLFEKRGKVTGKGLKNYLQSRGIAYEVMGGFDENFKASLKPWQDLAPYDLTYDEKEEVVRLITIFGDDKKLLKKRLRDLFGDRLTETERGKLARLKYTGWSRLSREFLTQVACTDKNTGEVTNIISALWDTNLNLMQLLYSADYMPTFGEQVAACNQFDKDVSLRQMVEDLYVSPKVKRPIYQSLLIAREIEKIQKCPPKKIFIEVARGEEKKERKKSRKAQLLELYQSCKKEYADLYAQLEGTEEDRLRSDKLYMYYTQMGRCMYTGEHIDLNSLLSGNVYDIDHIFPRSKVKDDSLNNRVLVKKVDNAKKTDVYPLDRETQAKMHGFWQLLLSKNLISKVKYQRLIRTTPLTDEELGAFISRQLVETRQSTKAVAQIMEQLYDKEQTEIVYVKAALASDFRHTYDMLKCREVNDFHHAKDAYLNVVVGNVYNVRCTHNLRNFIRGLQENGQRGYSMNAMFKWDIPGAWVAEGGELQETQTKSLKIVKQMMAKNNICYTRYAFCQHGGLFDQMPVKKGKGQIPLKQDGPKSDMAKYGAYNRAMSMYFALVTYQDKKDREVRQLVPIDAVTEKAYLTDPDGYVSSYVGVPAKVLIPCIKYNACLSFDGFRMHISQKSGNQIGYKPAMQLVLSYEQEKYVRNITKYLSQNKDRPLNTYDGISTEKNVTLFDTLIDKMRNTVLRLRFGDMGAKIADKREVFCALSSEEQCVVVAEILKILHANVMRGDLTNIKLAKTAGALVSNMKLSEIKGVTSVKLIHQSITGLFEQQIELLP

SEQ ID NO: 20075 - protein, 1332 aa, unidentified
  REGION 1..1332: note = Cas Enzyme sequence
MKNFNDDYYAGFDIGTDSVGYAVADTDYNLCKFKGNAMWGVDLFEESNSAAERRTLRSARRRGLRKRNRIEWLQMLFDEEISKVDNAFYQRLKESCLYLDDKSSNVPYAVFADGNYTDKEFHTDYPTIYHLRKELIKSSQPHDIRLVYLALHHIIKHRGHFLFDNMGSDFESESSFETLFDDLKLYLKEEYEIEFECNDSLRFSEILKDKTLKKTAKSSESYKLFGYSKRNNPYETALIDLMCGRNVGFSDMFGDKSFDSEEVNGITFESGYDDNENTYRDLLQEKFEPIEKAKAVYDWAILADILNGEKYNGKKYISFAKVKIYEEHSSDLKMLKDFVKERCKSLYGEIFRITKDKLDNYTAYCGKYKENGRNGVIQYRTNQADFCKYLKKKFEKLDKTGYEEMFDKIENGTFMPKIVVKDNGIIPMQVNRSELKAILKNASTYLEFLNKKDENGISVSDKIVKIFEFRIPYYVGPLNNHSLKSWLVRSDEKIYPWNFDSVVDIEQSAENFINNLTSKCTYLPTKDVIPKNSILYSAFTVLNELNNLRLDGKKPDVSLKQAIFNDLFMTHKKVRRKDLLNYLKSEKGITPDITGIDGDFKSSMRSAIEMSQFNLTDSEKEDAIKAITVFGDDKKLLRKRLKRQLGSKLSDEDIMRISKLKYKDWGRLSKEFLTEVYNVDKNTGELQFNIIHALWQTNDNLMELLGSKYGFEQSRQNYLDGIQTGQSLEKMVENLYISPAVKRPVYQSLKIMHEINKIQGHAPKKIFVEMTRKDGVKGDKGRKESRKTKLVDLYKKCGEDSGELWESLEKTPDDEFKRDRLYFYYTQFGKCMYTGEPITLSELYNKNIYEVDHIFPRSKVKDDSLDNRVLVKKQVNAHKDNTYPLDSSIREKMKGFWHLLMDKGLISKKKYERLTRATELSDSELSDFIARQIVETSQSTKAVASLFKELYPDTEIVYVKASTVSEFRHEYDFLKCREVNDFHHAKDAYLNIVVGNVYNERCTHNKSIFIKGLQTKTYSLNKMFSFNTPNAWSIDDNKSIKIVRKTMNKNNIRFTRYALTRNGGLFKMNPLKKGSGQVSLKQNSPLSDISKYGGYDRPTSSYFSFVKYEGKKGKEMRRLVAIDSYIKARYEANPEKYLSENLGLKNPVVLIPVVKYNACIEIDGFRMHISSKSSGGKQIVYKPAMQLTVSYDTEKYIRNVVKLNSKPENYNITELDKVSADENLKLFDILTSKMTDTVLKVKFGDMGAKIISHRDAFEKLDIRKQCFVLAEILKIIHCNISEGNLRFIGGAKQSGSIKMSSVISGIKGVKSIYLVHQSVTGLFEKKIDLLHM

SEQ ID NO: 20076 - protein, 1325 aa, unidentified
  REGION 1..1325: note = Cas Enzyme sequence
MKNFNDDYYAGFDIGTDSVGYAVADTDYNLCKFKGNAMWGVDLFEESNSAAERRTLRSARRRGLRKRNRIEWLQMLFDQEISKVDNAFYQRLKESCLYLDDKSSNVPYAVFADGNYTDKEFHTDYPTIYHLRKELIKSSQPHDVRLVYLALHHIIKHRGHFLFDNMGSDFESESSFDALFDDLKLYLKEEYEIEFECNDSLRFSEILKDKTLKKTAKSSESYKLFGYSKRNNPYETALIDLMCGRKVKFSDMFGDKSFDSEEVNGITFESGYDDNENTYRDLLQEKFELIEKAKAVYDWAILADILNGEKYISFAKVKTYEEHSSDLKMLKDFVKERCKSLYGEIFRITKDKLDNYTAYCGKYKENGRNGVIQYRTNQADFCKYLKKKFEKLDKTGYEEMFDKIENGTFMPKIVVKDNGVIPMQVNRSELKAILKNASTYLEFLNKKDENGISVSDKIVKIFEFRIPYYVGPLNNHSLKSWLVRSDEKIYPWNFDSVVDIEQSAENFINNLTSKCTYLPMKDVIPKNSILYSAFTVLNELNNLRLDGKKPDVSLKQAIFNDLFMTHKKVRKKDLLNYLKSEKGITPDITGIDGDFKSSMRSAIEMSQFNLTDSEKEDAIKAITVFGDDKKLLRKRLKRQLGSKLSDEDIMRISKLKYKDWGRLSKEFLTEVYNVDKNTGELQFNIIHALWQTNDNLMELLGSKYGFEQSRQNYLDGIQTGQSLEKMVENLYISPAVKRPVYQSLKIMHEINKIQGHAPKKIFVEMTRKDGVKGDKGRKESRKTKLVDLYKKCGEDSGELWESLEKTPDDEFKRDRLYFYYTQFGKCMYTGEPINLSELYNQNIYDVDHIFPRSKVKDDSLDNRVLVKKQVNAHKDNTYPLDSSIREKMKGFWHLLMDKGLISKKKYERLTRATELTDSELSDFIARQIVETSQSTKAVASLFKELYPDTEIVYVKASTVSEFRHEYDFLKCREVNDFHHAKDAYLNIVVGNVYNERCTHNKSIFIKGLQTKTYSLNKMFSFNTPNAWSIDDNKSIKIVRKTMNKNNIRFTRYAFTKNGELFKMNPLKKGRGQAPLKQNSPLSDISKYGGYDKPTSSYFSFVKYEGKKGKEMRRLVAIDSYIKAQYESNPEKYLSENLGLKNPVVLIPVVKYNACIEIDGFRMHISAKTGKQIIYKPAMQLTVSYDTEKYIRNVVKLNSKPENYNITELDKVSTDENIELFDILTYKMTDTVLKVKFGDMGAKIISHRDAFEKLDIRKQCFVLTEILKIIHCNAVLGNLTYIGEGSSSGRVGLNSVLSEVKGVKSIYLVHQSVTGLFEKKIDLLHM

SEQ ID NO: 20077 - protein, 1325 aa, unidentified
  REGION 1..1325: note = Cas Enzyme sequence
MKNFNNDYYAGFDIGTDSVGYAVADTDYNLCKFKGNAMWGVDLFEESNSAAERRTLRSARRRGLRKRNRIEWLQMLFDEEISKVDNAFFQRLKESCLYLDDKSSNVPYAVFADGNYTDKEFHTDYPTIYHLRKELIKSSQPHDIRLVYLALHHIIKHRGHFLFDNMGSDFENESSFEALFDDLKLYLKEEYEIEFECNDSLRFSEILKDKTLKKTAKSSESYKLFGYSKRNNPYETALIDLMCGRKVKFSDMFGDKSFDSEEVNGITFESGYDDNENTYRDLLQEKFELIEKAKAVYDWAILADILNGEKYISFAKVKTYEEHSSDLKMLKDFVKERCKSLYGEIFRITKDKLDNYTAYCGKYKENGRNGVIQYRTNQADFCKYLKKKFEKLDKTGYEEMFDKIENGTFMPKIVVKDNGVIPMQVNRSELKAILKNASTYLEFLNKKDENGISVSDKIVKIFEFRIPYYVGPLNNHSLKSWLVRSDEKIYPWNFDSVVDIEQSAENFINNLTSKCTYLPTKDVIPKNSILYSAFTVLNELNNLRLDGKKPDVSLKQAIFNDLFMTHKKVRRKDLLNYLKSEKGVAFDITGIDGDFKSSMRSAIEMSQFNLTDSEKEDAIKAITVFGDDKKLLRKRLKRQLGSKLSDEDIMRISKLKYKDWGRLSKEFLTEVYNVDKNTGELQFNIIHALWQTNDNLMELLGSKYGFEQSRQNYLDGIQTGQSLEKMVENLYISPAVKRPVYQSLKIMHEINKIQGHAPKKIFVEMTRKDGVKGDKGRKESRKTKLVDLYKKCGEDSGELWESLEKTPDDEFKRDRLYFYYTQFGKCMYTGEPINLSELYNQNIYDVDHIFPRSKVKDDSLDNRVLVKKQVNAHKDNTYPLDSSIREKMKGFWHLLMDKGLISKKKYERLTRATELTDSELSDFIARQIVETSQSTKAVASLFKELYPDTEIVYVKASTVSEFRHEYDFLKCREVNDFHHAKDAYLNIVVGNVYNERCTHNKSIFIEGLKTKAYSLNKMFSFNTPNAWSIDDNKSIKIVRKTMNKNNIRFTRYALTRNGGLFKMNPLKKGSGQVSLKQNSPLSDISKYGGYDKPTSSYFSFVKYEGKKGKEMRRLVAIDSYIKARYEANPEKYLSETLGLKNPVVLIPVVKYNACIEIDGFRMHISAKTGKQIIYKPAMQLTVSYDTEKYIRNVVKLNSKPENYNITELDKVSADENLKLFDILTYKMTDTVLKVKFGDMGVKIASHRDAFEKLDIRKQCFVLTEILKIIHCNAVLGNLTYIGEGSSSGRVGLNSVLSEVKGVKSIYLVHQSVTGLFEKKIDLLNM

SEQ ID NO: 20078 - protein, 1331 aa, unidentified
  REGION 1..1331: note = Cas Enzyme sequence
MKNFNNDYYAGFDIGTDSVGYAVADTDYILCKFKGNAMWGVDLFEESNSAAERRTLRSARRRGLRKRNRIEWLQMLFDEEISKVDNAFFQRLKESCLYLDDKSSNVPYAVFADGNYTDKEFHTDYPTIYHLRKELIKSSQPHDIRLVYLALHHIIKHRGHFLFDNMGSDFESESSFEALFDDLKLYLKEEYEIEFECNDSLRFSEILKDKTLKKTAKSSESYKLFGYSKRNNPYETALIDLMCGRKVKFSDMFGDKSFDSEEVNGITFESGYDDNENTYRDLLQEKFELIEKAKAVYDWAILADILNGEKYISFAKVKTYEEHSSDLKILKKFVKERCKPLYDEIFRITKDKLDNYTAYCGKYKENGKNGVIIYRPDVDPQDKFCKYLKKKFEKLDKTGYEEMFDKIENGTFMPKIVVKDNGVIPMQVNRSELKAILKNASTYLEFLNKKDENGISVSDKIVKIFEFRIPYYVGPLNNHSLKSWLVRSDEKIYPWNFDSVVDIEQSAENFINNLTSKCTYLPTKDVIPKNSILYSAFTVLNELNNLRLDGKKPDVSLKQAIFYDLFMTHKKVRRKDLLNYLKSEKGITPDITGIDGDFKSSMRSAIEMSQFNLTDSEKEDAIKAITVFGDDKKLLRKRLKRQFGSKLSDEDIMRISKLKYKDWGKLSKEFLTEVYNVDKNTGELQFNIIHALWQTNDNLMELLGSKYGFEQSRQNYLDGIQTGQSLEEMVENLYISPAVKRPVYQSLKIMHEINKIQGHAPKKIFVEMTRKDGVKGDKGRKESRKTKLVDLYKKCGEDSGELWESLEKTPDDEFKRDRLYFYYTQFGKCMYTGEPINLSELYNQNIYDVDHIFPRSKVKDDSLDNRVLVKKQVNAHKDNTYPLDSSIREKMKGFWHLLMDKGLISKKKYERLTRATELTDSELSDFIARQIVETSQSTKAVASLFKELYPDTEIVYVKASLVSEFRDESRGFGFLKCREVNDFHHAKDAYLNIVVGNVYNERCTHNKSIFIKGLQTKTYSLNKMFSFNTPNAWSIDDNKSIKIVRKTMNKNNIRFTRYALTRNGGLFKMNPLKKGSGQVSLKQNSPLSDISKYGGYDKPASSYFSFVKYEGKKGKEMRQLVAIDSYIKARYEANPEKYLSETLGLKNPVVLIPVVKYNACIEIDGFRMHISAKTGKQIIYKPAMQLTVSYDTEKYIRNVVKLNSKPENYNITELDKVSAEENVELFDILTYKMTDTVLKVKFGDMGAKIISHRDAFEKLDIRKQCFVLTEILKIIHCNAVLGNLTYIGEGSSSGRVGLNSVLSEVKGVKSIYLVHQSVTGLFEKKIDLLNM

SEQ ID NO: 20079 - protein, 1327 aa, unidentified
  REGION 1..1327: note = Cas Enzyme sequence
MKNFNDDYYAGFDIGTDSVGYAVADTDYNLCKFKGNAMWGVDLYEESNSAAERRTLRSARRRGLRKRNRIEWLQMLFDEEISKVDNAFFQRLKESCLYLDDKSSNVPYAVFADGNYTDKEFHTDYPTIYHLRKELIKSSQPHDIRLVYLALHHIIKHRGHFLFDNMGSDFESESSFEALFDDLKLYLKEEYEIEFECNDSLRFSEILKDKTLKKTAKSSESYKLFGYSKRNNPYETALIDLMCGRKVKFSDMFGDKSFDSEEINGITFESGYDDNENTYRDLLQEKFELIEKAKAVYDWAILADILNGEKYISFAKVKTYEEHNSDLKMLKDFVKERCKSLYGEIFRITKDKLDNYTAYCGKYKENGRNGVIQYRTNQADFCKYLKKKFEKLDKTGYEEMFDKIENGTFMPKIVVKDNGVIPMQVNRSELKAILKNASTYLEFLNKKDENGISVSDKIVKIFEFRIPYYVGPLNNHSLKFWLVRSDEKIYPWNFDSVVDIEQSAENFINNLTSKCTYLPTKDVIPKNSILYSAFTVLNELNNLRLDGKKPDVSLKQAIFNDFFMTHKKVRRKDLLNYLKSEKGITPDITGIDGDFKSSMRSAIEMSQFNLTDSEKEDAIKAITVFGDDKKLLRKRLKRQLGSKLSDEDIMRISKLKYKDWGRLSKEFLTEVYNVDKNTGELQFNIIHALWQTNDNLMELLGSKYGFEQSRQNYLDGIQTGQSLEKMVENLYISPAVKRPVYQSLKIMHEINKIQGHAPKKIFVEMTRKDGVKGDKGRKESRKTKLVDLYKKCGEDSGELWESLEKTPDDEFKRDRLYFYYTQFGKCMYTGEPINLSELYNQNIYDVDHIFPRSKVKDDSLDNRVLVKKQVNAHKDNTYPLDSSIREKMKGFWHLLMDKGLISKKKYERLTRATPLSDSELSDFIARQIVETSQSTKAVASLFKELYPDTEIVYVKASTVSEFRHEYDFLKCREVNDFHHAKDAYLNIVVGNVYNERCTHNKSIFIKGLQTKTYSLNKMFSFNTPNAWSIDDNKSIKIVRKTMNKNNIRFTRYALTRNGGLFKMNPLKKGSGQVSLKQNSPLSDISKYGGYDKPASSYFSFVKYEGKKGKEMRQLVAIDSYIKARYEANPEKYLSETLGLKNPVVLIPVVKYNACIEIDGFRMHISSKSNGGKKIVYKPAMQLTVSYDTEKYIRNVVKLNSKPENYNITELDKVSAEENVELFDILIFKMTDTILKVKFGDMGVKIASHRDTFEKLDVRKQCFVLAEILKIIHSNVVTGDLTLIDEAKKAGVVSTNSVLSEIKSVKSIYLVHQSVTGLFEKKIDLLNM

SEQ ID NO: 20080 - protein, 1333 aa, unidentified
  REGION 1..1333: note = Cas Enzyme sequence
MKNFNNDYYTGFDIGTDSVGYAVADTDYNLCKFKGNAMWGVDLFEESNSAAERRTLRSARRRGLRKRNRIEWLQMLFDEEISKVDNAFFQRLKESCLYLDDKSSNVPYAVFADGNYTDKEFHTDYPTIYHLRKELIKSSQPHDIRLVYLALHHIIKHRGHFLFDNMGSDFESESSFETLFDDLKLYLKEEYEIEFECNDSLRFSEILKDKTLKKTAKSSESYKLFGYSKRNNPYETALIDLMCGRNVGFSDMFGDKSFDSEEVNGITFESGYDDNENTYRDLLQEKFEPIEKAKAVYDWAILADILNGEKYNGKKYISFAKVKTYEEHSSDLKMLKDFVKERCKSLYGEIFRITKDKLDNYTAYCGKYKENGRNGVIQYRTNQADFCKYLKKRFEKLDKTGYEEMFDKIENGTFMPKIVVKDNGIIPMQVNRSELKAILKNASTYLEFLNKKDENGISVSDKIVKIFEFRIPYYVGPLNNHSLKSWLVRSDEKIYPWNFDSVVDIEQSAENFINNLTSKCTYLPTKDVIPKNSILYSAFTVLNELNNLRLDGKKPDVSLKQAIFNDLFMTHKKVRRKDLLNYLKSEKGITPDITGIDGDFKSSMRSAIEMSQFNLTDSEKEDAIKAITVFGDDKKLLRKRLKRQLGSKLSDEDIMRISKLKYKDWGRLSKEFLTEVYNVDKNTGELQFNIIHALWQTNDNLMELLGSKYGFEQSRQNYLDGIQTGQSLEKMVENLYISPAVKRPVYQSLKIMHEINKIQGHAPKKIFVEMTRKDGVKGDKGRKESRKTKLVDLYKKCGEDSGELWESLEKTPDDEFKRDRLYFYYTQFGKCIYTGEPINLSELYNQNIYDVDHIFPRSKVKDDSLDNRVLVKKQVNAHKDNTYPLDSSIREKMKGFWHLLMDKGLISKKKYERLTRATPLSDSELSDFIARQIVETSQSTKAVASLFKELYPDTEIVYVKASLVSEFRDESRGFGFLKCREVNDFHHAKDAYLNIVVGNVYNERCTHNKSIFIKGLQTKTYSLNKMFSFNTPNAWSIDDNKSIKIVRKTMNKNNIRFTRYALTRNGGLFKMNPLKKGSGQVSLKQNSPLSDISKYGGYDKPASSYFSFVKYEGKKGKEMRQLVAIDSYIKARYEANPEKYLSETFGLKKPVVLIPVVKRDACIEIDGFRMHISGKTGSRITFKPAMQITVSYDTEKYIRNVVKLNSKPENYNITELDKVSTDENIELFDILTYKMTDTVLKVKFGDMGAKIISHRDAFEKLDIRKQCFVLTEILKIIHCNAVLGNLTYIGEGSSSGRVGLNSVLSEVKGVKSIYLVHQSVTGLFEKKIDLLHM

SEQ ID NO: 20081 - protein, 1332 aa, unidentified; identical to SEQ ID NO: 20075
  REGION 1..1332: note = Cas Enzyme sequence

SEQ ID NO: 20082 - protein, 1330 aa, unidentified
  REGION 1..1330: note = Cas Enzyme sequence
MKNFNNDYYTGFDIGTDSVGYAVADTDYNLCKFKGNAMWGVDLFEESNSAAERRTLRSARRRGLRKRNRIEWLQMLFDEEISKVDNAFYQRLKESCLYLDDKSSNVPYAVFADGNYTDKEFHTDYPTIYHLRKELIKSSQPHDIRLVYLALHHIIKHRGHFLFDNMGSDFESESSFEALFDDLKLYLKEEYEIEFECNDSLRFSEILKDKTLKKTAKSSESYKLFGYSKRNNPYETALIDLMCGRKVKFSDMFGDKSFDSEEVNGITFESGYDDNENTYRDLLQEKFELIEKAKAVYDWAILADILNGEKYISFAKVKTYEEHSSDLKMLKDFVKERCKSLYGEIFRITKDKLDNYTAYCGKYKENGRNGVIQYRTNQADFCKYLKKKFEKLDKTGYEEMFDKIENGTFMPKIVVKDNGVIPMQVNRSELKAILKNASTYLEFLNKKDENGISVSDKIVKIFEFRIPYYVGPLNNHSLKSWLVRSDEKIYPWNFDSVVDIEQSAENFINNLTSKCTYLPTKDVIPKNSILYSAFTVLNELNNLRLDGKKPDVSLKQAIFNDLFMTHKKVRRKDLLNYLKSEKGITPDITGIDGDFKSSMRSAIEMSQFNLTDSEKEDAIKAITVFGDDKKLLRKRLKRQLGSKLSDEDIMRISKLKYKDWGRLSKEFLTEVYNVDKNTGELQFNIIHALWQTNDNLMELLGSKYGFEQSRQNYFDGIQTGQSLEKMVENLYISPAVKRPVYQSLKIMHEINKIQGHAPKKIFVEMTRKDGVKGDKGRKESRKTKLVDLYKKCGEDSGDLWESLEKTPDDEFKRDRLYFYYTQFGKCMYTGEPINLSELYNQNIYDVDHIFPRSKVKDDSLDNRVLVKKQVNAHKDNTYPLDSSIREKMKGFWHLLMDKGLISKKKYERLTRVTPLSDSELSDFIARQIVETSQSTKAVASLFKELYPDTEIVYVKASLVSEFRDESRGFGFLKCREVNDFHHAKDAYLNIVVGNVYNERCTHNKSIFIKGLQTKTYSLNKMFSFNTPNAWSIDDNKSIKIVRKTMNKNNIRFTRYALTRNGGLFKMNPLKKGSGQVSLKQNSPLSDISKYGGYDKPTSSYFSFVKYEGKKGKEMRRLVAIDSYIKARYEANPEKYLSETLGLKNPVVLIPVVKYNACIEIDGFRMHISSKSNGGKKIVYKPAMQLTVSYDTEKYIRNVVKLNSMPENYNITERDKVSAEENVELFDILIFKMTDTILKVKFGDMGVKIASHRDTFEKLDVRKQCFVLAEILKIIHSNVVTGDLTLIDEAKKAGVVSTNSVLSEIKSVKSIYLVHQSVTGLFEKKIDLLNM

SEQ ID NO: 20083 - protein, 1328 aa, unidentified
  REGION 1..1328: note = Cas Enzyme sequence
MKNFNDDYYVGFDIGTDSVGYAVADTDYNLCKFKGNAMWGVDLFEESNSAAERRTLRSARRRGLRKRNRIEWLQMLFDEEISKVDNAFYQRLKESCLYLDDKSSNVPYAVFADGNYTDKEFHTDYPTIYHLRKELIKSSQPHDIRLVYLALHHIIKHRGHFLFDNMGSDFESESSFEALFDDLKLYLKEECEIEFECNDSLRFSEILKDKTLKKTAKSSESYKLFGYSKRNNPYETALIDLMCGRKVKFSDMFGDKSFDSEEVNGITFESGYDDNENTYRDLLQEKFELIEKAKAVYDWAILADILNGEKYISFAKVKTYEEHNSDLKMLKDFVKERCKSLYGEIFRITKDKLDNYTAYCGKYKENGRNGVIQYRTNQADFCKYLKKKFEKLDKTGYEEMFDKIENGTFMPKIVVKDNGVIPMQVNRSELKAILKNASTYLEFLNKKDENGISVSDKIVKIFEFRIPYYVGPLNNHSLKSWLVRSDEKIYPWNFDSVVDIEQSAENFINNLTSKCTYLPTKDVIPKNSILYSAFTVLNELNNLRLDGKKPDVSLKQAIFNDLFMTHKKVRRKDLLNYLKSEKGITPDITGIDGDFKSSMRSAIEMSQFNLTDSEKEDAIKAITVFGDDKKLLRKRLKRQLGSKLSDEDIMRISKLKYKDWGRLSKEFLTEVYNVDKNTGELQFNIIHALWQTNDNLMELLGSKYGFEQSRQYYLDGIQTGQSLEKMVENLYISPAVKRPVYQSLKIMHEINKIQGHAPKKIFVEMTRKDGVKGDKGRKESRKTKLVDLYKKCGEDSGELWESLEKTPDDEFKRDRLYFYYTQFGKCMYTGEPINLSELYNQNIYDVDHIFPRSKVKDDSLDNRVLVKKQVNAHKDNTYPLDSSIREKMKGFWHLLIDKGLISKKKYERLTRANELSDSELSDFIARQIVETSQSTKAVASLFKELYPDTEIVYVKASLVSEFRDESRGFGFLKCREVNDFHHAKDAYLNIVVGNVYNERCTHNKSIFIKGLQTKTYSLNKMFSFNTPNAWSIDDNKSIKIVRKTMNKNNIRFTRYAFAKNGELFKRKPLKKGRGQAPLKQNSPLSDISKYGGYDKPTSSYFSFVKYEGKKGKEMRQLVAIDSYIKARYEANPEKYLSETLGLKNPVVLIPVVKYNACIEIDGFRMHISAKTDKRIQYKPAMQLTVSYDTEKYIRNVVKLNSKPENYNITELDKVSTDENLKLFDILTSKMTDTILKVKFGDMGVKIASHRDVFEKLDVRKQCFVLAEILKIIHCNILEGDLTFIGGAKQSGSIKMSSVISGIKGVKSIYLVHQSVTGLFEKKIDLLHM

SEQ ID NO: 20084 - protein, 1325 aa, unidentified
  REGION 1..1325: note = Cas Enzyme sequence
MKNFNDDYYTGFDIGTDSVGYAVADTDYNLCKFKGNAMWGVDLFEESNSAAERRTLRSARRRGLRKRNRIEWLQMLFDEEISKVDNAFFQRLKESCLYLDDKSSNVPYAVFADGNYTDKEFHTDYPTIYHLRKELIKSSQPHDIRLVYLALHHIIKHRGHFLFDNMGSDFESESSFEALFDDLKLYLKEEYEIEFECNDSLRFSEILKDKTLKKTAKSSESYKLFGYSKRNNPYETALIDLMCGRKVKFSDMFGDKSFDSEEVNGITFESGYDDNENTYRDLLQEKFELIEKAKAVYDWAILADILNGEKYISFAKVKTYEEHNSDLKMLKDFVKERCKSLYGEIFRITKDKLDNYTAYCGKYKENGRNGVIQYRTNQADFCKYLKKKFEKLDKTGYEEMFDKIENGTFMPKIVVKDNGVIPMQVNRSELKAILKNASTYLEFLNKKDENGISVSDKIVKIFEFRIPYYVGPLNNHSLKSWLVRSDEKIYPWNFDSVVDIEQSAENFINNLTSKCTYLPTKDVIPKNSILYSAFTVLNELNNLRLDGKKPDVSLKQAIFNDLFMTHKKVRRKDLLNYLKSEKGVAFDITGIDGDFKSSMRSAIEMSQFNLTDSEKEDAIKAITVFGDDKKLLRKRLKRQLGSKLSDEDIMRISKLKYKDWGRLSKEFLTEVYNVDKNTGELQFNIIHALWQTNDNLMELLGSKYGFEQSRQNYLDGIQTGQSLEKMVENLYISPAVKRPVYQSLKIMHEINKIQGHAPKKIFVEMTRKDGVKGDKGRKESRKTKLVDLYKKCGEDSGELWESLEKTPDDEFKRDRLYFYYTQFGKCMYTGEPINLSELYNQNIYDVDHIFPRSKVKDDSLDNRALVKKQVNAHKDNTYPLDSSIREKMKGFWHLLMDKGLISKKKYERLTRVTPLSDSELSDFIARQIVETSQSTKAVASLFKELYPDTEIVYVKASTVSEFRHEYDFLKCREVNDFHHAKDAYLNIVVGNVYNERCTHNKSIFIEGLKTKAYSLNKMFSFNTPNAWSIDDNKSIKIVRKTMNKNNIRFTRYALTRNGGLFKMNPLKKGSGQVSLKQNSPLSDISKYGGYDKPTSSYFSFVKYEGKKGKEMRQLVAIDSYIKAQYEANPEKYLSETLGLKNPVVLIPVVKYNACIEIDGFRMHISAKTGKQIIYKPAMQLTVSYDTEKYIRNVVKLNSKPENYNITELDKVSTDENIELFDILTYKMTDTVLKVKFGDMGAKIISHRDAFEKLDIRKQCFVLTEILKIIHCNAVLGNLTYIGEGSSSGRVGLNSVLSEVKGVKSIYLVHQSVTGLFEKKIDLLHM

SEQ ID NO: 20085 - protein, 1325 aa, unidentified; identical to SEQ ID NO: 20076
  REGION 1..1325: note = Cas Enzyme sequence

SEQ ID NO: 20086 - protein, 985 aa, unidentified
  REGION 1..985: note = Cas Enzyme sequence
MKNFNDDYYAGFDIGTDSVGYAVADTDYNLCKFKGNAMWGVDLFEESNSAAERRTLRSARRRGLRKRNRIEWLQMLFDEEISKVDNAFYQRLKESCLYLDDKSSNVPYAVFADGNYTDKEFHTDYPTIYHLRKELIKSSQPHDIRLVYLALHHIIKHRGHFLFDNMGSDFESESSFEALFDDLKLYLKEEYEIEFECNDSLRFSEILKDKTLKKTAKSSESYKLFGYSKRNNPYETALIDLICGRKVKFSDMFGDKSFDSEEVNGITFESGYDDNENTYRDLLQEKFELIEKAKAVYDWAILADILNGEKYNGKNYISFAKVKTYEEHSSDLKILKKFVKERCKPLYDEIFRITKDKLDNYTAYCGKYKENGKNGVIIYRPDVDPQDKFCKYLKKKFEKLDKTGYEEMFDKIENGTFMPKIVVKDNGVIPMQVNRSELKAILKNASTYLEFLNKKDENGISVSDKIVKIFEFRIPYYVGPLNNHSLKSWLVRSNEKIYPWNFDSVVDIEQSAENFINNLTSKCTYLPTKDVIPKNSILYSAFTVLNELNNLRLDGKKPDVSLKQAIFNDLFMTHKKVRRKDLLNYLKSEKGITPDITGIDGDFKSSMRSAIEMSQFNLTDSEKEDAIKAITVFGDDKKLLRKRLKRQLGSKLSDEDIMRISKLKYKDWGRLSKEFLTEIYNVDKNTGELQFNIIHALWQTNDNLMELLGSKYGFEQSRQNYLDGIQTGQSLEKMVENLYISPAVKRPVYQSLKIMHEINKIQGHAPKKIFVEMTRKDGVKGDKGRKESRKTKLVDLYKKCGEDSGELWESLEKTPDDEFKRDRLYFYYTQFGKCMYTGEPITLSELYNKNIYEVDHIFPRSKVKDDSLDNRVLVKKQVNAHKDNTYPLDSSIREKMKGSWHFLMDKGLISKKKYERLTRVTPLSDSELSDFIARQIVETSQSTKAVASLFKELYPDTEIVYVKASTVSEFRCKFSERIGKTVKSR

SEQ ID NO: 20087 - protein, 1332 aa, unidentified
  REGION 1..1332: note = Cas Enzyme sequence
MKNFNNDYYTGFDIGTDSVGYAVADTDYNLCKFKGNAMWGVDLFEESNSAAERRTLRSARRRGLRKRNRIEWLQMLFDEEISKVDNAFFQRLKESCLYLDDKSSNVPYAVFADGNYTDKEFHTDYPTIYHLRKELIKSSQPHDIRLVYLALHHIIKHRGHFLFDNMGSDFESESSFETLFDDLKLYLKEEYEIEFECNDSLRFSEILKDKTLKKTAKSSESYKLFGYSKRNNPYETALIDLMCGRNVGFSDMFGDKSFDSEEVNGITFESGYDDNENTYRDLLQEKFEPIEKAKAVYDWAILADILNGEKYNGKKYISFAKVKTYEEHSSDLKMLKDFVKERCKSLYGEIFRITKDKLDNYTAYCGKYKENGRNGVIQYRTNQADFCKYLKKKFEKLDKTGYEEMFDKIENGTFMPKIVVKDNGVIPMQVNRSELKAILKNASTYLEFLNNKDENGISVSDKIVKIFEFRIPYYVGPLNNHSLKSWLVRSDEKVYPWNFDSVVDIEQSAENFINNLTSKCTYLPTKDVIPKNSILYSAFTVLNELNNLRLDGKKPDVSLKQAIFNDLFMTHKKVRRKDLLNYLKSEKGITPDITGIDGDFKSSMRSAIEMSQFNLTDSEKEDAIKAITVFGDDKKLLRKRLKRQLGSKLSDEDIMRISKLKYKDWGRLSKEFLTEVYNVDKNTGELQFNIIHALWQTNDNLMELLGSKYGFEQSRQNYLDGIQTGQSLEKMVENLYISPAVKRPVYQSLKIMHEINKIQGHAPEKIFVEMTRKDGVKGDKGRKESRKTKLVDLYKKCGEDSGELWESLEKTPDDEFKRDRLYFYYTQFGKCMYTGEPINLSELYNQNIYDVDHIFPRSKVKDDSLDNRVLVKKQVNAHKDNTYPLDSSIREKMKGFWHLLMDKGLISKKKYERLTRATELTDSELSDFIARQIVETSQSTKAVASLFKELYPDTEIVYVKASTVSKFRHKYDFLKCREVNDFHHAKDAYLNIVVGNVYNERCTHNKSIFIKGLQTKTYSLNKMFSFNTPNAWSIDDNKSIKIVRKTMNKNNIRFTRYALTRNGGLFKMNPLKKGSGQVSLKQNSPLSDISKYGGYDKPTSSYFSFVKYEGKKGKEMRQLVAIDSYIKARYEANPEKYLSETLGLKNPVVLIPVVKYNACIEIDGFRMHISSKSNGGKTVVCKPAMQLTVSYDTEKYIRNIVKLNSKPENYNITELDKVSADENLKLFDILTSKMTDTILKVKFGSMGTKISAHRDAFEKLDVRKQCFVLAEILKIIHSNVLTGDLSFIGESKKSGVVSTNSVLSEVKGVKSIYLVHQSVTGLFEKKIDLLHM

SEQ ID NO: 20088 - protein, 1335 aa, unidentified
  REGION 1..1335: note = Cas Enzyme sequence
MKNFNDDYYAGFDIGTDSVGYAVADTDYNLCKFKGNAMWGVDLFEESNSAAERRTLRSARRRGLRKRNRIEWLQMLFDEEISKVDNAFYQRLKESCLYLDDKSSNVPYAVFADGNYTDKEFHTDYPTIYHLRKELIKSSQPHDIRLVYLALHHIIKHRGHFLFDNMGSDFESESSFETLFDDLKLYLKEEYEIEFECNDSLRFSEILKDKTLKKTAKSSESYKLFGYSKRNNPYETALIDLMCGRNVGFSDMFGDKSFDSEEVNGITFESGYDDNENTYRDLLQEKFEPIEKAKAVYDWAILADILNGEKYNGKKYISFAKVKTYEEHSSDLKMLKDFVKERCKSLYGEIFRITKDKLDNYTAYCGKYKENGRNGVIQYRTNQADFCKYLKKRFEKLDKTGYEEMFDKIENGTFMPKIVVKDNGIIPMQVNRSELKAILKNASTYLEFLNKKDENGISVSDKIVKIFEFRIPYYVGPLNNHSLKSWLVRSDEKIYPWNFDSVVDIEQSAENFINNLTSKCTYLPTKDVIPKNSILYSAFTVLNELNNLRLDGKKPDVSLKQAIFNDLFMTHKKVRRKDLLNYLKSEKGITPDITGIDGDFKSSMRSAIEMSQFNLTDSEKGDAIKAITVFGDDKKLLRKRLKRQLGSKLSDEDIMRISKLKYKDWGRLSKEFLTEVYNVDKNTGELQFNIIHALWQTNDNLMELLGSKYGFEQSRQNYLDGIQTGQSLEKMVENLYISPAVKRPVYQSLKIMHEINKIQGHAPKKIFVEMTRKDGVKGDKGRKESRKTKLVDLYKKCGEDSGELWESLEKTPDDEFKRDRLYFYYTQFGKCMYTGEPINLSELYNQNIYDVDHIFPRSKVKDDSLDNRVLVKKQVNAHKDNTYPLDSSIREKMKGFWHLLMDKGLISKKKYERLTRATELTDSELSDFIARQIVETSQSTKAVASLFKELYPNTEIVYVKASLVSEFRDESRGFGFLKCREVNDFHHAKDAYLNIVVGNVYNERCTHNKSIFIKGLQTKTYSLNKMFSFNTPNAWSIDDNKSIKIVRKTMNKNNIRFTRYALTRNGGLFKMNPLKKGSGQVSLKQNSPLSDISKYGGYDKPTSSYFSFVKYEGKKGKEMRRLVAIDSYIKARYEANPEKYLSETLGLKNPVVLIPVVKYNACIEIDGFRMHISSKSGGGRQIVYKPAMQLTVSYDTEKYIRNVVKLNSKPENYNITELDKVSADENLKLFDILTSKMTETILKVKFGDMGVKIASHRDAFEKLDVRKQCFVLAEILKIIHCNILEGDLTFIGGAKQSGSIKMSSAISGIKGVKSIYLVHQSVTGLFEKKIDLLHM

SEQ ID NO: 20089 - protein, 1325 aa, unidentified
  REGION 1..1325: note = Cas Enzyme sequence
MKNFNDDYYVGFDIGTDSVGHAVADTDYNLCKFKGNAMWGVDLFEESNSAAERRTLRSARRRGLRKRNRIEWLQMLFDEEISKVDNAFFQRLKESCLYLDDKSSNVPYAVFADGNYTDKEFHTDYPTIYHLRKELIKSSQPHDIRLVYLALHHIIKHRGHFLFDNMGSDFESESSFETLFDDLKLYLKEEYEIEFECNDSLRFSEILKDKTLKKTAKSSESYKLFGYSKRNNPYETALIDLMCGRKVKFSDMFGDKSFDSEEVNGITFESGYDDNENTYRDLLQEKFELIEKAKAVYDWAILADILNGEKYISFAKVKTYEEHSSDLKMLKDFVKERCKSLYGEIFRITKDKLDNYTAYCGKYKENGRNGVIQYRTNQADFCKYLKKKFEKLDKTGYEEMFDKIENGTFMPKIVVKDNGVIPMQVNRSELKAILKNASTYLEFLNKKDENGISVSDKIVKIFEFRIPYYVGPLNNHSLKSWLVRSDEKIYPWNFDSVVDIEQSAENFINNLTSKCTYLPTKDVIPKNSILYSAFTVLNELNNLRLDGKKPDVSLKQAIFNDLFMTHKKVRRKDLLNYLKSEKGITPDITGIDGDFKSSMRSAIEMSQFNLTDSEKEDAIKAITVFGDDKKLLRKRLKRQLGSKLSDEDIMRISKLKYKDWGRLSKEFLTEVYNVDNNTGELQFNIIHALWQTNDNLMELLGSKYGFEQSRQNYLDGIQTGQSLEKMVENLYISPAVKRPVYQSLKIMHEINKIQGHAPKKIFVEMTRKDGVKGDKGRKESRKTKLVDLYKKCGEDSGELWESLEKTPDDEFKRDRLYFYYTQFGKCMYTGEPINLSELYNQNIYDVDHIFPRSKVKDDSLDNRVLVKKQVNAHKDNTYPLDSSIREKMKGFWHFLMDKGLISKKKYERLTRATELTDSELSDFIARQIVETSQSTKAVASLFKELYPDTEIVYVKASTVSEFRHEYDFLKCREVNDFHHAKDAYLNIVVGNVYNERCTHNKSIFIKGLQTKTYSLNKMFSFNTPNAWSIDDNKSIKIVRKTMNKNNIRFTRYALTRNGGLFKMNPLKKGSGQVSLKQNSPLSDISKYGGYDKPTSSYFSFVKYEGKKGKEMRRLVAIDSYIKARYEANPEKYLSETLGLKNPVVLIPVVKYNACIEIDGFRMHISAKTGKQIIYKPAMQLTVSYDTEKYIRNVVKLNSKPENYNITELDKVSAEENVELFDILISKMTDTILKVKFGDMGVKIASHRDAFEKLDVRKQCFVLAEILKIIHSNVVTGDLTLIGEAKKAGVVYTNSVLSEIKGVKSIYLVHQSVTGLFEKKIDLLNM

SEQ ID NO: 20090 - protein, 1332 aa, unidentified
  REGION 1..1332: note = Cas Enzyme sequence
MKNFNDDYYAGFDIGTDSVGYAVADTDYNLCKFKGNAMWGVDLFEESNSAAERRILRSARRRGLRKRNRIEWLQMLFDEEISKVDNAFYQRLKESCLYLDDKSSNVPYAVFADGNYTDKEFHTDYPTIYHLRKELIKSSQPHDIRLVYLALHHIIKHRGHFLFDNMGSDFESESSFETLFDDLKLYLKEEYEIEFECNDSLRFSEILKDKTLKKTAKSSESYKLFGYSKRNNPYETALIDLMCGRNVGFSDMFGDKSFDSEEVNGITFESGYDDNENTYRDLLQEKFEPIEKAKAVYDWAILADILNGEKYNGKKYISFAKVKTYEEHSSDLKMLKDFVKERCKSLYGEIFRITKDKLDNYTAYCGKYKENGRNGVIQYRTNQADFCKYLKKRFEKLDKTGYEEMFDKIENGTFMPKIVVKDNGIIPMQVNRSELKAILKNASTYLEFLNKKDENGISVSDKIVKIFEFRIPYYVGPLNNHSLKSWLVRSDEKIYPWNFDSVVDIEQSAENFINNLTSKCTYLPTKDVIPKNSILYSAFTVLNELNNLRLDGKKPDVSLKQAIFNDLFMTHKKVRRKDLLNYLKSEKGITPDITGIDGDFKSSMRSAIEMSQFNLTDSEKEDAIKAITVFGDDKKLLRKRLKRQLGSKLSDEDIMRISKLKYKDWGRLSKEFLTEVYNVDKNTGELQFNIIHALWQTNDNLMELLGSKYGFEQSRQNYLDGIQTGQSLEKMVENLYISPAVKRPVYQSLKIMHEINKIQGHAPKKIFVEMTRKDGVKGDKGRKESRKTKLVDLYKKCGEDSGELWESLEKTPDDEFKRDRLYFYYTQFGKCMYTGEPITLSELYNKNIYEVDHIFPRSKVKDDSLDNRVLVKKQVNAHKDNTYPLDSSIREKMKGFWHLLMDKGLISKKKYERLTRATELTDSELSDFIARQIVETSQSTKAVASLFKELYPDTEIVYVKASTVSKFRHKYDFLKCREVNDFHHAKDAYLNIVVGNVYNERCTHNKSIFIKGLQTKTYSLNKMFSFNTPNAWSIDDNKSIKIVRKTMNKNNIRFTRYAFTKNGELFKRKPLKKGRGQAPLKQNSPLSDISKYGGYDKPTSSYFSFVKYEGKKGKEMRQLVAIDSYIKARYEANPEKYLSENLGLKNPVVLIPVVKYNACIEIDGFRMHISSKSSGGKQIVYKPAMQLTVSYDTEKYIRNVVKLNSEPENYNITELDKVSTDENVKLFDTLISKMTDTILKVKFGDMGVKIASHRDVFEKLDIRKQCFVLTEILKIIHCNAVLGNLTYIGEGSSSGRVGLNSVLSEVKGVKSIYLVHQSVTGLFEKKIDLLHM

SEQ ID NO: 20091 - protein, 1330 aa, unidentified
  REGION 1..1330: note = Cas Enzyme sequence
MKNFNDDYYAGFDIGTDSVGYAVADTDYNLCKFKGNAMWGVDLFEESNSAAERRTLRSARRRGLRKRNRIEWLQMLFDEEISKVDNAFFQRLKESCLYLDDKSSNVPYAVFADGNYTDKEFHTDYPTIYHLRKELIKSSQPHDIRLVYLALHHIIKHRGHFLFDNMGSDFESESSFETLFDDLKLYLKEEYEIEFECNDSLRFSEILKDKTLKKTAKSSESYKLFGYSKRNNPYETALIDLMCGRKVKFSDMFGDKSFDSEEVNGITFESGYDDNENTYRDLLQEKFELIEKAKAVYDWAILADILNGEKYISFAKVKTYEEHSSDLKMLKDFVKERCKSLYGEIFRITKDKLDNYTAYCGKYKENGRNGVIQYRTNQADFCKYLKKKFEKLDKTGYEEMFDKIENGTFMPKIVVKDNGVIPMQVNRSELKAILKNASTYLEFLNKKDENGISVSDKIVKIFEFRIPYYVGPLNNHSQKSWLVRSDEKIYPWNFDSVVDIEQSAENFINNLTSKCTYLPTKDVIPKNSILYSAFTVLNELNNLRLDGKKPDVSLKQAIFNDLFMTHKKVRRKDLLNYLKSEKGITPDITGIDGDFKSSMRSAIEMSQFNLTDSEKEDAIKAITVFGDDKKLLRKRLKRQLGSKLSDEDIMRISKLKYKDWGRLSKEFLTEVYNVDKNTGELQFNIIHALWQTNDNLMELLGSKYGFEQSRQNYLDGIQTGQSLEKMVENLYISPAVKRPVYQSLKIMHEINKIQGHAPKKIFVEMTRKDGVKGDKGRKESRKTKLVDLYKKCGEDSGELWESLEKTPDDEFKRDRLYFYYTQFGKCMYTGEPINLSELYNQNIYDVDHIFPRSKVKDDSLDNRVLVKKQVNAHKDNTYPLDSSIREKMKGFWHSLMDKGLISKKKYERLTRATPLSDSELSDFIARQIVETSQSTKAVASLFKELYPDTEIVYVKASLVSEFRDESRGFGFLKCREVNDFHHAKDAYLNIVVGNVYNERCTHNKSIFIKGLQTKTYSLNKMFSFNTPNAWSIDDNKSIKIVRKTMNKNNIRFTRYALTRNGGLFKMNPLKKGSGQVSLKQNSPLSDISKYGGYDKPASSYFSFVKYEGKKGKEMRQLVAIDSYIKARYEANPEKYLSETLGLKNPVVLIPVVKYNACIEIDGFRMHISSKSNGGKKIVYKPAMQLTVSYDTEKYIRNVVKLNSMPENYNITERDKVSTDENIELFDILIFKMTDTILKVKFGDMGVKIASHRDAFEKLDVRKQCFVLAEILKIIHSNVVTGDLTLIDEAKKAGVVSTNSVLSEIKGVKSIYLVHQSVTGLFEKKIDLLHM

SEQ ID NO: 20092 - protein, 1332 aa, unidentified
  REGION 1..1332: note = Cas Enzyme sequence
MKNFNNDYYAGFDIGTDSVGYAVADTDYNLCKFKGNAMWGVDLFEESNSAAERRTLRSARRRGLRKRNRIEWLQMLFDEEISKVDNAFFQRLKESCLYLDDKSSNVPYAVFADGNYTDKEFHTDYPTIYHLRKELIKSSQPHDIRLVYLALHHIIKHRGHFLFDNMGSDFESESSFETLFDDLKLYLKEEYEIEFECNDSLRFSEILKDKTLKKTAKSSESYKLFGYSKRNNPHETALIDLMCGRKVKFSDMFGDKSFDSEEVNGITFESGYDDNENTYRDLLQEKFELIEKAKAVYDWAILADILNGEKYNGKNYISFAKVKTYEEHSSDLKMLKDFVKERCKSLYGEIFRITKDKLDNYTAYCGKYKENGRNGVIQYRTNQADFCKYLKKKFETLDKTGYEEMFDKIENGTFMPKIVVKDNGVIPMQVNRSELKAILKNASTYLEFLNKKDENGISVSDKIVKIFEFRIPYYVGPLNNHSLKSWLVRSDEKIYPWNFDSVVDIEQSAENFINNLTSKCTYLPTKDVIPKNSILYSAFTVLNELNNLRLDGKKPDVSLKQAIFNDLFMTHKKVRRKDLLNYLKSEKGITPDITGIDGDFKSSMRSAIEMSQFNLTDSEKEDAIKAITVFGDDKKLLRKRLKRQLGSKLSDEDIMRISKLKYKDWGRLSKEFLTEVYNVDKNTGELQFNIIHALWQTNDNLMELLGSKYGFEQSRQNYLDGIQTGQSLEKMVENLYISPAVKRPVYQSLKIMHEINKIQGHAPKKIFVEMTRKDGVKGDKGRKDSRKTKLVDLYKKCGEDSGELWETLEKTPDDEFKRDRLYFYYTQFGKCMYTGEPINLSELYNQNIYDVDHIFPRSKVKDDSLDNRVLVKKQVNAHKDNTYPLDSSIHEKMKGFWHLLMDKGLISKKKYERLTRATPLSDSELSDFIARQIVETSQSTKAVASLFKELYPDTEIVYVKASTVSEFRHEYDFLKCREVNDFHHAKDAYLNIVVGNVYNERCTHNKSIFIEGLKTKDYSLNKMFSFNTPNAWSIDDNKSIKIVRKTMNKNNIRFTRYALTRNGGLFKMNPLKKGSGQVSLKQNSPLSDISKYGGYDKPASSYFSFVKYEGKKGKEMRRLVAIDSYIKARYEANPEKYLSETLGLKNPVVLIPVVKYNACIEIDGFRMHISSKSNGGKKIVYKPAMQLTVSYDTEKYIRNVVKLNSMPENYNITERDKVSTDGNIELFDILIFKMTDTILKVKFGDMGVKIAAHRDAFEKLDVRKQCFVLAEILKIIHSNVVTGDLTLIDEAKKAGVVSTNSVLSEIKGVKSIYLVHQSVTGLFEKKIDLLHM

SEQ ID NO: 20093 - protein, 1253 aa, unidentified
  REGION 1..1253: note = Cas Enzyme sequence
MLFDEEISKVDNAFFQRLKESCLYLDDKSSNVPYAVFADGNYTDKEFHTDYPTIYHLRKELIKSSQPHDVRLVYLALHHIIKHRGHFLFDNMGSDFESESSFETLFDDLKLYLKEEYEIEFECNDSLRFSEILKDKTLKKTAKSSESYKLFGYSKRNNPYETALIDLMCGRKVKFSDMFGDKSFDSEEVNGITFESGYDDNENTYRDLLQEKFELIEKAKAVYDWAILADILNGEKYISFAKVKTYEEHSSDLKMLKDFVKERCKSLYVEIFRITKDKLDNYTAYCGKYKENGRNGVIQYRTNQADFCKYLKKKFEKLDKTGYEEMFDKIENGTFMPKIVVKDNGVIPMQVNRSELKAILKNASTYLEFLNKKDENGISVSDKIVKIFEFRIPYYVGPLNNHSLKSWLVRSDEKIYPWNFDSVVDIEQSAENFINNLTSKCTYLPTKDVIPKNSILYSAFTVLNELNNLRLDGKKPDVSLKQAIFNDLFMTHKKVRRKDLLNYLKSEKGITPDITGIDGDFKSSMRSAIEMSQFNLTDSEKEDAIKAITVFGDDKKLLRKRLKRQLGSKLSDEDIMRISKLKYKDWGRLSKEFLTEVYNVDKNTGELQFNIIHALWQTNDNLMELLGSKYGFEQSRQNYLDGIQTGQSLEKMVENLYISPAVKRPVYQSLKIMHEINKIQGHAPKKIFVEMTRKDGVKGDKGRKESRKTKLVDLYKKCGDDSGELWESLEKTPDDEFKRDRLYFYYTQFGKCMYTGEPINLSELYNQNIYDVDHIFPRSKVKDDSLDNRVLVKKQVNAHKDNTYPLDSSIHEKMKGFWHLLMDKGLISKKKYERLTRATELTDSELSDFIARQIVETSQSTKAVASLFKELYPDTEIVYVKASTVSEFRHEYDFLKCREVNDFHHAKDAYLNIVVGNVYNERCTHNKSIFIEGLKTKAYSLNKMFSFNTPNAWSIDDNKSIKIVRKTMNKNNIRFTRYALTRNGGLFKMNPLKKGSGQVSLKQNSPLSDISKYGGYDKPTSSYFSFVKYEGKKGKEMRQLVAIDSYIKARYEANPEKYLSENLGLKNPVVLIPVVKYNACIEIDGFRMHISGKSNGGKTVVCKPAMQLTVSYDTEKYIRNVVKLNSMPENYNITERDKVSTDENIELFDILISKMTDTILNVKFGSMGTKISAHRDAFEKLDVRKQCFVLAEILKIIHSNVVTGDLSFIGESKKSGVVSTNSVLSEIKGVKSIYLVHQSVTGLFEKKIDLLNM

SEQ ID NO: 20094 - protein, 1325 aa, unidentified
  REGION 1..1325: note = Cas Enzyme sequence
MKNFNNDYYAGFDIGTDSVGYAVADTDYNLCKFKGNAIWGVDLFEESNSAAERRTLRSARRRGLRKRNRIEWLQMLFDEEISKVDNAFFQRLKESCLYLDDKSSNVPYAVFADGNYTDKEFHTDYPTIYHLRKELIKSSQPHDIRLVYLALHHIIKHRGHFLFDNMGSDFESESSFEALFDDLKLYLKEEYEIEFECNDSLRFSEILKDKTLKKTAKSSESYKLFGYSKRNNPYETALIDLMCGRKVKFSDMFGDKSFDSEEVNGITFESGYDDNENTYRDLLQEKFELIEKAKAVYDWAILADILNGEKYISFAKVKTYEEHNSDLKMLKDFVKERCKSLYGEIFRITKDKLDNYTAYCGKYKENGRNGVIQYRTNQADFCKYLKKKFEKLDKTGYEEMFDKIESGTFMPKIVVKDNGVIPMQVNRSELKAILKNASTYLEFLNKKDENGISVSDKIVKIFEFRIPYYVGPLNNHSLKSWLVRSDEKIYPWNFDSVVDIEQSAENFINNLTSKCTYLPTKDVIPKNSILYSAFTVLNELNNLRLDGKKPDVSLKQAIFNDLFMTHKKVRRKDLLNYLKSEKGVAFDITGIDGDFKSSMRSAIEMSQFNLTDSEKEDTIKAITVFGDDKKLLRKRLKRQLGSKLSDEDIMRISKLKYKDWGRLSKEFLTEVYNVDKNTGELQFNFIHALWQTNDNLMELLGSKYGFEQSRQNYLDGIQTGQSLEKMVENLYISPAVKRPVYQSLKIMHEINKIQGHAPKKIFVEMTRKDGVKGDKGRKESRKTKLVDLYKKCGEDSGDLWESLEKTPDDEFKRDRLYFYYTQFGKCMYTGEPINLSELYNQNIYDVDHIFPRSKVKDDSLDNRVLVKKQVNAHKDNTYPLDSSIREKMKGFWHLLMDKGLISKKKYERLTRATELTDSELSDFIARQIVETSQSTKAVASLFKELYPDTEIVYVKASTVSEFRHEYDFLKCREVNDFHHAKDAYLNIVVGNVYNERCTHNKSIFIKGLQTKTYSLNKMFSFNTPNTWSIDDNKSIKIVRKTMNKNNIRFTRYALTRNGELFKRKPFKKGRGQAPLKQNSPLSDISKYGGYDKPTSSYFSFVKYEGKKGKEMRRLVAIDSYIKARYEANPEKYLSETLGLKNPVVLIPVVKYNACIEIDGFRMHISAKTDKRIQYKPAMQLTVSYDTEKYIRNVVKLNSKPENYNITELDKVSADENLKLFDILTSKMTDTILKVKFGDMGVKIASHRDAFEKLDVRKQCFVLAEILKIIHCNILEGDLTFIGGAKQSGSIKMSSVISGIKGVKSIYLVHQSVTGLFEKKIDLLHM

SEQ ID NO: 20095 - protein, 1330 aa, unidentified
  REGION 1..1330: note = Cas Enzyme sequence
MKNFNDDYYAGFDIGTDSVGYAVADTDYNLCKFKGNAMWGVDLFEESNSAAERRTLRSARRRGLRKRNRIEWLQMLFDQEISKVDNAFYQRLKESCLYLDDKSSNVPYAVFADGNYTDKEFHTDYPTIYHLRKELIKSSQPHDVRLVYLALHHIIKHRGHFLFDNMGSDFESESSFETLFDDLKLYLKEEYEIEFECNDSLRFSEILKDKTLKKTAKSSESYKLFGYSKRNNPYETALIDLMCGRKVKFSDMFGDKSFDSEEVNGITFESGYDDNENTYRDLLQEKFELIEKAKAVYDWAILADILNGEKYISFAKVKTYEEHSSDLKMLKDFVKERCKSLYGEIFRITKDKLDNYTAYCGKYKENGRNGVIQYRTNQADFCKYLKKKFEKLDKTGYEEMFDKIENGTFMPKIVVKDNGVIPMQVNRSELKAILKNASTYLEFLNKKDENGISVSDKIVKIFEFRIPYYVGPLNNHSLKSWLVRSDEKIYPWNFDSVVDIEQSAENFINNLTSKCTYLPTKDVIPKNSILYSAFTVLNELNNLRLDGKKPDVSLKQAIFNDLFMTHKKVRRKDLLNYLKSEKGVAFDITGIDGDFKSSMRSAIEMSQFNLTDSEKEDAIKAITVFGDDKKLLRKRLKRQLGSKLSDEDIMRISKLKYKDWGRLSKEFLTEVYNVDKNTGELQFNIIHALWQTNDNLMELLGSKYGFEQSRQNYLDGIQTGQSLEEMVENLYISPAVKRPVYQSLKIMHEINKIQGHAPKKIFVEMTRKDGVKGDKGRKESRKTKLVDLYKKCGEDSGELWESLEKTPDDEFKRDRLYFYYTQFGKCMYTGEPINLSELYNQNIYDVDHIFPRSKVKDDSLDNRVLVKKQVNAHKDNTYPLDSSIREKMKGFWHLLMDKGLISKKKYERLTRATELSDSELSDFIARQIVETSQSTKAVASLFKELYPDTEIVYVKASLVSEFRDESRGFGFLKCREVNDFHHAKDAYLNIVVGNVYNERCTHNKSIFIKGLQTKTYSLNKMFSFNTPNAWSIDDNKSIKIVRKTMNKNNIRFTRYALTRNGGLFKMNPLKKGSGQVSLKQNSPLSDISKYGGYDKPASSYFSFVKYEGKKGKEMRQLVAIDSYIKARYEANPEKYLSETIGLKNPVVLIPVVKYNACIEIDGFRMHISSKSGGGRQIVYKPAMQLTVSYDTEKYIRNVVKLNSKPENYNITELDKVSADENLKLFDILTSKMTDTILKVKFGDMGVKIASHRDVFEKLDVRKQCFVLAEILKIIHSNVVTGDLSFIGESKKSGVVSTNSVLSEVKGVKSIYLVHQSVTGLFEKKIDLLNM

SEQ ID NO: 20096 - protein, 1330 aa, unidentified
  REGION 1..1330: note = Cas Enzyme sequence
MKNFNDDYYVGFDIGTDSVGYAVADTDYNLCKFKGNAMWGVDLFEESNSAAERRTLRSARRRGLRKRNRIEWLQMLFDEEISKVDNAFYQRLKESCLYLDDKSSNVPYAVFADGNYTDKEFHTDYPTIYHLRKELIKSSQPHDIRLIYLALHHIIKHRGHFLFDNMGSDFESESSFEALFDDLKLYLKEEYEIEFECNDSLRFSEILKDKTLKKTAKSSESYKLFGYSKRNNPYETALIDLMCGRKVKFSDMFGDKSFDSEEVNGITFESGYDDNENTYRDLLQEKFELIEKAKAVYDWAILADILNGEKYISFAKVKTYEEHSSDLKMLKDFVKERCKSLYGEIFRITKDKLDNYTAYCGKYKENGRNGVIQYRTNQADFCKYLKKKFEKLDKTGYEEMFDRIENGTFMPKIVVKDNGVIPMQVNRSELKAILKNASTYLEFLNNKDENGISVSDKIVKIFEFRIPYYVGPLNNHSLKFWIVRSDEKIYPWNFDSVVDIEQSAENFINNLTSKCTYLPTKDVIPKNSILYSAFTVLNELNNLRLDGKKPDVSLKQAIFNDLFMTHKKVRRKDLLNYLKSEKGITPDITGIDGDFKSSMRSAIEMSQFNLTDSEKEDAIKAITVFGDDKKLLRKRLKRQLGSKLSDEDIMRISKLKYKDWGRLSKEFLTEVYNVDKNTGELQFNIIHALWQTNDNLMELLGSKYGFEQSRQNYLDGIQTGQSLEKMVENLYISPAVKRPVYQSLKIMHEINKIQGHAPKKIFVEMTRKDGVKGDKGRKESRKTKLVDLYKKCGEDSGELWESLEKTPDDEFKRDRLYFYYTQFGKCMYTGEPINLSELYNQNIYDVDHIFPRSKVKDDSLDNRVLVKKQVNAHKDNTYPLDSSIRAKMKGFWHLLMDKGLISKKKYERLTRATELTDSELSDFIARQIVETSQSTKAVASLFKELYPNTEIVYVKASLVSEFRDESRGFGFLKCREVNDFHHAKDAYLNIVVGNVYNERCTHNKSIFIKGLQTKTYSLNKMFSFNTSNAWSIDDNKSIKIVRKTMNKNNIRFTRYALTRNGGLFKMNPLKKGSGQVSLKQNSPLSDISKYGGYDKPASSYFSFVKYEGKKGKEMRQLVAIDSYIKARYEANPEKYLSENLGLKNPVVLIPVVKYNACIEIDGFRMHISSKSNGGKKIVYKPAMQLTVSYDTEKYIRNVVKLNSMPENYNITERDKVSTDENIELFDILIFKMTDTILKVKFGDMGVKIASHRDAFEKLDVRKQCFVLAEILKIIHSNVVTGDLTLIDEAKKAGVVSTNSVLSEIKGVKSIYLVHQSVTGLFEKKIDLLHM

SEQ ID NO: 20097 - protein, 1327 aa, unidentified
  REGION 1..1327: note = Cas Enzyme sequence
MKNFNDDYYVGFDIGTDSVGYAVADTDYNLCKFKGNAMWGVDLFEESNSAAERRTLRSARRRGLRKRNRIEWLQMLFDEEISKVDNAFYQRLKESCLYLDDKSSNVPYAVFADGNYTDKEFHTDYPTIYHLRKELIKSSQPHDIRLIYLALHHIIKHRGHFLFDNMGSDFESESSFEALFDDLKLYLKEEYEIEFECNDSLRFSEILKDKTLKKTAKSSESYKLFGYSKRNNPYETALIDLMCGRKVKFSDMFGDKSFDSEEVNGITFESGYDDNENTYRDLLQEKFELIEKAKAVYDWAILADILNGEKYISFAKVKTYEEHSSDLKMLKDFVKERCKSLYGEIFRITKDKLDNYTAYCGKYKENGRNGVIQYRTNQADFCKYLKKKFEKLDKTGYEEMFDKIENGTFMPKIVVKDNGVIPMQVNRSELKAILKNASTYLEFLNKKDENGISVSDKIVKIFEFRIPYYVGPLNNHSLKSWLVRSDEKIYPWNFDSVVDIEQSAENFINNLTSKCTYLPTKDVIPKNSILYSAFTVLNELNNLRLDGKKPDVSLKQAIFNDLFMTHKKVRRKDLLNYLKSEKGITPDITGIDGDFKSSMRSAIEMSQFNLTDSEKEDAIKAITVFGDDKKLLRKRLKRQLGSKLSDEDIMRISKLKYKDWGRLSKEFLTEVYNVDKNTGELQFNIIHALWQTNDNLMELLGSKYGFEQSRQNYLDGIQTGQSLEKMVENLYISPAVKRPVYQSLKIMHEINKIQGHAPKKIFVEMTRKDGVKGDKGRKESRKTKLVDLYKKCGEDSGELWESLEKTPDDEFKRDRLYFYYTQFGKCMYTGEPITLSELYNKNIYEVDHIFPRSKVKDDSLDNRVLVKKQVNAHKDNTYPLDSSIREKMKGFWHLLMDKGLISKKKYERLTRATELTDSELSDFIARQIVETSQSTKAVASLFKELYPDTEIVYVKASTVSEFRHEYDFLKCREVNDFHHAKDAYLNIVVGNVYNERCTHNKSIFIKGLQTKTYSLNKMFSFSTPNAWSIDDNKSIKIVRKTMNKNNIRFTRYALTRNGGLFKMNPLKKGSGQVSLKQNSPLSDISKYGGYDKPTSSYFSFVKYEGKKGKEMRQLVAIDSYIKARYEANPEKYLSENLGLKNPVVLIPVVKYNACIEIDGFRMHISSKQSGGKEIVYKPAMQLTVNYDTEKYIRNVVKLNSKPENYNITELDKVSADENLKLFDILTSKMTDTILNVKFGSVGAKIASHRDTFEKLDVWKQCFILGEILKIIHSNVVTGNLTFINEAKKAGVVFTKSVLSEIKGAKSIYLVHQSVTGLFEKKIDLLHM

SEQ ID NO: 20098 - protein, 1335 aa, unidentified
  REGION 1..1335: note = Cas Enzyme sequence
MKNFNDDYYAGFDIGTDSVGYAVADTDYNLCKFKGNAMWGVDLFEESNSAAERRILRSARRRGLRKRNRIEWLQMLFDEEISKVDNAFYQRLKESCLYLDDKSSNVPYAVFADGNYTDKEFHTDYPTIYHLRKELIKSSQPHDIRLVYLALHHIIKHRGHFLFDNMGSDFESESSFETLFDDLKLYLKEEYEIEFECNDSLRFSEILKDKTLKKTAKSSESYKLFGYSKRNNPYETALIDLMCGRNVGFSDMFGDKSFDSEEVNGITFESGYDDNENTYRDLLQEKFEPIEKAKAVYDWAILADILNGEKYNGKKYISFAKVKTYEEHSSDLKMLKDFVKERCKSLYGEIFRITKDKLDNYTAYCGKYKENGRNGVIQYRTNQMDFCKYLKKRFEKLDKTGYEEMFDKIENGTFMPKIVVKDNGVIPMQVNRSELKAILKNASTYLEFLNKKDENGISVSDKIVKIFEFRIPYYVGPLNNHSLKFWLVRSDEKIYPWNFDSVVDIEQSAENFINNLTSKCTYLPTKDVIPKNSILYSVFTVLNELNNLRLDGKKPDVSLKQAIFNDLFMTHKKVRRKDLLNYLKSEKGITPDITGIDGDFKSSMRSAIEMSQFNLTDSEKEDAIKAITVFGDDKKLLRKRLKRQLGSKLSDEDIMRISKLKYKDWGRLSKEFLTEVYNVDKNTGELQLNIIHALWQTNDNLMELLGSKYGFEQSRQNYLDGIQTGQSLEKMVENLYISPAVKRPVYQSLKIMHEINKIQGHAPKKIFVEMTRKDGVKGDKGRKESRKTKLLDLYKKCGEDSGELWESLEKTPDDEFKRDRLYFYYTQFGKCMYTGEPINLSELYNQNIYDVDHIFPRSKVKDDSLDNRVLVKKQVNAHKNNTYPLDSSIREKMKGFWHLLMDKGLISKKKYERLTRATELTDSELSDFIARQIVETSQSTKAVASLFKELYPDTEIVYVKASLVSEFRDESRGFGFLKCREVNDFHHAKDAYLNIVVGNVYNERCTHNKSIFIEGLKTKAYSLNKMFSFNTPNAWSIDDNKSIKIVRKTMNKNNIRFTRYALTRNGGLFKMNPLKKGRGQAPLKQNSPLSDISKYGGYDKPASSYFSFVKYEGKKGKEMRQLVAIDSYIKARYEANPEKYLSETLGLKNPVVLIPVVKYNACIEIDGFRMHMSSKSNGGKKIVYKPAMQLTVSYDTEKYIRNVVKLNSMPENYNITERDKVSADENLKLFDILIFKMTETILKVKFGDMGVKIASHRDTFEKLDVRKQCFVLVEILKIIHSNVVTGDLTLIDEAKKAGVVSTNSVLSEIKGVKSIYLVHQSVTGLFEKKIDLLHM

SEQ ID NO: 20099 - protein, 1325 aa, unidentified
  REGION 1..1325: note = Cas Enzyme sequence
VKNFNDDYYVGFDIGTDSVGHAVADTDYNLCKFKGNAMWGVDLFEESNSAAERRTLRSARRRGLRKRNRIEWLQMLFDEEISKVDNAFFQRLKESCLYLDDKSSNVPYAVFADGNYTDKEFHTDYPTVYHLRKELIKSSQPHDIRLVYLALHHIIKHRGHFLFDNMGSDFESESSFEALFDDLKLYLKEEYEIEFECNDSLRFSEILKDKTLKKTAKSSESYKLFGYSKRNNPYETALIDLMCGRKVKFSDMFGDKSFDSEEVNGITFESGYDDNENTYRDLLQEKFELIEKAKAVYDWAILADILNGEKYISFAKVKTYEEHNSDLKMLKDFVKERCKSLYGEIFRITKDKLDNYTAYCGKYKENGRNGVIQYRTNQADFCKYLKKKFEKLDKTGYEEMFDKIENSTFMPKIVVKDNGVIPMQVNRSELKAILKNASTYLEFLNKKDENGISVSDKIVKIFEFRIPYYVGPLNNHSLKSWLVRSDEKIYPWNFDSVVDIEQSAENFINNLTSKCTYLPTKDVIPKNSILYSAFTVLNELNNLRLDGKKPDVGLKQAIFNDLFMTHKKVRRKDLLNYLKSEKGITPDITGIDGDFKSSMRSAIEMSQFNLTDSEKEDAIKAITVFGDDKKLLRKRLKRQLGSKLSDEDIMRISKLKYKDWGRLSKEFLTEVYNVDKNTGELQFNIIHALWQTNDNLMELLGSKYGFEQSRQNYLDGIQTGQSLEKMVENLYISPAVKRPVYQSLKIMHEINKIQGHAPKKIFVEMTRKDGVKGDKGRKESRKTKLVDLYKKCGEDSGELWESLEKTPDDEFKRDRLYFYYTQFGKCMYTGEPINLSELYNQNIYDVDHIFPRSKVKDDSLDNRVLVKKQVNAHKDNTYPLDCSIREKMKGFWHLLMDKGLISKKKYERLTRATPLSDSELSDFIARQIVETSQSTKAVASLFKELYPDTEIVYVKASTVSEFRHEYDFLKCREVNDFHHAKDAYLNIVVGNVYNERCTHNKSIFIEGLKTKAYSLNKMFSFNTPNAWSIDDNKSIKIVRKTMNKNNIRFTRYALTRNGGLFKMNPLKKGSGQVSLKQNSPLSDISKYGGYDKPASSYFSFVKYEGKKGKEMRRLVAIDSYIKARYEANPEKYLSETLGLKNPVVLIPVVKYNACIEIDGFRMHISAKTDKRIQYKPAMQLTVSYDTEKYIRNVVKLNSMPENYNITERDKVSADENLKLFDILILKMTDTILKVKFGDMGVKIASHRDAFEKLDVRKQCFVLAEILKIIHCNILEGDLTFIGGAKQSGSIKMGSVISEIKGVKSIYLVHQSVTGLFEKKIDLLHM

SEQ ID NO: 20100 - protein, 1328 aa, unidentified
  REGION 1..1328: note = Cas Enzyme sequence
MKNLNDDYYAGFDIGTDSVGYAVADTDYNLCKFKGKAMWGVDLFEESNSAAERRTFRSARRRGLRKRNRIEWLQMLFDQEISKVDNAFFQRLKESCLYLDDKSSNVPYAVFADGNYTDKEFHTDYPTIYHLRKELIKSSQPHDIRLVYLALHHIIKHRGHFLFDNMGSDFESESSFEALFDDLKLYLKEEYEIEFECNDSLRFSEILKDKTLKKTAKSSESYKLFGYSKRNNPYETALIDLMCGRKVKFSDMFGDKSFDSEEVNGITFESGYDDNENTYRDLLQEKFELIEKAKAVYDWAILADILNGEKYISFAKVKTYEEHNSDLKMLKDFVKERCKSLYGEIFRITKDKLDNYTAYCGKYKENGRNGVIQYRTNQADFCKYLKKKFEKLDKTDYEEMFDKIENGTFMPKIVVKDNGVIPMQVNRSELKAILKNASTYLEFLNNKDENGISVSDKIVKIFEFRIPYYVGPLNNHSQKWWLVRSDEKIYPWNFDSVVDIEQSAENFINNLTSKCTYLPTKDVIPKNSILYSAFTVLNELNNLRLDGKKPDVSLKQAIFNDLFMTHKKVRRKDLLNYLKSEKGITPDITGIDGDFKSSMRSAIEMSQFNLTDSEKEDAIKAITVFGDDKKLLRKRLKRQLGSKLSDEDIMRISKLKYKDWGRLSKEFLTEVYNVDKNTGELQFNIIHALWQTNDNLMELLGSKYGFEQSRQNYLDGIQTGQSLEKMVENLYISPAVKRPVYQSLKIMHEINKIQGHAPKKIFVEMTRKDGVKGDKGRKESRKTKLVDLYKKCGEDSGELWESLEKTPDDEFKRDRLYFYYTQFGKCMYTGEPINLSELYNQNIYDVDHIFPRSKVKDDSLDNRALVKKQVNAHKDNTYPLDSSIREKMKGFWHLLMDKGLISKKKYERLTRATELTDSELSDFIARQIVETSQSTKAVASLFKELYPDTEIVYVKASLVSEFRDESRGFGFLKCREVNDFHHAKDAYLNIVVGNVYNERCTHNKSIFIKGLQTKTYSLNKMFSFNTPDAWSIDDNKSIKIVRKTMNKNNIRFTRYALTRNGGLFKMNPLKKGSGQVSLKQNSPLSDISKYGGYDKPASSYFSFVKYEGKKGKEMRQLVAIDSYIKARYEANPEKYLSENLDLKNPVVLIPVVKYNACIEIDGFRMHISAKTGKQIIYKPAMQLTVSYDTEKYIRNVVKLNSKPENYNITERDKVSTDENIELFDILTYKMTDTVLKVKFGDMGVKIASHRDAFEKLDVRKQCFVLTEILKIIHCNAVLGNLTYIGEGSSSGRVGLNSVLSEVKGVKSIYLVHQSVTGLFEKKIDLLNM

SEQ ID NO: 20101 - protein, 1327 aa, unidentified
  REGION 1..1327: note = Cas Enzyme sequence
MKNFNDDYYVGIDIGTDSVGHAVADTDYNLCKFKGNAMWGVDLFEESNSAAERRTLRSARRRGLRKRNRIEWLQMLFDEEISKVDNAFYQRLKESCLYLDDKSSNVPYAVFADGNYTDKEFHTDYPTIYHLRKELIKSSQPHDVRLVYLALHHIIKHRGHFLFDNMGSDFESESSFETLFDDLKLYLKEEYEIEFECNDSLRFSEILKDKTLKKTAKSSESYKLFGYSKRNNPYETALIDLMCGRKVKFSDMFGDKSFDSEEVNGITFESGYDDNETTYRDLLQEKFELIEKAKSVYDWAILADILNGEKYISFAKVKTYEEHNSDLKILKKFVKERCKPLYGEIFRITKDKLDNYTAYCGKYKENGRNGVIQYRTNQADFCKYLKKKFEKLDKTGYEEMFDKIENGTFMPKIVVKDNGVIPMQVNRSELKAILKNASTYLEFLNKKDENGISVSDKIVKIFEFRIPYYVGPLNNHSLKSWLVRSDEKIYPWNFDSVVDIEQSAENFINNLTSKCTYLPTKDVIPKNSILYSAFTVLNELNNLRLDGKKPDVSLKQAIFNDLFMTHKKVRRKDLLNYLKSEKGITPDITGIDGDFKSSMRSAIEMSQFNLTDSEKEDAIKAITVFGDDKKLLRKRLKRQLGSKLSDEDIMRISKLKYKDWGRLSKEFLTEVYNVDKNTGELQFNIIHALWQTNDNLMELLGSKYGFEQSRQNYLDGIQTGQSLEKMVENLYISPAVKRPVYQSLKIMHEINKIQGHAPKKIFVEMTRKDGVKGDKGRKESRKTKLVDLYKKCGDDSGELWESLEKTPDDEFKRDRLYFYYTQFGKCMYTGEPINLSELYNQNIYDVDHIFPRSKVKDDSLDNRVLVKKQVNAHKDNTYPLDSSIHEKMKGFWHLLMDKGLISKKKYERLTRATELTDSELSDFIARQIVETSQSTKAVASLFKELYPDTEIVYVKASTVSEFRHEYDFLKCREVNDFHHAKDAYLNIVVGNVYNERCTHNKSIFIEGLKTKAYSLNKMFSFNTPNAWSIDDNKSIKIVRKTMNKNNIRFTRYALTRNGGLFKMNPLKKGSGQVSLKQNSPLSDISKYGGYDKPTSSYFSFVKYEGKKGKEMRQLVAIDSYIKARYEANPEKYLSENLGLKNPVVLIPVVKYNACIEIDGFRMHISGKSNGGKTVVCKPAMQLTVSYDTEKYIRNVVKLNSMPENYNITERDKVSTDENIELFDILISKMTDTILNVKFGSMGTKISAHRDAFEKLDVRKQCFVLAEILKIIHSNVVTGDLSFIGESKKSGVVSTNSVLSEIKGVKSIYLVHQSVTGLFEKKIDLLNM

SEQ ID NO: 20102 - protein, 1325 aa, unidentified
  REGION 1..1325: note = Cas Enzyme sequence
MKNFNDDYYTGFDIGTDSVGYAVADTDYNLCKFKGNAMWGVDLFEESNSAAERRTLRSARRRGLRKRNRIEWLQMLFDEEISKVDNAFYQRLKESCLYLDDKSSNVPYAVFADGNYTDKEFHTDYPTIYHLRKELIKSSQPHDIRLVYLALHHIIKHRGHFLFDNMGSDFESESSFEALFDDLKLYLKEECEIEFECNDSLRFSEILKDKTLKKTAKSSESYKLFGYSKRNNPYETALIDLMCGRKVKFSDMFGDKSFDSEEVNGITFESGYDDNENTYRDLLQEKFELIEKAKAVYDWAILADILNGEKYISFAKVKTYEEHSSDLKMLKDFVKERCKSLYGEIFRITKDKLDNYTAYCGKYKENGRNGVIQYRTNQADFCKYLKKKFEKLDKTGYEEMFDKIENGTFMPKIVVKDNGVIPMQVNRSELKAILKNASTYLEFLNKKDENGISVSDKIVKIFEFRIPYYVGPLNNHSLKSWLVRSDEKIYPWNFDSVVDIEQSAENFINNLTSKCTYLPTKDVIPKNSILYSAFTVLNELNNLRLDGKKPDVSLKQAIFNDLFMTHKKVRRKDLLNYLKSEKGVAFDITGIDGDFKSSMRSAIEMSQFNLTDSEKEDAIKAITVFGDDKKLLRKRLKRQLGSKLSDEDIMRISKLKYKDWGRLSKEFLTEVYNVDKNTGELQFNIIHALWQTNDNLMELLGSKYGFEQSRQNYLDGIQTGQSLEKMVENLYISPAVKRPVYQSLKIMHEINKIQGHAPKKIFVEMTRKDGVKGDKGRKESRKTKLVDLYKKCGEDSGELWESLEKTPDDEFKRDRLYFYYTQFGKCMYTGEPINLSELYNQNIYDVDHIFPRSKVKDDSLDNRALVKKQVNAHKDNTYPLDSSIREKMKGFWHLLMDKGLISKKKYERLTRVTPLSDSELSDFIARQIVETSQSTKAVASLFKELYPDTEIVYVKASTVSEFRHEYDFLKCREVNDFHHAKDAYLNIVVGNVYNERCTHNKSIFIEGLKTKAYSLNKMFSFNTPNAWSIDDNKSIKIVRKTMNKNNIRFTRYALTRNGGLFKMNPLKKGSGQVSLKQNSPLSDISKYGGYDKPTSSYFSFVKYEGKKGKEMRQLVAIDSYIKAQYEANPEKYLSETLGLKNPVVLIPVVKYNACIEIDGFRMHISAKTGKQIIYKPATQLTVSYDTEKYIRNVVKLNSKPENYNITELDKVSTDENIELFDILTYKMTDTVLKVKFGDMGAKIISHRDAFEKLDIRKQCFVLTEILKIIHCNAVLGNLTYIGEGSSSGRVGLNSVLSEVKGVKSIYLVHQSVTGLFEKKIDLLHM

SEQ ID NO: 20103 - protein, 1327 aa, unidentified
  REGION 1..1327: note = Cas Enzyme sequence
MKNFNNDYYAGFDIGTDSVGYAVADTDYNLCKFKGNAMWGVDLFEESNSAAERRTLRSARRRGLRKRNRIEWLQMLFDEEISKVDNAFYQRLKESCLYLDDKSSNVPYAVFADGNYTDKEFHTDYPTIYHLRKELIKSSQPHDIRLVYLALHHIIKHRGHFLFDNMGSDFESESSFEALFDDLKLYLKEEYEIEFECNDSLRFSEILKDKTLKKTAKSSESYKLFGYSKRNNPYETALIDLMCGRKVKFSDMFGDKSFDSEEVNGITFESGYDDNENTYRDLLQEKFELIEKAKAVYDWAILADILNGEKYISFAKVKTYEEHSSDLKMLKDFVKERCKSLYGEIFRITKDKLDNYTAYCGKYKENGRNGVIQYRTNQADFCKYLKKKFEKLDKTGYEEMFDKIENGTFMPKIVVKDNGVIPMQVNRSELKAILKNASTYLEFLNKKDENGISVSDKIVKIFEFRIPYYVGPLNNHSLKSWLVRSDEKIYPWNFDSVVDIEQSAENFINNLTSKCTYLPTKDVIPKNSILYSAFTVLNELNNLRLDGKKPDVSFKQAIFNDLFMTHKKVRRKDLLNYLKSEKGIMPDITGIDGDFKSSMRSAIEMSQFNLTDSEKEDTIKAITVFGDDKKLLRKRLKRQLGSKLSDEDIMRISKLKYKDWGRLSKEFLTEVYNVDKNTGELQFNIIHALWQTNDNLMELLGSKYGFEQSRQNYLDGIQTGQSLEKMVENLYISPAVKRPVYQSLKIMHEINKIQGHAPKKIFVEMTRKDGVKGDIGRKESRKTKLVDLYKKCGEDSGELWESLEKTPDDEFKRDRLYFYYTQFGKCMYTGEPINLSELYNQNIYDVDHIFPRSKVKDDSLDNRVLVKKQVNAHKDNTYPLDSSIREKMKGSWHFLMDKGLISKKKYERLTRVTELTDSELSDFIARQIVETSQSTKAVASLFKELYPDTEIVYVKASTVSEFRHEYDFLKCREVNDFHHAKDAYLNIVVGNVYNERCTHNKSIFIKGLQTKTYSLNKMFSFNTPNAWSIDDNKSIKIVRKTMNKNNIRFTRYALTRNGGLFKMNPLKKGSGQVSLKQNSPLSDIGKYGGYDKPASSYFSFVKYEGKKGKEMRRLVAIDSYIKARYEANPEKYLSENLGLKNPVVLIPVVKYNACIEIDGFRMHISSKQSGGKEIVYKPAMQLTVNYDTEKYIRNVVKLNSKPENYNITELDNVSADENVKLFDILTSKMTDTILNVKFGSVGAKIASHRDIFEKLDVRKQCFILGEILKIIHSNVVTGNLTFINEAKKAGVVFTKSVLSEIKGVKSIYLVHQSVTGLFEKKIDLLNM

SEQ ID NO: 20104 - protein, 1325 aa, unidentified
  REGION 1..1325: note = Cas Enzyme sequence
MKNFNDDYYAGFDIGTDSVGYAVADTDYNLCKFKGNAMWGVDLFEESNSAAERRTLRSVRRRGLRKRNRIEWLQMLFDEEISKVDNAFYQRLKESCLYLDDKSSNVPYAVFADGNYTDKEFHTDYPTIYHLRKELIKSSQPHDIRLVYLALHHIIKHRGHFLFDNMGSDFENESSFEALFDDLKLYLKEEYEIEFECNDSLRFSEILKDKTLKKTAKSSESYKLFGYSKRNNPYETALIDLMCGRKVKFSDMFGDKSFDSEEVNGITFESGYDDNENTYRDLLQEKFELIEKAKAVYDWAILADILNGEKYISFAKVKTYEEHNSDLKMLKDFVKERCKSLYGEIFRITKDKLDNYTAYCGKYKENGRNGVIQFRTNQADFCKYLKKKFEKLDKTGYEEMFDKIENGTFMPKIVVKDNGVIPMQVNRSELKAILKNASTYLEFLNKKDENGISVSDKIVKIFEFRIPYYVGPLNNHSLKSWLVRSDEKIYPWNFDSVVDIEQSAENFINNLTSKCTYLPTKDVIPKNSILYSAFTVLNELNNLRLDGKKPDVSLKQAIFNDLFMTHKKVRRKDLLNYLKSEKGITPDITGIDGDFKSSMRSAIEMSQFNLTDSEKEDAIKAITVFGDDKKLLRKRLKRQLGSKLSDEDIMRISKLKYKDWGRLSKEFLTEVYNVDKNTGELQFNIIHALWQTNDNLMELLGSKYGFEQSRQNYLDGIQTGQSLEKMVENLYISPAVKRPVYQSLKIMHEINKIQGHAPKKIFVEMTRKDGVKGDKGRKESRKTKLVDLYKKCGEDSGELWESLEKTPDDEFKRDRLYFYYTQFGKCMYTGEPINLSELYNQNIYDVDHIFPRSKVKDDSLDNRALVKKQVNAHKDNTYPLDSSIREKMKGFWHLLMDKGLISKKKYERLTRVTPLSDSELSDFIARQIVETSQSTKAVASLFKELYPDTEIVYVKASTVSEFRHEYDFLKCREVNDFHHAKDAYLNIVVGNVYNERCTHNKSIFIEGLKTKAYSLNKMFSFNTPNAWSIDDNKSIKIVRKTMNKNNIRFTRYALTRNGGLFKMNPLKKGSGQVSLKQNSPLSDISKYGGYDKPTSSYFSFVKYEGKKGKEMRQLVAIDSYIKAQYEANPEKYLSETLGLKNPVVLIPVVKYNACIEIDGFRMHISAKTGKQIIYKPAMQLTVSYDTEKYIRNVVKLNSKPENYNITELDKVSTDENIELFDILTYKMTDTVLKVKFGDMGAKIISHRDAFEKLDIRKQCFVLTEILKIIHCNAVLGNLTYIGEGSSSGRVGLNSVLSEVKGVKSIYLVHQSVTGLFEKKIDLLHM

SEQ ID NO: 20105 - protein, 1325 aa, unidentified
  REGION 1..1325: note = Cas Enzyme sequence
MKNFNDDYYAGFDIGTDSVGYAVADTDYNLCKFKGNAMWGVDLFEESNSAAERRTLRSARRRGLRKRNRIEWLQMLFDEEISKVDNAFYQRLKESCLYLDDKSSNVPYAVFADGNYTDKEFHTDYPTIYHLRKELIKSSQPHDIRLVYLALHHIIKHRGHFLFDNMGSDFESESSFEALFDDLKLYLKEEYEIEFECNDSLRFSEILKNKTLKKTAKSSESYKLFGYSKKNNPYETALIDLMCGRKVKFSDMFGDKSFDSEEVNGITFESGYDDNENTYRDLLQEKFELIEKAKAVYDWAILADILNGEKYISFAKVKTYEEHSSDLKMLKDFVKERCKSLYGEIFRITKDKLDNYTAYCGKYKENGRNGVIQYRTNQADFCKYLKKKFEKLDKTGYEEMFDKIENGTFMPKIVVKDNGVIPMQVNRSELKAILKNASTYLEFLNNKDENGISVSDKIVKIFEFRIPYYVGPLNNHSLKSWLVRSDEKIYPWNFDSVVDIEQSAENFINNLTSKCTYLPTKDVVPKNSILYSAFTVLNELNNLRLDGKKPDVSLKQAIFNDLFMTHKKVRRKDLLNYLKSEKGVAFDITGIDGDFKSSMRSAIEMSQFNLTDSEKEDTIKAITVFGDDKKLLRKRLKRQLGSKLSDEDIMRISKLKYKDWGRLSKEFLTEVYNVDKNTGELQFNFIHALWQTNDNLMELLGSKYGFEQSRQNYLDGIQTGQSLEKMVENLYISPAVKRPVYQSLKIMHEINKIQGHAPKKIFVEMTRKDGVKGDKGRKESRKTKLVDLYKKCGEDSGDLWESLEKTPDDEFKRDRLYFYYTQFGKCMYTGEPINLSELYNQNIYDVDHIFPRSKVKDDSLDNRVLVKKQVNAHKDNTYPLDSSIREKMKGFWHLLMDKGLISKKKYERLTRATELTDSELSDFIARQIVETSQSTKAVASLFKELYPDTEIVYVKASTVSEFRHEYDFLKCREVNDFHHAKDAYLNIVVGNVYNERCTHNKSIFIKGLQTKTYSLNKMFSFNTPNTWSIDDNKSIKIVRKTMNKNNIRFTRYALTRNGELFKRKPFKKGRGQAPLKQNSPLSDISKYGGYDKPTSSYFSFVKYEGKKGKEMRRLVAIDSYIKARYEANPEKYLSETLGLKNPVVLIPVVKYNACIEIDGFRMHISAKTDKRIQYKPAMQLTVSYDTEKYIRNVVKLNSKPENYNITELDKVSADENLKLFDILTSKMTDTILKVKFGDMGVKIASHRDAFEKLDVRKQCFVLAEILKIIHCNILEGDLTFIGGAKQSGSIKMSSVISGIKGVKSIYLVHQSVTGLFEKKIDLLHM

SEQ ID NO: 20106 - protein, 1325 aa, unidentified
  REGION 1..1325: note = Cas Enzyme sequence
MKNFNNDYYAGFDIGTDSVGYAVADTDYNLCKFKGNAMWGVDLFEESNSAAERRTLRSARRRGLRKRNRIEWLQMLFDEEISKVDNAFYQRLKESCLYLDDKSSNVPYAVFADGNYTDKEFHTDYPTIYHLRKELIKSSQPHDIRLVYLALHHIIKHRGHFLFDNMGSDFENESSFETLFDDLKLYLKEEYEIEFECNDSLRFSEILKDKTLKKNAKSSESYKLFGYSKRNNPYETALIDLMCGRKVKFSDMFGDKSFDSEDVNGITFESGYDDNENTYRDLLQEKFELIEKAKAVYDWAILADILNGEKYISFAKVKTYEEHSLDLKILKKFVKERCKPLYGEIFRITKDKLDNYTAYCGKYKENGRNGVIQYRTNQADFCKYLKKKFEKLDKTGYEEMFDKIENGTFMPKIVVKDNGVIPMQVNRSELKAILKNASTYLEFLNKKDENGISVSDKIVKIFEFRIPYYVGPLNNHSLKSWLVRSDEKIYPWNFDSVVDIEQSAENFINNLTSKCTYLPTKDVIPKNSILYSAFTVLNELNNLRLDGKKPDVSLKQAIFNDLFMTHKKVRRKDLLNYLKSEKGITPDITGIDGDFKSSMRSAIEMSQFNLTDSEKEDAIKAITVFGDDKKLLRKRLKRQLGSKLSDEDIMRISKLKYKDWGRFSKEFLTEVYNVDKNTGELQFNIIHALWQTNDNLMELLGSKYGFEQSRQNYLDGIQTGQSLEKMVENLYISPAVKRPVYQSLKIMHEINKIQGHAPKKIFVEMTRKDGVKGDKGRKESRKTKLVDLYKKCGEDSGELWESLEKTPDDEFKRDRLYFYYTQFGKCMYTGEPINLSELYNQNIYDVDHIFPRSKVKDDSLDNRVLVKKQVNAHKDNTYPLDSSIREKMKGFWHLLMDKGLISKKKYERLTRATELTDSELSDFIARQIVETSQSTKAVASLFKELYPDTEIVYVKASTVSEFRHEYDFLKCREVNDFHHAKDAYLNIVVGNVYNERCTHNKSIFIKGLQTKTYSLNKMFSFNTPNAWSIDDNKSIKIVRKTMNKNNIRFTRYALTRNGGLFKMNPLKKGSGQVSLKQNSPLSDISKYGGYDKPTSSYFSFVKYEGKKGKEMRRLVAIDSYIKARYEANPEKYLSETLGLKNPVVLIPVVKYNACIEIDGFRMHISAKTGKQIIYKPAMQLTVSYDTEKYIRNVVKLNSKPENYNITELDKVSAEENVELFDILISKMTDTILKVKFGDMGVKIASHRDAFEKLDVRKQCFVLAEILKIIHSNVVTGDLTLIDEAKKAGVVYTNSVLSEIKGVKSIYLVHQSVTGLFEKKIDLLHM

SEQ ID NO: 20107 - protein, 1330 aa, unidentified
  REGION 1..1330: note = Cas Enzyme sequence
MKNFNNDYYAGFDIGTDSVGYAVADTDYNLCKFKGNAMWGVDLFEESNSAAERRTLRSARRRGLRKRNRIEWLQMLFDEEISKVDNAFFQRLKESCLYLDDKSSNVPYAVFADGNYTDKEFHTDYPTIYHLRKELIKSSQPHDIRLVYLALHHIIKHRGHFLFDNMGSDFENESSFEALFDDLKLYLKEEYEIEFECNDSLRFSEILKDKTLKKTAKSSESYKLFGYSKRNNPYETALIDLMCGRKVKFSDMFGDKSFDSEEVNGITFESGYDDNENTYRDLLQEKFELIEKAKAVYDWAILADILNGEKYISFAKVKTYEEHSSDLKMLKDFVKEKCKSLYGEIFRITKDKLDNYTAYCGKYKENGRNGVIQYRTNQADFCKYLKKKFEKLDKTGYEEMFDKIENGTFMPKIVVKDNGVIPMQVNRSELKAILKNASTYLEFLNKKDENGISVSDKIVKIFEFRIPYYVGPLNNHSLKSWLVRSDEKIYPWNFDSVVDIEQSAENFINNLTSKCTYLPTKDVIPKNSILYSAFTVLNELNNLRLDGKKPDVSLKQAIFNDLFMTHKKVRRKDLLNYLKSEKGITPDITGIDGDFKSSMRSAIEMSQFNLTDSEKEDAIKAITVFGDDKKLLKKRLKRQLGSKLSDEDIMRISKLKYKDWGRLSKEFLTEVYNVDKNTGELQFNIIHALWQTNDNLMELLGSKYGFEQSRQNYLDGIQTGQSLEKMVENLYISPAVKRPVYQSLKIMHEINKIQGHAPKKIFVEMTRKDGVKGDKGRKESRKTKLVDLYKKCGEDSGELWESLEKTPDDEFKRDRLYFYYTQFGKCMYTGEPINLSELYNQNIYDVDHIFPRSKVKDDSLDNRVLVKKQVNAHKDNTYPLDSSIREKMKGFWHLLMDKGLISKKKYERLTRVTPLSDSELSDFIARQIVETSQSTKAVASLFKELYPDTEIVYVKASLVSEFRDESRGFGFLKCREVNDFHHAKDAYLNIVVGNVYNERCTHNKSIFIKGLQTKTYSLNKMFSFNTPNAWSIDDNKSIKIVRKTMNKNNIRFTRYALTRNGGLFKMNPLKKGSGQVSLKQNSPLSDISKYGGYDKPTSSYFSFVKYEGKKGKEMRQLVAIDSYIKAQYEANPEKYLSETLGLKNPVVLIPVVKYNACIEIDGFRMHISSKSNGGKKIVYKPAMQLTVSYDTEKYIRNVVKLNSMPENYNITERDKVSADENLKLFDILIFKMTETILKVKFGDMGVKIASHRDTFEKLDVRKQCFVLAEILKIIHSNVVTGDLTLIDEAKKAGVVSTNSVLSEIKGVKSIYLVHQSVTGLFEKKIDLLHM

SEQ ID NO: 20108 - protein, 1325 aa, unidentified
  REGION 1..1325: note = Cas Enzyme sequence
MKNFNDDYYVGFDIGTDSVGYAVADTDYNLCKFKGNAMWGVDLFEESNSAAERRTLRSARRRGLRKRNRIEWLQMLFDEEISKVDNAFFQRLKESCLYLEDKSSNVPYAVFADSNYTDIEFHTDYPTIYHLRKELIKSSQPHDIRLVYLALHHIIKHRGHFLFDNMGSDFESESSFEALFDDLKLYLKEEYEIEFECNDSLRFSEILKDKTLKKTAKSSESYKLFGYSKRNNPYETALIDLMCGRKVKFSDMFGYKSFDSEEVNGITFESGYDDNENTYRDLLQEKFELIEKAKAVYDWAILADILNGEKYISFAKVKTYEEHNSDLKMLKDSVKERCKSLYGEIFRITKDKLDNYTAYCGKYKENGRNGVIQYRTNQADFCKYLKKKFEKLDKTGYEEMFDKIENGTFMPKIVVKDNGVIPMQVNRSELKAILKNASTYLEFLNKKDENGISVSDKIVKIFEFRIPYYVGPLNNHSQKSWLVRSDEKIYPWNFDSVVDIEQSAENFINNLTSKCTYLPTKDVIPKNSILYSTFTVLNELNNLRLDGKKPDVSLKQAIFNDLFMTHKKVRRKDLLNYLKSEKGITPDITGIDGDFKSSMRSAIEMSQFNLTDSEKEDAIKAITVFGDDKKLLRKRLKRQLGSKLSDEDIMRISKLKYKDWGRLSKEFLTEVYNVDKNTGELQFNIIHALWQTNDNLMELLGSKYGFEQSRQNYLDGIQTGQSLEKMVENLYISPAVKRPVYQSLKIMHEINKIQGHAPKKIFVEMTRKDGVKGDKGRKESRKTKLVDLYKKCSEDSGELWESLEKTPDDEFKRDRLYFYYTQFGKCMYTGEPINLSELYNQNIYDVDHIFPRSKVKDDSLDNRVLVKKQVNAHKDNTYPLDSSIREKMKGFWHLLMDKGLISKKKYERLTRATELTDSELSDFIARQIVETSQSTKAVASLFKELYPDTEIVYVKASTVSEFRHEYDFLKCREVNDFHHAKDAYLNVVVGNVYNERCTHNKSIFIEGLKTKAYSLNKMFSFNTPNAWSIDDNKSIKIVRKTMNKNNIRFTRYALTRNGGLFKMNPLKKGSGQVSLKQNSPLSDISKYGGYDKPASSYFSFVKYEGKKGKEMRQLVAIDSYIKARYEANPEKYLSENLGLKNPVVLIPVVKYNACIEIDGFRMHISAKTGKQIIYKPAMQLTVSYDTEKYIRNVVKLNSKPENYNITELDKVSADENLKLFDILTSKMTDTILKVKFGDMGVKIASHRDAFEKLDIRKQCFVLTEILKIIHCNAVLGNLTYIGEGSSSGRVGLNSVLSEVKGVKSIYLVHQSVTGLFEKKIDLLHM

SEQ ID NO: 20109 - protein, 1325 aa, unidentified
  REGION 1..1325: note = Cas Enzyme sequence
MKNFNDDYYTGFDIGTDSVGYAVADTDYNLCKFKGNAMWGVDLFEESNSAAERRTLRSARRRGLRKRNRIEWLQMLFDEEISKVDNAFYQRLKESCLYLDDKSSNVPYAVFADGNYTDKEFHTDYPTIYHLRKELIKSSQPHDIRLVYLALHHIIKHRGHFLFDNMGSDFESESSFEALFDDLKLYLKEECEIEFECNDSLRFSEILKDKTLKKTAKSSESYKLFGYSKRNNPYETALIDLMCGRKVKFSDMFGDKSFDSEEVNGITFESGYDDNENTYRDLLQEKFELIEKAKAVYDWAILADILNGEKYISFAKVKTYEEHSSDLKMLKDFVKERCKSLYGEIFRITKDKLDNYTAYCGKYKENGRNGVIQYRTNQADFCKYLKKKFEKLDKTGYEEMFDKIENGTFMPKIVVKDNGVIPMQVNRSELKAILKNASTYLEFLNKKDENGISVSDKIVKIFEFRIPYYVGPLNNHSLKSWLVRSDEKIYPWNFDSVVDIEQSAENFINNLTSKCTYLPTKDVIPKNSILYSAFTVLNELNNLRLDGKKPDVSLKQAIFNDLFMTHKKVRRKDLLNYLKSEKGVAFDITGIDGDFKSSMRSAIEMSQFNLTDSEKEDAIKAITVFGDDKKLLRKRLKRQLGSKLSDEDIMRISKLKYKDWGRLSKEFLTEVYNVDKNTGELQFNIIHALWQTNDNLMELLGSKYGFEQSRQNYLDGIQTGQSLEKMVENLYISPAVKRPVYQSLKIMHEINKIQGHAPKKIFVEMTRKDGVKGDKGRKESRKTKLVDLYKKCGEDSGELWESLEKTPDDEFKRDRLYFYYTQFGKCMYTGEPINLSELYNQNIYDVDHIFPRSKVKDDSLDNRALVKKQVNAHKDNTYPLDSSIREKMKGFWHLLMDKGLISKKKYERLTRATPLSDSELSDFIARQIVETSQSTKAVASLFKELYPDTEIVYVKASTVSEFRHEYDFLKCREVNDFHHAKDAYLNIVVGNVYNERCTHNKSIFIEGLKTKAYSLNKMFSFNTPNAWSIDDNKSIKIVRKTMNKNNIRFTRYALTRNGGLFKMNPLKKGSGQVSLKQNSPLSDISKYGGYDKPTSSYFSFVKYEGKKGKEMRQLVAIDSYIKAQYEANPEKYLSETLGLKNPVVLIPVVKYNACIEIDGFRMHISAKTGKQIIYKPAMQLTVSYDTEKYIRNVVKLNSKPENYNITELDKVSTDENIELFDILTYKMTDTVLKVKFGDMGAKIISHRDAFEKLDIRKQCFVLTEILKIIHCNAVLGNLTYIGEGSSSGRVGLNSVLSEVKGVKSIYLVHQSVTGLFEKKIDLLHM

SEQ ID NO: 20110 - protein, 1333 aa, unidentified
  REGION 1..1333: note = Cas Enzyme sequence
MKNFNNDYYTGFDIGTDSVGYAVADTDYNLCKFKGNAMWGVDLFEESNSAAERRTLRSARRRGLRKRNRIEWLQMLFDEEISKVDNAFFQRLKESCLYLDDKSSNVPYAVFADGNYTDKEFHTDYPTIYHLRKELIKSSQPHDIRLVYLALHHIIKHRGHFLFDNMGSDFESESSFETLFDDLKLYLKEEYEIEFECNDSLRFSEILKDKTLKKTAKSSESYKLFGYSKRNNPYETALIDLMCGRNVGFSDMFGDKSFDSEEVNGITFESGYDDNENTYRDLLQEKFEPIEKAKAVYDWAILADILNGEKYNGKKYISFAKVKTYEEHSSDLKMLKDFVKERCKSLYGEIFRITKDKLDNYTAYCGKYKENGRNGVIQYRTNQADFCKYLKKRFEKLDKTGYEEMFDKIENGTFMPKIVVKDNGIIPMQVNRSELKAILKNASTYLEFLNKKDENGISVSDKIVKIFEFRIPYYVGPLNNHSLKSWLVRSDEKIYPWNFDSVVDIEQSAENFINNLTSKCTYLPTKDVIPKNSILYSAFTVLNELNNLRLDGKKPDVSLKQAIFNDLFMTHKKVRRKDLLNYLKSEKGITPDITGIDGDFKSSMRSAIEMSQFNLTDSEKEDAIKAITVFGDDKKLLRKRLKRQLGSKLSDEDIMRISKLKYKDWGRLSKEFLTEVYNVDKNTGELQFNIIHALWQTNDNLMELLGSKYGFEQSRQNYLDGIQTGQSLEKMVENLYISPAVKRPVYQSLKIMHEINKIQGHAPEKIFVEMTRKDGVKGDKGRKESRKTKLVDLYKKCGEDSGELWESLEKTPDDEFKRDRLYFYYTQFGKCMYTGEPINLSELYNQNIYDVDHIFPRSKVKDDSLDNRVLVKKQVNAHKDNTYPLDSSIREKMKGFWHLLMDKGLISKKKYERLTRATPLSDSELSDFIARQIVETSQSTKAVASLFKELYPDTEIVYVKASLVSEFRDESRGFGFLKCREVNDFHHAKDAYLNIVVGNVYNERCTHNKSIFIKGLQTKTYSLNKMFSFNTPNAWSIDDNKSIKIVRKTMNKNNIRFTRYALTRNGGLFKMNPLKKGSGQVSLKQNSPLSDISKYGGYDKPASSYFSFVKYEGKKGKEMRQLVAIDSYIKARYEANPEKYLSETFGLKKPVVLIPVVKRDACIEIDGFRMHISGKTGSRITFKPAMQITVSYDTEKYIRNVVKLNSKPENYNITELDKVSTDENIELFDILTYKMTDTVLKVKFGDMGAKIISHRDAFEKLDIRKQCFVLTEILKIIHCNAVLGNLTYIGEGSSSGRVGLNSVLSEVKGVKSIYLVHQSVTGLFEKKIDLLHM

SEQ ID NO: 20111 - protein, 1325 aa, unidentified
  REGION 1..1325: note = Cas Enzyme sequence
MKNFNDDYYAGFDIGTDSVGYAVADTDYNLCKFKGNAMWGVDLFEESNSAAERRTLRSARRRGLRKRNRIEWLQMLFDEEISKVDNAFFQRLKESCLYLDDKSSNVPYAVFADGNYTDKEFHTDYPTIYHLRKELIKSSQPHDIRLVYLALHHIIKHRGHFLFDNMGSDFESESSFEALFDDLKLYLKEEYEIEFECNYSLRFSEILKDKTLKKTAKSSESYKLFGYSKRNNPYETALIDLMCGRKVKFSDMFGDKSFDSEEVNGITFESGYDDNENTYRDLLQEKFELIEKAKAVYDWAILADILNGEKYISFAKVKTYEEHSSDLKMLKDFVKERCKSLYGEIFRITKDKLDNYTAYCGKYKENGRNGAIQYRTNQADFCKYLKKKFEKLDKTGYEEMFDKIENGTFMPKIVVKDNGIIPMQVNRSELKAILKNASTYLEFLNKKDENGISVSDKIVKIFEFRIPYYVGPLNNHSLKSWLVRSDEKIYPWNFDSVVDIEQSAENFINNLTSKCTYLPTKDVIPKNSILYSAFTVLNELNNLRLDGKKPDVSLKQAIFNDLFMTHKKVRRKDLLNYLKSEKGITPDITGIDGDFKSSMRSAIEMSQFYLTNSEKEDAIKAITVFGDDKKLLRKRLKRQLGSKLSDEDIMRISKLKYKDWGRLSKEFLTEVYNVDKNTGELQFNIIHALWQTNDNLMELLGSKYGFEQSRQNYLDGIQTGQSLEKMVENLYISPAVKRPVYQSLKIMHEINKIQGHAPKKIFVEMTRKDGVKGDKGRKESRKTKLVDLYKKCGEDSGELWESLEKTPDDEFKRDRLYFYYTQFGKCMYTGEPITLSELYNKNIYEVDHIFPRSKVKDDSLDNRVLVKKQVNAHKDNTYPLDSSIREKMKGFWHLLMDKGLISKKKYERLTRATELTDSELSDFIARQIVETSQSTKAVASLFKELYPDTEIVYVKASTVSEFRHEYDFLKCREVNDFHHAKDAYLNIVVGNVYNERCTHNKSIFIEGLKTKAYSLNKMFSFNTPNAWSIDDNKSIKIVRKTMNKNNIRFTRYAFTKNGELFKRKPLKKGRGQAPLKQNSPLSDISKYGGYDKPTSSYFSFVKYEGKKGKEMRRLVAIDSYIKAQYEANPEKYLSETLGLKNPVVLIPVVKYNACIEIDGFRMHISAKTDKRIQYKPAMQLTVSYDTEKYIRNVVKLNSKPENYNITELDKVSTDENLKLFDILTSKMTDTILKVKFGDMGVKIASHRDVFEKLDVRKQCFVLAEILKIIHCNILEGDLTFIGGAKQSGSIKMSSVISGIKGVKSIYLVHQSVTGLFEKKIDLLHM

SEQ ID NO: 20112 - protein, 1327 aa, unidentified
  REGION 1..1327: note = Cas Enzyme sequence
MKNFNDDYYVGFDMGTDSVGHAVADTDYNLCKFKGNAMWGVDLFEESNSAAERRTLRSARRRGLRKRNRIEWLQMLFDEEISKVDNAFFQRLKESCLYLDDKSSNVPYAVFADGNYTDKEFHTDYPTIYHLRKELIKSSQPHDIRLVYLALHHIIKHRGHFLFDNMGSDFESESSFETLFEDLKLYLKEEYEIEFECNDSLRFPEILKDKTLKKTAKSSESYKLFGYSKRNNPYETALIDLMCGRKVKFSDMFGDKSFDSEEVNGITFESGYDDNENTYRDLLQEKFELIEKAKAVYDWAILADILNGEKYISFAKVKTYEEHNSDLKMLKDFVKERCKSLYGEIFRITKDKLDNYTAYCGKYKENGRNGVIQFRTNQADFCKYLKKKFEKLDKTGYEEMFDKIENGTFMPKIVVKDNGVIPMQVNRSELKAILKNASTYLEFLNKKDENGISVSDKIVKIFEFRIPYYVGPLNNHSLKSWLVRSDEKIYPWNFDSVVDIEQSAENFINNLTSKCTYLPTKDVIPKNSILYSAFTVLNELNNLRLDGKKPDVSLKQAIFNDLFMTHKKVRRKDLLNYLKSEKGITPDITGIDGDFKSSMRSAIEMSQFNLTDSEKEDAIKAITVFGDDKKLLRKRLKRQLGSKLSDEDIMRISKLKYKDWGRLSKEFLTEVYNVDKNTGELQFNIIHALWQTNDNLMELLGSKYGFEQSRQNYLDGIQTGQSLEKMVENLYISPAVKRPVYQSLKIMHEINKIQGHAPKKIFVEMTRKDGVKGDKGRKESRKTKLVDLYKKCGEDSGELWESLEKTPDDEFKRDRLYFYYTQFGKCMYTGEPINLSELYNQNIYDVDHIFPRSKVKDDSLDNRVLVKKQVNAHKDNTYPLDSSIREKMKGFWHLLMDKGLISKKKYERLTRATPLSDSELSDFIARQIVETSQSTKAVASLFKELYPDTEIVYVKASTVSEFRHEYDFLKCREVNDFHHAKDAYLNIVVGNVYNERCTHNKSIFIKGLQTKTYSLNKMFSFNTPNAWSIDDNKSIKIVRKTMNKNNIRFTRYALTRNGGLFKMNPLKKGSGQVSLKQNSPLSDISKYGGYDKPASSYFSFVKYEGKKGKEMRQLVAIDSYIKARYEANPEKYLSETLGLKNPVVLIPVVKYNACIEIDGFRMHISSKSNGGKKIVYKPAMQLTVSYDTEKYIRNVVKLNSKPENYNITELDKVSAEENVELFDILIFKMTDTILKVKFGDMGVKIASHRDTFEKLDVRKQCFVLAEILKIIHSNVVTGDLTLIDEAKKAGVVSTNSVLSEIKSVKSIYLVHQSVTGLFEKKIDLLNM

SEQ ID NO: 20113 - protein, 1327 aa, unidentified
  REGION 1..1327: note = Cas Enzyme sequence
MKNFNNDYYTGFDIGTDSVGYAVADTDYNLCKFKGNAMWGVDLFEESNSAAERRTLRSARRRGLRKRNRIEWLQMLFDEEISKVDNAFFQRLKESCLYLDDKSSNVPYAVFADGNYTDKEFHTDYPTIYHLRKELIKSSQPHDIRLVYLALHHIIKHRGHFLFDNMGADFESESSFETLFDDLKLYLKEEYDIEFECNDSLRFSEILKDKTLKKTAKSSESYKLFGYSKRNNPYETALIDLMCGRKVKFSDMFGDKSFDSEEVNGITFESGYDDNENTYRDLLQEKFELIEKAKAVYDWAILADILNGEKYISFAKVKTYEEHSSDLKMLKDFVKERCKSLYGEIFRITKDKLDNYTAYCGKYKENGRNGVIQYRTNQADFCKYLKKKFEKLDKTGYEEMFDKIENGTFMPKIVVKDNGVIPMQVNRSELKAILKNASTYLEFLNKKDENGISVSDKIVKIFEFRIPYYVGPLNNHSLKSWLVRSDEKIYPWNFDNVVDIEQSAENFINNLTSKCTYLPTKDVIPKNSILYSAFTVLNELNNLRLDGKKPDVSLKQAIFNDLFMTHKKVRRKDLLNYLKSEKGIMPDITGIDGDFKSSMRSAIEMSQFNLTDSEKEDAIKAITVFGDDKKLLRKRLKRQLGSKLSDEDIMRISKLKYKDWGRLSKEFLTEIYNVDKNTGELQFNIINALWQTNDNLMELLGSKYGFEQSRQNYLDGIQTGQSLEKMVENLYISPAVKRPVYQSLKIMHEINKIQGHAPKKIFVEMTRKDGVKGDKGRKESRKTKLVDLYKKCGEDSGELWESLEKTPDDEFKRDRLYFYYTQFGKCMYTGEPINLSELYNQNIYDVDHIFPRSKVKDDSLDNRVLVKKQVNAHKDNTYPLDSSIREKMKGFWHLLMDKGLISKKKYERLTRATPLSDSELSDFIARQIVETSQSTKAVASLFKELYPDTEIVYVKASTVSEFRHEYDFLKCREVNDFHHAKDAYLNIVVGNVYNERCTHNKSIFIKGLQTKTYSLNKMFSFNTPNAWSIDDNKSIKIVRKTMNKNNIRFTRYALTRNGGLFKMNPLKKGSGQVSLKQNSPLSDISKYGGYDKPASSYFSFVKYEGKKGKEMRQLVAIDSYIKARYEANPEKYLSETLGLKNPVVLIPVVKYNACIEIDGFRMHISGKSNGGKTVVCKPAMQLTVSYDTEKYIRNVVKLNSMPENYNITERDKVSTDENIELFDILISKMTDTILKVKFGSMGTKISAHRDAFEKLDVRKQCFVLAEILKIIHSNVVTGDLSFIGESKKSGVVSTNSVLSEIKGVKSIYLVHQSVTGLFEKKIDLLNM

SEQ ID NO: 20114 - protein, 1328 aa, unidentified
  REGION 1..1328: note = Cas Enzyme sequence
MKNFNDDYYAGFDIGTDSVGYAVADTDYNLCKFKGNAMWGVDLFEESNSAAERRTLRSARRRGLRKRNRIEWLQMLFDEEISKVDNAFFQRLKESCLYLDDKSSNVPYAVFADGNYTDKEFHTDYPTIYHLRKELIKSSQPHDIRLVYLALHHIIKHRGHFLFDNMGSDFESESSFETLFDDLKLYLKEEYEIEFECNDSLRFSEILKDKTLKKTAKSSESYKLFGYSKRNNPYETALIDLMCGRNVEFSDMFGDKSFDSEEVNGITFESGYDDNENTYRDLLQEKFEPIEKAKAVYDWAILADILNGEKYISFAKVKTYEEHSSDLKILKKFVKERCKPLYDEIFRITKDKLDNYTAYCGKYKENGKNGVIIYRPDVDPQDKFCKYLKKKFEKLDKTGYEEMFDKIENGTFMPKIVVKDNGIIPMQVNRSELKAILKNASTYLEFLNKKDENGISVSDKIVKIFEFRIPYYVGPLNNHSLKSWLVRSDEKIYPWNFDSVVDIEQSAENFINNLTSKCTYLPTKDVIPKNSILYSAFTVLNELNNLRLDGKKPDVSLKQAIFNDLFMTHKKVRRKDLLNYLKSEKGITPDITGIDGDFKSSMRSAIEMSQFNLTDSEKEDAIKAITVFGDDKKLLRKRLKRQLGSKLSDEDIMRISKLKYKDWGRLSKEFLTEVYNVDKNTGELQFNIIHALWQTNDNLMELLGSKYGFEQSRQNYLDGIQTGQSLEKMVENLYISPAVKRPVYQSLKIMHEINKIQGHAPKKIFVEMTRKDGVKGDKGRKESRKTKLVDLYKKCGEDSGELWESLEKTPDDEFKRDRLYFYYTQFGKCIYTGEPINLSELYNQNIYDVDHIFPRSKVKDDSLDNRVLVKKQVNAHKDNTYPLDSSIREKMKGFWHLLMDKGLISKKKYERLTRATPLSDSELSDFIARQIVETSQSTKAVASLFKELYPDTEIVYVKASTVSKFRHKYDFLKCREVNDFHHAKDAYLNIVVGNVYNERCTHNKSIFIKGLQTKKYSLNKMFSFNTPNAWSIDDNKSIKIVRKTMNKNNIRFTRYALTRNGGLFKMNPLKKGSGQVSLKQNSPLSDISKYGGYDKPASSYFSFVKYEGKKGKEMRQLVAIDSYIKARYEANPEKYLSETFGLKKPVVLIPVVKRDACIEIDGFRMHISGKTGSRITFKPAMQITVSYDTEKYIRNVVKLNSKPENYNITELDKVSTDENIELFDILTYKMTDTVLKVKFGDMGAKIISHRDAFEKLDIRKQCFVLTEILKIIHCNAVLGNLTYIGEGSSSGRVGLNSVLSEVKGVKSIYLVHQSVTGLFEKKIDLLHM

SEQ ID NO: 20115 - protein, 1332 aa, unidentified
  REGION 1..1332: note = Cas Enzyme sequence
MKNFNNDYYTGFDIGTDSVGYAVADTDYNLCKFKGNAMWGVDLFEESNSAAERRTLRSARRRGLRKRNRIEWLQMLFDEEISKVDNAFFQRLKESCLYLDDKSSNVPYAVFADGNYTDKEFHTDYPTIYHLRKELIKSSQPHDIRLVYLALHHIIKHRGHFLFDNMGSDFESESSFETLFDDLKLYLKEEYEIEFECNDSLRFSEILKDKTLKKTAKSSESYKLFGYSKRNNPYETALIDLMCGRNVGFSDMFGDKSFDSEEVNGITFESGYDDNENTYRDLLQEKFEPIEKAKAVYDWAILADILNGEKYNGKKYISFAKVKTYEEHSSDLKMLKDFVKERCKSLYGEIFRITKDKLDNYTAYCGKYKENGRNGVIQYRTNQADFCKYLKKKFEKLDKTGYEEMFDKIENGTFMPKIVVKDNGVIPMQVNRSELKAILKNASTYLEFLNNKDENGISVSDKIVKIFEFRIPYYVGPLNNHSLKSWLVRSDEKVYPWNFDSVVDIEQSAENFINNLTSKCTYLPTKDVIPKNSILYSAFTVLNELNNLRLDGKKPDVSLKQAIFNDLFMTHKKVRRKDLLNYLKSEKGITPDITGIDGDFKSSMRSAIEMSQFNLTDSEKEDAIKAITVFGDDKKLLRKRLKRQLGSKLSDEDIMRISKLKYKDWGRLSKEFLTEVYNVDKNTGELQFNIIHALWQTNDNLMELLGSKYGFEQSRQNYLDGIQTGQSLEKMVENLYISPAVKRPVYQSLKIMHEINKIQGHAPKKIFVEMTRKDGVKGDKGRKESRKTKLVDLYKKCGEDSGELWESLEKTPDDEFKRDRLYFYYTQFGKCMYTGEPINLSELYNQNIYDVDHIFPRSKVKDDSLDNRVLVKKQVNAHKDNTYPLDSSIREKMKGFWHLLMDKGLISKKKYERLTRATPLSDSELSDFIARQIVETSQSTKAVASLFKELYPDTEIVYVKASTVSEFRHEYDFLKCREVNDFHHAKDAYLNIVVGNVYNERCTHNKSIFIKGLQIKTYSLNKMFSFNTPNAWSIDDNKSIKIVRKTMNKNNIRFTRYALTRNGGLFKMNPLKKGRGQAPLKQNSPLSDISKYGGYDKPTSSYFSFVKYEGKKGKEMRQLVAIDSYIKARYEANPEKYLSETLGLKNPVVLIPVVKYNACIEIDGFRMHISSKSNGGKTVVCKPAMQLTVSYDTEKYIRNIVKLNSKPENYNITELDKVSADENLKLFDILTSKMTDTILKVKFGSMGTKISAHRDAFEKLDVRKQCFVLAEILKIIHSNVLTGDLSFIGESKKSGVVSTNSVLSEVKGVKSIYLVHQSVTGLFEKKIDLLHM

SEQ ID NO: 20116 - protein, 1327 aa, unidentified
  REGION 1..1327: note = Cas Enzyme sequence
MKNFNDDYYAGFDIGTDSVGYAVADTDYNLCKFKGNAMWGVDLFEESNSAAERRTLRSARRRGLRKRNRIEWLQMLFDQEISKVDNAFYQRLKESCLYLDDKSSNVPYAVFADGNYTDKEFHTDYPTIYHLRKELIKSSQPHDVRLVYLALHHIIKHRGHFLFDNMGSDFESESSFETLFDDLKLYLKEEYEIEFECNDSLRFSEILKDKTLKKTAKSSESYKLFGYSKRNNPYETALIDLMCGRKVKFSDMFGDKSFDSEEVNGITFESGYDDNENTYRDLLQEKFELIEKAKAVYDWAILADILNGEKYISFAKVKTYEEHNSDLKTLKKFVKERCKPLYGEIFRITKDKLDNYTAYCGKYKENGRNGVIQYRTNQADFCKYLKKKFEKLDKTGYEEMFDKIENGTFMPKIVVKDNGVIPMQVNRSELKAILKNASTYLEFLNKKDENGISVSDKIVKIFEFRIPYYVGPLNNHSLKFWLVRSDEKIYPWNFDSVVDIEQSAENFINNLTSKCTYLPTKDVIPKNSILYSAFTVLNELNNLRLDGKKPDVSLKQAIFNDLFMTHKKVRRKDLLNYLKSEKGVAFDITGIDGDFKSSMRSAIEMSQFNLTDSEKEDAIKAITVFGDDKKLLRKRLKRQLGSKLSDEDIMRISKLKYKDWGRLSKEFLTEVYNVDKNTGELQFNIIHALWQTNDNLMELLGSKYGFEQSRQNYLDGIQTGQSLEKMVENLYISPAVKRPVYQSLKIMHEINKIQGHAPKKIFVEMTRKDGVKGDKGRKESRKTKLVDLYKKCGEDSGELWESLEKTPDDEFKRDRLYFYYTQFGKCMYTGEPINLSELYNQNIYDVDHIFPRSKVKDDSLDNRVLVKKQVNAHKDNTYPLDSSIREKMKGFWHLLMDKGLISKKKYERLTRATELTDSELSDFIARQIVETSQSTKAVASLFKELYPDTEIVYVKASTVSEFRHEYDFLKCREVNDFHHAKDAYLNIVVGNVYNERCTHNKSIFIKGLQTKTYSLNKMFSFNTPNAWSIDDNKSIKIVRKTMNKNNIRFTRYALTRNGGLFKMNPLKKGSGQVSLKQNSPLSDISKYGGYDKPASSYFSFVKYEGKKGKEMRQLVAIDSYIKARYEANPEKYLSENLGLKNPVVLIPVVKYNACIEIDGFRMHISSKSSGGKQIVYKPAMQLTVSYDTEKYIRNIVKLNSMPENYNIKELDKVSTDENLKLFDILTSKMTDTILKVKFGDMGVKIASHRDAFEKLDVRKQCFVLAEILKIIHCNAVLGNLTYIGEGSSSGRVGLNSVLSEVKGVKSIYLVHQSVTGLFEKKIDLLHM

SEQ ID NO: 20117 - protein, 1330 aa, unidentified
  REGION 1..1330: note = Cas Enzyme sequence
MKNFNDDYYTGFDIGTDSVGYAVADTDYNLCKFKGNAMWGVDLFEESNSAAERRTLRSARRRGLRKRNRIEWLQMLFDEEISKVDNAFFQRLKESCLYLDDKSSNVPYVVFADGNYTDKEFHTDYPTIYHLRKELIKSSQPHDIRLVYLALHHIIKHRGHFLFDNMGSDFESESSFETLFDDLKLYLKEEYEIEFECNDSLRFSEILKDKTLKKTAKSSESYKLFGYSKRNNPYETALIDLMCGRKVKFSDMFGDKSFDSEEVNGITFESGYDDNENTYRDLLQEKFELIEKAKAVYDWAILADILNGEKYISFAKVKTYEEHNSDLKMLKDFVKERCKSLYGEIFRITKDKLDNYTAYCGKYKENGRNGVIQYRTNQADFCKYLKKKFEKLDKTGYEEMFDKIENGTFMPKIVVKDNGVIPMQVNRSELKAILKNASTYLEFLNKKDENGISVSDKIVKIFEFRIPYYVGPLNNHSKKSWLARSDEKIYPWNFESVVDIEQSAENFINNLTSKCTYLPTKNVIPKNSILYSAFTVLNELNNLRLDGKKPDVSLKQAIFNDLFMTHKKVRRKDLLNYLKSEKGITPDITGIDGDFKSSMRSAIEMSQFNLTDSEKEDAIKAITVFGDDKKLLRKRLKRQLGSKLSDEDIMRISKLKYKDWGRLSKEFLTEVYNVDINTGELQFNIIHALWQTNDNLMELLGSKYGFEQSRQNYLDGIQTGQSLEKMVENLYISPAVKRPVYQSLKIMHEINKIQGHAPKKIFVEMTRKDGVKGDNGRKESRKTKLVDLYKKCGEDSGELWESLEKTPDDEFKRDRLYFYYTQFGKCMYTGEPINLSELYNQNIYDVDHIFPRSKVKDDSLDNRVLVKKQVNAHKDNTYPLDSSIREKMKGFWHLLMDKGLISKKKYERLTRATPLSDSELSDFIARQIVETSQSTKAVASLFKELYPDTEIVYVKASLVSEFRDESRGFGFLKCREVNDFHHAKDAYLNIVVGNVYNERCTHNKSIFIKGLQTKTYSLNKMFSFNTPNAWSIDDNKSIKIVRKTMNKNNIRFTRYALTRNGGLFKMNPLKKGSGQVSLKQNSPLSDISKYGGYDKPTSSYFSFVKYEGKKGKEMRQLVAIDSYIKAQYEANPEKYLSETLGLKNPVVLIPVVKYNACIEIDGFRMHISSKSSGGKQIVYKPAMQLTVSYDTEKYIRNIVKLNSKPENYNITELDKVSADENVKLFDILIFKMTDTILKVKFGDMGVKIASHRDTFEKLDVRKQCFVLAEILKIIHSNVVTGDLSFIGESKKSGVVSTNSVLSEVKGVKSIYLVHQSVTGLFEKKIDLLHM

SEQ ID NO: 20118 - protein, 1330 aa, unidentified
  REGION 1..1330: note = Cas Enzyme sequence
MKNFNDDYYAGFDIGTDSVGYAVADTDYNLCKFKGNAMWGVDLFEESNSAAERRTLRSVRRRGLRKRNRIEWLQMLFDEEISKVDNAFYQRLKESCLYLDDKSSNVPYAVFADGNYTDKEFHTDYPTIYHLRKELIKSSQPHDIRLVYLALHHIIKHRGHFLFDNMGSDFENESSFEALFDDLKLYLKEEYEIEFECNDSLRFSEILKDKTLKKTAKSSESYKLFGYSKRNNPYETALIDLMCGRKVKFSDMFGDKSFDSEEVNGITFESGYDDNENTYRDLLQEKFELIEKAKAVYDWAILADILNGEKYISFAKVKTYEEHNSDLKMLKDFVKERCKSLYGEIFRITKDKLDNYTAYCGKYKENGRNGVIQFRTNQADFCKYLKKKFEKLDKTGYEEMFDKIENGTFMPKIVVKDNGVIPMQVNRSELKAILKNASTYLEFLNKKDENGISVSDKIVKIFEFRIPYYVGPLNNHSLKSWLVRSDEKIYPWNFDSVVDIEQSAENFINNLTSKCTYLPTKDVIPKNSILYSAFTVLNELNNLRLDGKKPDVSLKQAIFNDLFMTHKKVRRKDLLNYLKSEKGITPDITGIDGDFKSSMRSAIEMSQFNLTDSEKEDAIKAITVFGDDKKLLRKRLKRQLGSKLSDEDIMRISKLKYKDWGRLSKEFLTEVYNVDKNTGELQFNIIHALWQTNDNLMELLGSKYGFEQSRQNYLDGIQTGQSLEKMVENLYISPAVKRPVYQSLKIMHEINKIQGHAPKKIFVEMTRKDGVKGDKGRKESRKTKLVDLYKKCGEDSGDLWESLEKTPDDEFKRDRLYFYYTQFGKCMYTGEPINLSELYNQNIYDVDHIFPRSKVKDDSLDNRVLVKKQVNAHKDNTYPLDSSIREKMKGFWHLLMDKGLISKKKYERLTRVTPLSDSELSDFIARQIVETSQSTKAVASLFKELYPDTEIVYVKASLVSEFRDESRGFGFLKCREVNDFHHAKDAYLNIVVGNVYNERCTHNKSIFIKGLQTKTYSLNKMFSFNTPNAWSIDDNKSIKIVRKTMNKNNIRFTRYALTRNGGLFKMNPLKKGSGQVSLKQNSPLSDISKYGGYDKPTSSYFSFVKYEGKKGKEMRRLVAIDSYIKARYEANPEKYLSETLGLKNPVVLIPVVKYNACIEIDGFRMHISSKSNGGKKIVYKPAMQLTVSYDTEKYIRNVVKLNSMPENYNITERDKVSAEENVELFDILIFKMTDTILKVKFGDMGVKIASHRDTFEKLDVRKQCFVLAEILKIIHSNVVTGDLTLIDEAKKAGVVSTNSVLSEIKSVKSIYLVHQSVTGLFEKKIDLLNM

SEQ ID NO: 20119 - protein, 1325 aa, unidentified
  REGION 1..1325: note = Cas Enzyme sequence
MKNFNNDYYAGFDIGTDSVGYAVADTDYNLCKFKGNAMWGVDLFEESNSAAERRTLRSARRRGLRKRNRIEWLQMLFDEEISKVDNAFFQRLKESCLYLDDKSSNVPYAVFADGNYTDKEFHTDYPTIYHLRKELIKSSQPHDIRLVYLALHHIIKHRGHFLFDNMGSDFENESSFEALFDDLKLYLKEEYEIEFECNDSLRFSEILKDKTLKKTAKSSESYKLFGYSKRNNPYETALIDLMCGRKVKFSDMFGDKSFDSEEVNGITFESGYDDNENTYRDLLQEKFELIEKAKAVYDWAILADILNGEKYISFAKVKTYEEHSSDLKMLKDFVKERCKSLYGEIFRITKDKLDNYTAYCGKYKENGRNGVIQYRTNQADFCKYLKKKFEKLDKTGYEEMFDKIENGTFMPKIVVKDNGVIPMQVNRSELKAILKNASTYLEFLNKKDENGISVSDKIVKIFEFRIPYYVGPLNNHSLKSWLVRSDEKIYPWNFDSVVDIEQSAENFINNLTSKCTYLPTKDVIPKNSILYSAFTVLNELNNLRLDGKKPDVSLKQAIFNDLFMTHKKVRRKDLLNYLKSEKGVAFDITGIDGDFKSSMRSAIEMSQFNLTDSEKEDAIKAITVFGDDKKLLRKRLKRQLGSKLSDEDIMRISKLKYKDWGRLSKEFLTEVYNVDKNTGELQFNIIHALWQTNDNLMELLGSKYGFEQSRQNYLDGIQTGQSLEKMVENLYISPAVKRPVYQSLKIMHEINKIQGHAPKKIFVEMTRKDGVKGDKGRKESRKTKLVDLYKKCGEDSGELWESLEKTPDDEFKRDRLYFYYTQFGKCMYTGEPINLSELYNQNIYDVDHIFPRSKVKDDSLDNRVLVKKQVNAHKDNTYPLDSSIREKMKGFWHLLMDKGLISKKKYERLTRATELTDSELSDFIARQIVETSQSTKAVASLFKELYPDTEIVYVKASTVSEFRHEYDFLKCREVNDFHHSKDAYLNIVVGNVYNERCTHNKSIFIEGLKTKAYSLNKMFSFNTPNAWSIDDNKSIKIVRKTMNKNNIRFTRYALTRNGGLFKMNPLKKGSGQVSLKQNSPLSDISKYGGYDKPTSSYFSFVKYEGKKGKEMRRLVAIDSYIKARYEANPEKYLSETLGLKNPVVLIPVVKYNACIEIDGFRMHISAKTGKQIIYKPAMQLTVSYDTEKYIRNVVKLNSKPENYNITELDKVSADENLKLFDILTYKMTDTVLKVKFGDMGVKIASHRDAFEKLDIRKQCFVLTEILKIIHCNAVLGNLTYIGEGSSSGRVGLNSVLSEVKGVKSIYLVHQSVTGLFEKKIDLLNM

SEQ ID NO: 20120 - protein, 977 aa, unidentified
  REGION 1..977: note = Cas Enzyme sequence
TKDKLDNYTAYCGKYKENGRNGVIQFRTNQADFCKYLKKKFEKLDKTGYEEMFDKIENGTFMPKIVVKDNGVIPMQVNRSELKAILKNASTYLEFLNNKDENGISVSDKIVKIFEFRIPYYVGPLNNHSLKFWLVRSNEKIYPWNFDSVVDIEQSAENFINNLTSKCTYLPTKDVIPKNSILYSAFTVLNELNNLRLDGKKPDVSLKQAIFNDLFMTHKKVRRKDLLNYLKSEKGVAFDITGIDGNFKSSMRSAIEMSQFNLTDSEKEDAIKAITVFGDDKKLLRKRLKRQLGSKLSDEDIMRISKLKYKDWGRLSKEFLTEVYNVDKNTGELQFNIIHALWQTNDNLMELLGSKYGFEQSRQNYLDGIQTGQSLEKMVENLYISPAVKRPVYQSLKIMHEINKIQGHAPKKIFVEMTRKDGVKGDKGRKESRKTKLVDLYKKCGEDSGELWKSIEKTPDDEFKRDRLYFYYTQFGKCMYTGEPINLSELYNQNIYDVDHIFPRSKVKDDSLDNRVLVKKQVNAHKDNTYPLDSSIREKMKGFWHLLMDKGLISKKKYERLTRATPLSDSELSDFIARQIVETSQSTKAVASLFKELYPDTEIVYVKASTVSEFRHEYDFLKCREVNDFHHAKDAYLNIVVGNVYNERCTHNKSIFIKGLQTKTYSLNKMFSFNTPNAWSIDDNKSIKIVRKTMNKNNIRFTRYALTRNGGLFKMNPLKKGSGQVSLKQNSPLSDISKYGGYDKPASSYFSFVKYEGKKGKEMRQLVAIDSYIKARYEANPEKYLSETLGLKNPVVLIPVVKYNACIEIDGFRMHISAKTGKQIIYKPAMQLTVSYDTEKYIRNVVKLNSKPENYNITELDKVSADENLKLFDILTYKMTDTVLKVKFGDMGVKIASHRDAFEKLDIRKQCFVLTEILKIIHCNAVLGNLTYIGEGSSSGRVGLNSVLSEIKGVKSIYLVHQSVTGLFEKKIDLLHM

SEQ ID NO: 20121 - protein, 1328 aa, unidentified; identical to SEQ ID NO: 20083
  REGION 1..1328: note = Cas Enzyme sequence

SEQ ID NO: 20122 - protein, 1325 aa, unidentified
  REGION 1..1325: note = Cas Enzyme sequence
MKNFNNDYYAGFDIGTDSVGYAVADTDYNLCKFKGNAIWGVDLFEESNSAAERRTLRSARRRGLRKRNRIEWLQMLFDEEISKVDNAFFQRLKESCLYLDDKSSNVPYAVFADGNYTDKEFHTDYPTIYHLRKELIKSSQPHDIRLVYLALHHIIKHRGHFLFDNMGSDFESESSFEALFDDLKLYLKEEYEIEFECNDSLRFSEILKDKTLKKTAKSSESYKLFGYSKRNNPYETALIDLMCGRKVKFSDMFGDKSFDSEEVNGITFESGYDDNENTYRDLLQEKFELIEKAKAVYDWAILADILNGEKYISFAKVKTYEEHNSDLKMLKDFVKERCKSLYGEIFRITKDKLDNYTAYCGKYKENGRNGVIQYRTNQADFCKYLKKKFEKLDKTGYEEMFDKIENGTFMPKIVVKDNGVIPMQVNRSELKVILKNASTYLEFLNKKDENGISVSDKIVKIFEFRIPYYVGPLNNHSLKSWLVRSDEKIYPWNFDSVVDIEQSAENFINNLTSKCTYLPTKDVIPKNSILYSAFTVLNELNNLRLDGKKPDVSLKQAIFNDLFMTHKKVRRKDLLNYLKSEKGVAFDITGIDGDFKSSMRSAIEMSQFNLTDSEKEDAIKAITVFGDDKKLLRKRLKRQLGSKLSDEDIMRISKLKYKDWGRLSKEFLTEVYNVDKNTGELQFNIIHALWQTNDNLMELLGSKYGFEQSRQNYLDGIQTGQSLEKMVENLYISPAVKRPVYQSLKIMHEINKIQGHAPKKIFVEMTRKDGVKGDKGRKESRKTKLVDLYKKCGEDSGELWESLEKTPDDEFKRDRLYFYYTQFGKCMYTGEPINLSELYNQNIYDVDHIFPRSKVKDDSLDNRVLVKKQVNAHKDNTYPLDSSIREKMKDFWHSLMDKGLISKKKYERLTRATELTDSELSDFIARQIVETSQSTKAVASLFKELYPDTEIVYVKASTVSEFRHEYDFLKCREVNDFHHAKDAYLNIVVGNVYNERCTHNKSIFIEGLKTKVYSLNKMFSFNTPNAWSIDDNKSIKIVRKTMNKNNIRFTRYAFTKNGELFKRKPLKKGRGQAPLKQNSPLSDISKYGGYDKPTSSYFSFVKYEGKKGKEMRRLVAIDSYIKARYEANPEKYLSENLGLKNPVVLIPVVKYNACIEIDGFRMHISAKTDKRIQYKPAMQLTVSYDTEKYIRNVVKLNSKPENYNITERDKVSADENLKLFDILTSKMTDTILKVKFGDMGVKIASHRDAFEKLDVRKQCFVLAEILKIIHCNILEGDLTFIGGAKQSGSIKMSSVISGIKGVKSIYLVHQSVTGLFEKKIDLLHL

SEQ ID NO: 20123 - protein, 1327 aa, unidentified
  REGION 1..1327: note = Cas Enzyme sequence
MKNFNDDYYAGFDIGTDSVGYAVADTDYNLCKFKGNAMWGVDLFEESNSAAERRTLRSARRRGLRKRNRIEWLQMLFDQEISKVDNAFYQRLKESCLYLDDKSSNVPYAVFADGNYTDKEFHTDYPTIYHLRKELIKSSQPHDVRLVYLALHHIIKHRGHFLFDNMGSDFESESSFETLFDDLKLYLKEEYEIEFECNDSLRFSEILKDKTLKKTAKSSESYKLFGYSKRNNPYETALIDLMCGRKVKFSDMFGDKSFDSEEVNGITFESGYDDNENTYRDLLQEKFELIEKAKAVYDWAILADILNGEKYISFAKVKTYEEHNSDLKTLKKFVKERCKPLYGEIFRITKDKLDNYTAYCGKYKENGRNGVIQYRTNQGDFCKYLKKKFEKLDKTGYEEMFDKIENGTFMPKIVVKDNGVIPMQVNRSELKAILKNASTYLEFLNKKDENGISVSDKIVKIFEFRIPYYVGPLNNHSLKFWLVRSDEKIYPWNFDSVVDIEQSAENFINNLTSKCTYLPTKDVIPKNSILYSAFTVLNELNNLRLDGKKPDVSLKQAIFNDLFMTHKKVRRKDLLNYLKSEKGITPDITGIDGDFKSSMRSAIEMSQFNLTDSEKEDAIKAITVFGDDKKLLKKRLKRQLGSKLSDEDIMRISKLKYKDWGRLSKEFLTEVYNVDKNTGELQFNIIHALWQTNDNLMELLGSKYGFEQSRQNYLDGIQTGQSLEKMVENLYISPAVKRPVYQSLKIMHEINKIQGHAPKKIFVEMTRKDGVKGDKGRKESRKTKLVDLYKKCGEDSGELWESLEKTPDDEFKRDRLYFYYTQFGKCMYTGEPINLSELYNQNIYDVDHIFPRSKVKDDSLDNRVLVKKQVNAHKDNTYPLDSSIREKMKGFWHLLMDKGLISKKKYERLTRATELTDSELSDFIARQIVETSQSTKAVASLFKELYPDTEIVYVKASTVSEFRHEYDFLKCREVNDFHHAKDAYLNIVVGNVYNERCTHNKSIFIEGLKTKAYSLNKMFSFNTPNAWSIDDNKSIKIVRKTMNKNNIRFTRYALTRNGGLFKMNPLKKGSGQVSLKQNSPLSDISKYGGYDKPASSYFSFVKYEGKKGKEMRQLVAIDSYIKARYEANPEKYLSENLDLKNPVVLIPVVKYNACIEIDGFRMHISSKSNGGRTVVCKPAMQLTVSYDTEKYIRNVVKLNSMPENYNITERDKVSADENLKLFDILTSKMTDTILKVKFGDMGVKIASHRDAFEKLDVRKQCFVLAEILKIIHSNVVTGDLSFIGESKKSGVVSTNSVLSEIKGVKSIYLVHQSVTGLFEKKIDLLNM

SEQ ID NO: 20124 - protein, 1325 aa, unidentified
  REGION 1..1325: note = Cas Enzyme sequence
MKNFNDDYYTGFDIGTDSVGYAVADTDYNLCKFKGNAMWGVDLFEESNSAAERRTLRSARRRGLRKRNRIEWLQMLFDEEISKVDNAFYQRLKESCLYLDDKSSNVPYAVFADGNYTDKEFHTDYPTIYHLRKELIKSSQPHDIRLVYLALHHIIKHRGHFLFDNMGSDFESESSFEALFDDLKLYLKEECEIEFECNDSLRFSEILKDKTLKKTAKSSESYKLFGYSKRNNPYETALIDLMCGRKVKFSDMFGDKSFDSEEVNGITFESGYDDNENTYRDLLQEKFELIEKAKAVYDWAILADILNGEKYISFAKVKTYEEHSSDLKMLKDFVKERCKSLYGEIFRITKDKLDNYTAYCGKYKENGRNGVIQYRTNQADFCKYLKKKFEKLDKTGYEEMFDKIENGTFMPKIVVKDNGVIPMQVNRSELKAILKNASTYLEFLNKKDENGISVSDKIVKIFEFRIPYYVGPLNNHSLKSWLVRSDEKIYPWNFDSVVDIEQSAENFINNLTSKCTYLPTKDVIPKNSILYSAFTVLNELNNLRLDGKKPDVSLKQAIFNDLFMTHKKVRRKDLLNYLKSEKGVAFDITGIDGDFKSSMRSAIEMSQFNLTDSEKEDAIKAITVFGDDKKLLRKRLKRQLGSKLSDEDIMRISKLKYKDWGRLSKEFLTEVYNVDKNTGELQFNIIHALWQTNDNLMELLGSKYGFEQSRQNYLDGIQTGQSLEKMVENLYISPAVKRPVYQSLKIMHEINKIQGHAPKKIFVEMTRKDGVKGDKGRKESRKTKLVDLYKKCGEDSGELWESLEKTPDDEFKRDRLYFYYTQFGKCMYTGEPINLSELYNQNIYDVDHIFPRSKVKDDSLDNRALVKKQVNAHKDNTYPLDSSIREKMKGFWHLLMDKGLISKKKYERLTRVTPLSDSELSDFIARQIVETSQSTKAVASLFKELYPDTEIVYVKASTVSEFRHEYDFLKCREVNDFHHAKDAYLNIVVGNVYNERCTHNKSIFIEGLKTKAYSLNKMFSFNTPNAWSIDDNKSIKIVRKTMNKNNIRFTRYALTRNGGLFKMNPLKKGSGQVSLKQNSPLSDISKYGGYDKPTSSYFSFVKYEGKKGKEMRQLVAIDSYIKAQYEANPEKYLSETLGLKNPVVLIPVVKYNACIEIDGFRMHISAKTGKQIIYKPAMQLTVSYDTEKYIRNVVKLNSKPENYNITELDKVSTDENIELFDILTYKMTDTVLKVKFGDMGAKIISHRDAFEKLDVRKQCFVLAEILKIIHSNVVTGDLSFIGESKKSGVVSTNSVLSEVKGVKSIYLVHQSVTGLLEKKIDLLHM

SEQ ID NO: 20125 - protein, 1330 aa, unidentified
  REGION 1..1330: note = Cas Enzyme sequence
MKNFNDDYYAGFDIGTDSVGYAVADTDYNLCKFKGNAMWGVDLFEESNSAAERRTLRSARRRGLRKRNRIEWLQMLFDEEISKVDNAFFQRLKESCLYLDDKSSNVPYAVFADGNYTDKEFHTDYPTIYHLRKELIKSSQPHDIRLVYLALHHIIKHRGHFLFDNMGSDFESESSFETLFDDLKLYLKEEYEIEFECNDSLRFSEILKDKTLKKTAKSSESYKLFGYSKRNNPYETALIDLMCGRNVEFSDMFGDKSFDSEEVNGITFESGYDDNENTYRDLLQEKFEPIEKAKAVYDWAILADILNGEKYISFAKVKTYEEHSSDLKILKKFVKERCKPLYDEIFRITKDKLDNYTAYCGKYKENGKNGVIIYRPDVDPQDKFCKYLKKKFEKLDKTGYEEMFDKIENGTFMPKIVVKDNGIIPMQVNRSELKAILKNASTYLEFLNKKDENGISVSDKIVKIFEFRIPYYVGPLNNHSLKSWLVRSDEKIYPWNFDSVVDIEQSAENFINNLTSKCTYLPTKDVIPKNSILYSAFTVLNELNNLRLDGKKPDVSLKQAIFNDLFMTHKKVRRKDLLNYLKSEKGITPDITGIDGDFKSSMRSAIEMSQFNLTDSEKEDAIKAITVFGDDKKLLRKRLKRQLGSKLSDEDIMRISKLKYKDWGRLSKEFLTEVYNVDKNTGELQFNIIHALWQTNDNLMELLGSKYGFEQSRQNYLDGIQTGQSLEKMVENLYISPAVKRPVYQSLKIMHEINKIQGHAPKKIFVEMTRKDGVKGDKGRKESRKTKLVDLYKKCGEDSGELWESLEKTPDDEFKRDRLYFYYTQFGKCMYTGEPITLSELYNKNIYEVDHIFPRSKVKDDSLDNRVLVKKQVNAHKDNTYPLDSSIREKMKGFWHLLMDKGLISKKKYERLTRATELTDSELSDFIARQIVETSQSTKAVASLFKELYPDTEIVYVKASTVSEFRHEYDFLKCREVNDFHHAKDAYLNIVVGNVYNERCTHNKSIFIKGLQTKTYSLNKMFSFNTPNAWSIDDNKSIKIVRKTMNKNNIRFTRYAFTKNGELFKRKPLKKGRGQAPLKQNSPLSDISKYGGYDKPTSSYFSFVKYEGKKGKEMRQLVAIDSYIKARYEANPEKYLSENLGLKNPVVLIPVVKYNACIEIDGFRMHISSKSSGGKQIVYKPAMQLTVSYDTEKYIRNVVKLNSEPENYNITELDKVSTDENVKLFDTLISKMTDTILKVKFGDMGVKIASHRDVFEKLDIRKQCFVLTEILKIIHCNAVLGNLTYIGEGSSSGRVGLNSVLSEVKGVKSIYLVHQSVTGLFEKKIDLLHM

SEQ ID NO: 20126 - protein, 1330 aa, unidentified
  REGION 1..1330: note = Cas Enzyme sequence
MKNFNNDYYTGFDIGTDSVGYAVADTDYNLCKFKGNAMWGVDLFEESNSAAERRTLRSARRRGLRKRNRIEWLQMLFNEEISKVDNAFFQRLKESCLYLDDKSSNVPYAVFADDNYTDKEFHTDYPTIYHLRKELIESSQPHDIRLVYLALHHIIKHRGHFLFDNMGSDFESESSFEALFDDLKLYLKEEYEIEFECNDSLRFSEILKDKTLKKTAKSSESYKLFGYSKRNNPYETALIDLMCGRKVKFSDMFGDKSFDSEEVNGITFENGYDDNENTYRDLLQEKFELIEKAKAVYDWAILADILNGEKYISFAKVKTYEEHNSDLKMLKDFVKERCKSLYGEIFRITKDKLDNYTAYCGKYKENGRNGVIQYRTNQADFCKYLKKKFEKLDKTGYEEMFDKIENGTFMPKIVVKDNGVIPMQVNRSELKAILKNASTYLEFLNKKDENGISVSDKIVKIFEFRIPYYVGPLNNHSLKFWLVRSDEKIYPWNFDSVVDIEQSAENFINNLTSKCTYLPTKNVIPKNSILYSAFTVLNELNNLRLDGKKPDVSLKQAIFNDLFMTHKKVRRKDLLNYLKSEKGVAFDITGIDGDFKSSMRSAIEMSQFNLTDSEKEDAIKAITVFGDDKKLLRKRLKRQLGSKLSDEDIMRISKLKYKDWGRLSKEFLTEVYNVDKNTGELQFNIIHALWQTNDNLMELLGSKYGFEQSRQNYLDGIQTGQSLEKMVENLYISPAVKRPVYQSLKIMREINKIQGHAPKKIFVEMTRKDGVKGDKGRKESRKTKLVDLYKKCGEDSGELWESLEKTPDDEFKRDRLYFYYTQFGKCMYTGELINLSELYNQNIYDVDHIFPRSKVKDDSLDNRVLVKKQVNAHKDNTYPLDSAIREKMKGFWHLLMDKGLISKKKYERLTRATELTDSELSDFIARQIVETSQSTKAVASLFKELYPDTEIVYVKASLVSEFRDESRGFGFLKCREVNDFHHAKDAYLNIVVGNVYNERCTHNKSIFIKGLQTKTYSLNKMFSFNTPNAWSIDDNKSIKIVRKTMNKNNIRFTRYAFTKNGELFKRKPLKKGRGQAPLKQNSPLSDINKYGGYDKPTSSYFSFVKYEGKKGKEMRRLVAIDSYIKAQYEANPEKYLSETLCLKNPVVLIPVVKYNACIEIDGFRMHISSKSSGGKQIVYKPAMQLTVSYDTEKYIRNVVKLNSKPENYNITELDKVSADENLKLFDILTSKMTETILKVKFGDMGVKIASHRDAFEKLDVRKQCFVLAEILKIIHCNILEGDLTFIGGAKQSGSIKMSSAISGIKGVKSIYLVHQSVTGLFEKKIDLLHM

SEQ ID NO: 20127 - protein, 1333 aa, unidentified
  REGION 1..1333: note = Cas Enzyme sequence
MKNFNDDYYAGFDIGTDSVGYAVADTDYNLCKFKGNAMWGVDLFEESNSAAERRILRSARRRGLRKRNRIEWLQMLFDEEISKVDNAFYQRLKESCLYLDDKSSNVPYAVFADGNYTDKEFHTDYPTIYHLRKELIKSSQPHDIRLVYLALHHIIKHRGHFLFDNMGSDFESESSFETLFDDLKLYLKEEYEIEFECNDSLRFSEILKDKTLKKTAKSSESYKLFGYSKRNNPYETALIDLMCGRNVGFSDMFGDKSFDSEEVNGITFESGYDDNENTYRDLLQEKFEPIEKAKAVYDWAILADILNGEKYNGKKYISFAKVKTYEEHSSDLKMLKDFVKERCKSLYGEIFRITKDKLDNYTAYCGKYKENGRNGVIQYRTNQADFCKYLKKRFEKLDKTGYEEMFDKIENGTFMPKIVVKDNGIIPMQVNRSELKAILKNASTYLEFLNKKDENGISVSDKIVKIFEFRIPYYVGPLNNHSLKSWLVRSDEKIYPWNFDSVVDIEQSAENFINNLTSKCTYLPTKDVIPKNSILYSAFTVLNELNNLRLDGKKPDVSLKQAIFNDLFMTHKKVRRKDLLNYLKSEKGITPDITGIDGDFKSSMRSAIEMSQFNLTDSEKEDAIKAITVFGDDKKLLRKRLKRQLGSKLSDEDIMRISKLKYKDWGRLSKEFLTEVYNVDKNTGELQFNIIHALWQTNDNLMELLGSKYGFEQSRQNYLDGIQTGQSLEKMVENLYISPAVKRPVYQSLKIMHEINKIQGHAPKKIFVEMTRKDGVKGDKGRKESRKTKLVDLYKKCGEDSGELWESLEKTPDDEFKRDRLYFYYTQFGKCIYTGEPINLSELYNQNIYDVDHIFPRSKVKDDSLDNRVLVKKQVNAHKDNTYPLDSSIREKMKGFWHLLMDKGLISKKKYERLTRATPLSDSELSDFIARQIVETSQSTKAVASLFKELYPDTEIVYVKASLVSEFRDESRGFGFLKCREVNDFHHAKDAYLNIVVGNVYNERCTHNKSIFIKGLQTKTYSLNKMFSFNTPNAWSIDDNKSIKIVRKTMNKNNIRFTRYALTRNGGLFKMNPLKKGSGQVSLKQNSPLSDISKYGGYDKPASSYFSFVKYEGKKGKEMRQLVAIDSYIKARYEANPEKYLSETFGLKKPVALIPVVKRDACIEIDGFRMHISGKTGSRITFKPAMQITVSYDTEKYIRNVVKLNSKPENYNITELDKVSTDENIELFDILTYKMTDTVLKVKFGDMGAKIISHRDAFEKLDIRKQCFVLTEILKIIHCNAVLGNLTYIGEGSSSGRVGLNSVLSEVKGVKSIYLVHQSVTGLFEKKIDLLHM

SEQ ID NO: 20128 - protein, 1333 aa, unidentified
  REGION 1..1333: note = Cas Enzyme sequence
DYYAGFVIGTDSVGYALADTDYNLCKFKGNAMWGVDVFEESNSAAERRTLRSARRRGLRKRNRIEWLQMLFDEEISKVDNAFYQRLKESCLYLDDKSSNVPYAVFADGNYTDKEFHTDYPTIYHLRKELIKSSQPHDIRLVYLALHHIIKHRGHFLFDNMGSDFESESSFEALFDDLKLYLKEEYEIEFECNDSLRFSEILKDKTLKKTAKSSESYKLFGYSKRNNPYETALIDLICGRKVKFSDMFGDKSFDSEEVNGITFESGYDDNENTYRDLLQEKFELIEKAKAVYDWAILADILNGEKYNGKNYISFAKVKTYEEHSSDLKILKKFVKERCKPLYDEIFRITKDKLDNYTAYCGKYKENGKNGVIIYRPDVDPQDKFCKYLKKKFEKLDKTGYEEMFDKIENGTFMPKIVVKDNGVIPMQVNRSELKAILKNASTYLEFLNKKDENGISVSDKIVKIFEFRIPYYVGPLNNHSLKSWLVRSNEKIYPWNFDSVVDIEQSAENFINNLTSKCTYLPTKDVIPQNSILYSAFTVLNELNNLRLDGKKPDVSLKQAIFNDLFMTHKKVRRKDLLNYLKSEKGITPDITGIDGDFKSSMRSAIEMSQFNLTDSEKEDAIKAITVFGDDKKLLRKRLKRQLGSKLSDEDIMRISKLKYKDWGRLSKEFLTEIYNVDKNTGELQFNIIHALWQTNDNLMELLGSKYGFEQSRQNYLDGIQTGQSLEKMVENLYISPAVKRPVYQSLKIMHEINKIQGHAPKKIFVEMTRKDGVKGDKGRKESRKTKLVDLYKKCGEDSGELWESLEKTPDDEFKRDRLYFYYTQFGKCMYTGEPITLSELYNKKIYEVDHIFPRSKVKDDSLDNRVLVKKQVNAHKDNTYPLDSSIREKMKGSWHFLMDKGLISKKKYERLTRVTPLSDSELSDFIARQIVETTQSTKAVASLFKELYPDTEIVYVKASTVSEFRHEYDFLKCREVNDFHHAKDAYLNIVVGNVYNERCTHNKSIFIEGLKTKAYSLNKMFSFNTPNAWSIDDNKSIKIVRKTMNKNNIRFTRYAFTQNGGDQNNGGFFKRNLLKKGNGQVPVKQNSALSDIEKYGGYNKAYASYFSFIKYEDKNGKEMRRIVAINAYTHLLYEANPEKYLSETFGLKKPVVLIPVVKRDACIEIDGFRMHISGKTGSRITFKPAMQLTVSYDTEKYIRNVVKLNSKPENYNITELDKVSTDENIELFDILTYKMTDTVLKVKFGDMGVKIASHRDAFEKLDIRKQCFVLTEILKIIHCNAVLGNLTYIGEGSSSGRVGLNSVLSEVKGVKSIYLVHQSVTGLFEKKIDLLNM

SEQ ID NO: 20129 - protein, 1327 aa, unidentified
  REGION 1..1327: note = Cas Enzyme sequence
MKNFNDDYYAGFDIGTDSVGYAVADTDYNLCKFKGNAMWGVDLFEESNSAAERRTLRSVRRRGLRKRNRIEWLQMLFDEEISKVDNAFYQRLKESCLYLDDKSSNVPYAVFADGNYTDKEFHTDYPTIYHLRKELIKSSQPHDIRLVYLALHHIIKHRGHFLFDNMGSDFENESSFEALFDDLKFYLKEEYEIEFECNDSLRFSEILKDKTLKKTAKSSESYKLFGYSKRNNPYETALIDLMCGRKVKFSDMFGDKSFDSEEVNGITFESGYDDNENTYRDLLQEKFELIEKAKAVYDWAILADILNGEKYISFAKVKTYEEHNSDLKMLKDFVKERCKSLYGEIFRITKDKLDNYTAYCGKYKENGRNGVIQFRTNQADFCKYLKKKFEKLDKTGYEEMFDKIENGTFMPKIVVKDNGVIPMQVNRSELKAILKNASTYLEFLNKKDENGISVSDKIVKIFEFRIPYYVGPLNNHSLKSWLVRSDEKIYPWNFDSVVDIEQSAENFINNLTSKCTYLPTKDVIPKNSILYSAFTVLNELNNLRLDGKKPDVSLKQAIFNDLFMTHKKVRRKDLLNYLKSEKGITPDITGIDGDFKSSMRSAIEMSQFNLTDSEKEDAIKAITVFGDDKKLLRKRLKRQLGSKLSDEDIMRISKLKYKDWGRLSKEFLTEVYNVDKNTGELQFNIIHALWQTNDNLMELLGSKYGFEQSRQNYLDGIQTGQSLEKMVENLYISPAVKRPVYQSLKIMHEINKIQGHAPKKIFVEMTRKDGVKGDKGRKESRKTKLVDLYKKCGEDSGELWESLEKTPDDEFKRDRLYFYYTQFGKCMYTGEPINLSELYNQNIYDVDHIFPRSKVKDDSLDNRVLVKKQVNAHKDNTYPLDSSIREKMKGFWHLLMDKGLISKKKYERLTRATPLSDSELSDFIARQIVETSQSTKAVASLFKELYPDTEIVYVKASTVSEFRHEYDFLKCREVNDFHHAKDAYLNIVVGNVYNERCTHNKSIFIKGLQTKTYSLNKMFSFNTPNAWSIDDNKSIKIVRKTMNKNNIRFTRYALTRNGGLFKMNPLKKGSGQVSLKQNSPLSDISKYGGYDKPASSYFSFVKYEGKKGKEMRQLVAIDSYIKARYEANPEKYLSETLGLKNPVVLIPVVKYNACIEIDGFRMHISSKSNGGKKIVYKPAMQLTVSYDTEKYIRNVVKLNSKPENYNITELDKVSAEENVELFDILIFKMTDTILKVKFGDMGVKIASHRDTFEKLDVRKQCFVLAEILKIIHSNVVTGDLTLIDEAKKAGVVSTNSVLSEIKSVKSIYLVHQSVTGLFEKKIDLLNM

SEQ ID NO: 20130 - protein, 994 aa, unidentified
  REGION 1..994: note = Cas Enzyme sequence
MKNFNNDYYTGFDIGTDSVGYAVADTDYNLCKFKGNAMWGVDLFEESNSAAERRTLRSARRRGLRKRNRIEWLQMLFDEEISKVDNAFFQRLKESCLYLDDKSSNVPYAVFADGNYTDKEFHTDYPTIYHLRKELIKSSQPHDIRLVYLALHHIIKHRGHFLFDNMGSDFESESSFETLFDDLKLYLKEEYEIEFECNDSLRFSEILKDKTLKKTAKSSESYKLFGYSKRNNPYETALIDLMCGRNVGFSDMFGDKSFDSEEVNGITFESGYDDNENTYRDLLQEKFEPIEKAKAVYDWAILADILNGEKYNGKKYISFAKVKTYEEHSSDLKMLKDFVKERCKSLYGEIFRITKDKLDNYTAYCGKYKENGRNGVIQYRTNQADFCKYLKKRFEKLDKTGYEEMFDKIENGTFMPKIVVKDNGIIPMQVNRSELKAILKNASTYLEFLNKKDENGISVSDKIVKIFEFRIPYYVGPLNNHSLKSWLVRSDEKIYPWNFDSVVDIEQSAENFINNLTSKCTYLPTKDVIPKNSILYSAFTVLNELNNLRLDGKKPDVSLKQAIFNDLFMTHKKVRRKDLLNYLKSEKGITPDITGIDGDFKSSMRSAIEMSQFNLTDSEKGDAIKAITVFGDDKKLLRKRLKRQLGSKLSDEDIMRISKLKYKDWGRLSKEFLTEVYNVDKNTGELQFNIIHALWQTNDNLMELLGSKYGFEQSRQNYLDGIQTGQSLEKMVENLYISPAVKRPVYQSLKIMHEINKIQGHAPKKIFVEMTRKDGVKGDKGRKESRKTKLVDLYKKCGEDSGELWESLEKTPDDEFKRDRLYFYYTQFGKCMYTGEPINLSELYNQNIYDVDHIFPRSKVKDDSLDNRVLVKKQVNAHKDNTYPLDSSIREKMKGFWHLLMDKGLISKKKYERLTRATELTDSELSDFIARQIVETSQSTKAVASLFKELYPNTEIVYVKASLVSEFRDESRGFGFLKCRCEFSERIGKTVKSR

SEQ ID NO: 20131 - protein, 1333 aa, unidentified
  REGION 1..1333: note = Cas Enzyme sequence
  REGION 1304..1313: note = misc_feature - Xaa can be any naturally occurring amino acid
MKNFNNDYYTGFDIGTDSVGYAVADTDYNLCKFKGNAMWGVDLFEESNSAAERRTLRSARRRGLRKRNRIEWLQMLFDEEISKVDNAFYQRLKESCLYLDDKSSNVPYAVFADGNYTDKEFHTDYPTIYHLRKELIKSSQPHDIRLVYLALHHIIKHRGHFLFDNMGSDFESESSFEALFDDLKLYLKEEYEIEFECNDSLRFSEILKDKTLKKTAKSSESYKLFGYSKRNNPYETALIDLMCGRKVKFSDMFGDKSFDSEEVNGITFESGYDDNENTYRDLLQEKFELIEKAKAVYDWAILADILNGEKYISFAKVKTYEEHSSDLKMLKDFVKERCKSLYGEIFRITKDKLDNYTAYCGKYKENGRNGVIQYRTNQADFCKYLKKKFEKLDKTGYEEMFDKIENGTFMPKIVVKDNGVIPMQVNRSELKAILKNASTYLEFLNKKDENGISVSDKIVKIFEFRIPYYVGPLNNHSLKSWLVRSDEKIYPWNFDSVVDIEQSAENFINNLTSKCTYLPTKDVIPKNSILYSAFTVLNELNNLRLDGKKPDVSLKQAIFNDLFMTHKKVRRKDLLNYLKSEKGITPDITGIDGDFKSSMRSAIEMSQFNLTDSEKEDAIKAITVFGDDKKLLRKRLKRQLGSKLSDEDIMRISKLKYKDWGRLSKEFLTEVYNVDKNTGELQFNIIHALWQTNDNLMELLGSKYGFEQSRQNYFDGIQTGQSLEKMVENLYISPAVKRPVYQSLKIMHEINKIQGHAPKKIFVEMTRKDGVKGDKGRKESRKTKLVDLYKKCGEDSGDLWESLEKTPDDEFKRDRLYFYYTQFGKCMYTGEPINLSELYNQNIYDVDHIFPRSKVKDDSLDNRVLVKKQVNAHKDNTYPLDSSIREKMKGFWHLLMDKGLISKKKYERLTRVTPLSDSELSDFIARQIVETSQSTKAVASLFKELYPDTEIVYVKASLVSEFRDESRGFGFLKCREVNDFHHAKDAYLNIVVGNVYNERCTHNKSIFIKGLQTKTYSLNKMFSFNTPNAWSIDDNKSIKIVRKTMNKNNIRFTRYALTRNGGLFKMNPLKKGSGQVSLKQNSPLSDISKYGGYDKPTSSYFSFVKYEGKKGKEMRRLVAIDSYIKARYEANPEKYLSETLGLKNPVVLIPVVKYNACIEIDGFRMHISSKSNGGKKIVYKPAMQLTVSYDTEKYIRNVVKLNSMPENYNITERDKVSAEENVELFDILIFKMTDTILKVKFGDMGVKIASHRDTFEKLDVRKQCFVLAEILKIIHSNVVTGDLTLIDEAKKAGVVSTNSVLSEXXXXXXXXXXYLVHQSVTGLFEKKIDLLNM

SEQ ID NO: 20132 - protein, 1332 aa, unidentified
  REGION 1..1332: note = Cas Enzyme sequence
MKNFNNDYYTGFDIGTDSVGYAVADTDYNLCKFKGNAMWGVDLFEESNSAAERRTLRSARRRGLRKRNRIEWLQMLFDEEISKVDNAFFQRLKESCLYLDDKSSNVPYAVFADGNYTDKEFHTDYPTIYHLRKELIKSSQPHDIRLVYLALHHIIKHRGHFLFDNMGSDFESESSFETLFDDLKLYLKEEYEIEFECNDSLRFSEILKDKTLKKTAKSSESYKLFGYSKRNNPYETALIDLMCGRNVGFSDMFGDKSFDSEEVNGITFESGYDDNENTYRDLLQEKFEPIEKAKAVYDWAILADILNGEKYNGKKYISFAKVKTYEEHSSDLKMLKDFVKERCKSLYGEIFRITKDKLDNYTAYCGKYKENGRNGVIQYRTNQADFCKYLKKRFEKLDKTGYEEMFDKIENGTFMPKIVVKDNGIIPMQVNRSELKAILKNASTYLEFLNKKDENGISVSDKIVKIFEFRIPYYVGPLNNHSLKSWLVRSDEKIYPWNFDSVVDIEQSAENFINNLTSKCTYLPTKDVIPKNSILYSAFTVLNELNNLRLDGKKPDVSLKQAIFNDLFMTHKKVRRKDLLNYLKSEKGITPDITGIDGDFKSSMRSAIEMSQFNLTDSEKEDAIKAITVFGDDKKLLRKRLKRQLGSKLSYEDIMRISKLKYKDWGRLSKEFLTEVYNVDKNTGELQFNIIHALWQTNDNLMELLGSKYGFEQSRQNYLDGIQTGQSLEKMVENLYISPAVKRPVYQSLKIMHEINKIQGHAPEKIFVEMTRKDGVKGDKGRKESRKTKLVDLYKKCGEDSGELWESLEKTPDDEFKRDRLYFYYTQFGKCMYTGEPINLSELYNQNIYDVDHIFPRSKVKDDSLDNRVLVKKQVNAHKDNTYPLDSSIREKMKGFWHLLMDKGLISKKKYERLTRATELTDSELSDFIARQIVETSQSTKAVASLFKELYPDTEIVYVKASTVSKFRHKYDFLKCREVNDFHHAKDAYLNIVVGNVYNERCTHNKSIFIKGLQTKTYSLNKMFSFNTPNAWSIDDNKSIKIVRKTMNKNNIRFTRYALTRNGGLFKMNPLKKGSGQVSLKQNSPLSDISKYGGYDRPTSSYFSFVKYEGKKGKEMRRLVAIDSYIKARYEANPEKYLSENLGLKNPVVLIPVVKYNACIEIDGFRMHISSKSSGGKQIVYKPAMQLTVSYDTEKYIRNVVKLNSKPENYNITELDKVSADENLKLFDILTSKMTDTVLKVKFGDMGAKIISHRDAFEKLDIRKQCFVLAEILKIIHCNISEGNLRFIGGAKQSGSIKMSSVISGIKGVKSIYLVHQSVTGLFEKKIDLLHM

SEQ ID NO: 20133 - protein, 1332 aa, unidentified
  REGION 1..1332: note = Cas Enzyme sequence
MKNFNDDYYAGFDIGTDSVGYAVADTDYNLCKFKGNAMWGVDLFEESNSAAERRTLRSARRRGLRKRNRIEWLQMLFDEEISKVDNAFYQRLKESCLYLDDKSSNVPYAVFADGNYTDKEFHTDYPTIYHLRKELIKSSQPHDIRLVYLALHHIIKHRGHFLFDNMGSDFESESSFETLFDDLKLYLKEEYEIEFECNDSLRFSEILKDKTLKKTAKSSESYKLFGYSKRNNPYETALIDLMCGRNVGFSDMFGDKSFDSEEVNGITFESGYDDNENTYRDLLQEKFEPIEKAKAVYDWAILADILNGEKYNGKKYISFAKVKTYEEHSSDLKMLKDFVKERCKSLYGEIFRITKDKLDNYTAYCGKYKENGRNGVIQYRTNQADFCKYLKKRFEKLDKTGYEEMFDKIENGTFMPKIVVKDNGIIPMQVNRSELKAILKNASTYLEFLNKKDENGISVSDKIVKIFEFRIPYYVGPLNNHSLKSWLVRSDEKIYPWNFDSVVDIEQSAENFINNLTSKCTYLPTKDVIPKNSILYSAFTVLNELNNLRLDGKKPDVSLKQAIFNDLFMTHKKVRRKDLLNYLKSEKGITPDITGIDGDFKSSMRSAIEMSQFNLTDSEKEDAIKAITVFGDDKKLLRKRLKRQLGSKLSDEDIMRISKLKYKDWGRLSKEFLTEVYNVDKNTGELQFNIIHALWQTNDNLMELLGSKYGFEQSRQNYLDGIQTGQSLEKMVENLYISPAVKRPVYQSLKIMHEINKIQGHAPKKIFVEMTRKDGVKGDKGRKESRKTKLVDLYKKCGEDSGELWESLEKTPDDEFKRDRLYFYYTQFGKCMYTGEPITLSELYNKNIYEVDHIFPRSKVKDDSLDNRVLVKKQVNAHKDNTYPLDSSIREKMKGFWHLLMDKGLISKKKYERLTRATELSDSELSDFIARQIVETSQSTKAVASLFKELYPDTEIVYVKASTVSEFRHEYDFLKCREVNDFHHAKDAYLNIVVGNVYNERCTHNKSIFIKGLQTKTYSLNKMFSFNTPNAWSIDDNKSIKIVRKTMNKNNIRFTRYALTRNGGLFKMNPLKKGSGQVSLKQNSPLSDISKYGGYDRPTSSYFSFVKYEGKKGKEMRRLVAIDSYIKARYEANPEKYLSENLGLKNPVVLIPVVKYNACIEIDGFRMHISSKSSGGKQIVYKPAMQLTVSYDTEKYIRNVVKLNSKPENYNITELDKVSADENLKLFDILTSKMTDTVLKVKFGDMGAKIISHRDAFEKLDIRKQCFVLAEILKIIHCNISEGNLRFIGGAKQSGSIKMSSVISGIKGVKSIYLVHQSVTGLFEKKIDLLHM

SEQ ID NO: 20134 - protein, 1351 aa, unidentified
  REGION 1..1351: note = Cas Enzyme sequence
MRVMNMKSDYYIGLDIGTNSVGWAVTDTEYNLCRANRKAMWGIRLFETAQTSEGRRTARSSRRRTDRNKQRIEWLQEFFSQEIYKIDPEFFIRMKESRYVYEDKRDSDGNIPDMPYSIFASEDYTDIEYHKDYPTIYHLRSELIHNSEKKFDIRLIYLALHHMMKHRGHFLFEGTDSENIDFETVFSAFQSAIYENLCSDDESEDSNDVVGIALNHENIKGAEEILRNRNIKRLDKEKELTRLFNVSSKQGKAVCGLIAGRKEDISIIFNDESLNDGDKLKISLSDSNYEESAAILSDLLMEKFYVIELAKSIYDWAVLADVKGGFSYISDAKKSTYEKHREDLKLLKKVIKENCPENYKNMFGTAKNNNYSMYVGHYTANGKKKYAEKSCKKDEFYKYVKKIIKDIDTPEAVKILNDIETENFMPKLKVNDNSVIPHQLHLAELNKILENAEKHYEFLRIADDSGKTVSEKIRDIFNYRIPYYIGPVNTAMNSKGFGWAVRKESGKIYPWNIEEKIDYEESAAAFIRRMTNKCTYLYGKDVLPKYSVLYSKFTVLNELNNLRINGDKPSVELKQEIYNNLFLHKKNVTQKTLRDYLISNAYASSDVQFTGIDGNFKSSMKSWIELNEILTGIDFDMETAESIILNISLFGAEKKMLKKRLKAIVPEITDKQCNRISELNYNGWGRLSKELLTDIEAADPETGEYCNIIDMMFNTNDNFMQLLSEKYDFINQIEAHNEGLKNYTMSYKTVDELYVSPSVKRAIWQTMLIVKEIVKIKGYEPKKIFVEMTRNPDSEKKRTVSRKNRLKELYEKCKEEESYLFTELNNVSDTSLKSDRLYLYYTQKGRCMYSGEPISLEDLYDKTLYDIDHIYPQSKVMDDSINNRVLVKRVLNEEKSDVYPINEKIRHSQAGFWAMLKNQGFISEEKFKRLTRNTPFDDNELAGFIARQIVETSQSTKAVAEVLKNVYASEIVYVKSGVVSKFRQKYDLIKVRDVNDYHHAKDAFLNIVVGNAYNVKFTHNPLNFVKTNERYTYNLEKLFEHDIKTKNALAWKGGADGTIGKVKKIMSKNNVLFTRYSYEKKGELFDSQLVGKGKGQVYIKDSDERLHDISKYGGYNKASGAYFMLVESIKGRRNIRTIEVVPIYLKDKIENDNTYAINYLKNQCGLTEPKIILHNIKIDSLLNVDGFYMHLSGRTGKRLLLKNANQLCLSYEEEKLIKRMSKFKKEQSENEAREIVEKDNITEEALINLYDRFVDKLKNSIYKVRLSKQTSTLESGRDTFVTLSAEDKSICILEILNLFKCNSVAANLKKINGPENGGILVLNNDISNIKIKLINQSVTGIFEQSVDLNEI

SEQ ID NO: 20135 - protein, 1330 aa, unidentified
  REGION 1..1330: note = Cas Enzyme sequence
MEQGRKRGDYYLGLDMGTDSVGWAVTDMDYRVPKFKGNAMWGVRLFDESNTAEERRLFRISRRRTQRRRERLDLLEMLFDGPVSTKDPAFFQRLRESDLYAEDKTTNTPFAVFADPDYTDTDYHRQFPTIYHLRNALLHEDGPYDVRLVFLAVHHIIKNRGHFLFDSLGEAQNFGSIYGALRDYLQEEYECAVECTDEKAFGAVLKDKSLSKSRKTAAAAELFGVTKKSAPQLYACLALACGATVKLKDLFNDDTLVEAEKPSIAFTGSYEDNEPEYQSLLEERFDLVVRIKALYDWAILDEILAGHQYLCEAKVATYEQHKTDLQRLKTYVKTYRSELYKKIFKLSSKDDNYVAYSGHIKENGHTGVLEKTCNQEAFCAYLKKTLGDNGDPAYADMFAAIENGTFMPKQVSKDNGVIPMQLQKKELEGILDRAQRYLLFLTEKDETGLTVREKIISLCEHRIPYYVGPLNQHSKKAWIVRKEGKIYPWNFDQVVDLDRSAEAFIENLTSKCTYLPQYDVIPKYSLLYTKFMVLNELNNLTLDGQRVEVKLKQEIYRDLFEKRGKVTGKGLKNYLQSRGIAYEVMGGFDENFKASLKPWQDLAPYDLTYDEKEEVVRLITIFGDDKKLLKKRLRDLFGDRLTETERGKLARLKYTGWSRLSREFLTQVACTDKNTGEVTNIISALWDTNLNLMQLLYSADYMPTFGEQVAACNQFDKDVSLRQMVEDLYVSPKVKRPIYQSLLIAREIEKIQKCPPKKIFIEVARGEEKKERKKSRKAQLLELYQSCKKEYADLYAQLEGTEEDRLRSDKLYLYYTQMGRCMYTGEHIDLNSLLSGNVYDIDHIFPRSKVKDDSLNNRVLVKKVDNAKKTDVYPLDRETQAKMHGFWQLLLSKNLISKVKYQRLIRTTPLTDEELGAFISRQLVETRQSTKAVAKIMEQLYDKEQTEIVYVKAALASDFRHTYDMLKCREVNDFHHAKDAYLNVVVGNVYNVRCTHNLRNFIRGLQENGSRSYSMNAMFKWDIPGAWVAEDGELQKTQTKSLKIVKQMMAKNNIRYTRYAFCQHGGLFDQMPVKKGKGQIPLKQDGPKSDMAKYGAYNKAMSKYFALVSYLDKKGKEVRQLVPIDAVTEKAYLADPDGYVSSYVGAPAKVLIPCIKYNACLSFDGFRMHISRKTGDRLGYKSGMQLVLSYAQEKYVRNITKYLSQNANRPLNKYDGISAEENIVLFNTLVDKMNHSILSLRFGDMGAKIADEQNVFFELSKEKQCIVLSEILKMLHANVLAGDLSQIKLAKNSGVLVSNSKLSEIKGVTSVKLIHQSITGLFEQQVELLP

SEQ ID NO: 20136 - protein, 1330 aa, unidentified
  REGION 1..1330: note = Cas Enzyme sequence
MEQGTKRGDYYLGLDMGTDSVGWAVTDMDYRIPKFKGNAMWGVRLFDESNTAEERRLFRISRRRTQRRRERLDLLEMLFDGPVSTKDPAFFQRLRESDLYAEDKTTNTPFAVFADPDYTDTDYHRQFPTIYHLRNALLHEDGPYDVRLVFLAVHHIIKNRGHFLFDSLGEAQNFGSIYGAFRDYLQEEYECAVECTDEKAFGAVLKDKSLSKSRKTAAAAELFGVTKKSAPQLYACLALACGATVKLKDLFNDDTLVEAEKPSIAFTGSYEDNEPEYQSLLEERFDLVVRIKALYDWAILDEILAGHQYLCEAKVATYEQHKTDLQRLKTYVKTYRSELYKKIFKLSSKDDNYVAYSGHIKENGHTGVLEKTCNQEAFCAYLKKTLGDNGDPAYADMFAAIENGTFMPKQVSKDNGVIPMQLQKKELEGILDRAQRYLPFLTEKDETGLTVREKIISLCEHRIPYYVGPLNKHSKKAWIVRKEGKIYPWNFDQVVDLDRSAEAFIENLTSKCTYLPQYDVIPKYSLLYTKFMVLNELNNLTLDGQRVEVKLKQETYRDLFEKRGKVTGKGLKNYLQSRGIAYEVMGGFDENFKASLKPWQDLAPYDLTYDEKEEVVRLITIFGDDKKLLKKRLRDLFGDRLTETERGKLARLKYTGWSRLSREFLTQVACTDKNTGEVTNIISALWDTNLNLMQLLYSADYMPTFGEQVAACNQFDQAVPLRQMVEDLYVSPKVKRPIYQSLLIAREIEKIQKCPPKKIFIEVARGEEKKERKKSRKAQLLELYQSCKKEYADLYAQLEGTEEDRLRSDKLYLYYTQMGRCMYTGEHIDLNSLLSGNVYDIDHIFPRSKVKDDSLNNRVLVKKVDNAKKTDVYPLDRETQAKMHGFWQLLLSKNLISKVKYQRLIRTTPLTDEELGAFISRQLVETRQSTKAVAQIMEQLYDKEQTEIVYVKAALASDFRHTYDMLKCREVNDFHHAKDAYLNVVVGNVYNVRCTHNLRNFIRGLQENGPRGYSMNAMFKWDIPGAWVAEGGELQKTQTKSLEVVKQMMAKNNIRYTRYAFCQHGGLFDQMPVKKGKGQIPLKQDGPKSDMAKYGAYNRAMSKYFALVSYSDKKGKEVRQLVPIDAVTEKAYLADPDGYVSSYVGAPAKVLIPCVKYNACLSFDGFRMHISQKSGNQLGYKPAMQLVVSYEQEEYVRNITKYLSQNKDRPLNKYDGISAEENVALFDALVDKMSNSILSLRFGDMGAKIANKREVFCALTPEEQCVVLAEVLKILHDNVMMGDLTLIGLAKNAGKLQTNVKLSEIKGVTSVKLIHQSITGLFEQQVELLP

SEQ ID NO: 20137 - protein, 1330 aa, unidentified
  REGION 1..1330: note = Cas Enzyme sequence
MEQGRKRGDYYLGLDMGTDSVGWAVTDMDYRVPKFKGNAMWGVRLFDESNTAEERRLFRISRRRTQRRRERLDLLEMLFDGPVSTKDPAFFQRLRESDLYAEDKTTNTPFAVFADPDYTDTDYHRQFPTIYHLRNALLHEDGPYDVRLVFLAVHHIIKNRGHFLFDSLGEAQNFGSIYGAFRDYLQEEYECAVECTDEKAFGAVLKDKSLSKSRKTAAAAELFGVTKKSAPQLYACLALACGATVKLKDLFNDDTLVEAEKPSIAFTGSYEDNEPEYQSLLEERFDLVVRIKALYDWAILDEILAGHQYLCEAKVATYEQHKTDLQRLKIYVKTYRSELYKKIFKLSSKNDNYVAYSGHIKENGHTGVLEKICNQEAFCAYLKKTLGDNGDPAYADMFAAIENGTFMPKQVSKDNGVIPMQLQKKELEGILNRAQRYLPFLTEKDETGLTVREKIISLCEHRIPYYVGPLNKHSKKAWIVRKEEKIYPWNFDQVVDLDRSAEAFIENLTSKCTYLPQYDVIPKYSLLYTKFMVLNELNNLTLDGQRVEVKLKQEIYRDLFEKRGKVTGKGLKNYLQSRGIAYEVMGGFDENFKASLKPWQDLAPYDLTYDEKEEVVRLITIFGDDKKLLKKRLRDLFGDRLTETERGKLARLKYTGWSRLSREFLTQVACTDKNTGEVTNIISALWDTNLNLMQLLYSADNMPTFGEQVASCNQFDKDVSLRQMVEDLYVSPKVKRPIYQSLLIAREIEKIQKCPPKKIFIEVARGEEKKERKKSRKAQLLELYQSCKKEYADLYAQLEGTEEDRLRSDKLYLYYTQMGRCMYTGEHIDLNSLLSGNVYDIDHIFPRSKVKDDSLNNRVLVKKVDNAKKTDVYPLDRETQAKMHGFWQLLLSKNLISKVKYQRLIRTTPLTDEELGAFISRQLVETRQSTKAVAKIMEQLYDKEQTEIVYVKAALASDFRHTYDMLKCREVNDFHHAKDAYLNVVVGNVYNVRCTHNLRNFIRGLQENGPRGYSMNAMFKWDIPGAWVAENGELQKTQTKSLEIVKQMMAKNNIRYTRYAFCQHGGLFDQMPVKKGKGQIPLKQDGPKSDMTKYGAYNKAMSKYFALISYLDKKGKEVRQLVPIDAVTEKVYLADPDEYVSNCVGVPAKVLIPCIKYNACLSFDGFRMHLSSKSGNQLGYKPAMQLVLSYEQEKYVRNITKYLSQNKDRPLNKYDGITPDKNIALFDTLVDKMSNSILSLRFGDMGAKIVDKREAFCVLTPEEQCVVLAEVLKILHANVMRGDLTNIKLAKTAGALVSNMKLSEIKGVTSIKLIHQSITGLFEQQVELLP

SEQ ID NO: 20138 - protein, 1330 aa, unidentified; identical to SEQ ID NO: 19846
  REGION 1..1330: note = Cas Enzyme sequence

SEQ ID NO: 20139 - protein, 1236 aa, unidentified
  REGION 1..1236: note = Cas Enzyme sequence
KESCLYLDDKSSNVPYAVFADSNYTDKEFHTDYPTIYHLRKELIKSSQPHDIRLVYLALHHIIKHRGHFLFDNMGSDFESESSFETLFDDLKLYLKEEYEIEFECNDSLRFSEILKDKTLKKTAKSSESYKLFGYSKRNNPYETTLIDLMCGRKVKFSDMFGDKSFDSEEVNGITFESGYDDNENTYRDLLQEKFELIEKAKAVYDWAILADILNGEKYISFAKVKTYEGHSSDLKMLKDFVKERCKSLYGEIFRITKDKLDNYTAYCGKYKENGKNGVIIYRPDVDPQDKFCKYLKKKFEKLDKTGYEEMFDKIENGTFMPKIVVKDNGIIPMQVNRSELKAILKNASTYLEFLNKKDENGISVSDKIVKIFEFRIPYYVGPLNNHSLKSWLVRSDEKIYPWNFDSVVDIEQSAENFINNLTSKCTYLPTKDVIPKNSILYSAFTVLNELNNLRLDGKKPDVSLKQAIFNDLFMTHKKVRRKDLLNYLKSEKGITPDITGIDGDFKSSMRSAIEMSQFNLTDSEKEDAIKAITVFGDDKKLLRKRLKRQLGSKLSDEDIMRISKLKYKDWGRLSKEFLTEVYNVDKNTGELQFNIIHALWQTNDNLMELLGSKYGFEQSRQNYLDGIQTGQSLEKMVENLYISPAVKRPVYQSLKIMHEINKIQGHAPKKIFVEMTRKDGVKGDKGRKESRKTKLVDLYKKCGEDSGELWESLEKTPDDEFKRDRLYFYYTQFGKCMYTGEPITLSELYNQNIYDVDHIFPRSKVKDDSLDNRVLVKKQVNAHKDNTYPLDSSIREKMKGFWHLLMDKGLISKKKYERLTRATELSDSELSDFIARQIVETSQSTKAVASLFKELYPDTEIVYVKASTVSEFRHEYDFLKCREVNDFHHAKDAYLNIVVGNVYNERCTHNKSIFIKGLQTKTYSLNKMFSFNTPNAWSIDDNKSIKIVRKTMNKNNIRFTRYALTRNGGLFKMNPLKKGSGQVSLKQNSPLSDISKYGGYDKPASSYFSFVKYEGKKGKEMRQLVAIDSYIKARYEANPEKYLSENLGLKNPVVLIPVVKYNACIEIDGFRMHISAKTGKQIIYKPAMQLTVSYDTEKYIRNVVKLNSKPENYNITERDKVSTDENIELFDILTYKMTDTVLKVKFGDMGVKIASHRDAFEKLDVRKQCFVLTEILKIIHCNAVLGNLTYIGEGSSSGRVGLNSVLSEVKGVKSIYLVHQSVTGLFEKKIDLLHM

SEQ ID NO: 20140 - protein, 1333 aa, unidentified
  REGION 1..1333: note = Cas Enzyme sequence
MGKEYYLGLDIGTDSVGWAVCDTNYKIPKFKGNAMWGIRLFEKSNSAEERRGFRSSRRRTQRKRERLKLLEMLFDEEISKIDPAFFIKLRESNLYLEDKSTKIPYCVFSDENYTDKDFHRDYPTIYHLRNELIKSNKPHDVRLVYLALHHIIKNRGHFLFDYSYKNDKSGDFMPIYNDLKNYFYDNYEIELDCSDVDEFANTLKDKSKGKTKKNAEIAELFGVSKKYDKVLYSALSLLSGSSVKLFDIFDDEALKDVEKKSVSFSSGFDDNANDFQSYLGERFELLEKLKAVYDWAVLADILDGKEYISEAKVAIYEKHKIDLRTLKKYIKIYMPEKKSEIFNISSKDNNYVAYSKHIKTSSGTGVLNSTCTQEEFCAYLKKTLGICKDASYEEMFKEIENSTFMPKQVTKDNGVVPMQVNEKELVAILDNAKEYLPFLLNEDNDGKTVYDKIKALFEYRIPYYIGPLNTHSTKHWLVRSNEKIYPWNIEDVVDFDKSAEKFIEKLTSKCTYLPQYDVIPKHSLLYNKFCVLNELNNLKIDGEKISVQLKQDIYNDLFKKYYKVTNKKLCYYLKSRNIAFDEISGIDNDFKSSLKSYKDLVAYNLTDEQKEEIVKAITIFGDDKKLLKKRLKNEFGGCLSDDEIKKICKLKYTGWSKLSREFLTDVTAVYKETGELINIICALWETNYNLTSLLYSDEFCCDDKENKTFNDKINELNSFGNDKTLNQIVEELYVSPLVKRPIYQSLLITKELEKIMKCPPKKIFVEVARGAEEKKRTVSRRNKLLDLYKSCKNDYPLLFDELQNNTTDDELKSDKLYLYFTQFGKCMYTGENIDLDDLFNKNLYDIDHIYPQSKIKDDSLDNRVLVKKTTNAKKDNEYPLSSQIREKMTLHWKALLDKGLINKKKYERLVRNYPLSDEELSQFISRQLVETRQSTKAVANILEQLYPRPDTEIVYVKAALASEFRHQYDMLKCREVNDLHHAKDAYLNIVVGNAYNVKFTHNKANFIKGLQNNDKAYTVKLDSMLKHNIDGAWIADNNESLNIVKSTMNKNNIRYTRYAFEKKGGLFKVTILKKGNGQASIKKNDKRNSIEKYGGYNQVSSTYFSCVEHGKDNKRMISMFSVNLYDKNKYEENPIAYLIENYGLINPIIKVKKVKIQSCISFDNMLCHLGGKDSGGSQISYRPGVQLVLGYDNERYIRNVIRCAGGDLHLQTSKNEEDIVTTEKNIELFNLLIEKMKNNIYGVLYSNLGDKLYCSKEKFEKLDIVEQCNVIKNVLTILKNNASKGDLKSIGIKANGAIRLNNNISEIKNVKSIKLINQSVTGLFEQEIELLNL

SEQ ID NO: 20141 - protein, 1333 aa, unidentified
  REGION 1..1333: note = Cas Enzyme sequence
MGKEYYLGLDIGTDSVGWAVCDTNYKIPKFKGNAMWGIRLFEKSNSAEERRGFRSSRRRTQRKRERLKLLEMLFDEEISKIDPAFFIKLRESNLYLEDKSTKIPYCVFSDENYTDKDFHRDYPTIYHLRNELIKSNKPHDVRLVYLALHHIIKNRGHFLFDYSYKNDKSGDFMPIYNDLKNYFYDNYEIELDCSDVDEFANTLKDKSKGKTKKNAEIAELFGVSKKYDKVLYSALSLLSGSSVKLFDIFDDEALKDVEKKSVSFSSGFDDNANDFQSYLGERFELLEKLKAVYDWAVLADNLDGKEYISEAKVAIYEKHKIDLRTLKKYIKIYMPEKKSEIFNISSKDNNYVAYSKHIKTSSGTGVLNSTCTQEEFCAYLKKTLGICKDASYEEMFKEIENSTFMPKQVTKDNGVVPMQVNEKELVAILDNAKEYLPFLLNEDNDGKTVYDKIKALFEYRIPYYIGPLNTHSTKHWLVRSNEKIYPWNIEDVVDFDKSAEKFIEKLTSKCTYLTQYDVIPKHSLLYNKFCVLNELNNLKIDGEKISVQLKQDIYNDLFKKYYKVTNKKLCYYLKSRNIAFDEISGIDNDFKSSLKSYKDLVAYNLTDEQKEEIVKAITIFGDDKKLLKKRLKNEFGGCLSDDEIKKICKLKYTGWSKLSREFLTDVTAVYKETGELINIICALWETNYNLTSLLYSDEFCCDDKENKTFNDKINELNSFGNDKTLNQIVEELYVSPLVKRPIYQSLLITKELEKIMKCPPKKIFVEVARGAEEKKRTVSRRNKLLDLYKSCKNDYPLLFDELQNNTTDDELKSDKLYLYFTQFGKCMYTGENIDLDDLFNKNLYDIDHIYPQSKIKDDSLDNRVLVKKTTNAKKDNEYPLSSQIREKMTLHWKALLDKGLINKKKYERLVRNYPLSDEELSQFISRQLVETRQSTKAVANILEQLYPRPDTEIVYVKAALASEFRHQYDMLKCREVNDLHHAKDAYLNIVVGNAYNVKFTHNKANFIKGLQNNDKAYTVKLDSMLKHNIDGAWIADNNESLNIVKSTMNKNNIRYTRYAFEKKGGLFKVTILKKGNGQASIKKNDKRNSIEKYGGYNQVSSTYFSCVEHGKDNKRMISMFSVNLYDKNKYEENPIAYLIENYGLINPIIKVKKVKIQSCISFDNMLCHLGGKDSGGSQISYRPGVQLVLGYDNERYIRNVIRCAGGDLHLQTSKNEEDIVTTEKNIELFNLLIEKMKNNIYGVLYSNLGDKLYCSKEKFEKLDIVEQCNVIKNVLTILKNNASKGDLKSIGIKANGAIRLNNNISEIKNVKSIKLINQSVTGLFEQEIELLNL

SEQ ID NO: 20142 - protein, 1333 aa, unidentified
  REGION 1..1333: note = Cas Enzyme sequence
MGKEYYLGLDIGTDSVGWAVCDTNYKIPKFKGNAMWGIRLFEKSNSAEERRGFRSSRRRTQRKRERLKLLEMLFDEEISKIDPAFFIKLRESNLYLEDKSTKIPYCVFSDENYTDKDFHRDYPTIYHLRNELIKNNKPHDVRLVYLALHHIIKNRGHFLFDYSYKNDKSGDFMPIYNDLKNYFYDNYEIELDCSDVDEFANTLKDKSKGKTKKNAEIAELFGVSKKDDKVLYSALSLLSGSSVKLFDIFDDEALKDVEKKSVSFSSGFDDNANDFQSYLGERFELLEKLKAVYDWAVLADILDGKEYISEAKVAIYEKHKRDLRTLKKYIKIYMPEKKAEIFNISSKDNNYVAYSKHIKTSSGTGVLNSTCTQEEFCAYLKKTLGICKDASYEEMFKEIENSTFMPKQVTKDNGVVPMQVNEKELVAILDNAKEYLPFLLNEDNDGKTVYDKIKALFEYRIPYYIGPLNTHSTKHWLVRSNEKIYPWNIEDVVDFDKSAEKFIEKLTSKCTYLPQYDVIPKHSLLYNKFCVLNELNNLKIDGEKISVQLKQDIYNDLFKKYYKVTNKKVCDYLKSRNIAFDEISGIDNDFKSSLKSYKDLVAYNLTDEQKEEIVKAITIFGDDKKLLKKRLKNEFGGCLSDDEIKKICKLKYTGWSKLSREFLTDVTAVYKETGELINIICALWETNYNLTSLLYSNEFCCDDKENKTFNDKINELNSFGSDKTLNQIVEELYVSPLVKRPIYQSLLITKELEKIMKCPPKKIFVEVARGAEEKKRTVSRRNKLLDLYKSCKNDYPLLFDELQNNTTDDELKSDKLYLYFTQFGKCMYTGENIDLGDLFNKNLYDIDHIYPQSKIKDDSLDNRVLVKKTTNAKKDNEYPLSSQIREKMTPHWKALLDKGLINKKKYERLVRNYPLSDEELSQFISRQLVETRQSTKAVANILEQLYPRPDTEIVYVKAALASEFRHQYDMLKCREVNDLHHAKDAYLNIVVGNAYNVKFTHNKANFIKGLQNNDKAYTVKLDSMLKHNIDGAWIADNNESLNIVKSTMNKNNIRYTRYAFEKKGGLFKVTILKKGNGQASIKKNDKRNSIEKYGGYNQVSSTYFSCVEHGKDNKRMISMFSVNLYDKNKYEENPIAYLIENYGLINPIIKVKKVKIQSCISFDNMLCHLGGKDSGGSQISYRPGVQLVLGYDNERYIGNVIRCAGGDLHLQTSKNEKDIVTTEKNIELFNLLIEKMKNNIYGVLYSNLGDKLYCSKEKFEKLDIVEQCNVIKNVLTILKNNASKGDLKSIGIKANGAIRLNNNISEIKNVKSIKLINQSVTGLFEKEIELLNL

SEQ ID NO: 20143 - protein, 1235 aa, unidentified
  REGION 1..1235: note = Cas Enzyme sequence
MGKEYYLGLDIGTDSVGWAVCDTDYKIPKFKGNAMWGIRLFEKSNSAEERRGFRSSRRRTQRKRERLKLLEMLFDEEISKIDPAFFIKLRESNLYLEDKSTKIPYCVFSDENYTDKDFHRDYPTIYHLRNELIKNNKPHDVRLVYLALHHIIKNRGHFLFDYSYKNDKSGDFMPIYNDLKNYFYDNYEIELDCSDVDEFSNTLKDKSKGKTKKNTEIAELFGVSKKDDKVLYSALSLLSGSSVKLFDIFDDEALKDVEKKSVSFSSGFDDNANDFQSYLGERFELLEKLKAVYDWAVLADILDGKEYISEAKVAIYEKHKRDLRTLKKYIKIYMPEKKAEIFNISSKDNNYVAYSKHIKTSSGTGVLNSTCTQEEFCAYLKKTLGICKNASYEEMFKEIENSTFMPKQVTKDNGVVPMQVNEKELVAILDNAKEYLPFLLNKDNDGKTVYDKIKALFEYRIPYYIGPLNTHSTKSWLVRSNEKIYPWNIEDVVDFDKSAEKFIEKLTSKCTYLPQYDVIPKHSLLYNKFCVLNELNNLKIDGEKISVQLKQNIYNDLFKKYYKVTNKKLCDYLKSRNITFDEISGIDNDFKSSLKSYKDLVAYNLTDEQKEEIVKAITIFGDDKKLLKKRLKNEFGDCLSDDEIKKICKLKYTGWSKLSREFLTDVTAVYKETGELINIICALWETNYNLTSLLYSDEFCCDDKENKTFNDKINELNSFGYDKTLNQIVEELYVSPLVKRPIYQSLLITKELEKIMKCPPKKIFVEVARGAEEKKRTVSRRNKLLDLYKSCKNDYPLLFDELQNNTTDDELKSDKLYLYFTQFGKCMYTGENIELGDLFNKNLYDIDHIYPQSKIKDDSLDNRVLVKKTTNAKKDNEYPLSSQIREKMTPHWKALLDKGLINKKKYERLVRNYPLRDEELSQFISRQLVETRQSTKAVANILEQLYPRPDTEIVYVKAALASEFRHQYDLLKCREVNDLHHAKDAYLNIVVGNAYNVKFTHNKANFIKGLQNNDKAYTVKLDSMLKHNIDGAWIADNNESLNIVKSTMNKNNIRYTRYAFTKHGKFFDATIQKKNGIGSVALKENSPRNNISKYGGYTQIGVSYFGIAKIAKKKCDDIVIFPVYIYNEKEYTKAPLDYAKMVTNKNVSEILIKKLKIDSLLSIDSYKVFVSGNGDSARFSYKPYSQLMIEPYYEKYLKRAFKYLDNCKKNKRELPISNYDGISEEMNMEIYKCFC

SEQ ID NO: 20144 - protein, 1333 aa, unidentified
  REGION 1..1333: note = Cas Enzyme sequence
MGKEYYLGLDIGTDSVGWAVCDTDYKIPKFKGNAMWGIRLFEKSNSAEERRGFRSSRRRTQRKRERLKLLEMLFDEEISKIDPAFFIKLRESNLYLEDKSTKIPYCVFSDENYTDKDFHRDYPTIYHLRNELIKNNKPHDVRLVYLALHHIIKNRGHFLFDYSYKNDKSGDFMPIYNGLKNYFYDNYEIELDCSDVDEFANTLKDKSKGKTKKNAEIAELFGVSKKDDKVLYSALSLLSGSSVKLFDIFDDEALKDVEKKSVSFSSGFDDNANDFQSYLGERFELLEKLKAVYDWAVLADILDGKEYISEAKVAIYEKHKRDLRTLKKYIKIYMPEKKAEIFNISSKDNNYVAYSKHIKTSSGTGVLNSTCTQEEFCAYLKKTLGICKDASYEEMFKEIENSTFMPKQVTKDNGVVPMQVNEKELVAILDNAKEYLPFLLNKDNDGKTVYDKIKALFEYRIPYYIGPLNTHSTKHWLVRNNEKIYPWNIKEVVDFDKSAEKFIEKLTSKCTYLPQYDVIPKHSLLYNKFCVLNELNNLKIDGEKISVQLKQDIYNDLFKKYYKVTNKKLCDYLESRNIAFDEISGIDNDFKSSLKSYKDLVAYNLTDEQKEEIVKAITIFGDDKKLLKKRLKNEFGGCLSDDEIKKICKLKYTGWSKLSREFLTDVTAVYKETGELINIICALWETNYNLTSLLYSDEFCCDDKENKTFNDKINELNSFENDKTLNQIVEELYVSPLVKRPIYQSLLITKELEKIMKCPPKKIFVEVARGAEEKKRTVSRRNKLLDLYKSCKNDYPLLFDELQNNTTDDELKSDKLYLYFTQFGKCMYTGENIDLGDLFNKNLYDIDHIYPQSKIKDDSLDNRVLVKKTTNAKKDNEYPLSSQIREKMTPHWKALLDKGLIGKKKYERLVRNYPLSDEELSQFISRQLVETRQSTKAVANILEQLYPRPDTEIVYVKAALASEFRHQYDMLKCREVNDLHHAKDAYLNIVVGNAYNVKFTHNKANFIKGLQNNDKAYTVKLDSMLKHNIDGAWIADNNESLNIVKSTMNKNNIRYTRYAFEQKGGLFDQNILKKGKGQVPIKANDKRNSIEKYGGYNQVSSTYFSCVEHGKDNKRMISMFSVNLYDKNKYEENPIAYLIENYGLINPIIKVKKVKIQSCISFDNMLCHLGGKDSGGSQISYRPGVQLVLGYDNERYIRNVIRCAGGDLHLQTSKNEKDIVTAEKNIELFNLLIEKMKNNIYGVLYSNLGDKLYCSKENFEKLDIVEQCNVIKNVLTILKNNATKGDLKSIGIKANGAIRLNNNISEIKNVKSIKLINQSVTGLFEKEFELLNL

SEQ ID NO: 20145 - protein, 1333 aa, unidentified
  REGION 1..1333: note = Cas Enzyme sequence
MGKEYYLGLDIGTDSVGWAVCDTNYKIPKFKGNAMWGIRLFEKSNSAEERRGFRSSRRRTQRKRERLKLLEMLFDEEISKIDPAFFIKLRESNLYLEDKSTKIPYCVFSDENYTDKDFHRDYPTIYHLRNELIKNNKPHDVRLVYLALHHIIKNRGHFLFDYSYKNDKSGDFMPIYNDLKNYFYDNYEIELDCSDVDEFANTLKDKSKGKTKKNAEIAELFGVSKKDDKVLYSALSLLSGSSVKLFDIFDDEALKDVEKKSVSFSSGFDDNANDFQSYLGERFELLEKLKAVYDWAVLADILDGKEYISEAKVAIYEKHKRDLRTLKKYIKIYMPEKKAEIFNISSKDNNYVAYSKHIKTSSGTGVLNSTCTQEEFCAYLKKTLGICKDASYEEMFKEIENSTFMPKQVTKDNGVVPMQVNEKELVAILDNAKEYLPFLLNEDNDGKTVYDKIKALFEYRIPYYIGPLNTHSTKHWLVRSNEKIYPWNIEDVVDFDKSAEKFIEKLTSKCTYLPQYDVIPKHSLLYNKFCVLNELNNLKIDGEKISVQLKQDIYNDLFKKYYKVTNKKVCDYLKSRNIAFDEISGIDNDFKSSLKSYKDLVAYNLTDEQKEEIVKAITIFGDDKKLLKKRLKNEFGGCLSDDEIKKICKLKYTGWSKLSREFLTDVTAVYKETGELINIICALWETNYNLTSLLYSNEFCCDDKENKTFNDKINELNSFGSDKTLNQIVEELYVSPLVKRPIYQSLLITKELEKIMKCPPKKIFVEVARGAEEKKRTVSRRNKLLDLYKSCKNDYPLLFDELQNNTTDDELKSDKLYLYFTQFGKCMYTGENIDLGDLFNKNLYDIDHIYPQSKIKDDSLDNRVLVKKTTNAKKDNEYPLSSQIREKMTPHWKALLDKGLINKKKYERLVRNYPLSDEELSQFISRQLVETRQSTKAVANILEQLYPRPDTEIVYVKAALASEFRHQYDMLKCREVNDLHHAKDAYLNIVVGNAYNVKFTHNKANFIKGLQNNDKAYTVKLDSMLKHNIDGAWIADNNESLNIVKSTMNKNNIRYTRYAFEKKGGLFKVTILKKGNGQASIKKNDKRNSIEKYGGYNQVSSTYFSCVEHGKDNKRMISMFSVNLYDKNKYEENPIAYLIENYGLINPIIKVKKVKIQSCISFDNMLCHLGGKDSGGSQISYRPGVQLVLGYDNERYIRNVIRCAGGDLHLQTSKNEKDIVTTEKNIELFNLLIEKMKNNIYGVLYSNLGDKLYCSKEKFEKLDIVEQCNVIKNVLTILKNNASKGDLKSIGIKANGAIRLNNNISEIKNVKSIKLINQSVTGLFEKEIELLNL

SEQ ID NO: 20146 - protein, 1332 aa, unidentified
  REGION 1..1332: note = Cas Enzyme sequence
MGTEYYLGLDIGTDSVGWAVCDTDYKIPKFKGNAMWGIRLFEKSNSAEERRGFRSSRRRTQRKRERLKLLEMLFDEEISKIDPAFFIKLRESNLYLEDKSTKIPYCVFSDENYNDKDFHRDYPTIYHLRNELIKNNKPHDVRLVYLALHHIIKNRGHFLFDYSYKNDKSGDFMPIYNDLKNYFYDNYEIELDCSDVDEFANTLKDKSKGKTKKNAKIAELFGVSKKDDKVLYSALSLLSGSSVKLFDIFDDEALKDVEKKSVSFSSGFDDNANDFQSYLGERFELLEKLKAVYDWAVLADILDGNEYISEAKVAIYEKHKRDLRTLKKYIKIYMPEKKAEIFNISSKDNNYVAYSKHIKTSSGTGVLNSTCTQEEFCAYLKKTLGICKDASYEEMFKEIENSTFMPKQVTKDNGVVPMQVNEKELVAILDNAKEYLPFLLNKDNDGKTVYDKIKALFEYRIPYYIGPLNTHSAKHWLVRSNEKIYPWNIEDVVDFDKSAEKFIEKLTSKCTYLPQYDVIPKHSLLYNKFCVLNELNNLKINGEKISVQLKQDIYNDLFKKYYKVTNKKLCDYLESRNIAFEEISGIDNDFKSSLKSYKDLVAYNLTDEQKEEIVKAITIFGDDKKLLKKRLKNEFGDCLSDDEIKKICKLKYTGWSKLSREFLTDVTAVYKETGELINIICALWETNYNLTSLLYSDEFCCDDKENKTFNDKINELNSFGNDKTLNQIVEELYVSPLVKRPIYQSLLITKELEKIMKCPPKKIFVEVARGAEEKKRTVSRRNKLLDLYKSCKNDYPLLFDELQNNTTDDELKSDKLYLYFTQFGKCMYTGENIDLGDLFNKNLYDIDHIYPQSKIKDDSLDNRVLVKKTTNAKKDNEYPLSSQIREKMTPHWKALLDKGLINKKKYERLVRNYPLSDEELSQFISRQLVETRQSTKAVANILEQLYPRPDTEIVYVKAALASEFRHQYDMLKCREVNDLHHAKDAYLNIVVGNAYNVKFTHNKANFIKGLQNNDKAYTVRLDSMLKHNIDGAWIADNNESLNIVKSTMNKNNIRYTRYAFKQKGGLFDQNILKKGKGQVPIKVNDKRNSIEKYGGYNRPSSSYFSLVKYFDKKGKKIIQLVPIDSFEEHIYQNTPERYISEKIGCDCEILIPCIKYNSCISIDGFRMHLSSKSNGGATIVCKPSIQLVVGYENEKYIKGIVKSIETGFNADILKRYNINNDNNLILYDLLSYKIKNTIYKSKFEKVFICMSSGREKFILLDLDEQCYIINEILKILHCNVVTGDLKLLGGSGQSGTVTINSALSNIKNVKSIKLINQSVTGLFEQEIELLNL

SEQ ID NO: 20147 - protein, 1333 aa, unidentified
  REGION 1..1333: note = Cas Enzyme sequence
MGKEYYLGLDIGTDSVGWAVCDTNYKIPKFKGNAMWGIRLFEKSNSAEERRGFRSSRRRTQRKRERLKLLEMLFDEEISKIDPAFFIKLRESNLYLEDKSTKIPYCVFSDENYTDKDFHRDYPTIYHLRNELIKSNKPHDVRLVYLALHHIIKNRGHFLFDYSYKNDKSGDFMPIYNDLKNYFYDNYEIELDCSDVDEFANTLKDKSKGKTKKNAEIAELFGVGKKDDKVLYSALSLLSGSSVKLFDIFDDEALKDVEKKSVSFSSGFDDNANDFQSYLGERFELLEKLKAVYDWAVLADILDGKEYISEAKVAIYEKHKRDLRTLKKYIKIYMPEKKSEIFNISSKDNNYVAYSKHIKTSSGTGVLNSTCTQEEFCAYLKKTLGICKDASYEEMFKEIENSTFMPKQVTKDNGVVPMQVNEKELVAILDNAKEYLPFLLNEDNDGKTVYDKIKALFEYRIPYYIGPLNTHSTKHWLVRSNEKIYPWNIEDVVDFDKSAEKFIENLTSKCTYLPQYDVIPKHSLLYNKFCVLNELNNLKINGEKISVQLKQDIYNDLFKKYYKVTNKKLCDYLKSRNIDFDEISGIDNDFKSSLKSYKDLVAYNLTDEQKEKIVMAITIFGDDKKLLKKRLKNEFGGCLSDDEIKKICKLKYTGWSKLSREFLTDVTAVYKETGELINIICALWETNYNLTSLLYSNEFCCDDKENKTFNDKINELNSFGSDKTLNQIVEELYVSPLVKRPIYQSLLITKELEKIMKCPPKKIFVEVARGAEEKKRTVSRRNKLLDLYKSCKNDYPLLFDELQNNTTDDELKSDKLYLYFTQFGKCMYTGENIDLGDLFNKNLYDIDHIYPQSKIKDDSLDNRVLVKKTTNAKKDNEYPLSSQIREKMTPHWKALLDKGLIDKKKYERLVRNYPLSDEELSQFISRQLVETRQSTKAVANILEQLYPRPDTEIVYVKAALTSEFRHQYDMLKCREVNDLHHAKDAYLNIVVGNAYNVKFTHNKANFIKGLQNNDKAYTVKLDSMLKHNIDGAWIADNNESLNIVKSTMNKNNIRYTRYAFEKKGGLFKVTILKKGNGQASIKKNDKRNSIEKYGGYNQVSSTYFSCVEHGKDNKRIISMFFVNLYDKNKYEENPIEYLIENYGLINPIIKVKKIKIQSCISFDNMLCHLGGKDSGGSQISYRPGVQLVLGYDNERYIRNVIRCAGGDLHLQTSKNEEDIVTTEKNIELFNLLIEKMKNNIYGVLYSNLGDKLYCSKEKFEKLDIVEQCNVIKNVLTILKNNASKGDLKSIGIKANGAIRLNNNISEIKNVKSIKLINQSVTGLFEQEIELLNL

SEQ ID NO: 20148 - protein, 1333 aa, unidentified
  REGION 1..1333: note = Cas Enzyme sequence
MGKEYYLGLDIGTDSVGWAVCDTNYKIPKFKGNAMWGIRLFEKSNSAEERRGFRSSRRRTQRKRERLKLLEMLFDEEISKIDPAFFIKLRESNLYLEDKSTKIPYCVFSDENYTDKDFHRDYPTIYHLRNELIKNNKPHDVRLVYLALHHIIKNRGHFLFDYSYKNDKSGDFMPIYNDLKNYFYDNYEIELDCSDVDEFANILKDKSKGKTKKNAEIAELFGVSKKDDKVLYSALSLLSGSSVKLFDIFDDEALKDVEKKSVSFSSGFDDNANDFQSYLGERFELLEKLKAVYDWAVLADILDGKEYISEAKVAIYEKHKRDLRTLKKYIKIYMPEKKAEIFNISSKDNNYVAYSKHIKTSSGTGVLNSTCTQEEFCTYLKKTLGICKDASYEEMFKEIENSTFMPKQVTKDNGVVPMQVNEKELVAILDNAKEYLPFLLNEDNDGKTVYDKIKALFEYRIPYYIGPLNTHSTKHWLVRSNEKIYPWNIEDVVDFDKSAEKFIEKLTSKCTYLPQYDVIPKHSLLYNKFCVLNELNNLKIDGEKISVQLKQDIYNDLFKKYYKVTNKKLCDYLKSRNIAFDEISGIDNDFKSSLKSYKDLVAYNLTDEQKEEIVKAITIFGDDKKLLKKRLKNEFGDCLSDDEIKKICKLKYTGWSKLSREFLTDVTAVYKETGELINIICALWETNYNLASLLYSDEFCCDDKENKTFNDKINELNSFGNDKTLNQIVEELYVSPLVKRPIYQSLLITKELEKIMKCPPKKIFVEVARGAEEKKRTVSRRNKLLDLYKSCKNDYPLLFDELQNNTTDDELKSDKLYLYFTQFGKCMYTGENIDLGDLFNKNLYDIDHIYPQSKIKDDSLDNRVLVKKTTNAKKDNEYPLSSQIREKMTPHWKALLDKGLINKKKYERLVRNYPLSDEELSQFISRQLVETRQSTKAVANILEQLYPRPDTEIVYVKAALASEFRHQYDMLKCREVNDLHHAKDAYLNIVVGNAYNVKFTHNKVNFIKGLQNNDKAYTVKLDSMLKHNIDGAWIADNNESLNIVKSTMNKNNIRYTRYAFEKKGGLFKVTILKKGNGQASIKKNDKRNSIEKYGGYNQVSSTYFSCVEHGKDNKRMISMFSVNLYDKNKYEENPIAYLIENYGLINPIIKVKKVKIQSCISFDNMLCHLGGKDSGGSQISYRPGVQLVLGYDNERYIRNVIRCAGGDLHLQTSKNEEDIVTAEKNIELFNLLIEKMKNNIYGVLYSNLGDKLYCSKEKFEKLDIVEQCNVIKNVLTILKNNASKGDLKSIGIKANGAIRLNNNISEIKNVKSIKLINQSVTGLFEKEFELLNL

SEQ ID NO: 20149 - protein, 1333 aa, unidentified
  REGION 1..1333: note = Cas Enzyme sequence
MGKEYYLGLDIGTDSVGWAVCDTNYKIPKFKGNAMWGIRLFEKSNSAEERRGFRSSRRRTQRKRERLKLLEMLFDEEISKIDPAFFIKLRESNLYLEDKSTKIPYCVFSDENYTDKDFHRDYPTIYHLRNELIKSNKPHDVRLVYLALHHIIKNRGHFLFDYSYKNDKSGDFMPIYNDLKNYFYDNYEIELDCSDVDEFANTLKDKSKGKTKKNAEIAELFGVSKKYDKVLYSALSLLSGSSVKLFDIFDDEALKDVEKKSVSFSSGFDDNANDFQSYLGERFELLEKLKAVYDWAVLADILDGKEYISEAKVAIYEKHKIDLRTLKKYIKIYMPEKKSEIFNISSKDNNYVAYSKHIKTSSGTGVLNSTCTQEEFCAYLKKTLGICKDASYEEIFKEIENSTFMPKQVTKDNGVVPMQVNEKELVAILDNAKEYLPFLLNEDNDGKTVYDKIKALFEYRIPYYIGPLNTHSTKHWLIRSNEKIYPWNIEDVVDFDKSAEKFIEKLTSKCTYLPQYDVIPKHSLLYNKFCVLNELNNLKIDGEKISVQLKQDIYNDLFKKYYKVTNKKLCYYLKSRNIAFDEISGIDNDFKSSLKSYKDLVAYNLTDEQKEEIVKAITIFGDDKKLLKKRLKNEFGGCLSDDEIKKICKLKYTGWSKLSREFLTDVTAVYKETGELINIICALWETNYNLTSLLYSDEFCCDDKENKTFNDKINELNSFGNDKTLNQIVEELYVSPLVKRPIYQSLLITKELEKIMKCPPKKIFVEVARGAEEKKRTVSRRNKLLDLYKSCKNDYPLLFDELQNNTTDDELKSDKLYLYFTQFGKCMYTGENIDLDDLFNKNLYDIDHIYPQSKIKDDSLDNRVLVKKTTNAKKDNEYPLSSQIREKMTLHWKALLDKGLINKKKYERLVRNYPLSDEELSQFISRQLVETRQSTKAVANILEQLYPRPDTEIVYVKAALASEFRHQYDMLKCREVNDLHHAKDAYLNIVVGNAYNVKFTHNKANFIKGLQNNDKAYTVKLDSMLKHNIDGAWIADNNESLNIVKSTMNKNNIRYTRYAFEKKGGLFKVTILKKGNGQASIKKNDKRNSIEKYGGYNQVSSTYFSCVEHGKDNKRMISMFSVNLYDKNKYEENPIAYLIENYGLINPIIKVKKVKIQSCISFDNMLCHLGGKDSGGSQISYRPGVQLVLGYDNERYIRNVIRCAGGDLHLQTSKNEEDIVTTEKNIELFNLLIEKMKNNIYGVLYSNLGDKLYCSKEKFEKLDIVEQCNVIKNVLTILKNNASKGDLKSIGIKANGAIRLNNNISEIKNVKSIKLINQSVTGLFEQEIELLNL

SEQ ID NO: 20150 - protein, 1333 aa, unidentified
  REGION 1..1333: note = Cas Enzyme sequence
MGKEYYLGLDIGTDSVGWAVCDTNYKIPKFKGNAMWGIRLFEKSNSAEERRGFRSSRRRTQRKRERLKLLEMLFDEEISKIDPAFFIKLRESNLYLEDKSTKIPYCVFSDENYTDKDFHRDYPTIYHLRNELIKSNKPHDVRLVYLALHHIIKNRGHFLFDYSYKNDKSGDFMPIYNDLKNYFYDNYEIELDCSDVDEFANTLKDKSKGKTKKNAEIAELFGVSKKYDKVLYSALSLLSGSSVKLFDIFDDEALKDVEKKSVSFSSGFDDNANDFQSYLGERFELLEKLKAVYDWAVLADILDGKEYISEAKVAIYEKHKIDLRTLKKYIKIYMPEKKSEIFNISSKDNNYVAYSKHIKTSSGTGVLNSTCTQEEFCAYLKKTLGICKDASYEEMFKEIENSTFMPKQVTKDNGVVPMQVNEKELVAILDNAKEYLPFLLNEDNDGKTVYDKIKALFEYRIPYYIGPLNTHSTKSWLVRSNEKIYPWNIEDVVDFDESAEKFIENLTSKCTYLPQYDVIPKHSLLYNKFCVLNELNNLKIDGEKISVQLKQDIYNDLFKKYYKVTNKKLCYYLKSRNIAFDEISGIDNDFKSSLKSYKDLVAYNLTDEQKEEIVKAITIFGDDKKLLKKRLKNEFGGCLSDDEIKKICKLKYTGWSKLSREFLTDVTAVYKETGELINIICALWETNYNLTSLLYSDEFCCDDKENKTFNDKINELNSFGKDKTLNQIVEGLYVSPLVKRPIYQSLLITKELEKIMKCSPKKIFVEVARGAEEKKRTASRRNKLLDLYKSCKNDYPLLFDELQNNTTDDELKSDKLYLYFTQFGKCMYTGENIDLGDLFNKNLYDIDHIYPQSKIKDDSLDNRVLVKKTTNAKKDNEYPLSSQIREKMTPHWKALLDKGLINKKKYERLVRNYPLSDEELSQFISRQLVETRQSTKAVANILEQLYPRPDTEIVYVKAALASEFRHQYDMLKCREVNDLHHAKDAYLNIVVGNAYNVKFTHNKANFIKGLQNNDKAYTVKLDSMLKHNIDGAWIADNNESLNIVKSTMNKNNIRYTRYAFEKKGGLFKVTILKKGNGQASIKKNDKRNSIEKYGGYNQVSSTYFSCVEHGKDNKRMISMFSVNLYDKNKYEENPIEYLIENYGLINPIIKVKKIKIQSCISFDNMLCHLGGKDSGGSQISYRPGVQLVLGYDNERYIRNVIRCAGGDLHLQTSKNEEDIVTTEKNIELFNLLIEKMKNNIYGVLYSNLGDKLYCSKEKFEKLDIVEQCNVIKNVLTILKNNASKGDLKSIGIKANGAIRLNNNISKIKNVKSIKLINQSVTGLFEQEIELLNL

SEQ ID NO: 20151 - protein, 1332 aa, unidentified
  REGION 1..1332: note = Cas Enzyme sequence
MGKEYYLGLDIGTDSVGWAVCDTNYKIPKFKGNAMWGIRLFEKSNSAEERRGFRSSRRRTQRKRERLKLLEMLFDEEISKIDPAFFIKLRESNLYLEDKSTKIPYCVFSDENYTDKDFHRDYPTIYHLRNELIKNNKPHDVRLVYLALHHIIKNRGHFLFDYSYKNDKSGDFMPIYNDLKNYFYDNYEIELDCSDVDEFANTLKDKSKGKTKKNAEIAELFGVSKKDDKVLYSALSLLSGSSVKLFDIFDDEALKDVEKKSVSFSSGFDDSANDFQSYLGERFELLEKLKAVYDWAVLADILDGKEYISEAKVAIYEKHKRDLKTLKKYIKIYMPEKKAEIFNISSKDNNYVAYSKHIKTSSGTGVLISTCTQEEFCAYLKKTLGICKDASYEEMFKEIENSTFMPKQVTKDNGVVPMQVNEKELVAILDNAKEYLPFLLNEDNDGKTVYDKIKALFEYRIPYYIGPLNTHSTKHWLIRSNEKIYPWNIEDVVDFDKSAEKFIEKLTSKCTYLPQYDVIPKHSLLYNKFCVLNELNNLKIDGEKISVQLKQDIYNDLFKKYYKVTNKKLCDYLKSRNIAFDEISGIDNDFKSSLKSYKDLVAYNLTDEQKEEIVKAITIFGDDKKLLKKRLKNEFGGCLSDDEIKKICKLKYTGWSKLSREFLTDVTAVYKETGELINIICALWETNYNLTSLLYSDEFCCDDKENKTFNDKINELNSFGKDKTLNQIVEELYVSPLVKRPIYQSLLITKELEKIMKCPPKKIFVEVARGAEEKKRTVSRRNKLLDLYKSCKNDYPLLFDELQNNTTDDELKSDKLYLYFTQFGKCMYTGENIDLGDLFNKNLYDIDHIYPQSKIKDDSLDNRVLVKKTTNAKKDNEYPLSSQIREKMTPHWKALLDKGLINKKKYERLVRNYPLSDEELSQFISRQLVETRQSTKAVANILEQLYPRPDTEIVYVKAALASEFRHQYDMLKCREVNDLHHAKDAYLNIVVGNAYNVKFTHNKANFIKGLQNNDKAYTVKLDSMLKHNIDGAWIADNNESLNIVKSTMNKNNIRYTRYAFKQKGGLFDQNILKKGKGQVPIKANDKRNSIDKYGGYNRPSSSYFSLVKYSDKKGKKIIQLVPIDSFEEHIYQNTPERYVSEKIGCDCEILIPCIKYNACISIDGFRMHLSSKSGGGAQIVYKPAQQLILGYDNEKMIKGIEKLLQNGINDDIVKKYDINKENNLKLYCLIVDKLRNTLFKTKYEKIGNDLINGKEKFETLDIEQQFYVINEILKILHCNVVTGDLKLIGGSGQAGVVLTNSSLSNIKNVKSIKLINQSVTGLFEQEIELLNL

SEQ ID NO: 20152 - protein, 1333 aa, unidentified
  REGION 1..1333: note = Cas Enzyme sequence
MGKEYYLGLDIGTDSVGWAVCDTNYKIPKFKGNAMWGIRLFEKSNSAEERRGFRSSRRRTQRKRERLKLLEMLFDEEISKIDPAFFIKLRESNLYLEDKSTKIPYCVFSDENYTDKDFHRDYPTIYHLRNELIKSNKPHDVRLVYLALHHIIKNRGHFLFDYSYKNDKSGDFMPIYNDLKNYFYDNYEIELDCSDVDEFANTLKDKSKGKTKKNAEIAELFGVSKKYDKVLYSALSLLSGSSVKLFDIFDDEALKDVEKKSVSFSSGFDDNANDFQSYLGERFELLEKLKAVYDWAVLADILDGKEYISEAKVAIYEKHKIDLRTLKKYIKIYMPEKKSEIFNISSKDNNYVAYSKHIKTSSGTGVLNSTCTQEEFCAYLKKTLGICKDASYEEMFKEIENSTFMPKQVTKDNGVVPMQVNEKELVAILDNAKEYLPFLLNEDNDGKTVYDKIKALFEYRIPYYIGPLNTHSTKHWLVRSNEKIYPWNIEDVVDFDKSAEKFIEKLTSKCTYLPQYDVIPKHSLLYNKFCVLNELNNLKIDGEKISVQLKQDIYNDLFKKYYKVTNKKLCYYLKSRNIAFDEISGIDNDFKSSLKSYKDLVAYNLTDEQKEEIVKAITIFGDDKKLLKKRLKNEFGGCLSDDEIKKICKLKYTGWSKLSREFLTDVTAVYKETGELINIICALWETNYNLTSLLYSDEFCCDDKENKTFNDKINELNSFGNDKTLNQIVEELYVSPLVKRPIYQSLLITKELEKIMKCPPKKIFVEVARGAEEKKRTVSRRNKLLDLYKSCKNDYPLLFDELQNNTTDDELKSDKLYFYFTQFGKCMYTGENIDLDDLFNKNLYDIDHIYPQSKIKDDSLDNRVLVKKTTNAKKDNEYPLSSQIREKMTLHWKALLDKGLINKKKYERLVRNYPLSDEELSQFISRQLVETRQSTKAVANILEQLYPRPDTEIVYVKAALASEFRHQYDMLKCREVNDLHHAKDAYLNIVVGNAYNVKFTHNKANFIKGLQNNDKAYTVKLDSMLKHNIDGAWIADNNESLNIVKSTMNKNNIRYTRYAFEKKGGLFKVTILKKGNGQASIKKNDKRNSIEKYGGYNQVSSTYFSCVEHGKDNKRMISMFSVNLYDKNKYEENPIAYLIENYGLINPIIKVKKVKIQSCISFDNMLCHLGGKDSGGSQISYRPGVQLVLGYDNERYIRNVIRCAGGDLHLQTSKNEEDIVTTEKNIELFILLIEKMKNNIYGVLYSNLGDKLYCSKEKFEKLDIVEQCNVIKNVLTILKNNASKGDLKSIGIKANGAIRLNNNISEIKNVKSIKLINQSVTGLFEQEIELLNL

SEQ ID NO: 20153 - protein, 1333 aa, unidentified
  REGION 1..1333: note = Cas Enzyme sequence
MGKEYYLGLDIGTDSVGWAVCDTNYKIPKFKGNAMWGIRLFEKSNSAEERRGFRSSRRRTQRKRERLKLLEMLFDEEISKIDPAFFIKLRESNLYLEDKSTKIPYCVFSDENYTDKDFHRDYPTIYHLRNELIKSNKPHDVRLVYLALHHIIKNRGHFLFDYSYKNDKSGDFMPIYNDLKNYFYDNYEIELDCSDVDEFANTLKDKSKGKTKKNAEIAELFGVSKKYDKVLYSALSLLSGSSVKLFDIFDDEALKDVEKKSVSFSSGFDDNANDFQSYLGERFELLEKLKAVYDWAVLADILDGKEYISEAKVAIYEKHKIDLRTLKKYIKIYMPEKKSEIFNISSKDNNYVAYSKHIKTSSGTGVLNSTCTQEEFCAYLKKTLGICKDASYEEMFKEIENSTFMPKQVTKDNGVVPMQVNEKELVAILDNAKEYLPFLLNEDNDGKTVYDKIKALFEYRIPYYIGPLNTHSTKHWLIRSNEKIYPWNIEDVVDFDKSAEKFIEKLTSKCTYLPQYDVIPKHSLLYNKFCVLNELNNLKIDGEKISVQLKQDIYNDLFKKYYKVTNKKLCYYLKSRNIAFDEISGIDNDFKSSLKSYKDLVAYNLTDEQKEEIVKAITIFGDDKKLLKKRLKNEFGGCLSDDEIKKICKLKYTGWSKLSREFLTDVTAVYKETGELINIICALWETNYNLTSLLYSDEFCCDDKENKTFNDKINELNSFGNDKTLNQIVEELYVSPLVKRPIYQSLLITKELEKIMKCPPKKIFVEVARGAEEKKRTVSRRNKLLDLYKSCKNDYPLLFVELQNNTTDDELKSDKLYLYFTQFGKCMYTGENIDLDDLFNKNLYDIDHIYPQSKIKDDSLDNRVLVKKTTNAKKDNEYPLSSQIREKMTLHWKALLDKGLINKKKYERLVRNYPLSDEELSQFISRQLVETRQSTKAVANILEQLYPRPDTEIVYVKAALASEFRHQYDMLKCREVNDLHHAKDAYLNIVVGNAYNVKFTHNKANFIKGLQNNDKAYTVKLDSMLKHNIDGAWIADNNESLNIVKSTMNKNNIRYTRYAFEKKGGLFKVTILKKGNGQASIKKNDKRNSIEKYGGYNQVSSTYFSCVEHGKDNKRMISMFSVNLYDKNKYEENPIAYLIENYGLINPIIKVKKVKIQSCISFDNMLCHLGGKDSGGSQISYRPGVQLVLGYDNERYIRNVIRCAGGDLHLQTSKNEEDIVTTEKNIELFNLLIEKMKNNIYGVLYSNLGDKLYCSKEKFEKLDIVEQCNVIKNVLTILKNNASKGDLKSIGIKANGAIRLNNNISEIKNVKSIKLINQSVTGLFEQEIELLNL

SEQ ID NO: 20154 - protein, 1327 aa, unidentified
  REGION 1..1327: note = Cas Enzyme sequence
LGLDIGTDSVGWAVCDTNYKIPKFKGNAMWGIRLFEKSNSAEERRGFRSSRRRTQRKRERLKLLEMLFDEEISKIDPAFFIKLRESNLYLEDKSTKIPYCVFSDENYTDKDFHRDYPTIYHLRNELIKNNKPHDVRLVYLALHHIIKNRGHFLFDYSYKNDKSGDFMPIYNDLKNYFYDNYEIELDCSDVDEFANTLKDKSKGKTKKNAEIAELFGVSKKDDKVLYSALSLLSGSSVKLFDIFDDEALKDVEKKSVSFSSGFDDSANDFQSYLGERFELLEKLKAVYDWAVLADILDGKEYISEAKVAIYEKHKRDLRTLKKYIKIYMPEKKAEIFNISSKDNNYVAYSKHIKTSSGTGVLNSTCTQEEFCTYLKKTLGICKDASYEEMFKEIENSTFMPKQVTKDNGVVPMQVNEKELVAILDNAKEYLPFLLNEDNDGKTVYDKIKALFEYRIPYYIGPLNTHSTKHWLVRSNEKIYPWNIEDVVDFDKSAEKFIEKLTSKCTYLPQYDVIPKHSLLYNKFCVLNELNNLKIDGEKISVQLKQDIYNDLFKKYYKVTNKKLCDYLKSRNIAFDEISGIDNDFKSSLKSYKDLVAYNLTDEQKEEIVKAITIFGDDKKLLKKRLKNEFGDCLSDDEIKKICKLKYTGWSKLSREFLTDVTAVYKETGELINIICALWETNYNLASLLYSDEFCCDDKENKTFNDKINELNSFGNDKTLNQIVEELYVSPLVKRPIYQSLLITKELEKIMKCPPKKIFVEVARGAEEKKRTVSRRNKLLDLYKSCKNDYPLLFDELQNNTTDDELKSDKLYLYFTQFGKCMYTGENIDLGDLFNKNLYDIDHIYPQSKIKDDSLDNRVLVKKTTNAKKDNEYPLSSQIREKMTPHWKALLDKGLIDKKKYERLVRNYPLSDEELSQFISRQLVETRQSTKAVANILEQLYPRPDTEIVYVKAALTSEFRHQYDMLKCREVNDLHHAKDAYLNIVVGNAYNVKFTHNKANFIKGLQNNDKAYTVKLDSMLKHNIDGAWIADNNESLNIVKSTMNKNNIRYTRYAFEKKGGLFKVTILKKGNGQASIKKNDKRNSIEKYGGYNQVSSTYFSCVEHGKDNKRMISMFSVNLHDKNKYEENPIAYLIENYGLINPIIKVKKVKIQSCISFDNMLCHLGGKDSGGSQISYRPGVQLVLGYDNERYIRNVIRCAGGDLHLQTSKNEEDIVTAEKNIELFNLLIEKMKNNIYGVLYSNLGDKLYCSKEKFEKLDIVEQCNVIKNVLTILKNNASKGDLKSIGIKANGAIRLNNNISEIKNVKSIKLINQSVTGLFEQEIELLNL

SEQ ID NO: 20155 - protein, 1332 aa, unidentified
  REGION 1..1332: note = Cas Enzyme sequence
MGKEYYLGLDIGTDSVGWAVCDTNYKIPKFKGNAMWGIRLFEKSNSAEERRGFRSSRRRTQRKRERLKLLEMLFDEEISKIDPAFFIKLRESNLYLEDKSTKIPYCVFSDENYTDKDFHRDYPTIYHLRNELIKNNKPHDVRLVYLALHHIIKNRGHFLFDYSYKNDKSGDFMPIYNDLKNYFYDNYEIELDCSDVDEFANTLKDKSKGKTKKNAEIAELFGVSKKDDKVLYSALSLLSGSSVKLFDIFDDEALKDVEKKSVSFSSGFDDSANDFQSYLGERFELLEKLKAVYDWAVLADILDGKEYISEAKVAIYEKHKRDLKTLKKYIKIYMPEKKAEIFNISSKDNNYVAYSKHIKTSSGTGVLISTCTQEEFCAYLKKTLGICKDASYEEMFKEIENSTFMPKQVTKDNGVVPMQVNEKELVAILDNAKEYLPFLLNEDNDGKTVYDKIKALFEYRIPYYIGPLNTHSTKHWLIRSNEKIYPWNIEDVVDFDKSAEKFIEKLTSKCTYLPQYDVIPKHSLLYNKFCVLNELNNLKIDGEKISVQLKQDIYNDLFKKYYKVTNKKLCDYLKSRNIAFDEISGIDNDFKSSLKSYKDLVAYNLTDEQKEEIVKAITIFGDDKKLLKKRLKNEFGGCLSDDEIKKICKLKYTGWSKLSREFLTDVTAVYKETGELINIICALWETNYNLTSLLYSDEFCCDDKENKTFNDKINELNSFGKDKTLNQIVEELYVSPLVKRPIYQSLLITKELEKIMKCPPKKIFVEVARGAEEKKRTVSRRNKLLDLYKSCKNDYPLLFDELQNNTTDDELKSDKLYLYFTQFGKCMYTGENIDLGDLFNKNLYDIDHIYPQSKIKDDSLDNRVLVKKTTNAKKDNEYPLSSQIREKMTPHWKVLLDKGLINKKKYERLVRNYPLSDEELSQFISRQLVETRQSTKAVANILEQLYPRPDTEIVYVKAALASEFRHQYDMLKCREVNDLHHAKDAYLNIVVGNAYNVKFTHNKANFIKGLQNNDKAYTVKLDSMLKHNIDGAWIADNNESLNIVKSTMNKNNIRYTRYAFKQKGGLFDQNILKKGKGQVPIKANDKRNSIDKYGGYNRPSSSYFSLVKYSDKKGKKIIQLVPIDSFEEHIYQNTPERYVSEKIGCDCEILIPCIKYNACISIDGFRMHLSSKSGGGAQIVYKPAQQLILGYDNEKMIKGIEKLLQNGINDDIVKKYDINKENNLKLYCLIVDKLRNTLFKTKYEKIGNDLINGKEKFETLDIEQQFYVINEILKILHCNVVTGDLKLIGGSGQAGVVLTNSSLSNIKNVKSIKLINQSVTGLFEQEIELLNL

SEQ ID NO: 20156 - protein, 1324 aa, unidentified
  REGION 1..1324: note = Cas Enzyme sequence
MKDFYIGLDMGTDSVGWAVADEDYNLCKFKGKAMWGVRLFDESATAAERRGFRTARRRAQRKRQRILWLQMLFNEEISKKDIAFFQRLNESKLYLEDKSTNVPYAVFADESFTDVDYHKLYPTIYHLRKELVQSDEPHDVRLVYLALHHLIKNRGHFLFENVGSDFEKESSFEVLFKNLQNYILGEYELALECISPLQIADILKDKSKRKTTKSSEICKLLGISKKGQPRLNAIVLLMCGQSVKLADLYGDENYNKEEKSSISFEKGYEDNEETYRELLLERFELIEKIKALYDWAILADILKGETYISFAKVKTYDEHRHDLQQLKAFVKERCRSDYNEIFRETSDKLNNYTAYCGKFKENGRNGVILHAANQTDFCKYLKSKFDKLDKSGYEDMFEKIENGSFMPKIVVKDNGVIPMQVNESEVRAILKNASGYLDFLNNQDKDGITVADKILQIFEFRIPYYVGPLNVHSDNSWLVRKDGKIYPWNFNKIVDVDKSAEEFINKLTAKCTYLPDRDVIPKNSILYSRYMVLNELNNLKLDGKKPDVSFKQAVFNDLFMHRRKVTQKALREYIKAQTGTEPEITGIDGDFKANMRPAIELAGYNLSEPDKEEIIKAITIFGDDKKLLKRRIKDKYSEMLSEDEIKKICKLKYKDWGRLSREFLTEIFDVDTATGECKDNIINTLWNTNDNLMELLGAKYNFTQSIEQAVSKSTHKASIEKMVEDMYVSPKVKRTVFQSLKIMKEIVKIKGHAPKKVFVEMTRHDGTKGDNGRTKSRKKQLEELYKKCKEDSTELWDELEKTDDDEFRQDKLFLYYTQMGRCMYSGERIELRDLFNKNLYDIDHIFPRSKVKDDSIDNRVLVKKQINSHKDNDYPLDSTVREKMRGHWQYLLRHGFISKKKYDRLTRVTPLTDDELADFIARQLVETSQSTKAVATLLKTLYPTTEIVYVKAGLVSWFRDEYKLFIKCREVNDLHHAKDAYLNIVVGNVYNVRYTHSKAIFIKGLQTKKYSLNRMFAFDTPGAWNIENEKSLSIVKKTVMKNNILYTRYSYTKKGGLFKIQPLKKGNGQAPLKKDLPLSDIGKYGGYDKPTASYFSYIKYEGKKGKECCQLVAIDNYLKKYYEENPIEYLTNRLGLKNPAVLIPVIKYNSCIEIDGFRMSISSKSSGGRAIIYKPAVQLVLGAEKEAYVKKISKVLSKPEEQKITSYDGVSAEENIELFDALTAKMTNTIFKIKLEDIGNKINSGRDKFVTLDVKKQCYVINEILKIMHCNVVTGDLSLIGAAKKSGVVSTSSALSEIKKVSSIMLINQSVTGLFETKIDLLNI

SEQ ID NO: 20157 - protein, 1323 aa, unidentified
  REGION 1..1323: note = Cas Enzyme sequence
MKDFYIGLDMGTDSVGWAVADEDYNLCKFKGKAMWGVRLFDESATAAERRGFRTARRRAQRKRQRILWLQMLFNEEISKKDIAFFQRLNESKLYLEDKSTNVPYAVFADESFTDVDYHKLYPTIYHLRKELVQSDEPHDVRLVYLALHHLIKNRGHFLFENVGSDFEKESSFEVLFKNLQNYILGEYELALECISPLQIADILKDKSKRKTTKSSEICKLLGISKKGQPRLNAIVLLMCGQSVKLADLYGDENYNKEEKSSISFEKGYEDNEETYRELLLERFELIEKIKALYDWAILADILKGETYISFAKVKTYDEHRHDLQQLKAFVKERCRSDYNEIFRETSDKLNNYTAYCGKFKENGRNGVILHSANQTDFCKYLKSKFDKLDKSGYEDMFEKIENGSFMPKIVVKDNGVIPMQVNESEVRAILKNASGYLDFLNNQDKDGITVADKILQIFEFRIPYYVGPLNVHSDNSWLVRKDGKIYPWNFNKIVDVDKSAEEFINKLTAKCTYLPDRDVIPKNSILYSRYMVLNELNNLKLDGKKPDVSFKQAVFNDLFMHRRKVTQKALREYIKAQTGTEPEITGIDGDFKANMRPAIELAGYNLSEPDKEEIIKAITIFGDDKKLLKRRIKDKYSEMLSEDEIKKICKLKYKDWGRLSREFLTEIFDVDTATGECKDNIINTLWNTNDNLMELLGAKYNFTQSIEQAISKSTHKASIEKMVEDMYVSPKVKRTVFQSLKIMKEIVKIKGHAPKKVFVEMTRHDGTKGDNGRTKSRKKQLEELYKKCKEDSTELWDELEKTDDDEFRQDKLFLYYTQMGRCMYSGERIELRDLFNKNLYDIDHIFPRSKVKDDSIDNRVLVKKQINSHKDNDYPLDSTVREKMRGHWQYLLRHGFISKKKYDRLTRVTPLTDDELADFIARQLVETSQSTKAVATLLKTLYPTTEIVYVKAELVSRFRTEYKFIKCREVNDLHHAKDAYLNIVVGNVYNVRYTHSKAIFIKGLQTKKYSLNRMFAFDTPGAWNIENEKSLSIVKKTVMKNNILYTRYSYMKKGGLFKIQPLKKGNGQAPLKKDLPLSDIGKYGGYDKPTASYFSYIKYEGKKGKECRQLVAIDNYLKKYYEENPIEYLTNRLGLKNPAVLIPVIKYNSCIEIDGFRMNISSKSNEGKTIVYKPAVQLVLGAEKEAYVKKISKVLSKPEEQKITSYDGVSAEENIELFDALTAKMTNTIFKIKLEDIGNKIKSGRDKFVTLDVKKQCYVINEILKIMHCNVVTGDLSLIGAAKKAGIVSTNSALSEIKKVSSIMLINQSVTGLFETKIDLLNI

SEQ ID NO: 20158 - protein, 1344 aa, unidentified
  REGION 1..1344: note = Cas Enzyme sequence
LSIKILKGRKIMGKEYYLGLDIGTDSVGWAVCDTDYKIPKFKGNAMWGIRLFEKSNSAEERRGFRSSRRRTQRKRERLKLLEMLFDEEISKIDPAFFIKLRESNLYLEDKSTKIPYCVFSDENYTDKDFHRDYPTIYHLRNELIKNNKPHDVRLVYLALHHIIKNRGHFLFDYSYKNDKSGDFMPIYNDLKNYFYDNYEIELDCSDIDEFANTLKDKSKGKTKKNAEIAELFGVSKKYDKVLYSALSLLTGSSVKLFDIFDDEALKDVEKKSVSFSSGFDDNANDFQSYLGERFELLEKLKAVYDWAVLADILDGKEYISEAKVAIYEKHKRDLRTLKKYIKIYMPEKKAEIFNISSKDNNYVAYSKHIKTSSGTGVLNSTCTQEEFCAYLKKTLGICKDASYEEMFKEIENSTFMPKQVTKDNGVVPMQVNEKELVAILDNAKEYLPFLLNKDNDGKTVYDKIKALFEYRIPYYIGPLNTHSTKHWLVRSNEKIYPWNIEDVVDFDKSAEKFIENLTSKCTYLPQYDVIPKHSLLYNKFCVLNELNNLKIDGEKISVQLKQDIYNDLFKKYYKVTNKKVCDYLKSRNIAFDEISGIDNDFKSSLKSYKDLVAYNLTDEQKEEIVKAITIFGDDKKLLKKRLKNEFGGCLSDDEIKKICKLKYTGWSKLSREFLTDVTAVYKETGELINIICALWETNYNLTSLLYSDEFCCDDKENKTFNDKINELNSFGNDKTLNQIVEELYVSPLVKRPIYQSLLITKELEKIMKCPPKKIFVEVARGAEEKKRTVSRRNKLLDLYKSCKNDYPLLFDELQNNTTDDELKSDKLYLYFTQFGKCMYTGENIDLDDLFNKNLYDIDHIYPQSKIKDDSLDNRVLVKKTTNAKKDNEYPLSSQIREKMTPHWKALLDKGLINKKKYERLVRNYPLSDEELSQFISRQLVETRQSTKAVANILEQLYPRPDTEIVYVKAALASEFRHQYDMLKCREVNDLHHAKDTYLNIVVGNAYNVKFTHNKANFIKGLQNNDKAYTVKLDSMLKHNIDGAWIADNNESLNIVKSTMNKNNIRYTRYAFEKKGGLFKVTILRKGNGQASIKKNDKRNSIEKYGGYNQVSSTYFSCVEHGKDNKRMISMFSVNLYDKNKYEENPIAYLIENYGLINPIIKVKKVKIQSCISFDNMLCHLGGKDSGGSQISYRPGVQLVLGYDNERYIRNVIRCAGGDLHLQTSKNEKDIVTTEKNIELFNLLIEKMKNNIYGVLYSNLGDKLYCSKEKFEKLDIVEQCNVIRNVLTILKNNASKGDLKSIGIKANGAIRLNNNISEIKNVKSIKLINQSVTGLFEKEIELLNL

SEQ ID NO: 20159 - protein, 1333 aa, unidentified
  REGION 1..1333: note = Cas Enzyme sequence
MGKEYYLGLDIGTDSVGWAVCDTDYKIPKFKGNAMWGIRLFEKSNSAEERRGFRSSRRRTQRKRERLKLLEMLFDEEISKIDPAFFIKLRESNLYLEDKSTKIPYCVFSDENYTDKDFHRDYPTIYHLRNELIKNNKPHDVRLVYLALHHIIKNRGHFLFDYSYKNDKSGDFMPIYNDLKNYFYDNYEIELDCSDIDEFANTLKDKSKGKTKKNAEIAELFGVSKKYDKVLYSALSLLTGSSVKLFDIFDDEALKDVEKKSVSFLSGFDDNANDFQSYLGERFELLEKLKAVYDWAVLADILDGKEYISEAKVAIYEKHKRDLRTLKKYIKIYMPEKKAEIFNISSKDNNYVAYSKHIKTSSGTGVLNSTCTQEEFCAYLKKTLGICKDASYEEMFKEIENSTFMPKQVTKDNGVVPMQVNEKELVAILDNAKEYLPFLLNKDNDGKTVYDKIKALFEYRIPYYIGPLNTHSTKHWLVRSNEKIYPWNIEDVVDFDKSAEKFIENLTSKCTYLPQYDVIPKHSLLYNKFCVLNELNNLKIDGEKISVQLKQDIYNDLFKKYYKVTNKKVCDYLKSRNIAFDEISGIDNDFKSSLKSYKDLVAYNLTDEQKEEIVKAITIFGDDKKLLKKRLKNEFGGCLSDDEIKKICKLKYTGWSKLSREFLTDVTAVYKETGELINIICALWETNYNLTSLLYSDEFCCDDKENKTFNDKINELNSFGNDKTLNQIVEELYVSPLVKRPIYQSLLITKELEKIMKCPPKKIFVEVARGAEEKKRTVSRRNKLLDLYKSCKNDYPLLFDELQNNTTDDELKSDKLYLYFTQFGKCMYTGENIDLDDLFNKNLYDIDHIYPQSKIKDDSLDNRVLVKKTTNAKKDNEYPLSSQIREKMTPHWKALLDKGLINKKKYERLVRNYPLSDEELSQFISRQLVETRQSTKAVANILEQLYPRPDTEIVYVKAALASEFRHQYDMLKCREVNDLHHAKDTYLNIVVGNAYNVKFTHNKANFIKGLQNNDKAYTVKLDSMLKHNIDGAWIADNNESLNIVKSTMNKNNIRYTRYAFEKKGGLFKVTILRKGNGQASIKKNDKRNSIEKYGGYNQVSSTYFSCVEHGKDNKRMISMFSVNLYDKNKYEENPIAYLIENYGLINPIIKVKKVKIQSCISFDNMLCHLGGKDSGGSQISYRPGVQLVLGYDNERYIRNVIRCAGGDLHLQTSKNEKDIVTTEKNIELFNLLIEKMKNNIYGVLYSNLGDKLYCSKEKFEKLDIVEQCNVIRNVLTILKNNASKGDLKSIGIKANGAIRLNNNISEIKNVKSIKLINQSVTGLFEKEIELLNL

SEQ ID NO: 20160 - protein, 1105 aa, unidentified
  REGION 1..1105: note = Cas Enzyme sequence
VLYSALSLLSGSSVKLFDIFDDEALKDVEKKSVSFSSGFDDNANDFQSYLGERFELLEKLKAVYDWAVLADILDGKEYISAAKVAIYEKHKIDLRTLKKYIKIYMPEKKSEIFNISSKDNNYVAYSKHIKTSSGTGVLNSTCTQEEFCAYLKKTLGICKDASYEEMFKEIENSTFMPKQVTKDNGVVPMQVNEKELVAILDNAKEYLPFLLNEDNDGKTVYDKIKALFEYRIPYYIGPLNTHSTKSWLVRSNEKIYPWNIEDVVDFDESAEKFIENLTSKCTYLPQYDVIPKHSLLYNKFCVLNELNNLKIDGEKISVQLKQDIYNDLFKKYYKVTNKKLCYYLKSRNIAFDEISGIDNDFKSSLKSYKDLVAYNLTDEQKEEIVKAITIFGDDKKLLKKRLKNEFGGCLSDDEIKKICKLKYTGWSKLSREFLTDVTAVYKETGELINIICALWETNYNLASLLYSDEFCCDDKENKTFNDKINELNSFGNDKTLNQIVEELYVSPLVKRPICQSLLITKELEKIMKCPPKKIFVEVARGAEEKKRTVSRRNKLLDLYKSCKNDYPLLFDELQNNTTDDELKSDKLYLYFTQFGKCMYTGENIDLGDLFNKNLYDIDHIYPQSKIKDDSLDNRVLVKKTTNAKKDNEYPFSSQIREKMTPHWKALLDKGLINKKKYERLVRNYPLSDEELSQFISRQLVETRQSTKAVANILEQLYSRPDTEIVYVKAALASEFRHQYDMLKCREVNDLHHAKDAYLNIVVGNAYNVKFTHNKANFIKGLQNNDKAYTVKLDSMLKHNIDGAWIADNNESLNIVKSTMNKNNIRYTRYAFTKHGKFFDATIQKKNGIGSVPLKENSPRNNISKYGGYTQIGVSYFGIAKIAKKKCDDIVIFPVYIYNEKEYTKAPLDYAKMVTNKNVSEILIKKLKIDSLLSIDSYKVFVSGNGDSTRFSYKPYSQLMIEPYYEKYLKRAFKYLDNCKKNKRELPISNYDGISEEMNMEIYKCLYKKMELPAFVFSFHDYGTKLKDKFVDFSKLKTYEQLCVLEAIVKTMKSDTVVGDIKKLLGISFSGFGNSKVFNLKKNTSLKIINQSVTGLFEQEIELLNL

SEQ ID NO: 20161 - protein, 1334 aa, unidentified
  REGION 1..1334: note = Cas Enzyme sequence
MGKEYYLGLDIGTDSVGWAVCDTNYKIPKFKGNAMWGIRLFEKSNSAEERRGFRSSRRRTQRKRERLKLLEMLFDKEISKLDPAFFIKLRESNLYLEDKSTKIPYCVFSDENYTDKDFHRDYPTIYHLRNELIKNNKPHDVRLVYLALHHIIKNRGHFLFDYSYKNDKSGDFMPIYNDLKNYFYDNYEIELDCSDVDEFANTLKDKSKGKTKKNAEIAELFGVSKKDDKVLYSALSLLSGSSVKLFDIFDDEALKDAEKKSVSFSSGFDDNANDFQSYLGERFELLEKLKAVYDWAVLADILDGKEYIDNLVARLYEKHKRDLRTLKKYIKIYMPEKKAEIFNISSKDNNYVAYSKHIKTSSGTGVLNSTCTQEEFCAYLKKTLGICKDASYEEMFKEIENSTFMPKQVTKDNGVVPMQVNEKELVAILDNAKEYLPFLLNKDNDGKTVYDKIKALFEYRIPYYIGPLNTHSTKSWLVRSNEKIYPWNIEDVVDFDESAEKFIENLTSKCTYLPQYDVIPKHSLLYNKFCVLNELNNLKIDGEKISVQLKQDIYNDLFKKYYKVTNKKLCDYLKSRNIAFDEISGIDNDFKSSLKSYKDLVAYNLTDEQKEKIVKAITIFGDDKKLLKKRLKNEFGGCLSDDEIKKICKLKYTGWSKLSREFLTDVTAVYKETGELINIICALWETNYNLTSLLYSDEFCCDDKENKTFNDKINELNSFGSDKTLNQIVEELYVSPLVKRPIYQSLLITKELEKIMKCPPKKIFVEVARGAEEKKRTVSRRNKLLDLYKSCKNDYPLLFDELQNNTTDDELKSDKLYLYFTQFGKCMYTGENIDLGDLFNKNLYDIDHIYPQSKIKDDSLDNRVLVKKTTNAKKDNEYPLSSQIREKMTPHWKALLDKGLINKKKYERLVRNYPLSDEELSQFISRQLVETRQSTKAVANILEQLYPRPDTEIVYVKAALASEFRHQYDMLKCREVNDLHHAKDAYLNIVVGNAYNVKFTHNKANFIKGLQNNDKAYTVKLDSMLKHNIDGAWIADNNESLNIVKSTMNKNNIRYTRYAFTKHGKFFDATIQKKNGIGSVPLKENSPRNNISKYGGYTQIGVSYFGIAKIAKKKCDDIVIFPVYIYDEKEYTKAPLDYAKMVTNKNVSEILIKKLKIDSLLSIDSYKVFVSGNGDSTRFSYKPYSQLMIEPYYEKYLKRAFKYLDNCKKNKRELPISNYDGISEEMNMEIYKCLYKKMELPAFVFSFHDYGTKLKDKFVDFSKLKTYEQLCVLEAIVKTMKSDTVVGDIKKLLGISFSGFRNSKVFNLKKNTSLKIINQSVTGLFEKEFELLNL

SEQ ID NO: 20162 - protein, 1325 aa, unidentified
  REGION 1..1325: note = Cas Enzyme sequence
MKGEYYLGLDMGSSSVGWAVTNEKYEILRAHGKTLWGVRLFDSAQTAEERRGFRTAKRRLDRRNWRIELLQKIFAEEVEKIDDGFFRRMKESRYWPEDKRDRQGKCPELPYALFADDDYTDKEYHKQFPTIYHLRKWLMETDETPDIRLIYLALHHMMKHRGHFLLNGNIEQVREFQTTFEQFLEAVRAEELGFSSEIGVERSKEIEAILKDRTLTKSAKKTKAVKAMRAETSCEKEWLGLITGGTAKLGNLFGEKQMDTLERPKLCFADAGYEEYAGEIEAELGEKYVLIEHAKAVYDWAVLADILQNYSSLSEAKVALYEKHKKDLKDLKKLVRENLSREEYQRLFAKKDEKANYYAYIKAPKQCSQEDFYGYLKKNILGKISDVTKASCMQKEMEMGTFLPKQTVKDNSVIPYQIHLYELNAILKNLEDKVPLLKENGEKIQKIFTFRIPYYVGPLNGIRKKGEKSNWAVRKEGKIYPWNFDEMVDLEASAEQFIRRMTNKCTYLPSEDVLPKYSLLYSKYEVLNELNNLRLDGEKISVEQKQKIYEEVFQKSRKVTQKKLKNYLVKEGITGKEVEITGIDGDFKSSLTAYHDFKEKLTNLSLNQAEKECIILNVTLFGDDKAILKQRLKKLFPELTEKQRDSISKLPYRGWGRLSKVFLEEMEAPAPETGEAWSIIRALWETNDNLMQLLSEKYLFASAIEEKNGNEQKKRDISYELVEELYVSPAVKRQIWQSLLIVKEICKVMGNPPKRVFIEMAREKTDQGRTSSRKKKLLELYKKCKAEEKDWIDEIEKRSDAEMRRDKLYLYYTQKGKCMYSGETIELEELWDNQKYDIDHIFPQSKVMDDSLDNRVLVKKKCNQMKEDKYPIDETVRKKMQPFWKSLVDAGLISEEKYKRLIRGNGFEPSELAGFISRQLVETRQSTKAAASILQQVIPDTQIVYVKAPTVSKFRKDFKFLKVREMNDYHHAKDAYLNIVVGNAYFVKFTSNPIHFIKENPGRSYNLKKMFEQERIERNGEIAWEGGNGTIVTVRKFMEKNNILVTRRSYEATGALFDQQIVKKGKGQVPIKSSDERLCNIQKYGGYNKEAGAYFVLAESEGKKGKKIRTIEYVPIRLKKEIQKSEENIIRYLEEERQLKNPRVLVPEIKIDTLFCVDGFYMWVSGRSGDQLLMQGANQLVLSQEETEILKKIVQYVERKKQNKELKIYDSDHLEEKKVVMLYETFLNKLTNTVYAKKLGAQAKTLTEKREKFKELCIEEKCIVLYEVLHFFQCQSAAADLKLIGGSGRAGILCLNKNITDCSRIEMIHQSPTGIYEQTVDLNAL

SEQ ID NO: 20163 - protein, 1354 aa, unidentified
  REGION 1..1354: note = Cas Enzyme sequence
MIQLNKKLNKETTMEKDYYLGLDMGSASVGWAVTDDQYHILRAHGKALWGTRLFESANTAEDRRINRTARRRLKRRNQRIEWLQEIFAEEIAEKDSGFFRRMKESRYWAEDKRDENGNCPEMPYLLFIDKEFTDKEYHEKFPTIYHLRKYLMTTEETPDIRLVYLAFHHMMKHRGHFLLNGSIEEIREFRTTFDQFLEVVRNEEMGFDGEITEETYHDIEKILKNVNLTRSAKKTTLIKLLKVTRVKEKELLALISGCTVKLSNIFNDKSLDETERPKISFADAGFDDYEVELKNNLNERYYIIESAKAVYDWAALADILNKYSSISEAKVALYEKHHKDLQHLKKIVKEDISIEAYKEIFTDTSGKYKNYCAYIGTVNINGKKKDFEGKKCTKEDFYAYLKKSVIERINDSEKTDWLKKELETGNFLPKQSTGANSVIPYQIHLYELNAIITNLQERIPLLKREGDKIRQIFTFRVPYYVGPLNGISIDGKKTNWVKRKEGKIYPWNFTDIVDEEVSAERFIRRMTNKCTYLIHEDVLPKYSLLYSKFEVLNELNNVRLNGELLSVELKQKIYEEVFQRYRKVTQKKFKRYLLIEGKIDENTVITGIDGDFKGSLTAYHDFKEKLTDVHLSEREKEEIILNVTLFGDARSLLRKRIGKICPQLTDKQRESLSNLSYRGWGRLSKKFLNGIAISVQGEEEWTIIKTLWGTQDNLSQLLSAKYTFRNEVEKENGQLDNKEISYETIKELNISPSVKRQVWQALLIVKEICKIQKTLPKRVFVEVAREKTNSGRTESRKKRLLDLYKYCSKYEKELYDENLQSKLEKCQEADLRSDRLFLYYTQMGRCMYTGLPIDLDELWNNQKYDIDHIYPQSKTMDDSIDNRVLVKRILNLEKTDVYPIQADIREKCRGFWKALKNAGFISEEKYKRLTRATEFEPAELAGFISRQLVENRQTTKVVASILKQAMPDTEIVYVKARTVSEFRHKFNFIKVRDMNDLHHAKDAYLNIVVGNTYLVKFTKSPVNFIENHSNRSYNLKKLFTYGEVERNGEIAWISGENGTIGTVRNIMKKNNILVTRRVHEATGGLFDQQLMKKGKGQVPVKGSDERLCDIEKYGGYNKEAGAYFVLVESDEKKGKKKRTIEYVPIRLKKQLENNREALENYLQEQRKLINPIVLLDKIKIDSLFQVGGFFMWLSGRTGNQLLFKCANQLILSTEDEATLKKVVKFVNRRKENKEIKIYESDKLNEEMLGQLYNTFLYKLQNSVYGNRLGEQAKTLSSKKEKFDELQIEEKCVVLYEILHMFQCQSVASDLKLIEGPGKAGILVLNSNITKCKNVCVINQSPTGIYEKVIDLQKL

SEQ ID NO: 20164 - protein, 1341 aa, unidentified
  REGION 1..1341: note = Cas Enzyme sequence
MEKDYYLGLDMGSASVGWAVTDDQYHILRAHGKALWGTRLFESANTAEDRRINRTARRRLKRRNQRIEWLQEIFAEEIAEKDSGFFRRMKESRYWAEDKRDENGNCPEMPYLLFIDKEFTDKEYHEKFPTIYHLRKYLMTTEETPDIRLVYLAFHHMMKHRGHFLLNGSIEEIREFRTTFDQFLEVVRNEEMGFDGEITEETYHDIEKILKNVNLTRSAKKTTLIKLLKVTRVKEKELLALISGCTVKLSNIFNDKSLDETERPKISFADAGFDDYEVELKNNLNERYYIIESAKAVYDWAALADILNKYSSISEAKVALYEKHHKDLQHLKKIVKEDISIEAYKEIFTDTSGKYKNYCAYIGTVNINGKKKDFEGKKCTKEDFYAYLKKSVIERINDSEKTDWLKKELETGNFLPKQSTGANSVIPYQIHLYELNAIITNLQERIPLLKREGDKIRQIFTFRVPYYVGPLNGISIDGKKTNWVKRKEGKIYPWNFTDIVDEEVSAERFIRRMTNKCTYLIHEDVLPKYSLLYSKFEVLNELNNVRLNGELLSVELKQKIYEEVFQRYRKVTQKKFKRYLLIEGKIDENTVITGIDGDFKGSLTAYHDFKEKLTDVHLSEREKEEIILNVTLFGDARSLLRKRIGKICPQLTDKQRESLSNLSYRGWGRLSKKFLNGIAISIQGEEEWTIIKTLWGTQDNLSQLLSAKYTFRNEVEKENGQLDNKEISYETIKELNISPSVKRQVWQALLIVKEICKIQKTLPKRVFVEVAREKTNSGRTESRKKRLLDLYKYCSKYEKELYDENLQSKLEKCQEADLRSDRLFLYYTQMGRCMYTGLPIDLDELWNNQKYDIDHIYPQSKTMDDSIDNRVLVKRILNLEKTDVYPIQADIREKCRGFWKALKNAGFISEEKYKRLTRATEFEPAELAGFISRQLVENRQTTKVVASILKQAMPDTEIVYVKARTVSEFRHKFNFIKVRDMNDLHHAKDAYLNIVVGNTYLVKFTKSPVNFIENHSNRSYNLKKLFTYGEVERNGEIAWISGENGTIGTVRNIMKKNNILVTRRVHEATGGLFDQQLMKKGKGQVPVKGSDERLCDIEKYGGYNKEAGAYFVLVESDEKKGKKKRTIEYVPIRLKKQLENNREALENYLQEQRKLINPIVLLDKIKIDSLFQVGGFFMWLSGRTGNQLLFKCANQLILSTEDEATLKKVVKFVNRRKENKEIKIYESDKLNEEMLGQLYNTFLYKLQNSVYGNRLGEQAKTLSSKKEKFDELQIEEKCVVLYEILHMFQCQSVASDLKLIEGPGKAGILVLNSNITKCKNVCVINQSPTGIYEKVIDLQKL

SEQ ID NO: 20165 - protein, 1340 aa, unidentified
  REGION 1..1340: note = Cas Enzyme sequence
MEKDYFLGLDMGSGSVGWAVTDDQYRVLRAHGKAMWGTRLFESANTAEDRRINRTARRRLDRRNQRIEWLQEIFAEEINKKDSGFFRRMKESRYYPEDKRDENGNCPELPYALFIDEDFTDKEYHEKFPTIYHLRKYLMQTQETPDVRLVYLALHHMMKHRGHFLLKGNIEQIREFRTTFDQFLKVIRDEEIGFAKTIDEEIYEKIEETLKDVSLTKSAKKTKLIKILQVTCPEEKELLALISGGTVKLSNIFNDKSLDECERPKLSFADAGFDDYAGEIQTSLNEKYLIIESAKAVYDWAVLADILGNYSCISDAKVQLYKKHRKDLHRLKAFVRDNLSKEVYREIFSDVSGKHKNYCSYVGIAKINGKKKNIEGKKCTKEDFYGYLKKSVIARIDDLEKTEWLKQELEAGNFLPKQTTGENSVVPYQVHLYELNAMISNLEDKIPLFKKDGEKIRKIFTFRIPYYVGPLNGISVNRKTTNWAERKAGKIYPWNFSDMINEEISAERFIRRMTNKCTYLDHEDVLPKYSLLYSKFDVLNELNNVRVNGEVLSVEWKQRIYVDVFQRYRKVTQKKLKDYLRKEGLISENAVITGIDGDFKGSLTAYHDFKEKLTGVILNEKEKEEIILNITLFGDARSLLKKRLEKICPQLTDRQKESLSNLSYRGWGRLSEKFLSGITSPALAGEEWTIIRALWETQDNLSQLLGSKYLFRKAVEKENGELEKQEITYQSVKELCISPAVKRQVWQTLLIVKEICKIKGNPPKRVFLEVAREKTNSGRTESRKKRLQEFYKYCRTHEKELYDEKIQGELENSSDADLRSDKLFLYYTQMGRCMYTEERIDINELWDNQKYDIDHIYPQSKTMDDSIDNRVLVKRTANQEKTDIYPIQAKIRESRRAFWKQLQLAGLISLEKYKRLTRATEFEPGELADFISRQLVENRQTTKVVADILKQALPETEIVYVKARTVSDFRRRFEFVKIREMNDLHHAKDAYLNVVVGNTYLIKFTKSPVNFIESHSNRSYNLKKLFTDGKVERNGEIAWVSGKNGTIGTVRAVMKKNNILVTRRVHEATGGLFDQQLMKKGKGQIPIKGSDNRLQNIAKYGGYNKEAGAYFVLVESDDKKGQKKRTIEYIPIRLKKQVEESKEKLCRYLIEEKELINPVVLLDKIRFDSLFQIDGFFMCVTARQAKQLVLKGAIQLVLSPQNEVVLKKVIKFINRRKENKEVKVYKSDNLDSTMLNALYDEFAYKLNNTVYSNRLGGLGKKILAKKDKFNSLEIEEKCQVLYEILHIFQCNRISADLKLIDEKAGGVLTMSKNISSYENVCIVNQSPTGIYEQVIDLQNL

SEQ ID NO: 20166 - protein, 1354 aa, unidentified; identical to SEQ ID NO: 20163
  REGION 1..1354: note = Cas Enzyme sequence

SEQ ID NO: 20167 - protein, 1017 aa, unidentified
  REGION 1..1017: note = Cas Enzyme sequence
  REGION 691..697: note = misc_feature - Xaa can be any naturally occurring amino acid
RLLKEVVRENFSKDIYKKIFVVSDAKLANYPAYIGMTKVNGKKTALGGKQCSREDFLKYLNKTIVEKLPESEEKTYLKNEIETDQFLPRQVTKDNGVLPYQIHKYELQKILDNLSARIPVIAENKEKLIQLFTFRIPYYVGPLNKVKEENEQKYTWAVRKSEDKIYPWNFTDIIDVEASAEKFIKRMTNKCTYLIGEDVLPKDSLLYSKYRVLNELNNVRLDGKEISVELKQKIYEGVFCKRRKVRQKDLKNFLLREGIAERDVDITGIDGDFKASLTAYHDFKEKLSGIDLKQSEKEEIIQNIVLFGDDKKLLKQRLGKLFPKLTDKQKSSIAALSYHGWGRFSKKFLEEITIPAPETGEVWNLITALWETNENLSQLLGKKYQFSDQIKEYNEEQNNPTLSYKTVEEQYVSPAVKRQIWQTLQVIKEIKKVMGKEPERIFVEMARESQESKRTESRKKHLMDLYKVCKEEEKEIYEKLEKHEEQQLRKDKLFLYYTQRGHCMYSGERIEFDDLWDNTKYDIDHIYPQSKTMDDSLNNRVLVKKEYNSKKSDDYPINSDIQKKQGGFWKSLLDGNFITKEKYKRLVRKTELTSDELAGFIERQIVETRQSTKVVADLLKKVMPDSEIVYVKGRSVSKFRQDYDFVKVRDMNDLHHAKDAYLNIVVGNAYYTKFTKNAVWFIKENPGRSYXXXXXXXKMFIHDISRNGKVAWKAGDKGTIKTVRNVMNKNNILVTRRSYEEKGGLFDQQIMKKGKGQVPVKTSDERLHDINKYGGYNKAAGAYFMLVKSTDAKGNEQRTIEFVPIYKKDYIERSKENALEYLREIMKERKLSKPVILINKIKIDTLFKVDGFYMWLSGRTGKQLIFKGANELLLSDEETKILKKVIKFINRKIENKNVKIVAFDGINEAELTHLYDVFVSKLQNTIYKIRLGLQASTLIDNKGKFEKLSLEDKCTVLAEILHLFQCQSTMANLTLISGPAKAGSIKINNNITKCKQISIINQSVTGIYEKEIDLLKL

SEQ ID NO: 20168 - protein, 1325 aa, unidentified
  REGION 1..1325: note = Cas Enzyme sequence
MKGEYYLGLDMGSGSVGWAVTNEKYEILRAHGKTLWGVRLFDSAQTAEERRGFRTAKRRLDRRNWRIELLQKIFAEEVEKIDDGFFRRMKESRYWPEDKRDRQGKCPELPYALFADDDYTDKEYHKQFPTIYHLRKWLMETDETPDIRLIYLALHHMMKHRGHFLLNGNIEQVREFQTTFEQFLEAVRAEELGFSSEIGVERSKEIEAILKDRTLTKSAKKTKAVKAMRAETSCEKEWLGLITGGTAKLGNLFGEKQMDTLERPKLCFADAGYEEYAGEIEAELGEKYVLIEHAKAVYDWAVLADILQNYSSLSEAKVALYEKHKKDLKDLKKLVRENLSREEYQRLFAKKDEKANYYAYIKAPKQCSQEDFYGYLKKNILGKISDVTKASCMQKEMEMGTFLPKQTVKDNSVIPYQIHLYELNAILKNLEDKVPLLKENGEKIQKIFTFRIPYYVGPLNGIRKKGEKSNWAVRKEGKIYPWNFDEMVDLEASAEQFIRRMTNKCTYLPSEDVLPKYSLLYSKYEVLNELNNLRLDGEKISVEQKQKIYEEVFQKSRKVTQKKLKNYLVKEGITGKEVEITGIDGDFKSSLTAYHDFKEKLTNLSLNQAEKECIILNVTLFGDDKAILKQRLKKLFPELTEKQRDSISKLPYRGWGRLSKVFLEEMEAPAPETGEAWSIIRALWETNDNLMQLLSEKYLFASAIEEKNGNEQKKRDISYELVEELYVSPAVKRQIWQSLLIVKEICKVMGNPPKRVFIEMAREKTDQGRTSSRKKKLLELYKKCKAEEKDWIDEIEKRSDAEMRRDKLYLYYTQKGKCMYSGETIELEELWDNQKYDIDHIFPQSKVMDDSLDNRVLVKKKCNQMKEDKYPIDETVRKKMQPFWKSLVDAGLISEEKYKRLIRGNGFEPSELAGFISRQLVETRQSTKAAASILQQVIPDTQIVYVKAPTVSKFRKDFKFLKVREMNDYHHAKDAYLNIVVGNAYFVKFTSNPIHFIKENPGRSYNLKKMFEQERIERNGEIAWEGGNGTIVTVRKFMEKNNILVTRRSYEATGALFDQQIVKKGKGQVPIKSSDERLCDIQKYGGYNKEAGAYFVLAESEGKKGKKIRTIEYVPIRLKKEIQKSEENIIRYLEEERQLKNPRVLVPEIKIDTLFCVDGFYMWVSGRSGDQLLMQGANQLVLSQEETEILKKIVQYVERKKQNKELKIYDSDHLEEKKVMMLYETFLNKLTNTIYAKKLGAQAKTLTEKREKFKELCIEEKCIVLYEVLHFFQCQSAAADLKLIGGSGRAGILCLNKNITDCSRIEMIHQSPTGIYEQTVDLNAL

SEQ ID NO: 20169 - protein, 1340 aa, unidentified
  REGION 1..1340: note = Cas Enzyme sequence
MEQGYYLGLDMGTGSVGWAVTDSEYHVLRKHGKALWGVRLFESASTAEERRMFRTSRRRLDRRNWRIEILQEIFAEEISKKDPGFFLRMKESKYYPEDKRDINGNCPELPYALFVDDDFTDKDYHKKFPTIYHLRKMLMNTEETPDIRLVYLAIHHMMKHRGHFLLSGDINEIKEFGTTFSKLLENIKNEELDWNLELGKEEYAVVESILKDNMLNRSTKKTRLIKALKAKSICEKAVLNLLAGGTVKLSDIFGLEELNETERPKISFADNGYDDYIGEVENELGEQFYIIETAKAVYDWAVLVEILGKYTSISEAKVATYEKHKSDLQFLKKIVRKYLTKEEYKDIFVSTSDKLKNYSAYIGMTKINGKKVDLQSKRCSKEEFYDFIKKNVLKKLEGQPEYEYLKEELERETFLPKQVNRDNGVIPYQIHLYELKKILGNLRDKIDLIKENEDKLVQLFEFRIPYYVGPLNKIDDGKEGKFTWAVRKSNEKIYPWNFENVVDIEASAEKFIRRMTNKCTYLMGEDVLPKDSLLYSKYMVLNELNNVKLDGEKLSVELKQRLYTDVFCKYRKVTVKKIKNYLKCEGIISGNVEITGIDGDFKASLTAYHDFKEILTGTELAKKDKENIITNIVLFGDDKKLLKKRLNRLYPQITPNQLKKICALSYTGWGRFSKKFLEEITAPDPETGEVWNIITALWESNNNLMQLLSNEYRFMEEVETYNMGKQTKTLSYETVENMYVSPSVKRQIWQTLKIVKELEKVMKESPKRVFIEMAREKQESKRTESRKKQLIDLYKACKNEEKDWVKELGDQEEQKLRSDKLYLYYTQKGRCMYSGEVIELKDLWDNTKYDIDHIYPQSKTMDDSLNNRVLVKKKYNATKSDKYPLNENIRHERKGFWKSLLDGGFISKEKYERLIRNTELSPEELAGFIERQIVETRQSTKAVAEILKQVFPESEIVYVKAGTVSRFRKDFELLKVREVNDLHHAKDAYLNIVVGNSYYVKFTKNASWFIKENPGRTYNLKKMFTSGWNIERNGEVAWEVGKKGTIVTVKQIMNKNNILVTRQVHEAKGGLFDQQIMKKGKGQIAIKETDERLASIEKYGGYNKAAGAYFMLVESKDKKGKTIRTIEFIPLYLKNKIESDESIALNFLEKGRGLKEPKILLKKIKIDILFDVDGFKMWLSGRTGDRLLFKCANQLILDEKIIVTMKKIVKFIQRRQENRELKLSDKDGIDNEVLMEIYNTFVDKLENTVYRIRLSEQAKTLIDKQKEFERLSLEDKSSTLFEILHIFQCQSSAANLKMIGGPGKAGILVMNNNISKCNKISIINQSPTGIFENEIDLLKI

SEQ ID NO: 20170 - protein, 1340 aa, unidentified
  REGION 1..1340: note = Cas Enzyme sequence
MEQEYYLGLDMGTGSVGWAVTDSEYHVLRKHGKALWGVRLFESASTAEERRMFRTSRRRLDRRNWRIEILQEIFAEEISKKDPGFFLRMKESKYYPEDKRDINGNCPELPYALFVDDDFTDKDYHKKFPTIYHLRKMLMNTEETPDIRLVYLAIHHMMKHRGHFLLSGDINEIKEFGTTFSKLLENIKNEELDWNLELGKEEYAVVESILKDNMLNRSTKKTRLIKALKAKSICEKAVLNLLAGGTVKLSDIFGLEELNETERPKISFADNGYDDYIGEVENELGEQFYIIETAKAVYDWAVLVEILGKYTSISEAKVATYEKHKSDLQFLKKIVRKYLTKEEYKDIFVSTSDKLKNYSAYIGMTKINGKKVDLQSKRCSKEEFYDFIKKNVLKKLEGQPEYEYLKEELERETFLPKQVNRDNGVIPYQIHLYELKKILGNLRDKIDLIKENEDKLVQLFEFRIPYYVGPLNKIDDGKEGKFTWAVRKSNEKIYPWNFENVVDIEASAEKFIRRMTNKCTYLMGEDVLPKDSLLYSKYMVLNELNNVKLDGEKLSVELKQRLYTDVFCKYRKVTVKKIKNYLKCEGIISGNVEITGIDGDFKASLTAYHDFKEILTGTELAKKDKENIITNIVLFGDDKKLLKKRLNRLYPQITPNQLKKICALSYTGWGRFSKKFLEEITAPDPETGEVWNIITALWESNNNLMQLLSNEYRFMEEVETYNMGKQTKTLSYETVENMYVSPSVKRQIWQTLKIVKELEKVMKESPKRVFIEMAREKQESKRTESHKKQLIDLYKACKNEEKDWVKELGDQEEQKLRSDKLYLYYTQKGRCMYSGEVIELKDLWDNTKYDIDHIYPQSKTMDDSLNNRVLVKKKYNATKSDKYPLNENIRHERKGFWKSLLDGGFISKEKYERLIRNTELSPEELAGFIERQIVETRQSTKAVAEILKQVFPESEIVYVKAGTVSRFRKDFELLKVREVNDLHHAKDAYLNIVVGNSYYVKFTKNASWFIKENPGRTYNLKKMFTSGWNIERNGEVAWEVGKKGTIVTVKQIMNKNNILVTRQVHEAKGGLFDQQIMKKGKGQIAIKETDERLASIEKYGGYNKAAGAYFMLVESKDKKGKTIRTIEFIPLYLKNKIESDESIALNFLEKGRGLKEPKILLKKIKIDTLFDVDGFKMWLSGRTGDRLLFKCANQLILDEKIIVTMKKIVKFIQRRQENRELKLSDKDGIDNEVLMEIYNTFVDKLENTVYRIRLSEQAKTLIDKQKEFERLSLEDKSSTLFEILHIFQCQSSAANLKMIGGPGKAGILVMNNNISKCNKISIINQSPTGIFENEIDLLKI

SEQ ID NO: 20171 - protein, 1325 aa, unidentified
  REGION 1..1325: note = Cas Enzyme sequence
  REGION 1318..1324: note = misc_feature - Xaa can be any naturally occurring amino acid
MEQEYYLGLDMGTGSVGWAVTDSEYHVLRKHGKALWGVRLFESASTAEERRMFRTSRRRLDRRNWRIEILQEIFAEEISKKDPGFFLRMKESKYYPEDKRDINGNCPELPYALFVDDDFTDKDYHKKFPTIYHLRKMLMNTEETPDIRLVYLAIHHMMKHRGHFLLSGDINEIKEFGTTFSKLLENIKNEELDWNLELGKEEYAVVESILKDNMLNRSTKKTRLIKALKAKSICEKAVLNLLAGGTVKLSDIFGLEELNETERPKISFADNGYDDYIGEVENELGEQFYIIETAKAVYDWAVLVEILGKYTSISEAKVATYEKHKSDLQFLKKIVRKYLTKEEYKDIFVSTSDKLKNYSAYIGMTKINGKKVDLQSKRCSKEEFYDFIKKNVLKKLEGQPEYEYLKEELERETFLPKQVNRDNGVIPYQIHLYELKKILGNLRDKIDLIKENEDKLVQLFEFRIPYYVGPLNKIDDGKEGKFTWAVRKSNEKIYPWNFENVVDIEASAEKFIRRMTNKCTYLMGEDVLPKDSLLYSKYMVLNELNNVKLDGEKLSVELKQRLYTDVFCKYRKVTVKKIKNYLKCEGIISGNVEITGIDGDFKASLTAYHDFKEILTGTELAKKDKENIITNIVLFGDDKKLLKKRLNRLYPQITPNQLKKICALSYTGWGRFSKKFLEEITAPDPETGEVWNIITALWESNNNLMQLLSNEYRFMEEVETYNMGKQTKTLSYETVENMYVSPSVKRQIWQTLKIVKELEKVMKESPKRVFIEMAREKQESKRTESRKKQLIDLYKACKNEEKDWVKELGDQEEQKLRSDKLYLYYTQKGRCMYSGEVIELKDLWDNTKYDIDHIYPQSKTMDDSLNNRVLVKKKYNATKSDKYPLNENIRHERKGFWKSLLDGGFISKEKYERLIRNTELSPEELAGFIERQIVETRQSTKAVAEILKQVFPESEIVYVKAGTVSRFRKDFELLKVREVNDLHHAKDAYLNIVVGNSYYVKFTKNASWFIKENPGRTYNLKKMFTSGWNIERNGEVAWEVGKKGTIVTVKQIMNKNNILVTRQVHEAKGGLFDQQIMKKGKGQIAIKETDERLASIEKYGGYNKAAGAYFMLVESKDKKGKTIRTIEFIPLYLKNKIESDESIALNFLEKGRGLKEPKILLKKIKIDTLFDVDGFKMWLSGRTGDRLLFKCANQLILDEKIIVTMKKIVKFIQRRQENRELKLSDKDGIDNEVLMEIYNTFVDKLENTVYRIRLSEQAKTLIDKQKEFERLSLEDKSSTLFEILHIFQCQSSAANLKMIGGPGKAGILVMNNNISKCXXXXXXXL

SEQ ID NO: 20172 - protein, 1340 aa, unidentified
  REGION 1..1340: note = Cas Enzyme sequence
MEQEYYLGLDMGTGSVGWAVTDSEYHVLRKHGKALWGVRLFESASTAEERRMFRTSRRRLDRRNWRIEILQEIFAEEISKKDPGFFLRMKESKYYPEDKRDINGNCPELPYALFVDDDFTDKDYHKKFPTIYHLRKMLMNTEETPDIRLVYLAIHHMMKHRGHFLLSGDINEIKEFGTTFSKLLENIKNEELDWNLELGKEEYAVVESILKDNMLNRSTKKTRLIKALKAKSICEKAVLNLLAGGTVKLSDIFGLEELNETERPKISFADNGYDDYIGEVENELGEQFYIIETAKAVYDWAVLVEILGKYTSISEAKVATYEKHKSDLQFLKKIVRKYLTKEEYKDIFVSTSDKLKNYSAYIGMTKINGKKVDLQSKRCSKEEFYDFIKKNVLKKLEGQPEYEYLKEELERETFLPKQVNRDNGVIPYQIHLYELKKILGNLRDKIDLIKENEDKLVQLFEFRIPYYVGPLNKIDDGKEEKFTWAVRKSNEKIYPWNFENVVDIEASAEKFIRRMTNKCTYLMGEDVLPKDSLLYSKYMVLNELNNVKLDGEKLSVELKQRLYTDVFCKYRKVTVKKIKNYLKCEGIISGNVEITGIDGDFKASLTAYHDFKEILTGTELAKKDKENIITNIVLFGDDKKLLKKRLNRLYPQITPNQLKKICALSYTGWGRFSKKFLEEVTAPDPETGEVWNIITALWESNNNLMQLLSNEYRFMEEVETYNMGKQTKTLSYETVENMYVSPSVKRQIWQTLKIVKELEKVMKESPKRVFIEMAREKQESKRTESRKKQLIDLYKACKNEEKDWVKELGDQEEQKLRSDKLYLYYTQKGRCMYSGEVIELKDLWDNTKYDIDHIYPQSKTMDDSLNNRVLVKKKYNATKSDKYPLNENIRHERKGFWKSLLDGGFISKEKYERLIRNTELSPEELAGFIERQIVETRQSTKAVAEILKQVFPESEIVYVKAGTVSRFRKDFELLKVREVNDLHHAEDAYLNIVVGNSYYVKFTKNASWFIKENPGRTYNLKKMFTSGWNIERNGEVAWEAGKKGTIVTVKQIMNKNNILVTRQVHEAKGGLFDQQIMKKGKGQIAIKETDERLASIEKYGGYNKAAGAYFMLVESKDKKGKTIRTIEFIPLYLKNKIESDESIALNFLEKGRGLKEPKILLKKIKIDTLFDVDGFKMWLSGRTGDRLLFKCANQLILDEKIIVTMKKIVKFIQRRQENRELKLSDKDGIDNEVLMEIYNTFVDKLENTVYRIRLSEQAKTLIDKQKEFERLSLEDKSSTLFEILHIFQCQSSAANLKMIGGPGKAGILVMNNNISKCNKISIINQSPTGIFENEIDLLKI

SEQ ID NO: 20173 - protein, 1341 aa, unidentified
  REGION 1..1341: note = Cas Enzyme sequence
MGKGYYVGLDMGTGSVGWAVTDESYQILRRHGKAMWGVRLFESAKTAEERRMFRTGRRRLDRRGWRIEILQEIFAEEISRVDPGFFLRMKESKYYPEDKRDIQGNCPELPYTLFVDKTFTDKDFHKKYPTIYHLRKMLMETEDTPDMRLVYLALHHMMKHRGHFLLSGDISQVTEFKNTFNQFIENIRNEEMDFEIELDESAVQMIEETLKDKNLTRSAKKSKLVKGLNAKNVRDKAFLTLLSGGTVKLSDLFGMEELNEGERPKISFADNGYEEYAAVVEMELGELYYIVESAKAVYDWAILSDILGGSTSISDAKVRAYEKHKADLKYLKAVVKEYFPKEVYNAVFVESSDKLNNYPAYIGMTKKNGKKVSLEGKRCSREEFMDFLKKNIVIKLPDEETKMYLQSELEKDSFLPKQVNKDNGVIPYQVHKYELKKILDNLGDKIPFLKENAEKIEKLFSFRIPYYVGPLRTGNGENSKFAWAERKSTEKIYPWNFENVINVEQSAENFIRRMTNKCTYLIGEDVLPKDSLLYSKFMVLNELNNLRLDGQKISVELKQKIYRDVFCRSRKVTQKKLKSYLIREGIAGKNVELTGIDGDFKGSLTAYHDFKEKLTGVELTQKEKEEIILNIVLFGDDKKLLKQRLKKKFPQLTEKQINTVTALSYKGWGRLSKKLLEEVTVPAPETGEVWNIITALWETNDNFMQLLSKEYQFSDRIEELNEEKADPEVSYQTIEDLYVSPAVKRQIWQTLQIVQEIEKVMGEKPKRVFVEMAREKQENKRMESRKKTLSDLYKKCKKEEPEWIETLCTSLEKHEEHQLRSDKLYLYYTQKGRCMYSGEPIDLEDLWDNTKYDIDHIYPQSKTMDDSLKNRVLVKKEYNAKKSDTYPIAADIQKKMMPFWKSLLTGGFIPKEKYDRLVRNNPLDANELAGFIERQIVETRQSTKAVAEILKKILPDTEIVYVKAKTVSKFRQDFDFIKVRDMNDLHHAKDAYLNIVVGNVYFVKFTKNAAWFVKENPGRTYNLEKMFIWDVARDGEIAWKAGKSGSIVQVRAMMEKNHILLTRRSYEVKGGLFDQQIVKKGKGQVPVKESDERLRDIGKYGGYNKAAGAYFMLVSSKDKKGKEQRTIEFVPIYLKDRVEKDMESARNYLMEERGLREPKILIKKIKIDTLFKVDGFYMWLSGRTSNQLIFKGANQLILSKEDMKTLKKVVKYIQRQKEDKNVKISVRDGITEEELLKLYETFLDKIRHSIYGVRLSSQEKTLVNGKEKFIDLSVEAKCQVLYEILHLFQCQSGASNLKMIGGPASAGILVMNNNISKCKNISIVNQSPTGIYEKEIDLLRV

SEQ ID NO: 20174 - protein, 1318 aa, unidentified
  REGION 1..1318: note = Cas Enzyme sequence
MKGEYYLGLDMGSSSVGWAVTNEKYEILRAHGKTLWGVRLFDSAQTAEERRGFRTAKRRLDRRNWRIELLQKIFAEEVEKIDDGFFRRMKESRYWPEDKRDRRGKCPELPYALFADDDYTDKEYHKQFPTIYHLRKWLMETDETPDIRLIYLALHHMMKHRGHFLLNGNIEQVREFQTTFEQFLEAVRAEELGFSSEIGVERSKEIEAILKDRTLTKSAKKTKAVKAMRAETSCEKEWLGLITGGTAKLGNLFGEKQMDTLERPKLCFADAGYEEYAGEIEAELGEKYALIEHAKAVYDWAVLADILQNYSSLSEAKVALYEKHKKDLKDLKKLVRENLSREEYQRLFAKKDEKTNYYAYIKAPKQCSQEDFYGYLKKNILGKISDVTKASCMQKEMEMGTFLPKQTVKDNSVIPYQIHLYELNAILKNLEDKVPLLKENGEKIQKIFTFRIPYYVGPLNGIRKKGEKSNWAVRKEGKIYPWNFDEMVDLEASAEQFIRRMTNKCTYLPSEDVLPKYSLLYSKYEVLNELNNLRLDGEKISVEQKQKIYEEVFQKSRKVTQKKLKNYLVKEGITGKEVEITGIDGDFKSSLTAYHDFKEKLTNLSLNQAEKECIILNVTLFGDDKAILKQRLKKLFPELTEKQRDSISKLPYRGWGRLSKVFLEETEAPAPETGEAWSIIRALWETNDNLMQLLSEKYLFASAIEEKNGNEQKKRDISYELVEELYVSPAVKRQIWQSLLIVKEICKVMGNPPKRVFIEMAREKTDQGRTSSRKKKLLELYKKCKAEEKDWIDEIEKRSDAEMRRDKLYLYYTQKGKCMYSGETIELEELWDNQKYDIDHIFPQSKVMDDSLDNRVLVKKKCNQMKEDKYPIDETVRKKMQPFWKSLVDAGLISEEKYKRLIRGNGFEPSELAGFISRQLVETRQSTKAAASILQQVIPDTQIVYVKAPTVSKFRKDFKFLKVREMNDYHHAKDAYLNIVVGNAYFVKFTSNPIHFIKENPGRSYNLKKMFEQERIERNGEIAWEGGNGTIVTVRKFMEKNNILVTRRSYEATGALFDQQIVKKGKGQVPIKSSDERLCDIQKYGGYNKEAGAYFVLAESEGKKGKKIRTIEYVPIRLKKEIQKSEENIIRYLEEERQLKNPRVLVPEIKIDTLFCVDGFYMWVSGRSGDQLLMQGANQLVLSQEETEILKKIVQYVERKKQNKELKIYDSDHLEEKKVVMLYETFLNKLTNTVYAKTLTEKREKFKELCIEEKCIVLYEILHFFQCQSVTADLKLIGGSGRAGILYLNKNITDCSRIEMIHQSPTGIYEQAVDLNAL

SEQ ID NO: 20175 - protein, 1325 aa, unidentified
  REGION 1..1325: note = Cas Enzyme sequence
MKGEYYLGLDMGSSSVGWAVTNEKYEILRAHGKTLWGVRLFDSAQTAEERRGFRTAKRRLDRRNWRIELLQKIFAEEVEKIDDGFFRRMKESRYWPEDKRDRQGKCPELPYALFADDDYTDKEYHKQFPTIYHLRKWLMETDETPDIRLIYLALHHMMKHRGHFLLNGNIEQVREFQTTFEQFLEAVRAEELGFSSEIGVERSKEIEAILKDRTLTKSAKKTKAVKAMRAETSCEKEWLGLITGGTAKLGNLFGEKQMDTLERPKLCFADAGYEEYAGEIEAELGEKYVLIEHAKAVYDWAVLADILQNYSSLSEAKVALYEKHKKDLKDLKKLVRENLSREEYQRLFAKKDEKANYYAYIKAPKQCSQEDFYGYLKKNILGKISDVTKASCMQKEMEMGTFLPKQTVKDNSVIPYQIHLYELNAILKNLEDKVPLLKENGEKIQKIFTFRIPYYVGPLNGIRKKGEKSNWAVRKEGKIYPWNFDEMVDLEASAEQFIRRMTNKCTYLPSEDVLPKYSLLYSKYEVLNELNNLRLDGEKISVEQKQKIYEEVFQKSRKVTQKKLKNYLVKEGITGKEVEITGIDGDFKSSLTAYHDFKEKLTNLSLNQAEKECIILNVTLFGDDKAILKQRLKKLFPELTEKQRDSISKLPYRGWGRLSKVFLEEMEAPAPETGEAWSIIRALWETNDNLMQLLSEKYLFASAIEEKNGNEQKKRDISYELVEELYVSPAVKRQIWQSLLIVKEICKVMGNPPKRVFIEMAREKTDQGRTSSRKKKLLELYKKCKAEEKDWIDEIEKRSDAEMRRDKLYLYYTQKGKCMYSGETIELEELWDNQKYDIDHIFPQSKVMDDSLDNRVLVKKKCNQMKEDKYPIDETVRKKMQPFWKSLVDAGLISEEKYKRLIRGNGFEPSELAGFISRQLVETRQSTKAAASILQQVIPDTQIVYVKAPTVSKFRKDFKFLKVREMNDYHHAKDAYLNIVVGNAYFVKFTSNPIHFIKENPGRSYNLKKMFEQERIERNGEIAWESGNGTIATVRKFMEKNNILVTRRSYEATGALFDQQIVKKGKGQVPIKSSDERLCDIQKYGGYNKEAGACFVLAESEGKKGKKIRTIEYVPIRLKKEIQKSEENIIRYLEEERQLKNPRVLVPEIKIDTLLCVDGFYMWVSGRSGDQLLMQGANQLVLSQEETEILKKIVQYVERKKQNKELKIYDSDHLEEKKVVMLYETFLNKLTNTVYAKKLGAQAKTLTEKREKFKELCIEEKCIVLYEILHFFQCQSVTADLKLIGGSGRAGILYLNKNITDCSRIEMIHQSPTGIYEQTVDLNAL

SEQ ID NO: 20176 - protein, 1325 aa, unidentified
  REGION 1..1325: note = Cas Enzyme sequence
MKGEYYLGLDMGSSSVGWAVTNEKYEILRAHGKTLWGVRLFDSAQTAEERRGFRTAKRRLDRRNWRIELLQKIFAEEVEKIDDGFFRRMKESRYWPEDKRDRQGKCPELPYALFADDDYTDKEYHKQFPTIYHLRKWLMETDETPDIRLIYLALHHMMKHRGHFLLNGNIEQVREFQTTFEQFLEAVRAEELGFSSEIGVERSKEIEAILKDRTLTKSAKKTKAVKAMRAETSCEKEWLGLITGGTAKLGNLFGEKQMDTLERPKLCFADAGYEEYAGEIEAELGEKYVLIEHAKAVYDWAVLADILQNYSSLSEAKVALYEKHKKDLKDLKKLVRENLSREEYQRLFAKKDEKANYYAYIKAPKQCSQEDFYGYLKKNILGKISDVTKASCMQKEMEMGTFLPKQTVKDNSVIPYQIHLYELNAILKNLEDKVPLLKENGEKIQKIFTFRIPYYVGPLNGIRKKGEKSNWAVRKEGKIYPWNFDEMVDLEASAEQFIRRMTNKCTYLPSEDVLPKYSLLYSKYEVLNELNNLRLDGEKISVEQKQKIYEEVFQKSRKVTQKKLKNYLVKEGITGKEVEITGIDGDFKSSLTAYHDFKEKLTNLSLNQAEKECIILNVTLFGDDKAILKQRLKKLFPELTEKQRDSISKLPYRGWGRLSKVFLEEMEAPAPETGEAWSIIRALWETNDNLMQLLSEKYLFASAIEEKNGNEQKKRDISYELVEELYVSPAVKRQIWQSLLIVKEICKVMGNPPKRVFIEMAREKTDQGRTSSRKKKLLELYKKCKAEEKDWIDEIEKRSDAEMRRDKLYLYYTQKGKCMYSGETIELEELWDNQKYDIDHIFPQSKVMDDSLDNRVLVKKKCNQMKEDKYPIDETVRKKMQPFWKSLVDAGLISEEKYKRLIRGNGFEPSELAGFISRQLVETRQSTKAAASILQQVIPDTQIVYVKAPTVSKFRKDFKFLKVREMNDYHHAKDAYLNIVVGNAYFVKFTSNPIHFIKENPGRSYNLKKMFEQERIERNGEIAWEGGNGTIVTVRKFMEKNNILVTRRSYEATGALFDQQIVKKGKGQVPIKSSDERLCDIQKYGGYNKEAGAYFVLAESEGKKGKKIRTIEYVPIRLKKEIQKSEENIIRYLEEERQLKNPRVLVPEIKIDTLFCVDGFYMWVSGRSGDQLLMQGANQLVLSQEETEILKKIVQYVERKKQNKELKIYDSDHLEEKKVVMLYETFLNKLTNTVYAKKLGAQAKTLTEKREKFKELCIEEKCIVLYEVLHFFQCQSAAADLKLIGGSGRAGILCLNKNITDCSRIEMIHQSPTGIYEQTVDLNAL

SEQ ID NO: 20177 - protein, 1343 aa, unidentified
  REGION 1..1343: note = Cas Enzyme sequence
MFMGKGYYVGLDMGTGSVGWAVTDESYQIFRRHGKAMWGVRLFESAKTAEERRMFRTGRRRLDRRGWRIEILQEIFAEEISRVDPGFFLRMKESKYYPEDKRDIQGNCPELPYTLFVDKTFTDKDFHKKYPTIYHLRKMLMETEDTPDMRLVYLALHHMMKHRGHFLLSGDISQVTEFKNTFNQFIENIRNEEMDFEIELDESAVQMIEETLKDKNLTRSAKKAKLVKGLNAKNVRDKAFLTLLSGGTVKLSDLFGMEELNEGERPKISFADNRYEEYAAVVEMELGELYYIVESAKAVYDWAILSDILGGSTSVSDAKVRAYEKHKADLKYLKAVVKEYFPKEVYNAVFVESSDKLNNYPAYIGMTKKNGKKVSLEGKRCSREEFMDFLKKNIVVKLPDEETKMYLQSELEKDSFLPKQVNKDNGVIPYQVHKYELKKILDNLGDKIPFLKENAEKIEKLFSFRIPYYVGPLRTGNGENSKFAWAERKSTEKIYPWNFENVIDVEQSAENFIRRMTNKCTYLIGEDVLPKDSLLYSKFMVLNELNNLRLDGQKISVELKQKIYRDVFCRSRKVTQKKLKSYLIREGIAGKNVELTGIDGDFKGSLTAYHDFKEKLTGVELTQKEKEEIILNIVLFGDDKKLLKQRLKKKFPQLTEKQINTVTALSYKGWGRLSKKLLEEVTVPAPETGEVWNIITALWETNDNFMQLLGKEYQFSDRIEEFNEEKADPEVSYQTIEDLYVSPAVKRQIWQTLQIVQEIEKVMGEKPKRVFVEMAREKQENKRMESRKKTLSDLYKKCKKEEPEWIETLCTSLEKHEEHQLRSDKLYLYYTQKGRCMYSGEPIDLEDLWDNTKYDIDHIYPQSKTMDDSLKNRVLVKKEYNAKKSDTYPIAADIQKKMMPFWKSLLTGGFIPKEKYDRLVRNNPLDANELAGFIERQIVETRQSTKAVAEILKKILPDTEIVYVKAKTVSKFRQDFDFIKVRDMNDLHHAKDAYLNIVVGNVYFVKFTKNAGWFVKENPGRTYNLEKMFIWDVARDGEIAWKAGKSGSIVQVRAMMEKNHILVTRRSYEVKGGLFDQQILKKGKGQVPVKESDERLRDIGKYGGYNKAAGAYFMLVSSKDKKGKEQRTIEFVPIYLKDRVEKDMESARNYLMEERGLREPKILIKKIKIDTLFKVDGFYMWLSGRTSNQLIFKGANQLILSKEDMKTLKKVVKYIQRQKEDKNVKISVRDGITEEELLKLYETFLDKIRHSIYGVRLSSQEKTLVNGKEKFIDLSVEAKCQVLYEILHLFQCQSGASNLKMIGGPASAGILVMNNNISKCKNISIVNQSPTGIYEKEIDLLRV

SEQ ID NO: 20178 - protein, 1325 aa, unidentified
  REGION 1..1325: note = Cas Enzyme sequence
MKGEYYLGLDMGSSSVGWAVTNEKYEILRAHGKTLWGVRLFDSAQTAEERRGFRTAKRRLDRRNWRIELLQKIFAEEVEKIDDGFFRRMKESRYWPEDKRDRQGKCPELPYALFADDDYTDKEYHKQFPTIYHLRKWLMETDETPDIRLIYLALHHMMKHRGHFLLNGNIEQVREFQTTFEQFLEAVRAEELGFSSEIGVERSKEIEAILKDRTLTKSAKKTKAVKAMRAETSCEKEWLGLITGGTAKLGNLFGEKQMDTLERPKLCFADAGYEEYAGEIEAELGEKYVLIEHAKAVYDWAVLADILQNYSSLSEAKVALYEKHKKDLKDLKKLVRENLSREEYQRLFAKKDEKANYYAYIKAPKQCSQEDFYGYLKKNILGKISDVTKASCMQKEMEMGTFLPKQTVKDNSVIPYQIHLYELNAILKNLEDKVPLLKENGEKIQKIFTFRIPYYVGPLNGIRKKGEKSNWAVRKEGKIYPWNFDEMVDLEASAEQFIRRMTNKCTYLPSEDVLPKYSLLYSKYEVLNELNNLRLDGEKISVEQKQKIYEEVFQKSRKVTQKKLKNYLVKEGITGKEVEITGIDGDFKSSLTAYHDFKEKLTNLSLNQAEKECIILNVTLFGDDKAILKQRLKKLFPELTEKQRDSISKLPYRGWGRLSKVFLEETEAPAPETGEAWSIIRALWETNDNLMQLLSEKYLFASAIEEKNGNEQKKRDISYELVEELYVSPAVKRQIWQSLLIVKEICKVMGNPPKRVFIEMAREKTDQGRTSSRKKKLLELYKKCKAEEKDWIDEIEKRSDAEMRRDKLYLYYTQKGKCMYSGETIELEELWDNQKYDIDHIFPQSKVMDDSLDNRVLVKKKCNQMKEDKYPIDETVRKKMQPFWKSLVDAGLISEEKYKRLIRGNGFEPSELAGFISRQLVETRQSTKAAASILQQVIPDTQIVYVKAPTVSKFRKDFKFLKVREMNDYHHAKDAYLNIVVGNAYFVKFTSNPIHFIKENPGRSYNLKKMFEQERIERNGEIAWEGGNGTIVTVRKFMEKNNILVTRRSYEATGALFDQQIVKKGKGQVPIKSSDERLCDIQKYGGYNKEAGAYFVLAESEGKKGKKIRTIEYVPIRLKKEIQKSEENIIRYLEEERQLKNPRVLVPEIKIDTLFCVDGFYMWVSGRSGDQLLMQGANQLVLSQEETEILKKIVQYVERKKQNKELKIYDSDHLEEKKVMLLYETFLNKLTNTVYAKKLGAQAKTLTEKREKFKELCIEEKCIVLYEILHFFQCQSVTADLKLIGGSGRAGILYLNKNITDCSRIEMIHQSPTGIYEQAVDLNAL

SEQ ID NO: 20179 - protein, 1325 aa, unidentified
  REGION 1..1325: note = Cas Enzyme sequence
MKGEYYLGLDMGSSSVGWAVTNEKYEILRAHGKTLWGVRLFDSAQTAEERRGFRTAKRRLDRRNWRIELLQKIFAEEVEKIDDGFFRRMKESRYWPEDKRDRRGKCPELPYALFADDDYTDKEYHKQFPTIYHLRKWLMETDETPDIRLIYLALHHMMKHRGHFLLNGNIEQVREFQTTFEQFLEAVRAEELGFSSEIGVERSKEIEAILKDRTLTKSAKKTKAVKAMRAETSCEKEWLGLITGGTAKLGNLFGEKQMDTLERPKLCFADAGYEEYAGEIEAELGEKYVLIEHAKAVYDWAVLADILQNYSSLSEAKVALYEKHKKDLKDLKKLVRENLSREEYQRLFAKKDEKANYYAYIKAPKQCSQEDFYGYLKKNILGKISDVTKVSCMQKEMEMGTFLPKQTVKDNSVIPYQIHLYELNAILKNLEDKVPLLKENGEKIQKIFTFRIPYYVGPLNGIRKKGEKSNWAVRKEGKIYPWNFDEMVDLEASAEQFIRRMTNKCTYLPSEDVLPKYSLLYSKYEVLNELNNLRLDGEKISVEQKQKIYEEVFQKSRKVTQKKLKNYLVKEGITGKEVEITGIDGDFKSSLTAYHDFKEKLTNLSLNQAEKECIILNVTLFGDDKAILKQRLKKLFPESTEKQRDSISKLPYRGWGRLSKVFLEETEAPAPETGEAWSIIRALWETNDNLMQLLSEKYLFASAIEEKNGNEQKKRDISYELVEELYVSPAVKRQIWQSLLIVKEICKVMGNPPKRVFIEMAREKTDQGRTSSRKKKLLELYKKCKAEEKDWIDEIEKRSDAEMRRDKLYLYYTQKGKCMYSGETIELEELWDNQKYDIDHIFPQSKVMDDSLDNRVLVKKKCNQMKEDKYPIDETVRKKMQPFWKSLVDAGLISEEKYKRLIRGNGFEPSELAGFISRQLVETRQSTKAAASILQQVIPDTQIVYVKAPTVSKFRKDFKFLKIREMNDYHHAKDAYLNIVVGNAYFVKFTSNPIHFIKENPGRSYNLKKMFEQEKIERNGEIAWEGGNGTIVTVRKFMEKNNILVTRRSYEATGALFDQQIVKKGKGQVPIKSGDERLCDIQKYGGYNKEAGAYFVLAESEGKKGKKIRTIEYVPIRLKKEIQKSEENIIRYLEEERQLKNPRVLVPEIKIDTLFCVDGFYMWVSGRSGDQLLMQGANQLVLSQEETEILKKIVQYVERKKQNKELKIYDSDHLEEKKVVMLYETFLNKLTNTVYAKKLGAQAKTLTEKREKFKELCIEEKCIVLYEILHFFQCQSVTADLKLIGGSGRAGILYLNKNITDCSRIEMIHQSPTGIYEQAVDLNAL

SEQ ID NO: 20180 - protein, 1341 aa, unidentified
  REGION 1..1341: note = Cas Enzyme sequence
MGKGYYVGLDMGTGSVGWAVTDESYQILRRHGKAMWGVRLFESAKTAEERRMFRTGRRRLDRRGWRIEILQEIFAEEISRVDPGFFLRMKESKYYPEDKRDIEGNCPELPYTLFVDKTFTDKDFHKKYPTIYHLRKMLMETEDTLDIRLVYLALHHMMKHRGHFLLSGDISQVTKFKNTFNQFIENIRNEEMDFEIELDESAVQMIEETLKDKNLTRSAKKSKLVKGLNAKNVRDKAFLTLLSGGTVKLSDLFGMEELNEGERPKISFADNGYEEYAAVVEMELGELYYIVESAKAVYDWAILSDILGGSTSISDAKVRAYEKHKADLKYLKAVVKEYFPKEVYNAVFVESSDKLNNYPAYIGMTKKKGKKVSLEGKRCSREEFMDFLKKNIVVKLPDEEAKMYLQSELEKDSFLPKQVNKDNGVIPYQVHKYELKKILDNLGDKIPFLKESAEKIEKLFSFRIPYYVGPLRTGNGENSKFAWAERKSTEKIYPWNFENVIDVEQSAENFIRRMTNKCTYLIGEDVLPKDSLLYSKFMVLNELNNLRLDGQKISVELKQKIYRDVFCRSRKVTQKKLKSYLIREGIAGKNVELTGIDGDFKGSLTAYHDFKEKLTDVELTQKEKEEIILNIVLFGDDKKLLKQRLKKKFPQLTEKQINTVTALSYKGWGRLSKKLLEEVTVPAPETGEVWNIITALWETNDNFMQLLSKEYQFSDRIEEFNEEKADPEVSYQTIEDLYVSPAVKRQIWQTLQIIQEIEKVMGEKPKRVFVEMAREKQENKRTESRKKMLSDLYKKCKKEEPEWIEALCTSLEKHEEHQLRSDKLYLYYTQKGRCMYSGEPIDLEDLWDNTKYDIDHIYPQSKTMDDSLKNRVLVKKEYNAKKSDTYPIAADIQKKMMPFWKSLLTGGFIPKEKYDRLIRNNPLDANELAGFIERQIVETRQSTKAVAEILKKILPDTEIVYVKAKTVSKFRQDFDFIKVRDMNDLHHAKDAYLNIVVGNVYFVKFTKNAGWFVKENPGRTYNLEKMFIWDVARDGEIAWKAGKSGSIVQVRAMMEKNHILVTRRSYEVKGGLFDQQILKKGKGQVPVKESDERLRDIGKYGGYNKAAGAYFMLVSSKDKKGKEQRTIEFVPIYLKDRVEKDMESARNYLMEERGLREPKILIKKIKIDTLFKVDGFYMWLSGRTSNQLIFKGANQLILSKEDMKTLKKVVKYIQRQKEDKNVKISVRDGITEEELLKLYETFLDKIRHSIYGVRLSSQEKTLVNGKEKFIDLSVEAKCQVLYEILHLFQCQSGASNLKMIGGPASAGILVMNNNISKCKNISIVNQSPTGIYEKEIDLLRV

SEQ ID NO: 20181 - protein, 1325 aa, unidentified; identical to SEQ ID NO: 20176
  REGION 1..1325: note = Cas Enzyme sequence

SEQ ID NO: 20182 - protein, 1325 aa, unidentified
  REGION 1..1325: note = Cas Enzyme sequence
MKGEYYLGLDMGSSSVGWAVTNEKYEILRAHGKTLWGVRLFDSAQTAEERRGFRTAKRRLDRRNWRIELLQKIFAEEVEKIDDGFFRRMKESRYWPEDKRDRQGKCPELPYALFADDDYTDKEYHKQFPTIYHLRKWLMETDETPDIRLIYLALHHMMKHRGHFLLNGNIEQVREFQTTFEQFLEAVRAEELGFSSEIGVERSKEIEAILKDRTLTKSAKKTKAVKAMRAETSCEKEWLGLITGGTAKLGNLFGEKQMDTLERPKLCFADAGYEEYAGEIEAELGEKYVLIEHAKAVYDWAVLADILQNYSSLSEAKVALYEKHKKDLKDLKKLVRENLSREEYQRLFAKKDEKANYYAYIKAPKQCSQEDFYGYLKKNILGKISDVTKASCMQKEMEMGTFLPKQTVKDNSVIPYQIHLYELNAILKNLEDKVPLLKENGEKIQKIFTFRIPYYVGPLNGIRKKGEKSNWAVRKEGKIYPWNFDEMVDLEASAEQFIRRMTNKCTYLPSEDVLPKYSLLYSKYEVLNELNNLRLDGEKISVEQKQKIYEEVFQKSRKVTQKKLKNYLVKEGITGKEVEITGIDGDFKSSLTAYHDFKEKLTNLSLNQAEKECIILNVTLFGDDKAILKQRLKKLFPELTEKQRDSISKLPYRGWGRLSKVFLEEMEAPAPETGEAWSIIRALWETNDNLMQLLSEKYLFASAIEEKNGNEQKKRDISYELVEELYVSPAVKRQIWQSLLIVKEICKVMGNPPKRVFIEMAREKTDQGRTSSRKKKLLELYKKCKAEEKDWIDEIEKRSDAEMRRDKLYLYYTQKGKCMYSGETIELEELWDNQKYDIDHIFPQSKVMDDSLDNRVLVKKKCNQMKEDKYPIDETVRKKMQPFWKSLVDAGLISEEKYKRLIRGNGFEPSELAGFISRQLVETRQSTKAAASILQQVIPDTQIVYVKAPTVSKFRKDFKFLKVREMNDYHHAKDAYLNIVVGNAYFVKFTSNPIHFIKENPGRSYNLKKMFEQERIERNGEIAWEGGNGTIVTVRKFMEKNNILVTRRSYEATGALFDQQIVKKGKGKVPIKSSDERLCDIQKYGGYNKEAGAYFVLAESEGKKGKKIRTIEYVPIRLKKEIQKSEENIIRYLEEERQLKNPRVLVPEIKIDTLFCVDGFYMWVSGRSGDQLLMQGANQLVLSQEETEILKKIVQYVERKKQNKELKIYDSDHLEEKKVMLLYETFLNKLTNTVYAKKLGAQAKTLTEKREKFKELCIEEKCIVLYEILHFFQCQSVTADLKLIGGSGRAGILYLNKNITDCSRIEMIHQSPTGIYEQAVDLNAL

SEQ ID NO: 20183 - protein, 1325 aa, unidentified
  REGION 1..1325: note = Cas Enzyme sequence
MKGEYYLGLDMGSSSVGWAVTNEKYEILRAHGKTLWGVRLFDSAQTAEERRGFRTAKRRLDRRNWRIELLQKIFAEEVEKIDDGFFRRMKESRYWPEDKRDRQGKCPELPYALFADDDYTDKEYHKQFPTIYHLRKWLMETDETPDIRLIYLALHHMMKHRGHFLLNGNIEQVREFQTTFEQFLEAVRAEELGFSSEIGVERSKEIEAILKDRTLTKSAKKTKAVKAMRAETSCEKEWLGLITGGTAKLGNLFGEKQMDTLERPKLCFADAGYEEYAGEIEAELGEKYVLIEHAKAVYDWAVLADILQNYSSLSEAKVALYEKHKKDLKDLKKLVRENLSREEYQRLFAKKDEKANYYAYIKAPKQCSQEDFYGYLKKNILGKISDVTKASCMQKEMEMGTFLPKQTVKDNSVIPYQIHLYELNAILKNLEDKVPLLKENGEKIQKIFTFRIPYYVGPLNGIRKKGEKSNWAVRKEGKIYPWNFDEMVDLEASAEQFIRRMTNKCTYLPSEDVLPKYSLLYSKYEVLNELNNLRLDGEKISVEQKQKIYEEVFQKSRKVTQKKLKNYLVKEGITGKEVEITGIDGDFKSSLTAYHDFKEKLTNLSLNQAEKECIILNVTLFGDDKAILKQRLKKLFPELTEKQRDSISKLPYRGWGRLSKVFLEETEAPAPETGEAWSIIRALWETNDNLMQLLSEKYLFASAIEEKNGNEQKKRDISYELVEELYVSPAVKRQIWQSLLIVKEICKVMGNPPKRVFIEMAREKTDQGRTSSRKKKLLELYKKCKAEEKDWIDEIEKRSDAEMRRDKLYLYYTQKGKCMYSGETIELEELWDNQKYDIDHIFPQSKVMDDSLDNRVLVKKKCNQMKEDKYPIDETVRKKMQPFWKSLVDAGLISEEKYKRLIRGNGFEPSELAGFISRQLVETRQSTKAAASILQQVIPDTQIVYVKAPTVSKFRKDFKFLKVREMNDYHHAKDAYLNIVVGNAYFVKFTSNPIHFIKENPGRSYNLKKMFEQERIERNGEIAWEGGNGTIVTVRKFMEKNNILVTRRSYEATGALFDQQIVKKGKGQVPIKSSDERLCDIQKYGGYNKEAGAYFVLAESEGKKGKKIRTIEYVPIRLKKEIQKSEENIIRYLEEERQLKNPRVLVPEIKIDTLFCVDGFYMWVSGRSGDQLLMQGANQLVLSQEETEILKKIVQYVERKKQNKELKIYDSDHLEEKKVVMLYETFLNKLTNTVYAKKLGAQAKTLTEKREKFKELCIEEKCIVLYEVLHFFQCQSAAADLKLIGGSGRAGILCLNKNITDCSRIEMIHQSPTGIYEQTVDLNAL

SEQ ID NO: 20184 - protein, 1325 aa, unidentified
  REGION 1..1325: note = Cas Enzyme sequence
MKGEYYLGLDMGSSSVGWAVTNEKYEILRAHGKTLWGVRLFDSAQTAEERRGFRTAKRRLDRRNWRIELLQKIFAEEVEKIDDGFFRRMKESRYWPEDKRDRQGKCPELPYALFADDDYTDKEYHKQFPTIYHLRKWLMETDETPDIRLIYLALHHMMKHRGHFLLNGNIEQVREFQTTFEQFLEAVRAEELGFSSEIGVERSKEIEAILKDRTLTKSAKKTKAVKAMRAETSCEKEWLGLITGGTAKLGNLFGEKQMDTLERPKLCFADAGYEEYAGEIEAELGEKYVLIEHAKAVYDWAVLADILQNYSSLSEAKVALYEKHKKDLKDLKKLVRENLSREEYQRLFAKKDEKANYYAYIKAPKQCSQEDFYGYLKKNILGKISDVTKASCMQKEMEMGTFLPKQTVKDNSVIPYQIHLYELNAILKNLEDKVPLLKENGEKIQKIFTFRIPYYVGPLNGIRKKGEKSNWAVRKEGKIYPWNFDEMVDLEASAEQFIRRMTNKCTYLPSEDVLPKYSLLYSKYEVLNELNNLRLDGEKISVEQKQKIYEEVFQKSRKVTQKKLKNYLVKEGITGKEVEITGIDGDFKSSLTAYHDFKEKLTNLSLNQAEKECIILNVTLFGDDKAILKQRLKKLFPELTEKQRDSISKLPYRGWGRLSKVFLEEMEAPAPETGEAWSIIRALWETNDNLMQLLSEKYLFASAIEEKNGNEQKKRDISYELVEELYVSPAVKRQIWQSLLIVKEICKVMGNPPKRVFIEMAREKTDQGRTSSRKKKLLELYKKCKAEEKDWIDEIEKRSDAEMRRDKLYLYYTQKGKCMYSGETIELEELWDNQKYDIDHIFPQSKVMDDSLDNRVLVKKKCNQMKEDKYPIDETVRKKMQPFWKSLVDAGLISEEKYKRLIRGNGFEPSELAGFISRQLVETRQSTKAAASILQQVIPDTQIVYVKAPTVSKFRKDFKFLKVREMNDYHHAKDAYLNIVVGNAYFVKFTSNPIHFIKENPGRSYNLKKMFEQERIERNGEIAWEGGNGTIVTVRKFMEKNNILVTRRSYEATGALFDQQIVKKGKGQVPIKSSDERLCDIQKYGGYNKEAGAYFVLAESEGKKGKKIRTIEYVPIRLKKEIQKSEENIIRYLEEERQLKNPRVLVPEIKIDTLFCVDGFYMWVSGRSGDQLLMQGANQLVLSQEETEILKKIVQYVERKKQNKELKIYDSDHLEEKKVVMLYETFLNKLTNTVYAKKLGAQAKTLTEKREKFKELCIEEKCIVLYEILHFFQCQSVTADLKLIGGSGRAGILCLNKNITDCSRIEMIHQSPTGIYEQAVDLNAL

SEQ ID NO: 20185 - protein, 1325 aa, unidentified
  REGION 1..1325: note = Cas Enzyme sequence
MKGEYYLGLDMGSSSVGWAVTNEKYEILRAHGKTLWGVRLFDSAQTAEERRGFRTAKRRLDRRNWRIELLQKIFAEEVEKIDDGFFRRMKESRYWPEDKRDRQGKCPELPYALFADDDYTDKEYHKQFPTIYHLRKWLMETDETPDIRLIYLALHHMMKHRGHFLLNGNIEQVREFQTTFEQFLEAVRAEELGFSSEIGVERSKEIEAILKDRTLTKSAKKTKAVKAMRAETSCEKEWLGLITGGTAKLGNLFGEKQMDTLERPKLCFADAGYEEYAGEIEAELGEKYVLIEHAKAVYDWAVLADILQNYSSLSEAKVALYEKHKKDLKDLKKLVRENLSREEYQRLFAKKDEKANYYAYIKAPKQCSQEDFYGYLKKNILGKISDVTKASCMQKEMEMGTFLPKQTVKDNSVIPYQIHLYELNAILKNLEDKVPLLKENGEKIQKIFTFRIPYYVGPLNGIRKKGEKSNWAVRKEGKIYPWNFDEMVDLEASAEQFIRRMTNKCTYLPSEDVLPKYSLLYSKYEVLNELNNLRLDGEKISVEQKQKIYEEVFQKSRKVTQKKLKNYLVKEGITGKEVEITGIDGDFKSSLTAYHDFKEKLTNLSLNQAEKECIILNVTLFGDDKAILKQRLKKLFPELTEKQRDSISKLPYRGWGRLSKVFLEEMEAPAPETGEAWSIIRALWETNDNLMQLLSEKYLFASAIEEKNGNEQKKRDISYELVEELYVSPAVKRQIWQSLLIVKEICKVMGNPPKRVFIEMAREKTDQGRTSSRKKKLLELYKKCKAEEKDWIDEIEKRSDAEMRRDKLYLYYTQKGKCMYSGETIELEELWDNQKYDIDHIFPQSKVMDDSLDNRVLVKKKCNQMKEDKYPIDETVRKKMQPFWKSLVDAGLISEEKYKRLIRGNGFEPSELAGFISRQLVETRQSTKAAASILQQVIPDTQIVYVKAPTVSKFRKDFKFLKVREMNDYHHAKDAYLNIVVGNAYFVKFTSNPIHFIKENPGRSYNLKKMFEQERIERNGEIAWEGGNGTIVTVRKFMEKNNILVTRRSYEATGALFDQQIVKKGKGQVPIKSSDERLCDIQKYGGYNKEAGAYFVLAESEGKKGKKIRTIEYVPIRLKKEIQKSEENIIRYLEEERQLKNPRVLVPEIKIDTLFCVDGFYMWVSGRSGDQLLMQGANQLVLSQEETEILKKIVQYVERKKQNKELKIYDSDHLEEKKVMLLYETFLNKLTNTVYAKKLGAQAKTLTEKREKFKELCIEEKCIVLYEILHFFQCQSVTADLKLIGGSGRAGILYLNKNITDCSRIEMIHQSPTGIYEQAVDLNAL

SEQ ID NO: 20186 - protein, 1325 aa, unidentified
  REGION 1..1325: note = Cas Enzyme sequence
MKGEYYLGLDMGSSSVGWAVTNEKYEILRAHGKTLWGVRLFDSAQTAEERRGFRTAKRRLDRRNWRIELLQKIFAEEVEKIDDGFFRRMKESRYWPEDKRDRQGKCPELPYALFADDDYTDKEYHKQFPTIYHLRKWLMETDETPDIRLIYLALHHMMKHRGHFLLNGNIEQVREFQTTFEQFLEAVRAEELGFSSEIGVERSKEIEAILKDRTLTKSAKKTKAVKAMRAETSCEKEWLGLITGGTAKLGNLFGEKQMDTLERPKLCFADAGYEEYAGEIEAELGEKYVLIEHAKAVYDWAVLADILQNYSSLSEAKVALYEKHKKDLKDLKKLVRENLSREEYQRLFAKKDEKANYYAYIKAPKQCSQEDFYGYLKKNILGKISDVTKASCMQKEMEMGTFLPKQTVKDNSVIPYQIHLYELNAILKNLEDKVPLLKENGEKIQKIFTFRIPYYVGPLNGIRKKGEKSNWAVRKEGKIYPWNFDEMVDLEASAEQFIRRMTNKCTYLPSEDVLPKYSLLYSKYEVLNELNNLRLDGEKISVEQKQKIYEEVFQKSRKVTQKKLKNYLVKEGITGKEVEITGIDGDFKSSLTAYHDFKEKLTNLSLNQAEKECIILNVTLFGDDKAILKQRLKKLFPELTEKQRDSISKLPYRGWGRLSKVFLEEMEAPAPETGEAWSIIRALWETNDNLMQLLSEKYLFASAIEEKNGNEQKKRDISYELVEELYVSPAVKRQIWQSLLIVKEICKVMGNPPKRVFIEMAREKTDQGRTSSRKKKLLELYKKCKAEEKDWIDEIEKRSDAEMRRDKLYLYYTQKGKCMYSGETIELEELWDNQKYDIDHIFPQSKVMDDSLDNRVLVKKKCNQMKEDKYPIDETVRKKMQPFWKSLVDAGLISEEKYKRLIRGNGFEPSELAGFISRQLVETRQSTKAAASILQQVIPDTQIVYVKAPTVSKFRKDFKFLKVREMNDYHHAKDAYLNIVVGNAYFVKFTSNPIHFIKENPGRSYNLKKMFEQERIERNGEIAWEGGNGTIVTVRKFMEKNNILVTRRSYEATGALFDQQIVKKGKGQVPIKSSDERLCDIQKYGGYNKEAGAYFVLAESEGKKGKKIRTIEYVPIRLKKEIQKSEENIIRYLEEERQLKNPRVLVPEIKIDTLFCVDGFYMWVSGRSGDQLLMQGANQLVLSQEETEILKKIVQYVERKKQNKELKIYDSDHLEEKKVVMLYETFLNKLTNTVYAKKLGAQAKTLTEKREKFKELCIEEKCIVLYEILHFFQCQSVTADLKLIGGSGRAGILYLNKNITDCSRIEMIHQSPTGIYEQAVDLNAL

SEQ ID NO: 20187 - protein, 1036 aa, unidentified
  REGION 1..1036: note = Cas Enzyme sequence
LIEHAKAVYDWAVLADILQNYSSLSEAKVALYEKHKKDLKDLKKLVRENLSREEYQRLFAKKDEKANYYAYIKAPKQCSQEDFYGYLKKNILGKISDVTKASCMQKEMEMGTFLPKQTVKDNSVIPYQIHLYELNAILKNLEDKVPLLKENGEKIQKIFTFRIPYYVGPLNGIRKKGEKSNWAVRKEGKIYPWNFDEMVDLEASAEQFIRRMTNKCTYLPSEDVLPKYSLLYSKYEVLNELNNLRLDGEKISVEQKQKIYEEVFQKSRKVTQKKLKNYLVKEGITGKEVEITGIDGDFKSSLTAYHDFKEKLTNLSLNQAEKECIILNVTLFGDDKAILKQRLKKLFPELTEKQRDSISKLPYRGWGRLSKVFLEETEAPAPETGEAWSIIRALWETNDNLMQLLSEKYLFASAIEEKNGNEQKKRDISYELVEELYVSPAVKRQIWQSLLIVKEICKVMGNPPKRVFIEMAREKTDQGRTSSRKKKLLELYKKCKAEEKDWIDEIEKRSDAEMRRDKLYLYYTQKGKCMYSGETIELEELWDNQKYDIDHIFPQSKVMDDSLDNRVLVKKKCNQMKEDKYPIDETVRKKMQPFWKSLVDAGLISEEKYKRLIRGNGFEPSELAGFISRQLVETRQSTKVAASILQQVIPDTQIVYVKAPTVSKFRKDFKFLKVREMNDYHHAKDAYLNIVVGNAYFVKFTSNPIHFIKENPGRSYNLKKMFEQERIERNGEIAWEGGNGTIVTVRKFMEKNNILVTRRSYEATGALFDQQIVKKGKGQVPIKSSDERLCDIQKYGGYNKEAGAYFVLAESEGKKGKKIRTIEYVPIRLKKEIQKSEENIIRYLEEERQLKNPRVLVPEIKIDTLFCVDGFYMWVSGRSGDRLLMQGANQLVLSQEETEILKKIVQYVERKKQNKELKIYDSDHLEEKKVMMLYETFLNKLTNTVYAKKLGAQAKTLTEKREKFKELCIEEKCIILYEVLHFFQCQSAAADLKLIGGSGRAGILCLNKNITDCSRIEMIHQSPTGIYEQTVDLNAL

SEQ ID NO: 20188 - protein, 1325 aa, unidentified
  REGION 1..1325: note = Cas Enzyme sequence
MKGEYYLGLDMGSSSVGWAVTNEKYEILRAHGKTLWGVRLFDSAQTAEERRGFRTAKRRLDRRNWRIELLQKIFAEEVEKIDDGFFRRMKESRYWPEDKRDRQGKCPELPYALFADDDYTDKEYHKQFPTIYHLRKWLMETDETPDIRLIYLALHHMMKHRGHFLLNGNIEQVREFQTTFEQFLEAVRAEELGFSSEIGVERSKEIEAILKDRTLTKSAKKTKAVKAMRAETSCEKEWLGLITGGTAKLGNLFGEKQMDTLERPKLCFADAGYEEYAGEIEAELGEKYVLIEHAKAVYDWAVLADILQNYSSLSEAKVALYEKHKKDLKDLKKLVRENLSREEYQRLFAKKDEKANYYAYIKAPKQCSQEDFYGYLKKNILGKISDVTKASCMQKEMEMGTFLPKQTVKDNSVIPYQIHLYELNAILKNLEDKVPLLKENGEKIQKIFTFRIPYYVGPLNGIRKKGEKSNWAVRKEGKIYPWNFDEMVDLEASAEQFIRRMTNKCTYLPSEDVLPKYSLLYSKYEVLNELNNLRLDGEKISVEQKQKIYEEVFQKSRKVTQKKLKNYLVKEGITGKEVEITGIDGDFKSSLTAYHDFKEKLTNLSLNQAEKECIILNVTLFGDDKAILKQRLKKLFPELTEKQRDSISKLPYRGWGRLSKVFLEEMEAPAPETGEAWSIIRALWETNDNLMQLLSEKYLFASAIEEKNGNEQKKRDISYELVEELYVSPAVKRQIWQSLLIVKEICKVMGNPPKRVFIEMAREKTDQGRTSSRKKKLLELYKKCKAEEKDWIDEIEKRSDAEMRRDKLYLYYTQKGKCMYSGETIELEELWDNQKYDIDHIFPQSKVMDDSLDNRVLVKKKCNQMKEDKYPIDETVRKKMQPFWKSLVDAGLISEEKYKRLIRGNGFEPSELAGFISRQLVETRQSTKAAASILQQVIPDTQIVYVKAPTVSKFRKDFKFLKVREMNDYHHAKDAYLNIVVGNAYFVKFTSNPIHFIKENPGRSYNLKKMFEQERIERNGEIAWESGNGTIATVRKFMEKNNILVTRRSYEATGALFDQQIVKKGKGQVPIKSSDERLCDIQKYGGYNKEAGACFVLAESEGKKGKKIRTIEYVPIRLKKEIQKSEENIIRYLEEERQLKNPRVLVPEIKIDTLLCVDGFYMWVSGRSGDQLLMQGANQLVLSQEETEILKKIVQYVERKKQNKELKIYDSDHLEEKKVVMLYETFLNKLTNTVYAKKLGAQAKTLTEKREKFKELCIEEKCIVLYEILHFFQCQSVTADLKLIGGSGRAGILYLNKNITDCSRIEMIHQSPTGIYEQAVDLNAL

SEQ ID NO: 20189 - protein, 1325 aa, unidentified
  REGION 1..1325: note = Cas Enzyme sequence
MKGEYYLGLDMGSSSVGWAVTNEKYEILRAHGKTLWGVRLFDSAQTAEERRGFRTAKRRLDRRNWRIELLQKIFAEEVEKIDDGFFRRMKESRYWPEDKRDRQGKCPELPYALFADDDYTDKEYHKQFPTIYHLRKWLMETDETPDIRLIYLALHHMMKHRGHFLLNGNIEQVREFQTTFEQFLEAVRAEELGFSSEIGVERSKEIEAILKDRTLTKSAKKTKAVKAMRAETSCEKEWLGLITGGTAKLGNLFGEKQMDTLERPKLCFADAGYEEYAGEIEAELGEKYVLIEHAKAVYDWAVLADILQNYSSLSEAKVALYEKHKKDLKDLKKLVRENLSREEYQRLFAKKDEKANYYAYIKAPKQCSQEDFYGYLKKNILGKISDVTKASCMQKEMEMGTFLPKQTVKDNSVIPYQIHLYELNAILKNLEDKVPLLKENGEKIQKIFTFRIPYYVGPLNGIRKKGEKSNWAVRKEGKIYPWNFDEMVDLEASAEQFIRRMTNKCTYLPSEDVLPKYSLLYSKYEVLNELNNLRLDGEKISVEQKQKIYEEVFQKSRKVTQKKLKNYLVKEGITGKEVEITGIDGDFKSSLTAYHDFKEKLTNLSLNQAEKECIILNVTLFGDDKAILKQRLKKLFPELTEKQRDSISKLPYRGWGRLSKVFLEEMEAPAPETGEAWSIIRALWETNDNLMQLLSEKYLFASAIEEKNGNEQKKRDISYELVEELYVSPAVKRQIWQSLLIVKEICKVMGNPPKRVFIEMAREKNDQGRTTSRKKKLLELYKKCKAEEKDWIDEIEKRSDAEMRRDKLYLYYTQKGKCMYSGETIELEELWDNQKYDIDHIFPQSKVMDDSLDNRVLVKKKCNQMKEDKYPIDETVRKKMQPFWKSLVDAGLISEEKYKRLIRGNGFEPSELAGFISRQLVETRQSTKAAASILQQVIPDTQIVYVKAPTVSKFRKDFKFLKVREMNDYHHAKDAYLNIVVGNAYFVKFTSNPIHFIKENPGRSYNLKKMFEQERIERNGEIAWEGGNGTIVTVRKFMEKNNILVTRRSYEATGALFDQQIVKKGKGQVPIKSSDERLCDIQKYGGYNKEAGAYFVLAESEGKKGKKIRTIEYVPIRLKKEIQKSEENIIRYLEEERQLKNPRVLVPEIKIDTLFCVDGFYMWVSGRSGDQLLMQGANQLVLSQEEMEILKKIVQYVERKKQNKELKIYDSDHLEEKKVVMLYETFLNKLTNTVYAKKLGAQAKTLTEKREKFKELCIEEKCIVLYEILHFFQCQSVTADLKLIGGSGRAGILYLNKNITDCSRIEMIHQSPTGIYEQAVDLNAL

SEQ ID NO: 20190 - protein, 1325 aa, unidentified
  REGION 1..1325: note = Cas Enzyme sequence
MKGEYYLGLDMGSSSVGWAVTNEKYEILRAHGKTLWGVRLFDSAQTAEERRGFRTAKRRLDRRNWRIELLQKIFAEEVEKIDDGFFRRMKESRYWPEDKRDRQGKCPELPYALFADDDYTDKEYHKQFPTIYHLRKWLMETDETPDIRLIYLALHHMMKHRGHFLLNGNIEQVREFQTTFEQFLEAVRAEELGFSSEIGVERSKEIEAILKDQTLTKSAKKTKAVKAMRAETSCEKEWLGLITGGTAKLGNLFGEKQMDTLERPKLCFTDAGYDEYAGEIEAELGEKYVLIEHAKAVYDWAVLADILQNYSSLSEAKVALYEKHKKDLKDLKKLVRENLSREGYQRLFAKKDEKTNYYAYIKAPKQCSQEDFYGYLKKNILGKISDVTKASCMQKEMEMGTFLPKQTVKDNSVIPYQIHLYELNAILKNLEDKVPLLKENGEKIQKIFTFRIPYYVGPLNGIRKKGEKSNWAVRKEGKIYPWNFDEMVDLEASAEQFIRRMTNKCTYLPSEDVLPKYSLLYSKYEVLNELNNLRLDGEKISVEQKQKIYEEVFQKSRKVTQKKLKNYLVKEGITGKEVEITGIDGDFKSSLTAYHDFKEKLTNLSLDQAEKECIILNVTLFGDDKAILKQRLKKLFPELTEKQRDSISKLPYRGWGRLSKVFLEETEAPAPETGEAWSIIRALWETNDNLMQLLSEKYLFASAIEEKNGNEQKKRDISYELVEELYVSPAVKRQIWQSLLIVKEICKVMGNPPKRVFIEMAREKTDQGRTTSRKKRLLELYKKCKAEEKDWIDEIEKRSDAEMRRDKLYLYYTQKGKCMYSGETIELEELWDNQKYDIDHIFPQSKVMDDSLDNRVLVKKKCNQMKEDKYPIDETVRKKMQPFWKSLVDAGLISEEKYKRLIRGNGFEPSELAGFISRQLVETRQSTKAAASILQQVIPDTQIVYVKAPTVSKFRKDFKFLKVREMNDYHHAKDAYLNIVVGNAYFVKFTSNPIHFIKENPGRSYNLKKMFEQEKIERNGEIAWESGNGTIATVRNFMEKNNILVTRRSYEATGALFDQQIVKKGKGQVPIKSSDERLCDIQKYGGYNKEAGAYFVLAESEGKKGKKIRTIEYVPIRLKKEIQKSEENIIRYLEEERQLKNPRVLVPEIKIDTLFCVDGFYMWVSGRSGDQLLMQGANQLVLSQEETEILKKIVQYVERKKQNKELKIYDSDHLEEKKVVMLYETFLNKLTNTVYAKKLGAQAKTLTEKREKFKELCIEEKCIVLYEVLHFFQCQSAAADLKLIGGSGRAGILCLNKNITDCSRIEMIHQSPTGIYEQTVDLNAL

SEQ ID NO: 20191 - protein, 1257 aa, unidentified
  REGION 1..1257: note = Cas Enzyme sequence
LLQKIFAEEVEKIDDGFFRRMKESRYWPEDKRDRQGKCPELPYALFADDDYTDKEYHKQFPTIYHLRKWLMETDETPDIRLIYLALHHMMKHRGHFLLNGNIEQVREFQTTFEQFLEAVRAEELGFSSEIGVERSKEIEAILKDRTLTKSAKKTKAVKAMRAETSCEKEWLGLITGGTAKLGNLFGEKQMDTLERPKLCFADAGYEEYAGEIEAELGEKYVLIEHAKAVYDWAVLADILQNYSSLSEAKVALYEKHKKDLKDLKKLVRENLSREEYQRLFAKKDEKANYYAYIKAPKQCSQEDFYGYLKKNIMGKISDVTKASCMQKEMEMGTFLPKQTVKDNSVIPYQIHLYELNAILKNLEDKVPLLKENGEKIQKIFTFRIPYYVGPLNGIRKKGEKSNWAVRKEGKIYPWNFDEMVDLEASAEQFIRRMTNKCTYLPSEDVLPKYSLLYSKYEVLNELNNLRLDGEKISVEQKQKIYEEVFQKSRKVTQKKLKNYLVKEGITGKEVEITGIDGDFKSSLTAYHDFKEKLTNLSLNQAEKECIILNVTLFGDDKAILKQRLKKLFPELTEKQRDSISKLPYRGWGRLSKVFLEETEAPAPETGEAWSIIRALWETNDNLMQLLSEKYLFASAIEEKNGNEQKKRDISYELVEELYVSPAVKRQIWQSLLIVKEICKVMGNPPKRVFIEMAREKTDQGRTSSRKKKLLELYKKCKAEEKDWIDEIEKRSDAEMRRDKLYLYYTQKGKCMYSGETIELEELWDNQKYDIDHIFPQSKVMDDSLDNRVLVKKKCNQMKEDKYPIDETVRKKMQPFWKSLVDAGLISEEKYKRLIRGNGFEPSELAGFISRQLVETRQSTKAAASILQQVIPDTQIVYVKAPTVSKFRKDFKFLKVREMNDYHHAKDAYLNIVVGNAYFVKFTSNPIHFIKENPGRSYNLKKMFEQERIERNGEIAWESGNGTIATVRKFMEKNNILVTRRSYEATGALFDQQIVKKGKGQVPIKSSDERLCDIQKYGGYNKEAGAYFVLAESEGKKGKKIRTIEYVPIRLKKEIQKSEENIIRYLEEERQLKNPRVLVPEIKIDTLFCVDGFYMWVSGRSGDQLLMQGANQLVLSQEETEILKKIVQYVERKKQNKELKIYDSDHLEEKKVMMLYETFLNKLTNTIYAKKLGAQAKTLTEKREKFKELCIEEKCIVLYEVLHFFQCQSAAADLKLIGGSGRAGILCLNKNITDCSRIEMIHQSPTGIYEQTVDLNAL

SEQ ID NO: 20192 - protein, 1325 aa, unidentified
  REGION 1..1325: note = Cas Enzyme sequence
MKGEYYLGLDMGSSSVGWAVTNEKYEILRAHGKTLWGVRLFDSAQTAEERRGFRTAKRRLDRRNWRIELLQKIFAEEVEKIDDGFFRRMKESRYWPEDKRDRQGKCPELPYALFADDDYTDKEYHKQFPTIYHLRKWLMETDETPDIRLIYLALHHMMKHRGHFLLNGNIEQVREFQTTFEQFLEAVRAEELGFSSEIGVERSKEIEAILKDQTLTKSAKKTKAVKAMRAETSCEKEWLGLITGGTAKLGNLFGEKQMDTLERPKLCFTDAGYDEYAGEIEAELGEKYVLIEHAKAVYDWAVLADILQNYSSLSEAKVALYEKHKKDLKDLKKLVRENLSREGYQRLFAKKDEKTNYYAYIKAPKQCSQEDFYGYLKKNILGKISDVTKASCMQKEMEMGTFLPKQTVKDNSVIPYQIHLYELNAILKNLEDKVPLLKENGEKIQKIFTFRIPYYVGPLNGIRKKGEKSNWAVRKEGKIYPWNFDEMVDLEASAEQFIRRMTNKCTYLPSEDVLPKYSLLYSKYEVLNELNNLRLDGEKISVEQKQKIYEEVFQKSRKVTQKKLKNYLVKEGITGKEVEITGIDGDFKSSLTAYHDFKEKLTNLSLNQAEKECIILNVTLFGDDKAILKQRLKKLFPELTEKQRDSISKLPYRGWGRLSKVFLEEMEAPAPETGEAWSIIRALWETNDNLMQLLSEKYLFASAIEEKNGNEQKKRDISYELVEELYVSPAVKRQIWQSLLIVKEICKVMGNPPKRVFIEMAREKTDQGRTSSRKKKLLELYKKCKAEEKDWIDEIEKRSDAEMRRDKLYLYYTQKGKCMYSGETIELEELWDNQKYDIDHIFPQSKVMDDSLDNRVLVKKKCNQMKEDKYPIDETVRKKMQPFWKSLVDAGLISEEKYKRLIRGNGFEPSELAGFISRQLVETRQSTKAAASILQQVIPDTQIVYVKAPTVSKFRKDFKFLKVREMNDYHHAKDAYLNIVVGNAYFVKFTSNPIHFIKENPGRSYNLKKMFEQERIERNGEIAWESGNGTIATVRNFMEKNNILVTRRSYEATGALFDQQIVKKGKGQVPIKSSDERLCDIQKYGGYNKEAGAYFVLAESEGKKGKKIRTIEYVPIRLKKEIQKSEENIIRYLEEERQLKNPRVLVPEIKIDTLFCVDGFYMWVSGRSGDQLLMQGANQLVLSQEETEILKKIVQYVERKKQNKELKIYDSDHLEEKKVVMLYETFLNKLTNTVYAKKLGAQAKTLTEKREKFKELCIEEKCIVLYEILHFFQCQSVTADLKLIGGSGRAGILCLNKNITDCSRIEMIHQSPTGIYEQAVDLNAL

SEQ ID NO: 20193 - protein, 1325 aa, unidentified
  REGION 1..1325: note = Cas Enzyme sequence
MKGEYYLGLDMGSSSVGWAVTNEKYEILRAHGKTLWGVRLFDSAQTAEERRGFRTAKRRLDRRNWRIELLQKIFAEEVEKIDDGFFRRMKESRYWPEDKRDRQGKCPELPYALFADDDYTDKEYHKQFPTIYHLRKWLMETDETPDIRLIYLALHHMMKHRGHFLLNGNIEQVREFQTTFEQFLEAVRAEELGFSSEIGVERSKEIEAILKDRTLTKSAKKTKAVKAMRAETSCEKEWLGLITGGTAKLGNLFGEKQMDTLERPKLCFADAGYEEYAGEIEAELGEKYVLIEHAKAVYDWAVLADILQNYSSLSEAKVALYEKHKKDLKDLKKLVRENLSREEYQRLFAKKDEKANYYAYIKAPKQCSQEDFYGYLKKNILGKISDVTKASCMQKEMEMGTFLPKQTVKDNSVIPYQIHLYELNAILKNLEDKVPLLKENGEKIQKIFTFRIPYYVGPLNGIRKKGEKSNWAVRKEGKIYPWNFDEMVDLEASAEQFIRRMTNKCTYLPSEDVLPKYSLLYSKYEVLNELNNLRLDGEKISVEQKQKIYEEVFQKSRKVTQKKLKNYLVKEGITGKEVEITGIDGDFKSSLTAYHDFKEKLTNLSLNQAEKECIILNVTLFGDDKAILKQRLKKLFPELTEKQRDSISKLPYRGWGRLSKVFLEEMEAPAPETGEAWSIIRALWETNDNLMQLLSEKYLFASAIEEKNGNEQKKRDISYELVEELYVSPAVKRQIWQSLLIVKEICKVMGNPPKRVFIEMAREKTDQGRTSSRKKKLLELYKKCKAEEKDWIDEIEKRSDAEMRRDKLYLYYTQKGKCMYSGETIELEELWDNQKYDIDHIFPQSKVMDDSLDNRVLVKKKCNQMKEDKYPIDETVRKKMQPFWKSLVDAGLISEEKYKRLIRGNGFEPSELAGFISRQLVETRQSTKAAASILQQVIPDTQIVYVKAPTVSKFRKDFKFLKVREMNDYHHAKDAYLNIVVGNAYFVKFTSNPIHFIKENPGRSYNLKKMFEQERIERNGEIAWEGGNGTIATVRNFMEKNNILVTRRSYEATGALFDQQIVKKGKGQVPIKSSDERLCDIQKYGGYNKEAGAYFVLAESEGKKGKKIRTIEYVPIRLKKEIQKSEENIIRYLEEERQLKNPRVLVPEIKIDTLFCVDGFYMWVSGRSGDQLLMQGANQLVLSQEETEILKKIVQYVERKKQNKELKIYDSDHLEEKKVMLLYETFLNKLTNTVYAKKLGAQAKTLTEKREKFKELCIEEKCIVLYEILHFFQCQSVTADLKLIGGSGRAGILYLNKNITDCSRIEMIHQSPTGIYEQAVDLNAL

SEQ ID NO: 20194 - protein, 1352 aa, unidentified
  REGION 1..1352: note = Cas Enzyme sequence
MEIMKQKFYVGLDMGTASVGWAVTDDKYNIIKRHGKALWGVRLFKTANTAEERRTFRAARRRTQRRKQRMELLQEIFGDEISKTDIGFYQRMKESKYWFEDKRDINGKQPELPYALFVDDGFTDKDYHEQFPTIFHVRNVLVNEWTQKYDIRLVYLAIHHIIKHRGHFLFEGKKMSEVTDFGSAFEAFCKVASDNDIEITVDEEKLKDIEDLLKSRQKSKTAKKQELGKIIAGADKQKKALAALITGCTVKLSEIFADKSLDDGERNKISFADSNYDEYIANVEETLAERFLLIATGKALYDWAVLSDILEGSTYISEAKVKIYKKHGDDLRKLKGLLKTRPDEYKLIFGLPEKQANYSAYIGMVKKNGKKVPIDKKCTKADFYSFLKKTLNKINFEDEKEREIAESIINEIENETFLPKQVISDNGVIPYQLHEAELDRILKNAALYYPFLSEKDDEGYTNTDKIKAIFKFRIPYYVGPLNTYHSDKGGNSWAVRKQDGKIYPWNFESKIDAEESAGKFIGRMTNKCTYLIGKDVLPKESLLYSKFMVLNELNNLRIDGEKVSVEIKQAVYENVFKKYQRVTGKKVKDFLIRSGIIEREQELSGFDQNFKSSLKAYHDIKQIAGDINLSQNQKEDIIKDITVFADSQKMLKKRLKIKYPELSDKQVTKLAAKKYTGWGRLSREFLEEVESVNKETGEVLNIISALWETNENLMQLLSNKYDYLSEIKRLNDEAEDKSKVVTYDDVQKLYVSPAVKRPVWQTLKIVEEISKIMGSKPERIFVEMAREPGQKGDVKVSRKSRLLEKYKYCKKEAPEIYENLVKEDDNKLRSDKLFLYYTQMGRCMYSNEVIDIEDLFTNRYDIDHIYPQSKVMDDSLDNRVLVKRELNSNKTDVFPVPKEYMDKAKTLWDMLKKKDLISKEKYHRLTRRDGFSENELSGFIARQLVETRQSTKAVTQLLTKAYPESEIVYAKANAVSEFRHKFGFTKVRNINDYHHAKDAYLNIVVGNTYYVKFTKDAAWFIRNNPGRTYNLKKMFEQGTVSRGGETAWVSGEDGTIFTVKRVMGKNNILFTRKAYEVKGGLFDQQIMKKGKGQIPIKNNSGDDRLCATEKYGAYNKASGAYFMLVESEDKKGNKIRTLEFVPVYIAKELEKSEDAAIRYCVEKLELKKPDIRVRKIKMDSLFNVDGFRMHLSGRTEKRLIFKCAEQLVLDEESQKILKKTAKVFADYKVNKNIKISDKMELTDEMLIKLYELFYKKLKDTVYNIRLSTQVKTLESGKEKFEKLSLLDKCLVIEEILHLFQCQSSGANLSSIGGAATAGILVLNKEISRCGRVEIINQSITGFYEQVIDLKTI

SEQ ID NO: 20195 - protein, 1341 aa, unidentified
  REGION 1..1341: note = Cas Enzyme sequence
MGKGYYVGLDMGTGSVGWAVTDESYQILRRHGKAMWGVRLFESAKTAEERRMFRTGRRRLDRRGWRIEILQEIFAEEISRVDPGFFLRMKESKYYPEDKRDIEGNCPELPYTLFVDKTFTDKDFHKKYPTIYHLRKMLMETEDTLDIRLVYLALHHMMKHRGHFLLSGDISQVTEFKNTFNQFIENIRNEEMDFEIELDESAVQMIEETLKDKNLTRSAKKLKLVKGLNAKNVRDKAFLTLLSGGTVKLSDLFGMEELNEGERPKISFADNGYEEYAAVVEMELGELYYIVESAKAVYDWAILSDILGGSTSISDAKVRAYEKHKADLKYLKAVVKEYFPKEVYNAVFVESSEKLNNYPAYIGMTKKNGKKVSLEGKRCSREEFMDFLKKNIVVKLPDEETKMYLQSELEKDSFLPKQVNKDNGVIPYQVHKYELKKILDNLGDKIPFLKENAEKIEKLFSFRIPYYVGPLRTGNGENSKFAWAERKSTEKIYPWNFENVIDVEQSAENFIRRMTNKCTYMIGEDVLPKDSLLYSKFMVLNELNNLRLDGQKISVELKQKIYRDVFCRSRKVTQKKLKSYLIREGIAGKNVELTGIDGDFKGSLTAYHDFKEKLTDVELTQKEKEEIILNIVLFGDDKKLLKQRLKKKFPQLTEKQINTVTALSYKGWGRLSKKLLEEVTVPAPETGEVWNIITALWETNDNFMQLLSKEYQFSDRIEEFNEEKADPEVSYQTIEDLYVSPAVKRQIWQTLQIIQEIEKVMGEKPKRVFVEMAREKQENKRTESRKKTLSDLYKKCKKEEPEWIEALCTSLEKHEEHQLRSDKLYLYYTQKGRCMYSGEPIDLEDLWDNTKYDIDHIYPQSKTMDDSLKNRVLVKKEYNAKKSDTYPIAADIQKKMMPFWKSLLTGGFIPKEKYDRLVRNNPLDANELAGFIERQIVETRQSTKAVAEILKKILPDTEIVYVKAKTVSKFRQDFDFIKVRDMNDLHHAKDAYLNIVVGNVYFVKFTKNAAWFVKENPGRTYNLEKMFIWDVARDGEIAWKAGKSGSIVQVRAMMEKNHILVTRRSYEVKGGLFDQQILKKGKGQVPVKESDERLRDIGKYGGYNKAAGAYFMLVSSKDKKGKEQRTIEFVPIYLKDRVEKDMESAKNYLMENRGLTEPKILIKKIKIDTLFKVDGFYMWLSGRTENRLIFKGANQLLLLKDDMKTLKKVVKYIQRQKEDKNVKISVRDGITEEELLKLYETFLDKIRHSIYGVRLSSQEKTLVNGKEKFIDLSVEAKCQVLYEILHLFQCQSGAANLKMIGGPASAGILVMNNNISKCKNISIVNQSPTGIYEKEIDLLRV

SEQ ID NO: 20196 - protein, 1192 aa, unidentified
  REGION 1..1192: note = Cas Enzyme sequence
VYLALHHMMKHRGHFLLSGDISQVTEFKNTFNQFIENIRNEEMDFEIELDESAVQMIEETLKDKNLTRSAKKSKLVKGLNAKNVRDKAFLTLLSGGTVKLSDLFGMEELNEGERPKISFADNGYEEYAAVVEMELGELYYIVESAKAVYDWAILSDILGGSTSISDAKVRAYEKHKADLKYLKAVVKEYFPKEVYNAVFVESSDKLNNYPAYIGMTKKNGKKVSLEGKRCSREEFMDFLKKNIVIKLPDEETKMYLQSELEKDSFLPKQVNKDNGVIPYQVHKYELKKILDNLGDKIPFLKENAEKIEKLFSFRIPYYVGPLRTGNGENSKFAWAERKSTEKIYPWNFENVINVEQSAENFIRRMTNKCTYLIGEDVLPKDSLLYSKFMVLNELNNLRLDGQKISVELKQKIYRDVFCRSRKVTQKKLKSYLIREGIAGKNVELTGIDGDFKGSLTAYHDFKEKLTGVELTQKEKEEIILNIVLFGDDKKLLKQRLKKKFPQLTEKQINTVTALSYKGWGRLSKKLLEEVTVPAPETGEVWNIITALWETNDNFMQLLSKEYQFSDRIEELNEEKADPEVSYQTIEDLYVSPAVKRQIWQTLQIVQEIEKVMGEKPKRVFVEMAREKQENKRMESRKKTLSDLYKKCKKEEPEWIETLCTSLEKHEEHQLRSDKLYLYYTQKGRCMYSGEPIDLEDLWDNTKYDIDHIYPQSKTMDDSLKNRVLVKKEYNAKKSDTYPIAADIQKKMMPFWKSLLTGGFIPKEKYDRLVRNNPLDANELAGFIERQIVETRQSTKAVAEILKKILPDTEIVYVKAKTVSKFRQDFDFIKVRDMNDLHHAKDAYLNIVVGNVYFVKFTKNAAWFVKENPGRTYNLEKMFIWDVARDGEIAWKAGKSGSIVQVRAMMEKNHILVTRRSYEVKGGLFDQQIVKKGKGQVPVKESDERLRDIGKYGGYNKAAGAYFMLVSSKDKKGKEQRTIEFVPIYLKDRVEKDMESARNYLMEERGLREPKILIKKIKIDTLFKVDGFYMWLSGRTSNQLIFKGANQLILSKEDMKTLKKVVKYIQRQKEEKKVKISVRDGITEEELLKLYETFLDKIRHSIYGVRLSSQEKTLVNGKEKFIDLSVEAKCQVLYEILHLFQCQSGAANLKMIGGPASAGILVMNNNISKCKNISIVNQSPTGIYEKEIDLLRV

SEQ ID NO: 20197 - protein, 1325 aa, unidentified
  REGION 1..1325: note = Cas Enzyme sequence
MKGEYYLGLDMGSSSVGWAVTNEKYEILRAHGKTLWGVRLFDSAQTAEERRGFRTAKRRLDRRNWRIELLQKIFAEEVEKIDDGFFRRMKESRYWPEDKRDRQGKCPELPYALFADDDYTDKEYHKQFPTIYHLRKWLMETDETPDIRLIYLALHHMMKHRGHFLLNGNIEQVREFQTTFEQFLEAVRAEELGFSSEIGVERSKEIEAILKDRTLTKSAKKTKAVKAMRAETSCEKEWLGLITGGTAKLGNLFWEKQMDTLERPKLCFADAGYEEYAGEIEAELGEKYVLIEHAKAVYDWAVLADILQNYSSLSEAKVALYEKHKKDLKDLKKLVRENLSREEYQRLFAKKDEKANYYAYIKAPKQCSQEDFYGYLKKNILGKISDVTKASCMQKEMEMGTFLPKQTVKDNSVIPYQIHLYELNAILKNLEDKVPLLKENGEKIQKIFTFRIPYYVGPLNGIRKKGEKSNWAVRKEGKIYPWNFDEMVDLEASAEQFIRRMTNKCTYLPSEDVLPKYSLLYSKYEVLNELNNLRLDGEKISVEQKQKIYEEVFQKSRKVTQKKLKNYLVKEGITGKEVEITGIDGDFKSSLTAYHDFKEKLTNLSLNQAEKECIILNVTLFGDDKAILKQRLKKLFPELTEKQRDSISKLPYRGWGRLSKVFLEEMEAPAPETGEAWSIIRALWETNDNLMQLLSEKYLFASAIEEKNGNEQKKRDISYELVEELYVSPAVKRQIWQSLLIVKEICKVMGNPPKRVFIEMAREKTDQGRTSSRKKKLLELYKKCKAEEKDWIDEIEKRSDAEMRRDKLYLYYTQKGKCMYSGETIELEELWDNQKYDIDHIFPQSKVMDDSLDNRVLVKKKCNQMKEDKYPIDETVRKKMQPFWKSLVDAGLISEEKYKRLIRGNGFEPSELAGFISRQLVETRQSTKAAASILQQVIPDTQIVYVKAPTVSKFRKDFKFLKVREMNDYHHAKDAYLNIVVGNAYFVKFTSNPIHFIKENPGRSYNLKKMFEQERIERNGEIAWEGGNGTIVTVRKFMEKNNILVTRRSYEATGALFDQQIVKKGKGQVPIKSSDERLCDIQKYGGYNKEAGAYFVLAESEGKKGKKIRTIEYVPIRLKKEIQKSEENIIRYLEEERQLKNPRVLVPEIKIDTLFCVDGFYMWVSGRSGDQLLMQGANQLVLSQEETEILKKIVQYVERKKQNKELKIYDSDHLEEKKVVMLYETFLNKLTNTVYAKKLGAQAKTLTEKREKFKELCIEEKCIVLYEVLHFFQCQSAAADLKLIGGSGRAGILCLNKNITDCSRIEMIHQSPTGIYEQTVDLNAL

SEQ ID NO: 20198 - protein, 1057 aa, unidentified
  REGION 1..1057: note = Cas Enzyme sequence
  REGION 214..223: note = misc_feature - Xaa can be any naturally occurring amino acid
  REGION 1031..1042: note = misc_feature - Xaa can be any naturally occurring amino acid
MKGEYYLGLDMGSSSVGWAVTNEKYEILRAHGKTLWGVRLFDSAQTAEERRGFRTAKRRLDRRNWRIELLQKIFAEEVEKIDDGFFRRMKESRYWPEDKRDRQGKCPELPYALFADDDYTDKEYHKQFPTIYHLRKWLMETDETPDIRLIYLALHHMMKHRGHFLLNGNIEQVREFQTTFEQFLEAVRAEELGFSSEIGVERSKEIEAILKDRXXXXXXXXXXVKAMRAETSCEKEWLGLITGGTAKLGNLFGEKQMDTLERPKLCFADAGYEEYAGEIEAELGEKYVLIEHAKAVYDWAVLADILQNYSSLSEAKVALYEKHKKDLKDLKKLVRENLSREEYQRLFAKKDEKANYYAYIKAPKQCSQEDFYGYLKKNILGKISDVTKASCMQKEMEMGTFLPKQTVKDNSVIPYQIHLYELNAILKNLEDKVPLLKENGEKIQKIFTFRIPYYVGPLNGIRKKGEKSNWAVRKEGKIYPWNFDEMVDLEASAEQFIRRMTNKCTYLPSEDVLPKYSLLYSKYEVLNELNNLRLDGEKISVEQKQKIYEEVFQKSRKVTQKKLKNYLVKEGITGKEVEITGIDGDFKSSLTAYHDFKEKLTNLSLNQAEKECIILNVTLFGDDKAILKQRLKKLFPELTEKQRDSISKLPYRGWGRLSKVFLEEMEAPAPETGEAWSIIRALWETNDNLMQLLSEKYLFASAIEEKNGNEQKKRDISYELVEELYVSPAVKRQIWQSLLIVKEICKVMGNPPKRVFIEMAREKTDQGRTSSRKKKLLELYKKCKAEEKDWIDEIEKRSDAEMRRDKLYLYYTQKGKCMYSGETIELEELWDNQKYDIDHIFPQSKVMDDSLDNRVLVKKKCNQMKEDKYPIDETIRKKMQPFWKSLVDAGLISEEKYKRLIRGNGFEPSELAGFISRQLVETRQSTKAAASILQQVIPDTQIVYVKAPTVSKFRKDFKFLKVREMNDYHHAKDAYLNIVVGNAYFVKFTSNPIHFIKENPGRSYNLKKMFEQEKIERNGEIAWESGNGTIXXXXXXXXXXXXKVYGKKQHSCDAKIV

SEQ ID NO: 20199 - protein, 1325 aa, unidentified
  REGION 1..1325: note = Cas Enzyme sequence
MKGEYYLGLDMGSSSVGWAVTNEKYEILRAHGKTLWGVRLFDSAQTAEERRGFRTAKRRLDRRNWRIELLQKIFAEEVEKIDDGFFRRMKESRYWPEDKRDRQGKCPELPYALFADDDYTDKEYHKQFPTIYHLRKWLMETDETPDIRLIYLALHHMMKHRGHFLLNGNIEQVREFQTTFEQFLEAVRAEELGFSSKMGVERSKEIETILKDRTLTKSAKKTKAVKAMRAETSCEKEWLGLITGGTAKLGNLFGEKQMDTLERPKLCFADAGYEEYAGEIEAELGEKYALIEHAKAVYDWAVLADILQNYSSLSEAKVALYEKHKKDLKDLKKLVRENLSREEYQRLFAKKDEKTNYYAYIKAPKQCSQEDFYGYLKKNILGKISDVTKASCMQKEMEMGTFLPKQTVKDNSVIPYQIHLYELNAILKNLEDKVPLLKENGEKIQKIFTFRIPYYVGPLNGIRKKGEKSNWAVRKEGKIYPWNFDEMVDLEASAEQFIRRMTNKCTYLPSEDVLPKYSLLYSKYEVLNELNNLRLDGEKISVEQKQKIYEEVFQKSRKVTQKKLKNYLVKEGITGKEVEITGIDGDFKSSLTAYHDFKEKLTNLSLNQAEKECIILNVTLFGDDKAILKQRLKKLFPELTEKQRDSISKLPYRGWGRLSKVFLEETEAPAPETGEAWSIIRALWETNDNLMQLLSEKYLFASAIEEKNGNEQKKRDISYELVEELYVSPAVKRQIWQSLLIVKEICKVMGNPPKRVFIEMAREKTDQGRTSSRKKKLLELYKKCKAEEKDWIDEIEKRSDAEMRRDKLYLYYTQKGKCMYSGETIELEELWDNQKYDIDHIFPQSKVMDDSLDNRVLVKKKCNQMKEDKYPIDETVRKKMQPFWKSLVDAGLISEEKYKRLIRRNGFEPSELAGFISRQLVETRQSTKAAASILQQVIPDTQIVYVKAPTVSKFRKDFKFLKVREMNDYHHAKDAYLNIVVGNAYFVKFTSNPIHFIKENPGRSYNLKKMFEQERIERNGEIAWEGGNGTIVTVRKFMEKNNILVTRRSYEATGALFDQQIVKKGKGQVPIKSSDERLCDIQKYGGYNKEAGAYFVLAESEGKKGKKIRTIEYVPIRLKKEIQKSEENIIRYLEEERQLKNPRVLVPEIKIDTLLCVDGFYMWVSGRSGDQLLMQGANQLVLSQEETEILKKIVQYVERKKQNKELKIYDSDHLEEKKVMMLYETFLNKLTNTVYAKKLGAQAKTLTEKREKFKELCIEEKCIVLYEVLHFFQCQSVTADLKLIGGSGRAGILYLNKNITDCSRIEMIHQSPTGIYEQAVDLNAL

SEQ ID NO: 20200 - protein, 1325 aa, unidentified
  REGION 1..1325: note = Cas Enzyme sequence
MKGEYYLGLDMGSSSVGWAVTNEKYEILRAHGKTLWGVRLFDSAQTAEERRGFRTAKRRLDRRNWRIELLQKIFAEEVEKIDDGFFRRMKESRYWLEDKRDRQGKCPELPYALFADDDYTDKEYHKQFPTIYHLRKWLMETDETPDIRLIYLALHHMMKHRGHFLLNGNIEQVREFQTTFEQFLEAVRAEELGFSSEIGVERSKEIEAILKDRTLTKSAKKTKAVKAMRAETSCEKEWLGLITGGTAKLGNLFGEKQMDTLERPKLCFADAGYEEYAGEIEAELGEKYVLIEHAKAVYDWAVLADILQNYSSLSEAKVALYEKHKKDLKDLKKLVRENLSREEYQRLFAKKDEKANYYAYIKAPKQCSQEDFYGYLKKNILGKISDVTKASCMQKEMEMGTFLPKQTVKDNSVIPYQIHLYELNAILKNLEDKVPLLKENGEKIQKIFTFRIPYYVGPLNGIRKKGEKSNWAVRKEGKIYPWNFDEMVDLEASAEQFIRRMTNKCTYLPSEDVLPKYSLLYSKYEVLNELNNLRLDGEKISVEQKQKIYEEVFQKSRKVTQKKLKNYLVKEGITGKEVEITGIDGDFKSSLTAYHDFKEKLTNLSLNQAEKECIILNVTLFGDDKAILKQRLKKLFPELTEKQRDSISKLPYRGWGRLSKVFLEEMEAPAPETGEAWSIIRALWETNDNLMQLLSEKYLFASAIEEKNGNEQKKRDISYELVEELYVSPAVKRQIWQSLLIVKEICKVMGNPPKRVFIEMAREKTDQGRTSSRKKKLLELYKKCKAEEKDWIDEIEKRSDAEMRRDKLYLYYTQKGKCMYSGETIELEELWDNQKYDIDHIFPQSKVMDDSLDNRVLVKKKCNQMKEDKYPIDETVRKKMQPFWKSLVDAGLISEEKYKRLIRGNGFEPSELAGFISRQLVETRQSTKAAASILQQVIPDTQIVYVKAPTVSKFRKDFKFLKVREMNDYHHAKDAYLNIVVGNAYFVKFTSNPIHFIKENPGRSYNLKKMFEQERIERNGEIAWEGGNGTIVTVRKFMEKNNILVTRRSYEATGALFDQQIVKKGKGQVPIKSSDERLCDIQKYGGYNKEAGAYFVLAESEGKKGKKIRTIEYVPIRLKKEIQKSEENIIRYLEEERQLKNPRVLVPEIKIDTLFCVDGFYMWVSGRSGDQLLMQGANQLVLSQEETEILKKIVQYVERKKQNKELKIYDSDHLEEKKVVMLYETFLNKLTNTVYAKKLGAQAKTLTEKREKFKELCIEEKCIVLYEVLHFFQCQSAAADLKLIGGSGRAGILCLNKNITDCSRIEMIHQSPTGIYEQTVDLNAL

SEQ ID NO: 20201 - protein, 1341 aa, unidentified
  REGION 1..1341: note = Cas Enzyme sequence
MGKGYYVGLDMGTGSVGWAVTDESYQILRRHGKAMWGVRLFESAKTAEERRMFRTGRRRLDRRGWRIEILQEIFAEEISRVDPGFFLRMKESKYYPEDKRDIQGNCPELPYTLFVDKTFTDKDFHKKYPTIYHLRKMLMETEDTPDMRLVYLALHHMMKHRGHFLLSGDISQVTEFKNTFNQFIENIRNEEMDFEIELDESAVQMIEETLKDKNLTRSAKKSKLVKGLNAKNVRDKAFLTLLSGGTVKLSDLFGMEELNEGERPKISFADNGYEEYAAVVEMELGELYYIVESAKAVYDWAILSDILGGSTSISDAKVRAYEKHKADLKYLKAVVKEYFPKEVYNAVFVESSDKLNNYPAYIGMTKKNGKKVSLEGKRCSREEFMDFLKKNIVVKLPDEEAKMYLQSELEKDSFLPKQVNKDNGVIPYQVHKYELKKILDNLGDKIPFLKENAEKIEKLFSFRIPYYVGPLRTGNGENSKFAWAERKSTEKIYPWNFENVIDVEQSAENFIRRMTNKCTYLIGEDVLPKDSLLYSKFMVLNELNNLRLDGQKISVELKQKIYRDVFCRSRKVTQKKLKSYLIREGIAGKNVELTGIDGDFKGSLTAYHDFKEKLIDVELTQKEKEEIILNIVLFGDDKKLLKQRLKKKFPQLTEKQINTVTALSYKGWGRLSKKLLEEVTVPAPETGEVWNIITALWETNDNFMQLLSKEYQFSDRIEEFNEEKADPEVSYQTIEDLYVSPAVKRQIWQTLQIIQEIEKVMGEKPKRVFVEMAREKQENKRTESRKKTLSDLYTKCKKEEPEWIEALCTSLEKHEEHQLRSDKLYLYYTQKGRCMYSGEPIDLEDLWDNTKYDIDHIYPQSKTMDDSLKNRVLVKKEYNAKKSDTYPIAADIQKKMMPFWKSLLTGGFIPKEKYDRLVRNNPLDANELAGFIERQIVETRQSTKAVAEILKKILPDTEIVYVKAKTVSKFRQDFDFIKVRDMNDLHHAKDAYLNIVVGNVYFVKFTKNAAWFVKENPGRTYNLEKMFIWDVARDGEIAWKAGKSGSIVQVRAMMEKNHILVTRRSYEVKGGLFDQQILKKGKGQVPVKESDERLRDIGKYGGYNKAAGVYFMLVSSKDKKGKEQRTIEFVPIYLKDRVEKDMESARNYLMEERGLREPKILIKKIKIDTLFKVDGFYMWLSGRTSNQLIFKGANQLILSKEDMKTLKKVVKYIQRQKEDKNVKISVRDGITEEELLKLYETFLDKIRHSIYGVRLSSQEKTLVNGKEKFIDLSVEAKCQVLYEILHLFQCQSGASNLKMIGGPASAGILVMNNNISKCKNISIVNQSPTGIYEKEIDLLRV

SEQ ID NO: 20202 - protein, 1253 aa, unidentified
  REGION 1..1253: note = Cas Enzyme sequence
MKGEYYLGLDMGSSSVGWAVTNEKYEILRAHGKTLWGVRLFDSAQTAEERRGFRTAKRRLDRRNWRIELLQKIFAEEVEKIDDGFFRRMKESRYWPEDKRDRQGKCPELPYALFADDDYTDKEYHKQFPTIYHLRKWLMETDETPDIRLIYLALHHMMKHRGHFLLNGNIEQVREFQTTFEQFLEAVRAEELGFSSEIGVERSKEIEAILKDRTLTKSAKKTKAVKAMRAETSCEKEWLGLITGGTAKLGNLFGEKQMDTLERPKLCFADAGYEEYAGEIEAELGEKYVLIEHAKAVYDWAVLADILQNYSSLSEAKVALYEKHKKDLKDLKKLVRENLSREEYQRLFAKKDEKANYYAYIKAPKQCSQEDFYGYLKKNILGKISDVTKASCMQKEMEMGTFLPKQTVKDNSVIPYQIHLYELNAILKNLEDKVPLLKENGEKIQKIFTFRIPYYVGPLNGIRKKGEKSNWAVRKEGKIYPWNFDEMVDLEASAEQFIRRMTNKCTYLPSEDVLPKYSLLYSKYEVLNELNNLRLDGEKISVEQKQKIYEEVFQKSRKVTQKKLKNYLVKEGITGKEVEITGIDGDFKSSLTAYHDFKEKLTNLSLNQAEKECIILNVTLFGDDKAILKQRLKKLFPELTEKQRDSISKLPYRGWGRLSKVFLEEMEAPAPETGEAWSIIRALWETNDNLMQLLSEKYLFASAIEEKNGNEQKKRDISYELVEELYVSPAVKRQIWQSLLIVKEICKVMGNPPKRVFIEMAREKTDQGRTSSRKKKLLELYKKCKAEEKDWIDEIEKRSDAEMRRDKLYLYYTQKGKCMYSGETIELEELWDNQKYDIDHIFPQSKVMDDSLDNRVLVKKKCNQMKEDKYPIDETVRKKMQPFWKSLVDAGLISEEKYKRLIRGNGFEPSELAGFISRQLVETRQSTKAAASILQQVIPDTQIVYVKAPTVSKFRKDFKFLKVREMNDYHHAKDAYLNIVVGNAYFVKFTSNPIHFIKENPGRSYNLKKMFEQERIERNGEIAWEGGNGTIVTVRKFMEKNNILVTRRSYEATGALFDQQIVKKGKGQVPIKSSDERLCDIQKYGGYNKEAGAYFVLAESEGKKGKKIRTIEYVPIRLKKEIQKSEENIIRYLEEERQLKNPRVLVPEIKIDTLFCVDGFYMWVSGRSGDQLLMQGANQLVLSQEETEILKKIVQYVERKKQNKELKIYDSDHLEEKKVVMLYETFLNKLTNTVYAKKTWSTGKDINGKKRKI

SEQ ID NO: 20203 - protein, 1296 aa, unidentified
  REGION 1..1296: note = Cas Enzyme sequence
  REGION 1272..1287: note = misc_feature - Xaa can be any naturally occurring amino acid
MKGEYYLGLDMGSSSVGWAVTNEKYEILRAHGKTLWGVRLFDSAQTAEERRGFRTAKRRLDRRNWRIELLQKIFAEEVEKIDDGFFRRMKESRYWPEDKRDRQGKCPELPYALFADDDYTDKEYHKQFPTIYHLRKWLMETDETPDIRLIYLALHHMMKHRGHFLLNGNIEQVREFQTTFEQFLEAVRAEELGFSSEIGVERSKEIEAILKDRTLTKSAKKTKAVKAMRAETSCEKEWLGLITGGTAKLGNLFGEKQMDTLERPKLCFADAGYEEYAGEIEAELGEKYVLIEHAKAVYDWAVLADILQNYSSLSEAKVALYEKHKKDLKDLKKLVRENLSREEYQRLFAKKDEKANYYAYIKAPKQCSQEDFYGYLKKNILGKISDVTKASCMQKEMEMGTFLPKQTVKDNSVIPYQIHLYELNAILKNLEDKVPLLKENGEKIQKIFTFRIPYYVGPLNGIRKKGEKSNWAVRKEGKIYPWNFDEMVDLEASAEQFIRRMTNKCTYLPSEDVLPKYSLLYSKYEVLNELNNLRLDGEKISVEQKQKIYEEVFQKSRKVTQKKLKNYLVKEGITGKEVEITGIDGDFKSSLTAYHDFKEKLTNLSLNQAEKECIILNVTLFGDDKAILKQRLKKLFPELTEKQRDSISKLPYRGWGRLSKVFLEEMEAPAPETGEAWSIIRALWETNDNLMQLLSEKYLFASAIEEKNGNEQKKRDISYELVEELYVSPAVKRQIWQSLLIVKEICKVMGNPPKRVFIEMAREKTDQGRTSSRKKKLLELYKKCKAEEKDWIDEIEKRSDAEMRRDKLYLYYTQKGKCMYSGETIELEELWDNQKYDIDHIFPQSKVMDDSLDNRVLVKKKCNQMKEDKYPIDETVRKKMQPFWKSLVDAGLISEEKYKRLIRGNGFEPSELAGFISRQLVETRQSTKAAASILQQVIPDTQIVYVKAPTVSKFRKDFKFLKVREMNDYHHAKDAYLNIVVGNAYFVKFTSNPIHFIKENPGRSYNLKKMFEQERIERNGEIAWEGGNGTIVTVRKFMEKNNILVTRRSYEATGALFDQQIVKKGKGQVPIKSSDERLCDIQKYGGYNKEAGAYFVLAESEGKKGKKIRTIEYVPIRLKKEIQKSEENIIRYLEEERQLKNPRVLVPEIKIDTLFCVDGFYMWVSGRSGDQLLMQGANQLVLSQEETEILKKIVQYVERKKQNKELKIYDSDHLEEKKVMLLYETFLNKLTNTVYAKKLGAQAKTLTEKREKFKELCIEEKCIVLYEVLHFXXXXXXXXXXXXXXXXQEFCVSTKI

SEQ ID NO: 20204 - protein, 1325 aa, unidentified
  REGION 1..1325: note = Cas Enzyme sequence
MKGEYYLGLDMGSGSVGWAVTNEKYEILRAHGKTLWGVRLFDSAQTAEERRGFRTAKRRLDRRNWRIELLQKIFAEEVEKIDDGFFRRMKESRYWPEDKRDRQGKCPELPYALFADDDYTDKEYHKQFPTIYHLRKWLMETDETPDIRLIYLALHHMMKHRGHFLLNGNIEQVREFQTTFEQFLEAVRAEELGFSSEIGVERSKEIEAILKDRTLTKSAKKTKAVKAMRAETSCEKEWLGLITGGTAKLGNLFGEKQMDTLERPKLCFADAGYEEYAGEIEAELGEKYVLIEHAKAVYDWAVLADILQNYSSLSEAKVALYEKHKKDLKDLKKLVRENLSREEYQRLFAKKDEKANYYAYIKAPKQCSQEDFYGYLKKNILGKISDVTKASCMQKEMEMGTFLPKQTVKDNSVIPYQIHLYELNAILKNLEDKVPLLKENGEKIQKIFTFRIPYYVGPLNGIRKKGEKSNWAVRKEGKIYPWNFDEMVDLEASAEQFIRRMTNKCTYLPSEDVLPKYSLLYSKYEVLNELNNLRLDGEKISVEQKQKIYEEVFQKSRKVTQKKLKNYLVKEGITGKEVEITGIDGDFKSSLTAYHDFKEKLTNLSLNQAEKECIILNVTLFGDDKAILKQRLKKLFPELTEKQRDSISKLPYRGWGRLSKVFLEETEAPAPETGEAWSIIRALWETNDNLMQLLSEKYLFASAIEEKNGNEQKKRDISYELVEELYVSPAVKRQIWQSLLIVKEICKVMGNPPKRVFIEMAREKTDQGRTSSRKKKLLELYKKCKAEEKDWIDEIEKRSDAEMRRDKLYLYYTQKGKCMYSGETIELEELWDNQKYDIDHIFPQSKVMDDSLDNRVLVKKKCNQMKEDKYPIDETVRKKMQPFWKSLVDAGLISEEKYKRLIRGNGFEPSELAGFISRQLVETRQSTKVAASILQQVIPDTQIVYVKAPTVSKFRKDFKFLKVREMNDYHHAKDAYLNIVVGNAYFVKFTSNPIHFIKENPGRSYNLKKMFEQERIERNGEIAWEGGNGTIVTVRKFMEKNNILVTRRSYEATGALFDQQIVKKGKGQVPIKSSDERLCDIQKYGGYNKEAGAYFVLAESEGKKGKKIRTIEYVPIRLKKEIQKSEENIIRYLEEERQLKNPRVLVPEIKIDTLFCVDGFYMWVSGRSGDRLLMQGANQLVLSQEETEILKKIVQYVERKKQNKELKIYDSDHLEEKKVMMLYETFLNKLTNTVYAKKLGAQAKTLTEKREKFKELCIEEKCIILYEVLHFFQCQSAAADLKLIGGSGRAGILCLNKNITDCSRIEMIHQSPTGIYEQTVDLNAL

SEQ ID NO: 20205 - protein, 1354 aa, unidentified
  REGION 1..1354: note = Cas Enzyme sequence
MEIMKQKFYVGLDMGTASVGWAVTDDKYNIIKRHGKALWGVRLFKTANTAEERRTFRAARRRTQRRKQRMELLQEIFGDEISKTDIGFYQRMKESKYWFEDKRDINGKQPELPYALFVDDGFTDKDYHEQFPTIFHLRNVLVNEWTQKYDIRLVYLAIHHIIKHRGHFLFEGKKMSEVTDFGSAFEAFCKVASDNDIEITVDEEKLKDIEDLLKSRQKSKTAKKQELGKIIAGADKQKKALAALVTGCTVKLSEIFADKMLDEEEKNKISFSDSNYDENIANVEETLAERFLLIAAGKALYDWAVLSDILEGSTYISEAKVKIYKKHGDDLKKLKGLLKTRPDEYKLIFGLPEKQANYSAYIGMVKKNGKKVPIDKKCTKADFYSFLKKTLNKINFEDEKEREIAESIINEIENETFLPKQVISDNGVIPYQLHEAELDRILKNAALYYPFLSEKDDEGYTNTDKIKAIFKFRIPYYVGPLNTYHSDKGGNSWAVRKQDGKIYPWNFESKIDAEESAGKFIGRMTNKCTYLIGKDVLPKESLLYSKFMVLNELNNLRIDGEKVSVEIKQAVYENVFKKYQRVTGKKVKDFLIRSGIIGREQELSGFDQNFKSSLKAYHDIKQIAGDINLSQNQKEDIIKDITVFADSQKMLKKRLKIKYPELSDKQVTKLAAKKYTGWGRLSREFLEEVESVNKETGEVLNIISALWETNENLMQLLSNKYDYLSEIKRLNDEAEDKSEVVTYDDVQKLYVSPAVKRPVWQTLKIVEEISKIMGSKPERIFVEMAREPGQKGDVKVSRKSRLLEKYKYCKKEAPEIYENLVKEDDNKLRSDKLFLYYTQMGRCMYSNEVIDIEDLFTNRYDIDHIYPQSKVMDDSLDNRVLVKRELNSNKTDVFPVPKEYMDKAKTLWDMLKKKDLISKEKYHRLTRRDGFSENELSGFIARQLVETRQSTKAVTQLLTKAYPESEIVYAKANAVSEFRHKFGFTKVKNINDYHHAKDAYLNIVVGNTYYVKFTKDAAWFIRNNPGRTYNLKKMFEQGTVSRGGETAWVSGDNGTIVTVKKVMRKNNILFTRKAYEVRGGLFDQQLVKKGNGQIPIKGNSYDDRLCATEKYGAYNKASGAYFMLVESEDKKGNKIRTLEFVPVYLAKEMEKSEDAAIRYCVEKLELKNPDIRVRKIKMDSLFNVDGFRMHLSSRNGKQLVFKGAEQLVLPEKYNKIVKDIGKICADYKINKDMVISDTIKITNYVLLDLYDLLLKKLSDTIYKIRLSRQFITLKNRRNNFERLSLLEKCIVLEEILHIFQCNIVNADITMINEGKGKDAGKLQLIYRLSNYDKVEIINQSITGFYEQVIDLKTI

SEQ ID NO: 20206 - protein, 1325 aa, unidentified
  REGION 1..1325: note = Cas Enzyme sequence
MKGEYYLGLDMGSSSVGWAVTNEKYEILRAHGKTLWGVRLFDSAQTAEERRGFRTAKRRLDRRNWRIELLQKIFAEEVEKIDDGFFRRMKESRYWPEDKRDRQGKCPELPYALFADDAYTDKEYHKQFPTIYHLRKWLMETDETPDIRLIYLALHHMMKHRGHFLLNGNIEQVREFQTTFEQFLEAVRAEELGFSSEIGVERSKEIEAILKDRTLTKSAKKTKAVKAMRAETSCEKEWLGLITGGTAKLGNLFGEKQMDTLERPKLCFADAGYEEYTGEIEAELGEKYVLIEHAKAVYDWAVLADILQNYSSLSEAKVALYEKHKKDLKDLKKLVRENLSREEYQRLFAKKDEKANYYAYIKAPKQCSQEDFYGYLKKNILGKISDVTKASCMQKEMEMGTFLPKQTVKDNSVIPYQIHLYELNAILKNLEDKVPLLKENGEKIQKIFTFRIPYYVGPLNGIRKKGEKSNWAVRKEGKIYPWNFDEMVDLEASAEQFIRRMTNKCTYLPSEDVLPKYSLLYSKYEVLNELNNLRLDGEKISVEQKQKIYEEVFQKSRKVTQKKLKNYLVKEGITGKEVEITGIDGDFKSSLTAYHDFKEKLTNLSLNQAEKECIILNVTLFGDDKAILKQRLKKLFPELTEKQRDSISKLPYRGWGRLSKVFLEETEAPAPETGEAWSIIRALWETNDNLMQLLSEKYLFASAIEEKNGNEQKKRDISYELVEELYVSPAVKRQIWQSLLIVKEICKVMGNPPKRVFIEMAREKTDQGRTSSRKKKLLELYKKCKAEEKDWIDEIEKRSDAEMRRDKLYLYYTQKGKCMYSGETIELEELWDNQKYDIDHIFPQSKVMDDSLDNRVLVKKKCNQMKEDKYPIDETVRKKMQPFWKSLVDAGLISEEKYKRLIRGNGFEPSELAGFISRQLVETRQSTKAAASILQQVIPDTQIVYVKAPTVSKFRKDFKFLKIREMNDYHHAKDAYLNIVVGNAYFVKFTSNPIHFIKENPGRSYNLKKMFEQEKIERNGEIAWEGGNGTIVTVRKFMEKNNILVTRRSYEATGALFDQQIVKKGKGQVPIKSSDERLCDIQKYGGYNKEAGAYFVLAESEGKKGKKIRTIEYVPIRLKKEIQKSEENIIRYLEEERQLKNPRVLVPEIKIDTLFCVDGFYMWVSGRSGDQLLMQGANQLVLSQEETEILKKIVQYVERKKQNKELKIYDSDHLEEKKVVMLYETFLNKLTNTVYAKKLGAQAKTLTEKREKFKELCIEEKCIVLYEILHFFQCQSVTADLKLIGGSGRAGILYLNKNITDCSRIEMIHQSPTGIYEQAVDLNAL

SEQ ID NO: 20207 - protein, 1325 aa, unidentified
  REGION 1..1325: note = Cas Enzyme sequence
MKGEYYLGLDMGSGSVGWAVTNEKYEILRTHGKTLWGVRLFDSAQTAEERRGFRTAKRRLDRRNWRIELLQKIFAEEVEKIDDGFFRRMKESRYWPEDKRDRQGKCPELPYALFADDDYTDKEYHKQFPTIYHLRKWLMETDETPDIRLIYLALHHMMKHRGHFLLNGNIEQVREFQTTFEQFLEAVRAEELGFSSEIGVERSKEIEAILKDRTLTKSAKKTKAVKAMRAETSCEKEWLGLITGGTAKLGNLFGEKQMDTLERPKLCFADAGYEEYAGEIEAELGEKYVLIEHAKAVYDWAVLADILQNYSSLSEAKVALYEKHKKDLKDLKKLVRENLSREEYQRLFAKKDEKANYYAYIKAPKQCSQEDFYGYLKKNILGKISDVTKASCMQKEMEMGTFLPKQTVKDNSVIPYQIHLYELNAILKNLEDKVPLLKENGEKIQKIFTFRIPYYVGPLNGIRKKGEKSNWAVRKEGKIYPWNFDEMVDLEASAEQFIRRMTNKCTYLPSEDVLPKYSLLYSKYEVLNELNNLRLDGEKISAEQKQKIYEEVFQKSRKVTQKKLKNYLVKEGITGKEVEITGIDGDFKSSLTAYHDFKEKLTNLSLNQAEKECIILNVTLFGDDKAILKQRLKKLFPELTEKQRDSISKLPYRGWGRLSKVFLEETEAPAPKTGEAWSIIRALWETNDNLMQLLSEKYLFASAIEEKNGNEQKKRDISYELVEELYVSPAVKRQIWQSLLIVKEICKVMGNPPKRVFIEMAREKTDQGRTSSRKKKLLELYKKCKAEEKDWIDEIEKRSDAEMRRDKLYLYYTQKGKCMYSGETIELEELWDNQKYDIDHIFPQSKVMDDSLDNRVLVKKKCNQMKEDKYPIDETVRKKMQPFWKSLVDAGLISEEKYKRLIRGNGFEPSELAGFISRQLVETRQSTKAAASILQQVIPDTQIVYVKAPTVSKFRKDFKFLKVREMNDYHHAKDAYLNIVVGNAYFVKFTSNPIHFIKENPGRSYNLKKMFEQERIERNGEIAWESGNGTIVTVRKFMEKNNILVTRRSYEATGALFDQQIVKKGKGQVPIKSSDERLCDIQKYGGYNKEAGAYFVLAESEGKKGKKIRTIEYVPIRLKKEIQKSEENIIRYLEEERQLKNPRVLVPEIKIDTLFCVDGFYMWVSGRSGDQLLMQGANQLVLSQEETEILKKIVQYVERKKQNKELKIYDSDHLEEKKVMMLYETFLNKLTNTVYAKKLGAQAKTLTEKREKFKELCIEEKCIVLYEILHFFQCQSVTADLKLIGGSGRAGILYLNKNITDCSRIEMIHQSPTGIYEQAVDLNAL

SEQ ID NO: 20208 - protein, 1352 aa, unidentified
  REGION 1..1352: note = Cas Enzyme sequence
MEIMKQKFYVGLDMGTASVGWAVTDDKYNIIKRHGKALWGVRLFKTANTAEERRTFRAARRRTQRRKQRMELLQEIFGDEISKTDIGFYQRMKESKYWFEDKRDINGKQPELPYALFVDDGFTDKDYHEQFPTIFHLRNVLVNEWTQKYDIRLVYLAIHHIIKHRGHFLFEGKKMSEVTDFGSAFEAFCKVASDNDIEITVDEEKLKDIEDLLKSRQKSKTAKKQELGKIIAGADKQKKALAALITGCTVKLSEIFADKSLDDGERNKISFADSNYDEYIANVEETLAERFLLIAAGKALYDWAVLSDILEGSTYISEAKVKIYKKHGDDLRKLKGLLKTRPDEYKLIFGLPEKQANYSAYIGMVKKNGKKVPIDKKCTKADFYSFLKKTLNKINFEDEKEREIAESIINEIENETFLPKQVISDNGVIPYQLHEAELDRILKNVALYYPFLSEKDDEGYTNTDKIKELFKFRIPYYVGPLNTYHSDKGGNSWAVRKQDGKIYPWNFESKIDAEESAGKFIGRMTNKCTYLIGKDVLPKESLLYSKFMVLNELNNLRIDGEKVSVEIKQAVYENVFKKYQRVTGKKVKDFLIRSGIIGREQELSGFDQNFKSSLKAYHDIKQIAGDINLSQNQKEDIIKDITVFADSQKMLKKRLKIKYPELSDKQVTKLAAKKYTGWGRLSREFLEEVESVNKETGEVLNIISALWETNENLMQLLSNKYDYLSAIKRLNDEAEDKSEVVTYDDVQKLYVSPAVKRPVWQTLKIVEEISKIMGSKPERIFVEMAREPGQKGDVKVSRKSRLLEKYKYCKKEAPEIYENLVKEDDNKLRSDKLFLYYTQMGRCMYSNEVIDIEDLFTNRYDIDHIYPQSKVMDDSLDNRVLVKRELNSNKTDVFPVPKEYMDKAKTLWDMLKKKDLISKEKYHRLTRRDGFSENELSGFIARQLVETRQSTKAVTQLLTKAYPESEIVYAKANAVSEFRHKFGFTKVRSINDYHHAKDAYLNIVVGNTYYVKFTKDAAWFIRNNPGRTYNLKKMFEQGTVSRGGETAWVSGEDGTIFTVKRVMGKNNILFTRKAYEVKGGLFDQQIMKKGKGQIPIKNNSGDDRLCATEKYGAYNKASGAYFMLVESEDKKGNKIRTLEFVPVYLAKEMEKSEDAAIRYCVEKLELKNPDIRVRKIKMDSLFNVDGFRMHLSGRTGKQLIFKCAEQLVLDEESQKILKKTGKICADYKINKNVKISDKMELTDEMLIKLYELFYKKLKDTVYNIRLSTQVKTLESGKEKFEKLSLLDKCLVIEEILHLFQCQSVAANLSSIGGAARAGILLLNNEISRCGKVEIINQSITGFYEQVIDLKTI

SEQ ID NO: 20209 - protein, 1341 aa, unidentified
  REGION 1..1341: note = Cas Enzyme sequence
MGKGYYVGLDMGTGSVGWAVTDESYQILRRHGKAMWGVRLFESAKTAEERRMFRTGRRRLDRRGWRIEILQEIFAEEISRVDPGFFLRMKESKYYPEDKRDIQGNCPELPYTLFVDKTFTDKDFHKKYPTIYHLRKMLMETEDTPDMRLVYLALHHMMKHRGHFLLSGDISQVTEFKNTFNQFIENIRNEEMDFEIELDESAVQMIEETLKDKNLTRSAKKSKLVKGLNAKNVRDKAFLTLLSGGTVKLSDLFGMEELNEGERPKISFADNGYEEYAAVVEMELGELYYIVESAKAVYDWAILSDILGGSTSISDAKVRAYEKHKADLKYLKAVVKEYFPKEVYNAVFVESSDKLNNYPAYIGMTKKNGKKVSLEGKRCSREEFMDFLKKNIVVKLPDEEAKMYLQSELEKDSFLPKQVNKDNGVIPYQVHKYELKKILDNLGDKIPFLKENAEKIEKLFSFRIPYYVGPLRTGNGENSKFAWAERKSTEKIYPWNFENVIDVEQRAENFIRRMTNKCTYLIGEDVLPKDSLLYSKFMVLNELNNLRLDGQKISVELKQKIYRDVFCRSRKVTQKKLKSYLIREGIAGKNVELTGIDGDFKGSLTAYHDFKEKLIDVELTQKEKEEIILNIVLFGDDKKLLKQRLKKKFPQLTEKQINTVTALSYKGWGRLSKKLLEEVTVPAPETGEVWNIITALWETNDNFMQLLSKEYQFSDRIEEFNEEKADPEVSYQTIEDLYVSPAVKRQIWQTLQIIQEIEKVMGEKPKRVFVEMAREKQENKRTESRKKTLSDLYTKCKKEEPEWIEALCTSLEKHEEHQLRSDKLYLYYTQKGRCMYSGEPIDLEDLWDNTKYDIDHIYPQSKTMDDSLKNRVLVKKEYNAKKSDTYPIAADIQKKMMPFWKSLLTGGFIPKEKYDRLVRNNPLDANELAGFIERQIVETRQSTKAVAEILKKILPDTEIVYVKAKTVSKFRQDFDFIKVRDMNDLHHAKDAYLNIVVGNVYFVKFTKNAAWFVKENPGRTYNLEKMFIWDVARDGEIAWKAGKSGSIVQVRAMMEKNHILVTRRSYEVKGGLFDQQILKKGKGQVPVKESDERLRDIGKYGGYNKAAGVYFMLVSSKDKKGKEQRTIEFVPIYLKDRVEKDMESARNYLMEERGLREPKILIKKIKIDTLFKVDGFYMWLSGRTSNQLIFKGANQLILSKEDMKTLKKVVKYIQRQKEDKNVKISVRDGITEEELLKLYETFLDKIRHSIYGVRLSSQEKTLVNGKEKFIDLSVEAKCQVLYEILHLFQCQSGASNLKMIGGPASAGILVMNNNISKCKNISIVNQSPTGIYEKEIDLLRV

SEQ ID NO: 20210 - protein, 1340 aa, unidentified
  REGION 1..1340: note = Cas Enzyme sequence
MFVKQDYFLGLDMGTGSLGWAVTDSTYQVMRKHGKALWGTRLFESASTAEERRMFRTARRRVDRRNWRIQVLQEIFSEEISKVDPGFFLRMKESKYYPEDKRDAEGNCPELPYALFVDDNYTDKDYHKDYPTIYHLRKMLMETTEIPDIRLVYLVLHHMMKHRGHFLLSGDISQIKEFKSTFEQLIQNIQDEELEWHISLDDAAMQFVEHILKDRNLTRSTKKSRLIKQLNAKSACEKAILNLLSGGTVKLSDIFNNKELDESERPKVSFADSGYDDYIGIVEAELAEQYYIIASAKAVYDWSVLVEILGNSVSISEAKIKVYQKHQEDLKTLKKIVRQYMTKEDYKRVFVDTEEKLNNYSAYIGMTKKNGKKVDLKSKQCTQADFYDFLKKNVIKVIDHKEITQEIESEIEKENFLPKQVTKDNGVIPYQVHDYELKKILDNLGTRMPFIKENAEKIQQLFEFRIPYYVGPLNRVDDGKDGKFTWSVRKSDARIYPWNFTDIIDVEASAEKFIRRMTNKCTYLVGEDVLPKDSLVYSKFMVLNELNNLRLNGEKISVELKQRIYEELFCKYRKVTRKKLERYLVIEGIAKKGVEITGIDGDFKASLTAYHDFKERLTDVQLSQKAKEAIVLNIVLFGDDKKLLKQRLSKMYPNLTTGQLKGICSLSYQGWGRLSKTFLEEITVPAPGTGEVWNIMTALWQTNDNLMQLLSRNYRFANEVEEFNTLKKETDLSYKTVDELYVSPAVKRQIWQTLKVVKEIQKVMGNAPKRVFVEMAREKQESKRSDSRKKQLVELYRACKDEERDWITELNAQSDQQLRRDKLFLYYIQKGRCMYSGETIQLDELWDNTKYDIDHIYPQSKTMDDSLNNRVLVKKNYNAIKSDTYPLSLDIQKKMMSFWKMLQQQGFITKEKYVRLVRSDELSADELAGFIERQIVETRQSTKAVATILKEALPDTEIVYVKAGNVSNFRQTYELLKVREMNDLHHAKDAYLNIVVGNAYFVKFTKNAAWFIRNNPGRSYNLKRMFEFDIERSGEIAWKAGNNGSIVTVKKVMQKNNILVTRKAYEVKGGLFDQQIMKKGKGQVPIKGNDERLANIEKYGGYNKAAGTYFMLVKSLDKKGKEIRTIEFVPLYLKNQIEINHESAIQYLAQERGLNSPEILLSKIKIDTLFKVDGFKMWLSGRTGNQLIFKGANQLILSHQEAAILKGVVKYVNRKNENKEAKLSERDGMTEEKLLQLYDTFLDKLSNTVYSIRLSAQIKTLTEKRAKFIGLSNEDQCIVLNEILHMFQCQSGSANLKLIGGPGSAGILVMNNNITACKQISVINQSPTGIYEKEIDLMKL

SEQ ID NO: 20211 - protein, 1342 aa, unidentified
  REGION 1..1342: note = Cas Enzyme sequence
MNQEYYMGLDMGTGSLGWAITDTDYHILRRHGKALWGVRLFESALTAEERRSFRIARRRLDRRNWRIQILQELFSEEISKVDLGFFQRMKESKYYPEDKKDINGKCPELPYALFVDKNYTDKEYHREYPTIYHLRKMLMETEEMPDIRLVYLGLHHMMKHRGHFLLSGDISKIKEFKGTFLQLEENLKKEELNWTLELSDDEIQFIENTLKDRMHTKSVKKSRLIKQLNAKTTCEKAILNLISGGSVKLSDIFENSELDGCENPKISFSDTGYDDYIGTVEADLVEQYYIIESAKAVYDWSVLVEILGDSSSISEAKVKLYEKHKADLRYLKKIVRKYLPLEYKHIFIDTEEKLNNYVAYIGMTKKNGKKNDLQSKKCSKEEFYDFLKKNVIKKISDQEVVSYLEKELEQGTFLPKQVNKENSVIPYQVHMYELRKILDNLSGKSSFMQENKEKILQLFEFRIPYYVGPLGRNEEGTEGKFTWAVRKNNEKIYPWNFKDVIDIEESAEKFIRRMTNKCTYMLGEDVLPKDSLLYSKYMVLNELNNLRLNGEKISVELKQRLYKEVFCCYRKVTIKKLKNYLIREGIVDKNVEITGIDGDFKAQLTAFHDFKEKLTGVTLSQKEKEEIILNIVLFGDDKKLLKQRVMRMHPELTEKQIKSISMLSYKGWGRLSKAFLENITTPAPGTEEVWNVITAMWETNDNLMQILSKNYQFMDRIEEYNSIRKEKNLSYKTVDELYVSPAVKRQIWQTLKVVKELQKVMGCAPKRVFVEMARGEQGNQKDKRRDSRKKQLIDLYKKCKEEERDWIEELNKNEDQQLRSDKLYLYYTQKGRCMYSGEIIQLEDLWDNTKYDIDHIYPQSKTMDDSLNNRVLVKKEYNAAKSDEYPIKESIRKARKLFWKSLLDEGFITKEKYERLIRNTALTPDELAGFINRQLVENRQSTKAVAEILKQVFPDSEIVYVKAKNVSEFRQDFTPDLLKVRDMNDLHHAKDAYLNIVVGNSYYTKFTKNAAWFIKENPGRSYNLKMMFKGDKDIIRNGEVAWKAGNNGTIVTVKNVMKKNNILVTRRTYEVKGGLFKQQPIKKGKGQLPLKESDNRLNNLKKYGGYTEIAGSYYLLVKSIDKKGKIKKTIEYIPIYLRETLENNKEKIIYYLKERGLINPQILLKIKTDTLFKINGSYIWISGRKTNYLIFKNANQLVLENTNAIILKNIIKFLQRKAENKNLQITHNDKLGEKELCQVYDVLSKKLEIPVYSAILTSEMEAVKKGREKFIELSREEQCNTIKKILHIMQCRSARENLREIGGGTEAGRILINKNIDKYKQISIINQSPTGIYEEEIDLLKL

SEQ ID NO: 20212 - protein, 1342 aa, unidentified
  REGION 1..1342: note = Cas Enzyme sequence
MNQEYYMGLDMGTGSLGWAITDTDYHILRRHGKALWGVRLFESALTAEERRSFRIARRRLDRRNWRIQILQELFSEEISKVDLGFFQRMKESKYYPEDKKDINGKCPELPYALFVDKNYTDKEYHREYPTIYHLRKMLMETEEMPDIRLVYLGLHHMMKHRGHFLLSGDISKIKEFKGTFLQLEENLKKEELNWTLELSDDEIQFIENTLKDRMHTKSVKKSRLIKQLNAKTTCEKAILNLISGGSVKLSDIFENSELDGCENPKISFSDTGYDDYIGTVEADLVEQYYIIESAKAVYDWSVLVEILGDSSSISEAKVKLYEKHKADLRYLKKIVRKYLPLEYKHIFIDTEEKLNNYVAYIGMTKKNGKKNDLQSKKCSKEEFYDFLKKNVIKKISDLEVVSYLEKELEQGTFLPKQVNKENSVIPYQVHMYELRKILDNLSGKSSFMQENKEKILQLFEFRIPYYVGPLGRNEEGTEGKFTWAVRKNNEKIYPWNFKDVIDIEESAEKFIRRMTNKCTYMLGEDVLPKDSLLYSKYMVLNELNNLRLNGEKISVELKQRLYKEVFCCYRKVTIKKLKNYLIREGIVDKNVEITGIDGDFKAQLTAFHDFKEKLTGVTLSQKEKEEIILNIVLFGDDKKLLKQRVMRMHPELTEKQIKSISMLSYKGWGRLSKAFLENITTPAPGTEEVWNVITAMWETNDNLMQILSKNYQFMDRIEEYNSIRKEKNLSYKTVDELYVSPAVKRQIWQTLKVVKELQKVMECAPKRVFVEMARGEQGNQKDKRRDSRKKQLIDLYKKCKEEERDWIEELNKNEDQQLRSDKLYLYYTQKGRCMYSGEIIQLEDLWDNTKYDIDHIYPQSKTMDDSLNNRVLVKKEYNAAKSDEYPIKGSIRKARKLFWKSLLDEGFITKEKYERLIRNTALTPDELAGFINRQLVETRQSTKAVAEILKQVFPDSEIVYVKAKNVSEFRQDFTPDLLKVRDMNDLHHAKDAYLNIVVGNSYYTKFTKNAAWFIKENPGRSYNLKMMFKGDKDIIRNGEVAWKAGNNGTIVTVKNVMKKNNILVTRRTYEVKGGLFKQQPIKKGKGQLPLKESDNRLNNLKKYGGYTEIAGSYYLLVKSIDKKGKIKKTIEYIPIYLRETLENNKEKIIYYLKERGLINPQILLKIKTDTLFKINGSYIWISGRKTNYLIFKNANQLVLENTNAIILKNIIKFLQRKAENKNLQITHNDKLGEKELCQVYDVLSKKLEIPVYSAILMSEMEAVKKGREKFIELSREEQCNTIKKIFHIMQCRSARENLREIGGGTEAGRILINKNIDKYKQISIINQSPTGIYEEEIDLLKL

SEQ ID NO: 20213 - protein, 1342 aa, unidentified
  REGION 1..1342: note = Cas Enzyme sequence
MNQEYYMGLDMGTGSLGWAITDTDYHILRRHGKALWGVRLFESALTAEERRSFRIARRRLDRRNWRIQILQELFSEEISKVDLGFFQRMKESKYYPEDKKDINGKCPELPYALFVDKNYTDKEYHREYPTIYHLRKMLMETEEMPDIRLVYLGLHHMMKHRGHFLLSGDISKIKEFKGTFLQLEENLKKEELNWTLELSDDEIQFIENTLKDRMHTKSVKKSRLIKQLNAKTTCEKAILNLISGGSVKLSDIFENSELDGCENPKISFSDTGYDDYIGTVEADLVEQYYIIESAKAVYDWSVLVEILGDSSSISEAKVKLYEKHKADLRYLKKIVRKYLPLEYKHIFIDTEEKLNNYVAYIGMTKKNGKKNDLQSKKCSKEEFYDFLKKNVIKKISDQEVVSYLEKELEQGTFLPKQVNKENSVIPYQVHMYELRKILDNLSGKSSFMQENKEKILQLFEFRIPYYVGPLGRNEEGTEGKFTWAVRKNNEKIYPWNFKDVIDIEESAEKFIRRMTNKCTYMLGEDVLPKDSLLYSKYMVLNELNNLRLNGEKISVELKQRLYKEVFCCYRKVTIKKLKNYLIREGIVDKNVEITGIDGDFKAQLTAFHDFKEKLTGVTLSQKEKEEIILNIVLFGDDKKLLKQRVMRMHPELTEKQIKSISMLSYKGWGRLSKAFLENITTPAPGTEEVWNVITAMWETNDNLMQILSKNYQFMDRIEEYNSIRKEKNLSYKTVDELYVSPAVKRQIWQTLKVVKELQKVMGCAPKRVFVEMARGEQGNQKDKRRDSRKKQLIDLYKKCKEEERDWIEELNKNEDQQLRSDKLYLYYTQKGRCMYSGEIIQLEDLWDNTKYDIDHIYPQSKTMDDSLNNRVLVKKEYNAAKSDEYPIKESIRKARKLFWKSLLDEGFITKEKYERLIRNTALTPDELAGFINRQLVENRQSTKAVAEILKQVFPDSEIVYVKAKNVSEFRQDFTPDLLKVRDMNDLHHAKDAYLNIVVGNSYYTKFTKNAAWFIKENPGRSYNLKMMFKGDKDVIRNGEVAWKAGNNGTIVTVKNVMKKNNILVTRRTYEVKGGLFKQQPIKKGKGQLPLKESDNRLNNLKKYGGYTEIAGSYYLLVKSIDKKGKIKKTIEYIPIYLRETLENNKEKIIYYLKERGLINPQILLKIKTDTLFKINGSYIWISGRKTNYLIFKNANQLVLENTNAIILKNIIKFLQRKAENKNLQITHNDKLGEKELCQVYDVLSKKLEIPVYSAILTSEMEAVKKGREKFIELSREEQCNTIKKILHIMQCRSARENLREIGGGTEAGRILINKNIDKYKQISIINQSPTGIYEEEIDLLKL

SEQ ID NO: 20214 - protein, 1342 aa, unidentified
  REGION 1..1342: note = Cas Enzyme sequence
MNQEYYMGLDMGTGSLGWAITDTDYHILRRHGKALWGVRLFESALTAEERRSFRIARRRLDRRNWRIQILQELFSEEISKVDLGFFQRMKESKYYPEDKKDINGKCPELPYALFVDKNYTDKEYHREYPTIYHLRKMLMETEEMPDIRLVYLGLHHMMKHRGHFLLSGDISKIKEFKGTFLQLEENLKKEELNWTLELSDDEIQFIENTLKDRMHTKSVKKSRLIKQLNAKTTCEKAILNLISGGSVKLSDIFENSELDGCENPKISFSDTGYDDYIGTVEADLVEQYYIIEYAKAVYDWSVLVEILGDSSSISEAKVKLYEKHKADLRYLKKIVRKYLPLEYKHIFIDTEEKLNNYVAYIGMTKKNGKKNDLQSKKCSKEEFYDFLKKNVIKKISDQEVVSYLEKELEQGTFLPKQVNKENSVIPYQVHMYELRKILDNLSGKSSFMQENKEKILQLFEFRIPYYVGPLGRNEEGTEGKFTWAVRKNNEKIYPWNFKDVIDIEESAEKFIRRMTNKCTYMLGEDVLPKDSLLYSKYMVLNELNNLRLNGEKISVELKQRLYKEVFCCYRKVTIKKLKNYLIREGIVDKNVEITGIDGDFKAQLTAFHDFKEKLTGVTLSQKEKEEIILNIVLFGDDKKLLKQRVMRMHPELTEKQIKSISMLSYKGWGRLSKAFLENITTPAPGTEEVWNVITAMWETNDNLMQILSKNYQFMDRIEEYNSIRKEKNLSYKTVDELYVSPAVKRQIWQTLKVVKELQKVMECAPKRVFVEMARGEQGNQKDKRRDSRKKQLIDLYKKCKEEERDWIEELNKNEDQQLRSDKLYLYYTQKGRCMYSGEIIQLEDLWDNTKYDIDHIYPQSKTMDDSLNNRVLVKKEYNAAKSDEYPIKGSIRKARKLFWKSLLDEGFITKEKYERLIRNTALTPDELAGFINRQLVETRQSTKAVAEILKQVFPDSEIVYVKAKNVSEFRQDFTPDLLKVRDMNDLHHAKDAYLNIVVGNSYYTKFTKNAAWFIKENPGRSYNLKMMFKGDKDIIRNGEVAWKAGNNGTIVTVKNVMKKNNILVTRRTYEVKGGLFKQQPIKKGKGQLPLKESDNRLNNLKKYGGYTEIAGSYYLLVKSIDKKGKIKKTIEYIPIYLRETLENNKEKIIYYLKERGLINPQILLKIKTDTLFKINGSYIWISGRKTNYLIFKNANQLVLENTNAIILKNIIKFLQRKAENKNLQITHNDKLGEKELCQVYDVLSKKLEIPVYSAILMSEMEAVKKGREKFIELSREEQCNTIKKIFHIMQCRSARENLREIGGGTEAGRILINKNIDKYKQISIINQSPTGIYEEEIDLLKL

SEQ ID NO: 20215 - protein, 1288 aa, unidentified
  REGION 1..1288: note = Cas Enzyme sequence
VRLFDSAQTAEERRGFRTAKRRLDRRNWRIELLQKIFAEEVEKIDDGFFRRMKESRYWPEDKRDRQGKCPELPYALFADDDYTDKEYHKQFPTIYHLRKWLMETDETLDIRLIYLALHHMMKHRGHFLLNGNIEQVREFQTTFEQFLEAVRAEELGFSSEIGVERSKEIEAILKDRTLTKSAKKTKAVKAMRAETSCEKEWLGLITGGTAKLGNLFGEKQMDTLERPKLCFADAGYEEYAGEIEAELGEKYVLIEHAKAVYDWAVLADILQNYSSLSEAKVALYEKHKKDLKDLKKLVRENLSREEYQRLFAKKDEKANYYAYIKAPKQCSQEDFYGYLKKNIMGKISDVTKASCMQKEMEMGTFLPKQTVKDNSVIPYQIHLYELNAILKNLEDKVPLLKENGEKIQKIFTFRIPYYVGPLNGIRKKGEKSNWAVRKEGKIYPWNFDEMVDLEASAEQFIRRMTNKCTYLPSEDVLPKYSLLYSKYEVLNELNNLRLDGEKISVEQKQKIYEEVFQKSRKVTQKKLKNYLVKEGITGKEVEITGIDGDFKSSLTAYHDFKEKLTNLSLNQAEKECIILNVTLFGDDKAILKQRLKKLFPELTEKQRDSISKLPYRGWGRLSKVFLEETEAPAPETGEAWSIIRALWETNDNLMQLLSEKYLFASAIEEKNGNEQKKRDISYELVEELYVSPAVKRQIWQSLLIVKEICKVMGNPPKRVFIEMAREKTDQGRTSSRKKKLLELYKKCKAEEKDWIDEIEKRSDAEMRRDKLYLYYTQKGKCMYSGETIELEELWDNQKYDIDHIFPQSKVMDDSLDNRVLVKKKCNQMKEDKYPIDETVRKKMQPFWKSLVDAGLISEEKYKRLIRGNGFEPSELAGFISRQLVETRQSTKAVASILQQVIPDTQIVYVKAPTVSKFRKDFKFLKVREMNDYHHAKDAYLNIVVGNAYFVKFTSNPILFIKENPGRSYNLKKMFEQERIERNGEIAWEGGNGTIVTVRKFMEKNNILVTRRSYEATGALFDQQIVKKGKGQVPIKSSDERLCDIQKYGGYNKEAGAYFVLAESEGKKGKKIRTIEYVPIRLKKEIQKSEENIIRYLEEERQLKNPRVLVPEIKIDTLLCVDGFYMWVSGRSGDQLLMQGANQLVLSQEETEILKKIVQYVERKKQNKELKIYDSDHLEEKKVMMLYETFLNKLINTVYAKKLGAQAKTLTEKREKFKELCIEEKCIVLYEILHFFQCQSVTADLKLIGGSGRAGILYLNKNITDCSRIEMIHQSPTGIYEQAVDLNAL

SEQ ID NO: 20216 - protein, 913 aa, unidentified
  REGION 1..913: note = Cas Enzyme sequence
FASANTAEERRGFRTARRRLDRRNWRINILQELFAEEISKVDSGFYLRMKESKYYPEDKKDSSGKCPELPYALFVDKDYTDKDYHKEYPTIYHLRKMLMETEKVPDIRLVYLAIHHMMKHRGHFLLSGDINQVTEFENTFLQFAENLKNEELDFQVEMSEERIKEVEIVLKDKNLTKSAKKNRLIKYFGAKSACEKAVFTLITGGTVKLSDVLGNEELNNCEKDKISFSDNNYDEYVGTVEEDLGEQFYIIESAKAVYDWSILADILGDSASISEAKVKSYEKHKEDLAYLKKVVKQYLPKEIYKKVFVITEDKLCNYPAYIGMTKINGKKVDLQGKQCSREDFLSFLKKEVVKKIEDESVKNYLSEEIEKDTFLPRQVNKDNGVIPYQIHKFELKKIIDNLSDKMPFIKENGEKIMQLFEFRIPYYVGPLGKKSEKFAWAVRKNDDKIYPWNFEQVIDVEESAEKFIRRMTNKCTYLIGEDVLPKDSLLYSKYIVLNELNNLRLGGEKISVALKQRIYEELFQRKRKVRQKDLKNYLIREGIAGKEVEISGIDGDFKGSLTAYHDFKEKLTGVELSKKEQEEIILNIVLFGDDKKLLKQRLGKRFPKLTEKQKATLASLSYSGWGRFSKKFLEEITAPAPETGEVWNIITALWESNNNLMQLLSSDYMFMESIEEFNHGKKNMTLTYETIENLYVSPAVKREIWQTLKILKEIQKVMGGEPKRVFIEMAREHQESKRTDSRKSWLMDLYKACKKEERDWLEELGQYESHQLRSDKLFLYYTQKGKCMYSGESINLEELWDNTKYDVDHIYPQSKTMDDSINNRVLVKRQYNAKKTDNYPLNSDIQEKMSSYWKMLLDGGFITKEKYERLVRKTELTPNELAGFIERQLVETRQGTKAVAEILKEAMPDYNYV

SEQ ID NO: 20217 - protein, 1336 aa, unidentified
  REGION 1..1336: note = Cas Enzyme sequence
MEQEYYIGLDIGTSSVGWAVTDMNYQIIKRHGKALWGSRLFASANTAEERRGFRTARRRLDRRNWRINILQELFAEEISKVDSGFYLRMKESKYYPEDKKDSSGKCPELPYALFVNKDYTDKDYHKEYPTIYHLRKMLMETEKVPDIRLVYLAIHHMMKHRGHFLLSGDINQVTEFKNTFLQFVENLKNEKLDFQVEMSEEKIKEVEIVLKDKNLTKSAKKNRLIKYFGAKSACEKAIFTLITGGTVKLSDVLGNEELNNCEKVKISFSDNNYDEYVGTVEEDLGEQFYIIESAKAVYDWSILADILGDSASISEAKVKSYEKHKEDLAYLKKVVKQYLPKEIYKKVFVITEDKLCNYPAYIGMTKINGKKVDLQGKQCNREDFLSFLKKEVVKKIEDESVKNYLSEEIEKDTLLPRQVNKDNGVIPYQIHKYELKKIIDNLSDKMPFIKENGEKIMQLFEFRIPYYVGPLGKKTEKFAWAVRKNDDKIYPWNFEQVIDVEESAEKFIRRMTNKCTYLVGEDVLPKDSLLYSKYIVLNELNNLRLGGEKISVALKQRIYEKLFQRKRKVRQKDLKNYLIREGIAGKEVEISGIDGDFKGSLTAYHDFKEKLTGVELSKKEQEEIILNIVLFGDDKKLLKQRLGKRFPKLTEKQKATLASLSYSGWGRFSKKFLEEIIAPAPETGEVWNIITALWESNNNLMQLLSSDYMFMESIEEFNHGKKNITLTYETIENLYVSPAVKREIWQTLKILKEIQKVMGGEPKRVFIEMAREHQESKRTDSRKSWLMDLYKACKKEERDWLEELGQYESHQLRSDKLFLYYTQKGKCMYSGESINLEELWDNTKYDVDHIYPQSKTMDDSINNRVLVKRQYNAKKTDKYPLNSDIQEKMSSYWKMLLDGGFITKEKYERLVRKTELTPNELAGFIERQLVETRQGTKAVAEILKEAMPDTEVVYAKAKNVSEFRHEYGFIKVREMNDLHHAKDAYLNIVVGNSYYVKFTKSAANFIRENPGRSYTLKTKELFAHDIVRNDEVAWKSGNHGTMEIVEQTMKKNNILVTRRIYEVKGGLFDQQIMKKGKGQIPIKGGDERLKNIYKYGGYNKASGAYFMLVKSLDKKNNEQRTLEFLPIYMKDYVEQSEEKAQEYLVTNRKLKNPEIILPKVKIDTLFKVDGFYMWLSGRTENRLIFKCANQLILSEEDVKILKKVIKFINRKKENKDIVLNEYDGITEEDAGNLYETFIRKLKDSIYKKRLALQGETLENKRKEFEALSLEDKCIVLGEILHLFQCQSGAANLKLIGGPASAGILVMNNNISKCNQISIITQSPTGIFEKEMDLLNL

SEQ ID NO: 20218 - protein, 1376 aa, unidentified
  REGION 1..1376: note = Cas Enzyme sequence
MAHSVWNKKSAMQTFFFYRQKLKLREDSGMEKDYYLGLDLGTGSLGWAVTNENYEVLRAHGKALWGVRLFESANTAEERRIFRTSRRRLDRRNWRIELLQGLFAEEIDKVDSGFYLRMKESKYMPEDKRDMNGECPQLPYALFVDKDFNDKDYHKQFPTIYHLRQWLMTTNETPDIRLVYLALHHIMKHRGHFLLSGDIENIREFDSTFSQFIQCLREEELDFHLDISAETSKVAETILQDKSLTKAAKKMRLIKELQAHTPCEKAVLTMIAGGTVKLSDIYTNSEYDNLERSKLSFSDSTYDDYSNTLQSDLGEQFIIIEKAKMVYDWSVLIDILGNYQSISESKVAIYEKHKKDLAYLKKLVKENFDSNLYRDIFVKTDEKTANYSAYIGMTKKNGKKVAIEGKQCSQSDFYQYIRKNVLNELTGNTDAQYLKDELDKETFLPKQVHKDNSVIPYQVHLYELNQILKNLSPRMPILQETGDKIRQIFTFRIPYYVGPLNGVLQNGQKTNWVVRRNAPNTKSEKIYPWNFNEIIDVEASAEKFIRRMTNKCTYLIHEDVVPKNSLLYSKYVVLNELNNLCLNGEPIDVALKQKIYHDVFEKSRKVTQKKLKDYLVREGIIAKSDAAKLDITGIDGDFKGSLTAYHDFKEKLSNCALSQEDKENIILNITLFGQDKTLLKKRLSALYPQLTDKQKSALCALNYSGWGRFSQKFLEGITAPAPKTGEVCTIIRTMWETNDNLMQVLSNQYLFRDAIEEENGKDEIKGFSYQLVDQLYVSPAVKRQIWQTLQIVKELCKVMGNPPKRIFVEMAREKSESKRTESRKKVLIDLYKKCKDEEREWVAELTKLEDTRLRGDKLYLYYTQKGRCMYSGEPIELDALWDNNKYDIDHIYPQSKVMDDSLDNRVLVKKTYNAEKTDIYPIRSEIREKMKPFWKSLLDGGFISKEKYNRLIRSNKFESSELAGFIERQLVETRQSTKAVASILKQLLPDTEIVYVKAKIVSNFRQDFHLVKVREMNDLHHAKDAYLNIVVGNVYYTKFTKDAVWFIHNNPGRTYNLKRMFTSKDIERNGQTAWKAGENGTISVVKRMMKKNNILVTRRSYEVKGGLFDQQLMKKGKGQVPIKGNDERLQNIEQYGGYNKASGTYFMLVESEDKKGNKIRTIEFVPLYLCHKIENDTAYAIQYLIQDRGLINPQILLAKIKIDTLFQVDGFYMWLSGRTGNQLVFKGANQLILSAADTSVLKKVLKFVARQKENKNLKLVAFDELDTADLIGLYDTFISKIKDTVYGVRLKAQESTLVEKRAEFCDLADEDKCIVLSEILHMFQCQSTTADLKLIHGPGHAGILVLNNNITKCKQISIINQSPTGIYAQEIDLQKL

SEQ ID NO: 20219 - protein, 1114 aa, unidentified
  REGION 1..1114: note = Cas Enzyme sequence
MENTYYLGLDMGSASLGWAVTDSEYHILKKHGESLWGVRLFDSASTAEERRTFRTSRRRLDRRNWRIQILQEIFAEEISKIDPGFFLRMKESKYYPEDKRDESGNCPELPYALFVDSGFTDKDFHREFPTIYHLRKWLMETEETPDIRLLYLAFHHMIKHRGHFLLSGDISKIKKFDSTFLTLLQNVAEEELDWNLEIDSAQISAIENILKNRNLTRSAKKSQLIRLSGAKTACEKAIFTLISGGTVKLSDIFGNDDLNESERPKISFSDSGYDDYIEAVTLTLGEQFYIIESAKAVYDWSVLADILGDSVSISAAKVKVYEKHKKDLMYLKKIVRSNLSKEDYKNIFVNTDAKLNNYCAYVGMTKKNGRKVSLAGKCCSQIEFYDFLKKNVLSKIDDTVIKEYLENEINCENFLPKQINKGNSVIPYQVHLFELKSILKNMEAKIPFIRENSDKIIQLFEFRIPYYVGPLCGESAGCRGKFSWAVRKSYDKIYPWNFNDVIDTESSAEVFIRRMTNKCTYLAGEDVLPKDSLLYSKFMVLNELNNVKLNGASISPELKQKIYTDVFCRCRKVTQKKLRNYLVCEGIADRTVDITGIDGDFKASLNSFHDFKEKLTGAELNQQEKEMIILNIVLFGEDKKLLKQRLKKLFPKLTEDQMKAICTLSYKGWGKLSKKFLEEVTVPDPETGEFINIITALWKTNDNLMQLLYGPLGFMKYVEDYNSGSEKVSLDYESIENLYVSPAVKRQIWQTLKVVKEIRKCMGTDPKRIFVEMAREKQESKRTESRKKQLLDLYRNCKEEQSEIVSSLEQREDHELRRDKLYLYYTQKGRCMYSGRPIDFEKLWDNNMYDIDHIYPQSRTMDDSLDNRVLVERKENELKEDIYPINPEIQKARKTLWKSLLDGGFISKKKYERLVRTTKFDENELAGFIERQIVETRQGTKIVADILKEAFPNSTIVYVKARTVSNFRQDFELMKVREMNDLHHAKDAYLNIVVGNSYYVKFTQNAAWYIKENPGRTYNLEEMFKPKKRGRVARDIVRNGEIAWKAGEKGTIITVKKVMQKNNILVTRRSYEVKGGLFDQMIMKKGKGQIPIKSSDGRLLDINKYGGYNKATGA

SEQ ID NO: 20220 - protein, 1346 aa, unidentified
  REGION 1..1346: note = Cas Enzyme sequence
MENTYYLGLDMGSASLGWAVTDSEYHILKKHGESLWGVRLFDSASTAEERRTFRTSRRRLDRRNWRIQILQEIFAEEISKIDPGFFLRMKESKYYPEDKRDESGNCPELPYALFVDSGFTDKDFHREFPTIYHLRKWLMETEETPDIRLLYLAFHHMIKHRGHFLLSGDISKIKKFDSTFLTLLQNVAEEELDWNLEIDSAQISAIENILKNRNLTRSAKKSQLIRLSGAKTACEKAIFTLISGGTVKLSDIFGNDDLNESERPKISFSDSGYDDYIEAVTLTLGEQFYIIESAKAVYDWSVLADILGDSVSISAAKVKVYEKHKKDLMYLKKIVRSNLSKEDYKNIFVNTDAKLNNYCAYVGMTKKNGRKVSLAGKCCSQIEFYDFLKKNVLSKIDDTVIKEYLENEINCENFLPKQINKGNSVIPYQVHLFELKSILKNMEAKIPFIRENSDKIIQLFEFRIPYYVGPLCGESAGCRGKFSWAVRKSYDKIYPWNFNDVIDTESSAEVFIRRMTNKCTYLAGEDVLPKDSLLYSKFMVLNELNNVKLNGASISPELKQKIYTDVFCRCRKVTQKKLRNYLVCEGIADRTVDITGIDGDFKASLNSFHDFKEKLTGAELNQQEKEMIILNIVLFGEDKKLLKQRLKKLFPKLTEDQMKAICTLSYKGWGKLSKKFLEEVTVPDPETGEFINIITALWKTNDNLMQLLYGPLGFMKYVEDYNSGSEKVSLDYESIENLYVSPAVKRQIWQTLKVVKEIRKCMGTDPKRIFVEMAREKQESKRTESRKKQLLDLYRNCKEEQSEIVSSLEQREDHELRRDKLYLYYTQKGRCMYSGRPIDFEKLWDNNMYDIDHIYPQSRTMDDSLDNRVLVERKENELKEDIYPINPEIQKARKTLWKSLLDGGFISKKKYERLVRTTKFDENELAGFIERQIVETRQGTKIVADILKEAFPNSTIVYVKARTVSNFRQDFELMKVREMNDLHHAKDAYLNIVVGNSYYVKFTQNAAWYIKENPGRTYNLEEMFKPKKRGRVARDIVRNGEIAWKAGEKGTIITVKKVMQKNNILVTRRSYEVKGGLFDQMIMKKGKGQIPIKSSDGRLLDINKYGGYNKATGAYFMLVKSRDKKGREIRSLEFVPLYLKNRIEQNEDAAIEYLEKDRGLKEPQIVLRKIRADTLFDVDGFKMWLSGRSGSQLIFKCANQLILSPNDEKCLKKILKFIQRRKENKNLQIYNVDGILEEDLLRLYDTFLDKLQNTMYKKRLSAQVITLTEKRNNFIKLRIEDKCIVLNEILHMFQSQSGCANLTLIGGPAKAGRIAMNSNITECKSISIINQSSSGIFEKKIDLLKL

SEQ ID NO: 20221 - protein, 1340 aa, unidentified
  REGION 1..1340: note = Cas Enzyme sequence
MGEEYFLGLDMGTGSLGWAVTDDKYQILRRHGNALWGVRLFETANTAEERRMFRTNRRRLDRQGWRIKILQELFAEEICRVDPGFYLRMKESKYYPEDKRDANGECPALPYALFADAQYTDKDYHREFPTIYHLRKMLMETETTPDIRLVYLAFHHMMKHRGHFLLSGDISQVTEFRNTFLQMIANIKSEELDFFLEIEETQMGQIEAVLKDHKLTRSEKKRRLTQILKPATACEKAIFTLLSGGTVKLSDIFGKAELDEGERPKISFADNGYDDYSASVEADLGEQYYIIESAKAVYDWSVLSDILGDSVSISDAKVKLYEKHKKDLAYLKKVVRENLPREVYNQVFVNTDEKLCNYCAYIGMAKKNGRKVALEGKRCTREEFESFLRKKIVNKIEDKKIQEYLSEEIEKGTFLPRQVTKDNGVIPYQIHLYELRKIIDNLSPRMPFIRDNGDKIIQLFTFRIPYYVGPLGKGEGSEKFSWAVRRTDEAIYPWNFKDVIDVEASAEKFICRMTNKCTYLYGEDVLPKDSPLYSKFMVLNELNNLKLDGQSVSVELKQRIYQELFCHTRKVTQKKLVSYLVREGITGKNVEISGIDGDFKASLTAYHDFKEKLTGVELSQQEQEEIVRNIVLFGEDKKLLKHRLEGRFPQLTQKQISVIATLSYKGWGRLSREFLENITVPAPGTGEVWNIITALWETNDNLMQLLYGEYGFQTEIECFNAKEKKKSLSYETIEESYVSPSVKRQIWQTLQVVKELKKVMRGDPKRVFIEMARENQESERTESRKKTLLDLYKNCKKEEPEWIAELTEHLEKLDDSQIRKDKLFLYYTQKGRCMYSGERIELEDLWDNTRYDIDHIYPQSKTMDDSVDNRVLVKKEYNAKKTDVYPIAADIRGKMFPFWKKLLDNKLISKKKYDRLVRTEELTPEELAGFIDRQLVETRQSTKVVAEILKEAFPDTEIVYVKAGNVSNFRHMFDIVKVRELNDLHHAKDAYLNIVVGNAYYVKFNKNAAWFIKENPGRSYNLKRMFDYDIRRNNEVAWLAGSAGTISQVKNMVSKNHILVTRKSYEVTGGLFDQQLMKKGKGQVPVKTSDERLGNIEKYGGYNKASGAYFMLVKSKNKKGEEQRTIEYVPIYLKHYIEESKENALDYLKNERKLKEPEILLAKIKMDTLFRVNGFYMWLSGRTGKQLIFKGANELLLAEPETLLLKKIIKYTQRRKENKDLKLTEWDNITNEELLALYDVFTEKLNHSVYAVRLGAQGKTLSEKRPAFEELSMEEKCIVLSEVLHLFQCQSGAANLKLLEGPASAGILVLNSNISELDEILIINQSPSGIFEKQIDLLRL

SEQ ID NO: 20222 - protein, 1285 aa, unidentified
  REGION 1..1285: note = Cas Enzyme sequence
NRRRLDRQGWRIKILQELFAEEICRVDPGFYLRMKESKYYPEDKRDANGECPALPYALFADAQYTDKDYHREFPTIYHLRKMLMETETTPDIRLVYLAFHHMMKHRGHFLLSGDISQVTEFRNTFLQMIANIKSEELDFSLEIEETQMGQIEAVLKDHKLTRSEKKRRLTQILKPATACEKAIFTLLSGGTVKLSDIFGKAELDEGERPKISFADNGYDDYSASVEADLGEQYYIIESAKAVYDWSVLSDILGDSVSISDAKVKLYEKHKKDLAYLKKVVRENLPREVYNQVFVNTDEKLCNYCAYIGMAKKNGRKVALEGKRCTREEFESFLRKKIVNKIEDKEIQEYLSEEIEKGTFLPRQVTKDNGVIPYQIHLYELRKIIDNLSPRMPFIRDNGDKIIQLFTFRIPYYVGPLGKGEGSEKFSWAVRRTDEAIYPWNFKDVIDVEASAEKFICRMTNKCTYLYGEDVLPKDSPLYSKFMVLNELNNLKLDGQSVSVELKQRIYQELFCHTRKVTQKKLVSYLVREGITGKNVEISGIDGDFKASLTAYHDFKEKLTGVELSQQEQEEIVRNIVLFGEDKKLLKQRLEGRFPQLTQKQISVIATLSYKGWGRLSREFLENITVPAPGTGEVWNIITALWETNDNLMQLLYGEYGFQTEIECFNAKEKKKSLSYETIEESYVSPSVKRQIWQTLQVVKELKKVMRGDPKRVFIEMARENQESKRTESRKKTLLDLYKNCKKEEPEWIAELTEHLEKLDDSQLRKDKLFLYYTQKGRCMYSGERIELEDLWDNTRYDIDHIYPQSKTMDDSVDNRVLVKKEYNAKKTDVYPIAADIRGKMSPFWKKLLDNKLISKKKYDRLVRTEELTPEELAGFIDRQLVETRQSTKVVAEILKEAFPDTEIVYVKAGNVSNFRHMFDIVKVRELNDLHHAKDAYLNIVVGNAYYVKFNKNAAWFIKENPGRSYNLKRMFDYDIRRNNEVAWLAGSTGTISQVKNMVSKNHILVTRKSYEVTGGLFDQQLMKKGKGQVPVKTSDERLGNIEKYGGYNKASGAYFMLVKSKNKKGEEQRTIEYVPIYLKHYIEESKENALDYLKNERKLNEPEILLDKIKKDTLFRVNGFYMCLSKRTGKQLAFKGANELLLPEPETLLLKKITKYIQRRKENKDLKLTKQDNITEKELLELYDVFTEKLNHSVYAVCLGTQGKTLVQKKPAFVALPVEEKCIVLSEILHLFQCQSGSANLKLIGGPASAGILYLNSNISDAGEILIINQSPSGIFEKRIDLLRL

SEQ ID NO: 20223 - protein, 1291 aa, unidentified
  REGION 1..1291: note = Cas Enzyme sequence
RRVFRTSRRRLQRRNWRLNLLQQIFVDEINKIDDGFFRRLKESRYLPEDKHNTDGSIPDLPYSLFIDKSYTDKDYHRQFPTIYHLRKWLMETDTTPDIRLVYLAFHHMLKHRGHFLFSGSIDEIRNFNNVFKQLSDALRSEDLPFNYNFTEDQVEKAELLLKNSQLTKSQKKTLLIQLFNEKTPCEKAVYTLLAGGTAKLSDLLGDELLNDSEKPKISFTDASYDDYVDSLQSTLGERYHIIEALKAVYDWAVLADILKGFSSISEAKVATYEKHHNDLVYLKKLVKENLSVTDYKELFVQTNEKLSNYSAYIGMTKKNGKKQSLENKLCSKEDFYSYLKKHVLACIADETKTAFLKAEIEYGTFLPKQTTKDNSVIPNQLHLYEFDRIIANLADRIPMLKEQKDKLRSLLTFRIPYYIGPLNGIVKNGERTNWMQRKSEGTIYPWNFSEIVDEEESARHFIQRMTNHCTYLPTEDVLPKYSPMYSRFMVLNELNNLRLDGQAISVPLKQQIFTELFMKKRKVTQKSLKQYLVREGIAKKEVEITGIDGDFKGSLTAYLDFKEKLTGMPLNTSDMEILVLNITLFGDDKRLLSKRLSRLFPKLTDKQRNSICNLPYRGWGRLSSAFLNELTAISPETGENWTILRTLWETNDNLMQILSDKYDFADAIEKQNQENGDLPQTLSYELIDRQPLSPAVKRQVWQTILIIKELCQAKKQPPKRIFIEMAREKQNTDRTVSRRKQLIDLYQSCKKEERDWINELNEKNDSDLRRDKLYLYYVQMGRCMYSGEPIELSDLWNDQKYDIDHIYPQSKVMDDSLDNRVLVKRTYNADKTDIYPISEDIRKKQTPFWKMLLEKKFISEEKYHRLTRNTGFEPSELAGFIARQLVETRQSTKAVASILKQFLPDTEIVYVKAKTVSQFRQDFHFIKVRDMNDFHHAKDAYLNIVVGNVYFTKFTKNAMWYVKEHPGRSYNLQKMFTAGVVERNGQTAWTPGENGSINIVRQVMGRNNVIITRRSYEVSGGLFDQQLLKKGKGQVPVKSSDPRLRDIEKYGGYNKETGAYFTLVQSKDKKGNLIRTIEFVPLRLKDSLEKNEMAMKTYMADEHGLNEPEILLSKIQIDTLFCIDGFYMWLSGRTGRQLVFKNANQLILSEKNTATLKKVLKFISRRKENKELQIYPSDELTNESLTQLYDQFLDKLKNTIYSSRLSAQIKSLEDKKEVFEQLSPEDKCTVLSEILHMFQCQSASANLKLIDGPGSAGILVLNSDITKCKHIQIIHQSPAGLYEQVLNLNQL

SEQ ID NO: 20224 - protein, 1340 aa, unidentified
  REGION 1..1340: note = Cas Enzyme sequence
MKNDYYVGLDLGSGSVGWAVTDPDYHLLRSHGKALWGVRLFDTAKTAEERRVFRTSRRRLQRRNWRLNLLQQIFVDEINKIDDGFFRRLKESRYLPEDKHNTDGSIPDLPYSLFIDKSYTDKDYHRQFPTIYHLRKWLMETDTTPDIRLVYLAFHHMLKHRGHFLFSGSIDEIRNFNNVFKQLSDALRSEDLPFNYNFTEDQVEKAELLLKNSQLTKSQKKTLLIQLFNEKTPCEKAVYTLLAGGTAKLSDLLGDELLNDSEKPKISFTDASYDDYVDSLQSTLGERYHIIEALKAVYDWAVLADILKGFSSISEAKVATYEKHHNDLVYLKKLVKENLSVTDYKELFVQTNEKLSNYSAYIGMTKKNGKKQSLENKLCSKEDFYSYLKKHVLACIADETKTAFLKAEIEYGTFLPKQTTKDNSVIPNQLHLYEFDRIIANLADRIPMLKEQKDKLRSLLTFRIPYYIGPLNGIVKNGERTNWMQRKSEGTIYPWNFSEIVDEEESARHFIQRMTNHCTYLPTEDVLPKYSPMYSRFMVLNELNNLRLDGQAISVPLKQQIFTELFMKKRKVTQKSLKQYLVREGIAKKEVEITGIDGDFKGSLTAYLDFKEKLTGMPLNTSDMEILVLNITLFGDDKRLLSKRLSRLFPKLTDKQRNSICNLPYRGWGRLSSAFLNELTAISPETGENWTILRTLWETNDNLMQILSDKYDFADAIEKQNQENGDLPQTLSYELIDRQPLSPAVKRQVWQTILIIKELCQAKKQPPKRIFIEMAREKQNTDRTVSRRKQLIDLYQSCKKEERDWINELNEKNDSDLRRDKLYLYYVQMGRCMYSGEPIELSDLWNDQKYDIDHIYPQSKVMDDSLDNRVLVKRTYNADKTDIYPISEDIRKKQTPFWKMLLEKKFISEEKYHRLTRNTGFEPSELAGFIARQLVETRQSTKAVASILKQFLPDTEIVYVKAKTVSQFRQDFHFIKVRDMNDFHHAKDAYLNIVVGNVYFTKFTKNAMWYVKEHPGCSYNLQKMFTAGVVERNGQTAWTPGENGSINIVRQVMGRNNVIITRRSYEVSGGLFDQQLLKKGKGQVPVKSSDPRLRDIEKYGGYNKETGAYFTLVQSKDKKGNLIRTIEFVPLRLKDSLEKNEMAMKTYMADEHGLNEPEILLSKIQIDTLFCIDGFYMWLSGRTGRQLVFKNANQLILSEKNTATLKKVLKFISRRKENKELQIYPSDELTNESLTQLYDQFLDKLKNTIYSSRLSAQIKSLEDKKEVFEQLSPEDKCTVLSEILHMFQCQSASANLKLIDGPGSAGILVLNSDITKCKHIQIIHQSPAGLYEQVLNLNQL

SEQ ID NO: 20225 - protein, 1340 aa, unidentified
  REGION 1..1340: note = Cas Enzyme sequence
MKTDYFMGLDMGTGSLGWAVTDSSYHLCRAHGKDLWGVRLFETAQTAEERRVFRCNRRRLDRRKRRIQLLQDIFAPEIYKIDPGFFLRLKESRYLPEDKKNLEGKTPELPYALFVDKKYTDKDFHKEYPTIYHLRLRLMQDRTPADVRLVYLALHHLIKHRGHFLFAGIEADKVTDFSAAFSEFLRIVQEQELDISFTPDEESSQIIKETLQNTNFTRSKKSTELIKGLKASTGCEKALLKLISGCKVKLSAVFDDPGCDAYEKSQVCFAESSYEDYAAILEDELEDRFIVIAAAKALYDWSVLVNILGEASTVSEAKVGIYEKHRRDLKYLKHLVKTNLTREDYQDLFVKAGAKKNNYCAYIGMTKKNNKKVVLEEKRCTKEDFYAYLKKEIYSKVQENPEAEYLLEELEKGTFLPRQVSKDNGVIPYQLQFLELQKILKNAVEYLPFLKEESEKIQQIMTFRIPYYVGPLNGKKEGQNTFAWAVRKNNEPVYPWNFEEVIDTEASAEQFIRRMTNKCTYLPGEDVLPKESLLYSKFMVLNELNNLRINGTKISVELKQELYEKLFQRYRKVSAKKLRDYLVRNGITEKDAEISGIDGDFKGTLRAYHDFKEKLTGVELTEAEKETIILNITLFGEDKVLLKKRMQRLLPNLTEGQKKAIVTLNYSGWGRLSREFLEEVQAPNPESGEILSIIRALWETNANLMQLLSNQYGYQEILEQMRADWTGHKLDYQTVEELYVSPAVKRQIWQTLQVVKELKKVMGGEPKRVFLEVAREKMESGRTVSRKKHLKDLYLSCKSEERNWLAELDRHEEHSYRSDRLFLYYTQKGRCMYCGKPIDLGHLWDVNMYDIDHIYPQSKVMDDSIRNRVLTCRTCNAEKTDHYPLKAEIRQKMRPFWDSLKAGNFIEEEKWKRLIRSEEFTSTELAGFIERQLVETRQSTKAVADILKQAMPETEIVYVKAKNVSAFRQDFNFVKNRDVNDFHHAKDAYLNIVVGNTYFVKFTKNASWFIERNPGRSYNLKRMFTSDYDVMSNGEIAWKAGNSGTITTVRKMMKKNSVLFTRRSFEVSGGLFDQQLMKKGKGQVYVKSGDERLRSIEKYGGYNKATGAYFMLVESEGKKGVKKRTIEFVPLYRKAELEASEEKMLEYLRTEIGLKEPHVLLHKIKTDTLFQADGFKMHLSGRTGKQLVFKGANQFLVAEDYERLLKKVGKVTEQLKTNKNYKINDYDGITEEGLKALYSEFLSKLQKAPYGNRLGTQAETLENGKEKFDKLSLENKCQVLSEILHLFQCNSSAADLSKLGGPGHGGILVLSNEITKCNKISIIHQSPAGIYEQEIDLKTL

SEQ ID NO: 20226 - protein, 1340 aa, unidentified
  REGION 1..1340: note = Cas Enzyme sequence
MKTDYFMGLDMGTGSLGWAVTDSSYHLCRAHGKDLWGVRLFETAQTAEERRVFRCNRRRLDRRKRRIQLLQDIFAPEIYKIDPGFFLRLKESRYLPEDKKNLEGKTPELPYALFVDKKYTDKDFHKEYPTIYHLRLRLMQDRTPADVRLVYLALHHLIKHRGHFLFAGIEADKVTDFSAAFSEFLRIVQEQELDISFTPDEESSQIIKETLQNTNFTRSKKSTELIKGLKASTGCEKALLKLISGCKVKLSAVFDDPGCDAYEKPQVCFAESSYEDYAAILEDELEDRFIVIAAAKALYDWSVLVNILGEASTVSEAKVGIYEKHRRDLKYLKHLVKTNLTREDYQDLFVKAGAKKNNYCAYIGMTKKNNKKVVLEEKRCTKEDFYAYLKKEIYSKVQENPEAEYLLEELEKGTFLPRQVSKDNGVIPYQLQFLELQKILKNAVEYLPFLKEESEKIQQIMTFRIPYYVGPLNGKKEGQNTFAWAVRKNNEPVYPWNFEEVIDTEASAEQFIRRMTNKCTYLPEEDVLPKESLLYSKFMVLNELNNLRINGTKISVELKQELYEKLFQRYRKVSAKKLRDYLVRNGITEKDAEISGIDGDFKGTLRAYHDFKEKLTGVELTEAEKETIILNITLFGEDKVLLKKRMQRLLPNLTEGQKKAIVTLNYSGWGRLSREFLEEVQAPNPESGEILSIIRALWETNANLMQLLSNQYGYQEILEQMRADWTGHKLDYQTVEELYVSPAVKRQIWQTLQVVKELKKVMGGEPKRVFLEVAREKMESGRTVSRKKHLKDLYLSCKSEERNWLAELDRHEEHSYRSDRLFLYYTQKGRCIYCGKPIDLGHLWDVNMYDIDHIYPQSKVMDDSIRNRVLTCRTCNAEKTDHYPLKAEIRQKMRPFWDSLKAGNFIEEEKWKRLIRSEEFTSTELAGFIERQLVETRQSTKAVADILKQAMPETEIVYVKAKNVSTFRQDFNFVKNRDVNDFHHAKDAYLNIVVGNTYFVKFTQNASWFIERNPGRSYNLKRMFTSDYDVISNGEIAWKAGNSGTITTVRKMMKKNSVLFTRRSFEVSGGLFDQQLMKKGKGQVYVKSGDERLRSIEKYGGYNKATGAYFMLVESEGKKGVKKRTIEFVPLYRKAELEASEEKMLEYLRTEIGLKEPHVLLHKIKTDTLFQADGFKMHLSGRTGKQLVFKGANQFLVAEDYERLLKKVGKVTEQLKTNKNYKINDYDGITEEGLKALYSEFLSKLQKAPYGNRLGTQAETLENGKEKFDKLSLENKCQVLSEILHLFQCNSSAADLSKLGGPGHGGILVLSNEITKCNKISIIHQSPAGIYEQELDLKTI

SEQ ID NO: 20227 - protein, 1340 aa, unidentified
  REGION 1..1340: note = Cas Enzyme sequence
MKTDYFMGLDMGTGSLGWAVTDSSYHLCRAHGKDLWGVRLFETAQTAEERRVFRCNRRRLDRRKRRIQLLQDIFAPEIYKIDPGFFLRLKESRYLPEDKKNLEGKTPELPYALFVDKKYTDKDFHKEYPTIYHLRLRLMQDRTPADVRLVYLALHHLIKHRGHFLFAGIEADKVTDFSAAFSEFLRIVQEQELDISFTPDEESSQIIKETLQNTNFTRSKKSTELIKGLKASTGCEKALLKLISGCKVKLSAVFDDPGCDAYEKPQVCFAESSYEDYAAILEDELEDRFIVIAAAKALYDWSVLVNILGEASTVSEAKVGIYEKHKRDLKYLKHLVKTNLTREDYQDLFVKAGAKKNNYCAYIGMTKKNNKKVVLEEKRCTKEDFYAYLKKEIYSKVQENPEAEYLLEELEKGTFLPRQVSKDNGVIPYQLQFLELQKILKNAVEYLPFLKEESEKIQQIMTFRIPYYVGPLNGKKEGQNTFAWAVRKNNEPVYPWNFEEVIDTEASAEQFIRRMTNKCTYLPGEDVLPKESLLYSKFMVLNELNNLRINGTKISVELKQELYEKLFQRYRKVSAKKLRDYLVRNGITEKDAEISGIDGDFKGTLRAYHDFKEKLTGVELTEAEKETIILNITLFGEDKVLLKKRMQRLLPNLTEGQKKAIVTLNYSGWGRLSREFLEEVQAPNPESGEILSIIRALWETNANLMQLLSNQYGYQEILEQMRADWTGHKLDYQTVEELYVSPAVKRQIWQTLQVVKELKKVMGGEPKRVFLEVAREKMESGRTVSRKKHLKDLYLSCKSEERNWLAELDRHEEHSYRSDRLFLYYTQKGRCMYCGKPIDLGHLWDVNMYDIDHIYPQSKVMDDSIRNRVLTCRTCNAEKTDHYPLKAEIRQKMRPFWDSLKAGNFIEEEKWKRLIRSEEFTSTELAGFIERQLVETRQSTKAVADILKQAMLETEIVYVKAKNVSAFRQDFNFVKNRDVNDFHHAKDAYLNIVVGNTYFVKFTKNASWFIERNPGRSYNLKRMFTSDYDVISNGEIAWKAGNSGTITTVRKMMKKNSVLFTRRSFEVSGGLFDQQLMKKGKGQVYVKSGDERLRSIEKYGGYNKATGAYFMLVESEGKKGVKKRTIEFVPLYRKAELEASEEKMLEYLRTEIGLKEPHVLLHKIKTDTLFQVDGFKMHLSGRTGKQLVFKGANQFLVAEDYERLLKKVGKVTEQLKTNKNYKINDYDGITEEGLKALYSEFLSKLQKAPYGNRLGTQAETLENGKEKFDKLSLENKCQVLSEILHLFQCNSSAADLSKLGGPGHGGILVLSNEITKCNKISIIHQSPAGIYEQEIDLKTL

SEQ ID NO: 20228 - protein, 1356 aa, unidentified
  REGION 1..1356: note = Cas Enzyme sequence
MKKFEEYYIGLDMGTGSVGWAVTDSAYNIIKRHGKALWGIRLFESAKTAEERRIFRTSRRRTERRKNRLHLLQEIFAEEISKKDMGFYQRMKESKYWHEDKKDINGNMPELPYALFADDGFTDKDYYKKYPTIFHLRYALATNTTDKPDIRLLYLALHHIIKHRGHFLFEGKKLSEVKEFSTAIEALVQQAEEQEIDLKSLTQEEVLTQLEHIMSDAQCTKSDKKTQVSKLIVGTDKQKQKQEKAIAALITGCTVKLSDIFADPELDKEEISKICFSDNGYEEKEVEIESVLADRFLLIAAAKGVYDWTVLHDILGDARFLSEAKVKTYEKHRDDLRKVKQLLRMDKEVYEAVFGVSEKNEANYSAYIGMAKKNGKKQPIEKKCSQEDFYKFLKKQLDRLSVDEMGQEIIDELKAEMDLGTLFPKQMIRDNGVIPYQLHENELNAILDNAQKFYPFLLEKDQDGYTPVEKIQKIFRFRIPYYVGPLNTAHQDKGGHSWSVRKKEGKIYPWNFSEMIDEEESATKFIERMTNKCTYLIGEDVLPKESLLYAKFNVLNELNNLRIDGELIAPELKQDIYNNVFKKYQRVTGKKVKDYLRINGVISKEQELSGFDQNFKSSLKAYHDFKQIVGTGVLSESEQEDIVRDITLFADSQKMLKQRIHRKYPMLSDKQIAQLANKKYAGWGRLSRTFLENIESVNKETGEVMNIITALWETNENLMKLLSGKYDYTKQIEQWNAGQMKKGEIEYQDIEELYVSPAVKRPIWQTIKIVREITNIMGGAPKRIFVEVAREPGEKGVRKVSRRNQLLDLYKACKKEAPELYDRLANKESDNALRSDKLFLYYSQMGRCMYSGDAIDLDELFTNRYDIDHIYPQSKVMDDSIDNRVLVKRDLNSKKTDTFPVSEEYRKAGKALWSTLLKKGLISKEKYKRLTRTEPFGEDELAGFIARQLVETRQSTKAVAHLLEEAYPDAEIVYAKARAVSEFRHKFDMIKVREVNDFHHAKDAYLNIVVGNTYYVKFTKDAAWFVRNNPGRTYNLKKMFENETVKRGNETAWIPGDNGTICTVKKWMRKNNVLFTRRAYEVKGGLFDQNILKKGKGQIPIKGGADERLQSIEKYGAYNKASGAYFMLVESDGKKGERKRTIEFVPVYLAKSLEESVELRRRYCEEELGLVNPDVRILKIKINTLFDVDGFKMHLSGRTGKQLLFKGANQLVLSEELQLIVKKIGKYCADYKENKEAVLSEKSEVTQEVLEELYDEFLHKLRNSLYGHRLSAQIEKIEKGKEIFQSMSNEQKCLILMEILHLFQCASQAANLQLIDGPGKAGILVLNNDISKLEDIKIINQSITGFYEQVIDLKTI

SEQ ID NO: 20229 - protein, 1356 aa, unidentified
  REGION 1..1356: note = Cas Enzyme sequence
MKKFEEYYIGLDMGTGSVGWAVTDPTYNIIKRHGKALWGIRLFESAKTAEERRIFRTSRRRTERRKNRLHLLQEIFAEEISKKDMGFYQRMKESKYWHEDKKDINGNMPELPYALFADDGFTDKDYYKKYPTIFHLRYALATNTTDKPDIRLLYLALHHIIKHRGHFLFEGKKLSEVKEFSTAIEALVQQAEEQEIDLKSLTQEEVLTQLEHIMSDAQCTKSDKKTQVSKLIVGTDKQKQKQEKAIAALITGCTVKLSDIFADPELDKEEISKICFSDNGYEEKEVEIESVLADRFLLIAAAKGVYDWTVLHDILGDARFLSEAKVKTYEKHRDDLRKVKQLLRMDKEVYEAVFGVSEKNEANYSAYIGMAKKNGKKQPIEKKCSQEDFYKFLKKQLDRLSVDEKGQEIIDELKAEMDLGTLFPKQMIRDNGVIPYQLHENELNAILDNAQKFYPFLLEKDQDGYTPVEKIQKIFRFRIPYYVGPLNTAHQDKGGHSWSVRKKEGKIYPWNFSEMIDEEESATKFIERMTNKCTYLIGEDVLPKESLLYAKFNVLNELNNLRIDGELIAPELKQDIYNNVFKKYQRVTGKKVKDYLRINGVISKEQELSGFDQNFKSSLKAYHDFKQIVGTGVLSESEQEDIVRDITLFADSQKMLKQRIHRKYPMLSDKQIAQLANKKYAGWGRLSRTFLENIESVNKETGEVMNIITALWETNENLMKLLSGKYDYTKQIEQWNAGQMKKGEIEYQDIEELYVSPAVKRPIWQTIKIVREITNIMGGAPKRIFVEVAREPGEKGVRKVSRRNQLLDLYKACKKEAPELYDRLANKESDNALRSDKLFLYYSQMGRCMYSGDAIDLDELFTNRYDIDHIYPQSKVMDDSIDNRVLVKRDLNSKKTDTFPVSEEYRKAGKALWSTLLKKGLISKEKYKRLTRTEPFGEDELAGFIARQLVETRQSTKAVAHLLEEAYPDAEIVYAKARAVSEFRHKFDMIKVREVNDFHHAKDAYLNIVVGNTYYVKFTKDAAWFVRNNPGRTYNLKKMFENETVKRGNETAWIPGDNGTICTVKKWMRKNNILFTRRAYEVKGGLFDQNILKKGKGQIPIKGGADERLQSIEKYGAYNKASGAYFMLVESDGKKGERKRTIEFVPVYLAKSLEESVELRRRYCEEKLGLVNPDVRLSKIKINTLFDVDGFKMHLSGRSSNGLLFKGANQLVVPYKMEKIIKVISKYCFDYKENKEAVLSEKNRPTEEMFEELFDILVSKLEYAVYEKRLSAQVPKLKNGKIIFVELSAEEKCIVLMEILHLFQCASQSANLKLINGPGHAGILIMGFDISGLSNVHIINQSITGFYEQVIDLKTI

SEQ ID NO: 20230 - protein, 1356 aa, unidentified
  REGION 1..1356: note = Cas Enzyme sequence
MKKFEEYYIGLDMGTGSVGWAVTDPTYNIIKRHGKALWGIRLFESAKTAEERRIFRTSRRRTERRKNRLHLLQEIFAEEISKKDMGFYQRMKESKYWHEDKKDINGNMPELPYALFADDGFTDKDYYKKYPTIFHLRYALATNTTDKPDIRLLYLALHHIIKHRGHFLFEGKKLSEVKEFSTAIEALVQQAEEQEIDLKSLTQEEVLTQLEHIMSDAQCTKSDKKTQVSKLIVGTDKQKQKQEKAIAALITGCTVKLSDIFADPELDKEEISKICFSDNGYEEKEVEIESVLADRFLLIAAAKGVYDWTVLHDILGDARFLSEAKVKTYEKHRDDLRKVKQLLRMDKEVYEAVFGVSEKNEANYSAYIGMAKKNGKKQPIEKKCSQEDFYKFLKKQLDRLSVDEMGQEIIDELKAEMDLGTLFPKQMIRDNGVIPYQLHENELNAILDNAQKFYPFLLEKDQDGYTPVEKIQKIFRFRIPYYVGPLNTAHQDKGGHSWSVRKKEGKIYPWNFSEMIDEEESATKFIERMTNKCTYLIGEDVLPKESLLYAKFNVLNELNNLRIDGELIAPELKQDIYNNVFKKYQRVTGKKVKDYLRINGVISKEQELSGFDQNFKSSLKAYHDFKQIVGTGVLSESEQEDIVKDITLFADSQKMLKQRIHRKYPMLSDKQVAQLANKKYAGWGRLSRTFLENIESVNKETGEVMNIITALWETNENLMKLLSGKYDYTKQIEQWNAGQMKKGEIEYQDIEELYVSPAVKRPIWQTIKIVREITNIMGGAPKRIFVEVAREPGEKGVRKVSRRNQLLDLYKACKKEAPELYDRLANKESDNALRSDKLFLYYSQMGRCMYSGDAIDLDELFTNRYDIDHIYPQSKVMDDSIDNRVLVKRDLNSKKTDTFPVSEEYRKAGKALWSTLLKKGLISKEKYKRLTRTEPFGEDELAGFIARQLVETRQSTKAVAHLLEEAYPDAEIVYAKARAVSEFRHKFDMIKVREVNDFHHAKDAYLNIVVGNTYYVKFTKDAAWFVRNNPGRTYNLKKMFENETVKRGNETAWIPGDNGTICTVKKWMRKNNILFTRRAYEVKGGLFDQNILKKGKGQIPIKGGADERLRSRDKYGAYNKASGAYFMLVESDGKKGERKRTIEFVPVFLAKSLEESVELRRRYCEEELGLVNPDVRLSKIKINTLFDVDGFKMHLSGRTGKRLVFKGANQLVLREKLQLTVKKIGKYCADYKENKEAVLSEKSEVTQEVLEELYDEFLHKLRNSLYGHRLSAQIERLETGKESFCSMSNEQKCLILMEILHLFQCTSQLANLQLIDGPGNAGMLLLNNDVSKLEDIKIINQSITGFYEQVIDLKTI

SEQ ID NO: 20231 - protein, 1356 aa, unidentified
  REGION 1..1356: note = Cas Enzyme sequence
MKKFEEYYIGLDMGTGSVGWAVTDPTYNIIKRHGKALWGIRLFESAKTAEERRIFRTSRRRTERRKNRLHLLQEIFAEEISKKDMGFYQRMKESKYWHEDKKDINGNMPELPYALFADDGFTDKDYYKKYPTIFHLRYALATNTTDKPDIRLLYLALHHIIKHRGHFLFEGKKLSEVKEFSTAIEALVQQAEEQEIDLKSLTQEEVLTQLEHIMSDAQCTKSDKKTQVSKLIVGTDKQKQKQEKAIAALITGCTVKLSDIFADPELDKEEISKICFSDNGYEEKEVEIESVLADRFLLIAAAKGVYDWTVLHDILGDARFLSEAKVKTYEKHRDDLRKVKQLLRMDKEVYEAVFGVSEKNEANYSAYIGMAKKNGKKQPIEKKCSQEDFYKFLKKQLDRLSVDEMGQEIIDELKAEMDLGTLFPKQIIRDNGVIPYQLHENELNAILDNAQKFYPFLLEKDQDGYTPVEKIQKIFRFRIPYYVGPLNTAHQDKGGHSWSVRKKEGKIYPWNFSEMIDEEESATKFIERMTNKCTYLIGEDVLPKESLLYAKFNVLNELNNLRIDGELIAPELKQDIYNNVFKKYQRVTGKKVKDYLRINGVISKEQELSGFDQNFKSSLKAYHDFKQIVGTGVLSESEQEDIVRDITLFADSQKMLKQRIHRKYPMLSDKQIAQLANKKYAGWGRLSRTFLENIESVNKETGEVMNIITALWETNENLMKLLSGKYDYTKQIEQWNAGQMKKGEIEYQDIEELYVSPAVKRPIWQTIKIVREITNIMGGAPKRIFVEVAREPGEKGVRKVSRRNQLLDLYKACKKEAPELYDRLANKESDNALRSDKLFLYYSQMGRCMYSGDVIDLDELFTNRYDIDHIYPQSKVMDDSIDNRVLVKRDLNSKKTDTFPVSEEYRKAGKALWSTLLKKGLISKEKYKRLTRTEPFGEDELAGFIARQLVETRQSTKAVAHLLEEAYPDAEIVYAKARAVSEFRHKFDMIKVREVNDFHHAKDAYLNIVVGNTYYVKFTKDAAWFVRNNPGRTYNLKKMFENETVKRGNETAWIPGDNGTICTVKKWMRKNNVLFTRRAYEVKGGLFDQNILKKGKGQIPIKGGADERLQSIEKYGAYNKASGAYFMLVESDGKKGERKRTIEFVPVFLAKSLEKSVELRRRYCEEELGLVNPDVRLSKIKINTLFDVDGFKMHLSGRSSNGLLFKGANQLVVPYKMEKIIKVISKYCFDYKENKEAVLSEKNRPTEEMFEELFDILVSKLEYAVYEKRLSAQVPKLKNGKIIFVELSAEEKCIVLMEILHLFQCASQSANLKLINGPGHAGILIMGFDISGLSNVHIINQSITGFYEQVIDLKTI

SEQ ID NO: 20232 - protein, 1356 aa, unidentified
  REGION 1..1356: note = Cas Enzyme sequence
MKKFEEYYIGLDMGTGSVGWAVTDSAYNIIKRHGKALWGIRLFESAKTAEERRIFRTSRRRTERRKNRLHLLQEIFAEEISKKDMGFYQRMKESKYWHEDKKDINGNMPELPYALFADDGFTDKDYYKKYPTIFHLRYALATNTTDKPDIRLLYLALHHIIKHRGHFLFEGKKLSEVKEFSTAIEALVQQAEEQEIDLKSLTQEEVLTQLEHIMSDAQCTKSDKKTQVSKLIVGTDKQKQKQEKAIAALITGCTVKLSDIFADPELDKEEISKICFSDNGYEEKEVEIESVLADRFLLIAAAKGVYDWTVLHDILGDARFLSEAKVKTYEKHRDDLRKVKQLLRMDKEVYEAVFGVSEKNEANYSAYIGMAKKNGKKQPIEKKCSQEDFYKFLKKQLDRLSVDEMGQEIIDELKAEMDLGTLFPKQIIRDNGVIPYQLHENELNAILDNAQKFYPFLLEKDQDGYTPVEKIQKIFRFRIPYYVGPLNTAHQDKGGHSWSVRKKEGKIYPWNFSEMIDEEESATKFIERMTNKCTYLIGEDVLPKESLLYAKFNVLNELNNLRIDGELIAPELKQDIYNNVFKKYQRVTGKKVKDYLRINGVISKEQELSGFDQNFKSSLKAYHDFKQIVGTGVLSESEQEDIVRDITLFADSQKMLKQRIHRKYPMLSDKQIAQLANKKYAGWGRLSRTFLENIESVNKETGEVMNIITALWETNENLMKLLSGKYDYTKQIEQWNAGQMKKGEIEYQDIEELYVSPAVKRPIWQTIKIVREITNIMGGAPKRIFVEVAREPGEKGVRKVSRRNQLLDLYKACKKEAPELYDRLANKESDNALRSDKLFLYYSQMGRCMYSGDVIDLDELFTNRYDIDHIYPQSKVMDDSIDNRVLVKRDLNSKKTDTFPVSEEYRKAGKALWSTLLKKGLISKEKYKRLTRTEPFGEDELAGFIARQLVETRQSTKAVAHLLEEAYPDAEIVYAKARAVSEFRHKFDMIKVREVNDFHHAKDAYLNIVVGNTYYVKFTKDAAWFVRNNPGRTYNLKKMFENETIKRGNETAWIPGDNGTICTVKKWMRKNNILFTRRAYEVKGGLFDQNILKKGKGQIPIKGGADERLRSRDKYGAYNKASGAYFMLVESDGKKGERKRTIEFVPVFLAKSLEESVELRRRYCEEELGLVNPDVRLSKIKINTLFDVDGFKMHLSGRTGKRLVFKGANQLVLREKLQLTVKKIGKYCADYKENKEAVLSEKSEVTQEVLEELYDEFLHKLRNSLYGHRLSAQIERLETGKESFCSMSNEQKCLILMEILHLFQCTSQLANLQLIDGPGNAGMLLLNNDVSKLEDIKIINQSITGFYEQVIDLKTI

SEQ ID NO: 20233 - protein, 1356 aa, unidentified
  REGION 1..1356: note = Cas Enzyme sequence
MKKFEEYYIGLDMGTGSVGWAVTDPTYNIIKRHGKALWGIRLFESAKTAEERRIFRTSRRRTERRKNRLHLLQEIFAEEISKKDMGFYQRMKESKYWHEDKKDINGNMPELPYALFADDGFTDKDYYKKYPTIFHLRYALATNTTDKPDIRLLYLALHHIIKHRGHFLFEGKKLSEVKEFSTAIEALVQQAEEQEIDLKSLTQEEVLTQLEHIMSDAQCTKSDKKTQVSKLIVGTDKQKQKQEKAIAALITGCTVKLSDIFADPELDKEEISKICFSDNGYEEKEVEIESVLADRFLLIAAAKGVYDWTVLHDILGDARFLSEAKVKTYEKHRDDLRKVKQLLRMDKEVYEAVFGVSEKNEANYSAYIGMAKKNGKKQPIEKKCSQEDFYKFLKKQLDRLSVDEMGQEIIDELKTEMDLGTLFPKQIIRDNGVIPYQLHENELNAILDNAQKFYPFLLEKDQDGYTPVEKIQKIFRFRIPYYVGPLNTAHQDKGGHSWSVRKKEGKIYPWNFSEMIDEEESATKFIERMTNKCTYLIGEDVLPKESLLYAKFNVLNELNNLRIDGELIAPELKQDIYNNVFKKYQRVTGKKVKDYLRINGVISKEQELSGFDQNFKSSLKAYHDFKQIVGTGVLSESEQEDIVRDITLFADSQKMLKQRIHRKYPMLSDKQIAQLANKKYAGWGRLSRTFLENIESVNKETGEVMNIITALWETNENLMKLLSGKYDYTKQIEQWNAGQMKKGEIEYQDIEELYVSPAVKRPIWQTIKIVREITNIMGGAPKRIFVEVAREPGEKGVRKVSRRNQLLDLYKACKKEAPELYDRLANKESDNALRSDKLFLYYSQMGRCMYSGDVIDLDELFTNRYDIDHIYPQSKVMDDSIDNRVLVKRDLNSKKTDTFPVSEEYRKAGKALWSTLLKKGLISKEKYKRLTRTEPFGEDELAGFIARQLVETRQSTKAVAHLLEEAYPDAEIVYAKARAVSEFRHKFDMIKVREVNDFHHAKDAYLNIVVGNTYYVKFTKDAAWFVRNNPGRTYNLKKMFENETVKRGNETAWIPGDNGTICTVKKWMRKNNVLFTRRAYEVKGGLFDQNILKKGKGQIPIKGGADERLQSIEKYGAYNKASGAYFMLVESDGKKGERKRTIEFVPVFLAKSLEKSVELRRRYCEEELGLVNPDVRLSKIKINTLFDVDGFKMHLSGRSSNGLLFKGANQLVVPYKMEKIIKVISKYCFDYKENKEAVLSEKNRPTEEMFEELFDILVSKLEYAVYEKRLSAQVPKLKNGKIIFVELSAEEKCIVLMEILHLFQCASQSANLKLINGPGHAGILIMGFDISGLSNVHIINQSITGFYEQVIDLKTI

SEQ ID NO: 20234 - protein, 955 aa, unidentified
  REGION 1..955: note = Cas Enzyme sequence
VDEMGQEIIDELKAEMDLGTLFPKQMIRDNGVIPYQLHENELNAILDNAQKFYPFLLEKDQDGYTPVEKIQKIFRFRIPYYVGPLNTAHQDKGGHSWSVRKKEGKIYPWNFSEMIDEEESATKFIERMTNKCTYLIGEDVLPKESLLYAKFNVLNELNNLRIDGELIAPELKQDIYNNVFKKYQRVTGKKVKDYLRINGVISKEQELSGFDQNFKSSLKAYHDFKQIVGTGVLSESEQEDIVRDITLFADSQKMLKQRIHRKYPMLSDKQIAQLANKKYAGWGRLSRTFLENIESVNKETGEVMNIITALWETNENLMKLLSGKYDYTKQIEQWNAGQMKKGEIEYQDIEELYVSPAVKRPIWQTIKIVREITNIMGGAPKRIFVEVAREPGEKGVRKVSRRNQLLDLYKACKKEAPELYDRLANKESDNALRSDKLFLYYSQMGRCMYSGDAIDLDELFTNRYDIDHIYPQSKVMDDSIDNRVLVKRDLNSKKTDTFPVSEEYRKAGKALWSTLLKKGLISKEKYKRLTRTEPFGEDELAGFIARQLVETRQSTKAVAHLLEEAYPDAEIVYAKARAVSEFRHKFDMIKVREVNDFHHAKDAYLNIVVGNTYYVKFTKDAAWFVRNNPGRTYNLKKMFENETVKRGNETAWIPGDNGTICTVKKWMRKNNVLFTRRAYEVKGGLFDQNILKKGKGQIPIKGGADERLQSIEKYGAYNKASGAYFMLVESDGKKGERKRTIEFVPVYLAKSLEESVELRRRYCEEELGLVNPDVRILKIKINTLFDVDGFKMHLSGRTGKQLLFKGANQLVLSEELQLIVKKIGKYCADYKENKEAVLSEKSEVTQEVLEELYDEFLHKLRNSLYGHRLSAQIEKIEKGKEIFQSMSNEQKCLILMEILHLFQCASQAANLQLIDGPGKAGILVLNNDISKLEDIKIINQSITGFYEQVIDLKTI

SEQ ID NO: 20235 - protein, 1356 aa, unidentified
  REGION 1..1356: note = Cas Enzyme sequence
MKKFEEYYIGLDMGTGSVGWAVTDPTYNIIKRHGKALWGIRLFESAKTAEERRIFRTSRRRTERRKNRLHLLQEIFAEEISKKDMGFYQRMKESKYWHEDKKDINGNMPELPYALFADDGFTDKDYYKKYPTIFHLRYALATNTTDKPDIRLLYLALHHIIKHRGHFLFEGKKLSEVKEFSTAIEALVQQAEEQEIDLKSLTQEEVLTQLEHIMSDAQCTKSDKKTQVSKLIVGTDKQKQKQEKAIAALITGCTVKLSDIFADPELDKEEISKICFSDNGYEEKEVEIESVLADRFLLIAAAKGVYDWTVLHDILGDARFLSEAKVKTYEKHRDDLRKVKQLLRMDKEVYEAVFGVSEKNEANYSAYIGMAKKNGKKQPIEKKCSQEDFYKFLKKQLDRLSVDEKGQEIIDELKAEMDLGTLFPKQMIRDNGVIPYQLHENELNAILDNAQKFYPFLLEKDQDGYTPVEKIQKIFRFRIPYYVGPLNTAHQDKGGHSWSVRKKEGKIYPWNFSEMIDEEESATKFIERMTNKCTYLIGEDVLPKESLLYAKFNVLNELNNLRIDGELIAPELKQDIYNNVFKKYQRVTGKKVKDYLRINGVISKEQELSGFDQNFKSSLKAYHDFKQIVGTGVLSESEQEDIVRDITLFADSQKMLKQRIHRKYPMLSDKQIAQLANKKYAGWGRLSRTFLENIESVNKETGEVMNIITALWETNENLMKLLSGKYDYTKQIEQWNARQMKKGEIEYQDIEELYVSPAVKRPIWQTIKIVREITNIMGGAPKRIFVEVAREPGEKGVRKVSRRNQLLDLYKACKKEAPELYDRLANKESDNALRSDKLFLYYSQMGRCMYSGDAIDLDELFTNRYDIDHIYPQSKVMDDSIDNRVLVKRDLNSKKTDTFPVSEEYRKAGKALWSTLLKKGLISKEKYKRLTRTEPFGEDELAGFIARQLVETRQSTKAVAHLLEEAYPDAEIVYAKARAVSEFRHKFDMIKVREVNDFHHAKDAYLNIVVGNTYYVKFTKDAAWFVRNNPGRTYNLKKMFENETVKRGNETAWIPGDNGTICTVKKWMRKNNVLFTRRAYEVKGGLFDQNILKKGKGQIPIKGGADERLRSRDKYGAYNKASGAYFMLVESDGKKGERKRTIEFVPVYLAKSLEESVELRRRYCEEELGLVNPDVRLSKIRKNALIDVDGFKMHLVGRTENRLLLIGATQLVLSEDDQQLIKKIGKYCLDHRENKDAVLSEKYELTMDLFEKLYDIFVFKLEQTVYAVKLSKQAKDLKEVKEEFLALDDEQKCLLLMEILHLFQCSPQLANLTNIGGGKSAGSLKILSDITKQQSVLLINQSITGFYEQVIDLKTI

SEQ ID NO: 20236 - protein, 1223 aa, unidentified
  REGION 1..1223: note = Cas Enzyme sequence
  SITE 247: note = misc_feature - Xaa can be any naturally occurring amino acid
  SITE 280: note = misc_feature - Xaa can be any naturally occurring amino acid
MDYPTIYHLRKALLENKKAFDVRLVYLAIHNILKYRGHFLFAGLKADAITDFTRVFADVRQYLQDNVTGLENWNCTDPETVKKILKDRKMSVTNKKKQLEALFSAESKQEKAVVALLAGGTAKLCDLFVDEELKEVEKASLSFSKDNYDEIQQILKEELADRVEAIEKLKALYDWSLLTEILKDNTFISYAKCAVYEEHGHDLAILKQVVKKYIPKEYKNIFGAQQGKTANYSSYIGMYKINGTKEXVEKKCNQEDICKFLSTKLKDIRSDDANLKIIRXKLALGIFLPKQVDKNNGIIPMQIHLVELEKILENASAYLPFLNNVDEAGNTIKSKIIDIMKFRIPYYVGPLNGTAMSKAKKRCWVVRSSDKIYPWNFEKVVNLEASAENFIRNMTNKCTYLTCEDVLPKNSLLYTEFMVRNEINNLKLDGMPISAGLKEQIFQDLFMQATKTRKLTLKKLAAYLKTENICGEVTGIDIDFKTSLKSYHDFYKIFGNDIIKNSAMIEKIILWITLFSNEKNMLIRKIKGNYPTVSETQIKQIKELNYADWGRFSQTLLDSAEIAYVDETTGEAVTILHAMKESGLNFMELLAKNCKYNFAQKIEAFNNANSSMETDLTYKTVDDLYVSPAVKRQIWQTITVVDELKGIMQHAPKKIFVEMARGEEEKKRTKSRKDRLMELYKACREDVKELLTELESSSDSDLRSEKLYLYYTQMGRDMYDTSKVIDVEQLMSSNIWDKDHIYPRSKTKDDSFDNLVLVNKAANAHKTDTYPLPAAVQSKNRGFWKLLLEKGFISQRKYDRLTRTTALSEDELADFIARQIVETRQSTKAVAQILTQVFKDTQIIYVKAGTVSDFRQVNEFTKVRDVNDYHHAKDAYLNIVVGNVYNTKFTNNPANFIKHLNGERYTLNPEKLYNFDVKNAWKAGKEGTISRVREIMSKNNILFTRHSYEGKGQLFDVNILKRGNGQVPVKKNWDIKKYGGYNSASTAYFTLVESVNKKGEKIRTIETVPMHIAKEIEKNEHGLETFLRKVDLLEPRVIIPKIKIKSLFVIDGYPMHISGRTGEQIMFWGAVELVLTAEQDSYAKKICKYIDRNKKANIKSGYLPINSLYDGITKNKNLELYDALLIKQKKTIYKQRPASQIKMVETSRDKFISLNIEEQSLVLKEILSLFTCSAASTNFELLGGGRQAGILKVSKNITDRAQAYIINQSPTGIFEQKVDLLRL

SEQ ID NO: 20237 - protein, 1335 aa, unidentified
  REGION 1..1335: note = Cas Enzyme sequence
MKKQFGEYFLGLDIGTNSIGWAVTDLNYNIQKLNGKAMWGIRLFEAGKTAEERRTFRSARRRRQRQLQRIDLLQDLFRDEISKKDANFYLRLEESKFYPDDKTINQKNSLFSDKTYTDKDYMKEFPSIYHLRKALIENKKEYDIRLVYLAIHHILKNRGHFLFEGQELQSATKLEPILIKLQTYFKDEFNTDFEFKSLEEVEKILEDKALKKRDKKKELTELLIESDKQQITVIDLLLGYKRKLSNIFDDPSYAESTLDSISFSEATFQEKRDDYSDLLEDRMYLIDLLSAIYDWSLLAETLQGHEFLSFAKVEKYEKHKKDLSILKQAIKQYAMHEYYNIFSSPTIANNYCAYSGKKSKKTDALKDKCSQEDFNSFIGKVLDKIDDEDNDQLKYLKNEVENKSLMPKQVSKENSVIPYQVHLNELRTILRNVSKYHTFLNNKDDKGLTVSDKVISIMEFRIPYYIGPLNDYHADTKFAWIEKRSNEKIYPWNFKDVVDEEKSAEKFIRRMTNKCTYLYKADVLPKHSLLHSEFQVLNELNNLKINEELISVELKSFIFNDLYKKERKVTTKKLKTFLMANGYIGKSDSISGIDIEIKNSLTSYHDMKNIIGNVDINTDMIEEIIKWITLFGDSGPMLQKRIVDNYGDLLDKDQVSKILSLKYSGWGRLSKELLCDIYDVNKETGELLNIINAMRDTNNNLMELLSGRHEYSNKISKMNLADTEQDDKLSYQMVEDLRLSPAVKRGIWQALQIVEELMKIMQKQPKKIFVEFAREEGIKRRTTSRRQNLIDLYANCKEDCMSLMEGLESKSDVDLRDDRLYLYYTQMGRCMYTGETIDLSTLLNDKNSKIYDIDHIYPRSKIKDDSLENRVLVKKTANMKKGDNYPLPSEYSTQKPLWKNLHENNLIGNKKYKRLTERKYLSDDDLADFVERQLVETRQSTKAFAEILKKIMPDSPIVYVKANNVTEFRNKFEIVKVREINDLHHAKDAYLNIVVGNVYDSKFTRNPRNFVKESHGGYNLRTLFEKDVLVGNYFAWKGDRNGTIKDVKKTVEKNNILFTRHSFEHKGGISDQQIMPKGKGQLPIKSGDPRLLNIDRYGGFNKVSTAYFFLVEHDIKGKRIRSIEYVPVHLASTINGREDLIRYCINNLNLINPDIRLEKIKINALLSFDGFRAHLKSRTGERLVFSSAHQLYMPLDFNRYLKNIYNILSRRDLISKDGLVESLIDNNININIYDYLSEKLTNSIYKTKLSAQIKNFHDGRDLFLNLSKMNQIEALSKIIQLFRCVSGTTDLTLIGAKGTAGSIRNAKTLNIKNKVLIINQSITGIFEKEVDLNTV

SEQ ID NO: 20238 - protein, 1349 aa, unidentified
  REGION 1..1349: note = Cas Enzyme sequence
MKKNEKYYVGFDIGTNSTGWAVTDDTYKLFKCNGHKMWGVRLFDEAETAENRRMHRASRRRLQRRNARIELLQELFAEEICKVDPGFYQRLEDSKFYIEDKKIAEKYTLFIGTEYNDKDYYRQFPTIYHLRAALIKGKKEYDVRLVYLAIHHILKNRGHFLYEGDKFDTSSLDDSIHEVFENSDVNTNDVELTDELLKKIKDIILNVKLTKTDKKKELKNLFGKSKQLESIFGLAIGTKESLENLFGTSEYKELENDITKISFSEKIYEEEREKYEEVLEDRIILIDTLKKIYDTVLLSGIKKEGLSLSESKVELYNKHKKELAALKKIIKSYSTEEYKRFFSEKDADLANYKNYIGDGDKKCSREDFYNSLKSLLNKVEDTPEKKYILEEIKLEKYLPLQRIKENSAIPYQVHQEELKLILDNASTYLNFLNQTDGKLSVKDKIINIMTFRIPYYVGPLNTFHAGKKNGFAWAIKKSNERITPWNFENIIDLEASHDKFIQNMTNKCTYIKGKNVIPKNSLLYSEFTLLNELNNIRCNGEKLPVSIRNKIIDNFFKKSDKRGKVTVSMISQLLRCEGECEENVTITGIDNEVKADLKSYRDFKSILGDDFNYEMVEDIIRWITLYTNEPKSIKKRINDKYADMLNCTQINKICKLKYNGWGRFSKEFLTEIICDEFTDYSSGEVGSIITAMRNTTNNLMQLLSNDHDYMKQIEEENDLLYNPDEEISHDMLDELYVSPGVKRMIWQTILIMEEIKKVMGKDPEKIFIETIRSNKAEKKRTDTRKKKLLELYSSCKDEIKDWPKEIQSRSDGSLRSKKLYLYYLQMGKCLYSGEEINLDKLMSGEDYDIDHIYPRSKTKDDSFDNLALVKRSLNNEKGDTYPISNVIQAKMKDTWDFLYKKGFISHKKYERLIRKEEFGANELADFINRQIVETSQSSKAVAQIMQRLYSDSNIIYVKAENVSDFRNEMKYIKVREINDLHHAKDAYLNIVVGNVFDTKFTRSPINYVKEAGFREYNLNRMYDLKVERAGYTAWDGRNGRCKKIVDSQMKCNDVRITKRVATQKGELFDLTIYKKDIAKPDSYIGTKTSDPRLCDVTKYGGYRKISIAYLIPYTCDMINKKGVRKSIRRLIGIPVYLANNIKTPQELSEFIFKHVPAKHGETIENLKIINTKLRIGSLIKYNGFYYYVGGRTEDNFYADSAIQLLLDEDDEKYIKEIIKFTNIQKGDKEIKAERFSDFITKENNIKLYDVLVNKMNTNIYMQAKDNKYDVFMEDKMRSKFCNLLIEEQIKILLNMLNLLNNKISTYDFKSLGFGVGRRKIGFNIANAKEFKLINQSITGLFENNIDLLS

SEQ ID NO: 20239 - protein, 901 aa, unidentified
  REGION 1..901: note = Cas Enzyme sequence
MTFRIPYYVGPLNTFHAGKKNGFAWAIKKSNERITPWNFENIIDLEASHDKFIQNMTNKCTYIKGKNVIPKNSLLYSEFTLLNELNNIRCNGEKLPVSIRNKIIDNFFKKSDKRGKVTVSMISQLLRCEGECEENVTITGIDNEVKADLKSYRDFKSILGDDFNYEMVEDIIRWITLYTNEPKSIKKRINDKYADMLNCTQINKICKLKYNGWGRFSKEFLTEIICDEFTDYSSGEVGSIITAMRNTTNNLMQLLSNDHDYMKQIEEENDLLYNPDEEISHDMLDELYVSPGVKRMIWQTILIMEEIKKVMGKDPEKIFIETIRSNKAEKKRTDTRKKKLLELYSSCKDEIKDWPKEIQSRSDGSLRSKKLYLYYLQMGKCLYSGEEINLDKLMSGEDYDIDHIYPRSKTKDDSFDNLALVKRSLNNEKGDTYPISNVIQAKMKDTWDFLYKKGFISHKKYERLIRKEEFGANELADFINRQIVETSQSSKAVAQIMQRLYSDSNIIYVKAENVSDFRNEMKYIKVREINDLHHAKDAYLNIVVGNVFDTKFTRSPINYVKEAGFREYNLNRMYDLKVERAGYTAWDGRNGRCKKIVDSQMKCNDVRITKRVATQKGELFDLTIYKKDIAKPDSYIGTKTSDPRLCDVTKYGGYRKISIAYLIPYTCDMINKKGVRKSIRRLIGIPVYLANNIKTPQELSEFIFKHVPAKHGETIENLKIINTKLRIGSLIKYNGFYYYVGGRTEDNFYADSAIQLLLDEDDEKYIKEIIKFTNIQKGDKEIKAERFSDFITKENNIKLYDVLVNKMNTNIYMQAKDNKYDVFMEDKMRSKFCNLLIEEQIKILLNMLNLLNNKISTYDFKSLGFGVGRRKIGFNIANAKEFKLINQSITGLFENNIDLLS

SEQ ID NO: 20240 - protein, 1349 aa, unidentified; identical to SEQ ID NO: 20238
  REGION 1..1349: note = Cas Enzyme sequence

SEQ ID NO: 20241 - protein, 1376 aa, unidentified
  REGION 1..1376: note = Cas Enzyme sequence
MSNFDNHKDSICKHKGLKKGNYYIGLDIGTNSVGWAATNEQYELLKFKSHKMWGSRLFAEAQTAVDTRMKRSARRRLQRRKFRLLLLEELFAKAINAADDTFFLRLHESKYHVEDKTNPVKYTLFMDKDYTDVDYYKEFPTIYHLRHHLMTTGTKDIRLLFLGIHHILKYRGNFLYGRKEFSIDGEMYSVLRSTLEELGFGSYVEDAGVLQSIANLVLDRGIVRSEKVKQIEPLIAQGKKLSSVEKNRLKAWAYLIVGLKANLVNLFTDEDVEVVLPEEKEFKTINLHEGIYEDVRDAYEDAWGDRFVIVDQCKILHDIIVISSIIKPGQSLSEAKIESYNQHKEDLGLLKSVLKEDKKLYDDMFVVDIDKGTNYVKYIKQGVNGNTSTTQEAFYKYVRKVLSVLPETEHTRCIVQKIEEGLFLPLQRISKNGVVPYQLHKEELIRILDKAKVNYPFLNEVEDGLTVADKIISILEFKIPYYVGPLNPTHSIENGGFAWVVRKEAGQVLPWNFEQKVDVQASAVKFIENLTNKCTYLIDQDVLPKYSLLYAEFSLLNELNNIRVNDKPLPVDVKQAFIRDHFISLQDSKTATKKVVAKYLVDNNYVSQPPIITGMDQQIATKLTSHRDMTRILGEHFDYAMAEDIIRYITIFGESKDMLRQVLKNYYGDRLTTEQIKKLGKLTYTGWGRLSKKFLSDIWGMKKNDDDAEAGTIIEHMCEGQENLMQLLSSSYSFIDVVQEYVTNVLGAKEKTAFEMLEDLSLSPMVKRSVWQTLRILDEIVSIRKELPKKIFVEVARTNKADKKRTQSRKALLEELYEQIKDEDVHVLQQELESKEDSALNSKKLYLYFIQMGHCMYSGRRIDIHELFTDKYDIDHIYPRSLTKDDSWHNIVLVEKQLNAEKTDRFPILSAIQSKQKGFWKLLWDRGFISEKKYDRLVRTTDLTDEELNQFINRQMVSTNQSVKTVTTLLHQMYPETEVVFSKAENVSDFRRDYGFVKVRSINHHHHAKDAYLNIVVGNVYHEKFTKNFLSFAKQKGTHRTYNLTKMFEYEIKLTEESKKVIWDPNIHMEIVKKMMKSNDVRVTQRAVPQKGGLSDETIYKKGIAKRGVYLPLKSSDERVRDVEKYGGRTSITISEYIILNIRDTSDQDRIEIFSLPLYIAGKKDIHKAIEEAYLSTCKKPASVVDIQILYRGLYIGSKVNINGFTYYMGGKTGSNVSVDSAVDVVMDITSSVYIKLLEKVAIKKIENSKTFRIENIKTSYNHKEVTVSKEQNITLYQELLKKLDTPLFSKMKGNKLEEFRTVGFGTFIALSLEDQASVLLEVLNVLTNFKTKRDITKIGMTSSRSTLGINISNTEQFSVITTSITGLYEQEIKIK

SEQ ID NO: 20242 - protein, 1355 aa, unidentified
  REGION 1..1355: note = Cas Enzyme sequence
MQDEKIYLGLDIGSDSVGYAVTDGEYNILKYHGKPAWGVTLFDAAAPKANRRSFRTARRRLDRRQQRVQLIRELFAGEIAKVDPKFYIRLQAAALYREEAGEAYTIFNDVGYTDREYHEDYPTVHHLIYELMTDSKPHDVRLVYLACAWLVAHRGHFLSNVSKDNLASIRDFSIVYEDFMNYFSDNEYAFPWHECDVAELGKKLKVKSTVTAKKKALVKFLYGAEKPSKEASEDFPFSREAIVGLLAGGKVKPKELFQNDEYAEMESISLGMDDEKYDASAAALGDDFELLSLMRSIYDWAVLADILADGSCISEAKVAVYERHKADLRLLKDLIAQYRPEKYREVFRDTDKSNYAAYVYHTDEKECDKFKKKNKEDFSRYILGIVKDIVPKDEDKEKFDDMLARLEARTFMPKQKDSDNRVIPQQLYWYELDRILKNAAGYLPFLAEADEDGLTAADKIESVFSFRVPYFVGPLNPNSDRAWLERKAGKIYPWNFEKMVDLDASEKKFIDCMTNTCSHLPGEPVLPKDSLLYHKFTVLNEINNLRINGERISVELKQRIYNELFLAKKKVTKKSLLEYLIRENIIANGDEDTVSGIDININSNLVPQIAFKNLLGSSVITEADAEEIIKRLTYSEDKARFKKWLEKEYPNISETDRKYICSLKFKDFGRLSRTLLCGMEGVCKETGEVMTVIGALWETQYNLMEIIADDSRFTFKAEIEAFKDDYYCKNPKTLQARLDEMYISNSVRRPIYRTLAIVKDVEKAFGKPDKIFIEVTRGASDEQKGKRTKTRKQQILELYDKCSCEDVPMLREQIESMGDLADNKLQSDRLFLYYMQLGRCLYTGRAIKLEELGSKLYDIEHIYPQAYVKDDSIINNEILVDTKANGEKSDAYPISSDIRRNMAGFWHYLKDHEFISEEKYKRLTRATGFTAEEKYGFINRQLTETSQSTKAVANLLHKCYPDADIVYSKARLVSDFRQEFDLLKSRLFNDLHHAVDAYLNIVVGNVYKMKFNRSWFNVNSKYSVKTRTMFTHPLVCAGETVWDGEKMLAKVKANAVKNNANVTKYSFMRHGGFFDQNPLPASEGLTPLKKDLPTEKYGGYNKPAVMFFIPVRYKAGRKSEIIIMSVELLYGKEFLADAEFARTYTFDRLRRILGKPVDEVSFPLGMRPWKINTMLSLDGFRVCITGSANAGKSIIPQTVTQFSANGFWQFYLKKLESFVDKVAKNPEYHFSEKYDKISAEKNLELYDIYIDKLENSIYKRRFNNPVEILKNGRDKFIELDIKAQAKQLLNAHQVFGRLSSGCDLEAIGGKTRSAATIGLSTVISNWKKYYKDVRIIDPSASGLWERTSGNLLELL

SEQ ID NO: 20243 - protein, 1355 aa, unidentified
  REGION 1..1355: note = Cas Enzyme sequence
MQDEKIYLGLDIGSDSVGYAVTDGEYNILKYHGKPAWGVTLFDAAAPKANRRSFRTARRRLDRRQQRVQLIRELFAGEIAKVDPKFYIRLQAAALYREEAGEAYTIFNDVGYTDREYHEDYPTVHHLIYELMTDSKPHDVRLVYLACAWLVAHRGHFLSNVSKDNLASIKDFSIVYEDFMNYFSDNEYAFPWHECDVAELGKKLKVKSTVTAKKKALVKFLYGTEKPSKEASEDFPFSREAIVGLLAGGKVKPKELFQNDEYAEMESISLGMDDEKYDASAAALGDDFELLSLMRSIYDWAVLADILADGSCISEAKVAVYERHKADLRLLKDLIAQYRPEKYREVFRDTDKSNYAAYVYHTDEKECDKFKKKNKEDFSKYILGIVKGIVPKDEDKEKFDDMLARLEARTFMPKQKDSDNRVIPQQLYWYELDRILKNAAGYLPFLDEADEDGLTAADKIESVFSFRVPYFVGPLNPNSDRAWLERKAGKIYPWNFEKMVDLDASEKKFIDCMTNTCSHLPGEPVLPKDSLLYHKFTVLNEINNLRINGERISVELKQRIYNELFLVKKKVTKKSLLEYLIRENIIANGDEDTVSGIDININSNLVPQIAFKNLLGSSVITEADAEEIIKRLTYSEDKARFKKWLEKEYPNISETDRKYICSLKFKDFGRLSRTLLCGMEGVCKETGEVMTVIGALWETQYNLMEIIADDSRFTFKAEIEAFKADYYCKNPKTLQARLDEMYISNSVRRPIYRTLAIVKDVEKAFGKPDKIFIEVTRGASDEQKGKRTKTRKQQILELYDKCSCEDVPMLREQIESMGDLADNKLQSDRLFLYYMQLGRCLYTGKAIKLEELGSGLYNIEHIYPQAYIKDDSIINNEVLVDSNINGIKDDVYPISSDIRRNMAGFWHYLKDHEFISEEKYKRLTRATGFTAEEKYGFINRQLTETSQSTKAVANLLHECYPDADIVYSKARLVSDFRQEFDLLKSRLFNDLHHAVDAYLNIVVGNVYKMKFNRSWFSVDSNYSVKTRTIFTHPLVCAGETVWDGEKMLAKVKANAVKNNANVTKYSFMRHGGFFDQNPLPASEGLTPLKKDLPTEKYGGYNKPAVMFFIPVRYKAGRKSEIIIMSVELLYGKEFLADAEFARTYTFDRLRRILGKPVDEVSFPLGMRPWKINTMLSLDGFRVCITGSANAGKSIIPQTVTQFSANGFWQFYLKKLESFVDKVAKNPEYHFSEKYDKISAEKNLELYDIYIDKLENSIYKRRFNNPVEILKNGRDKFIELDIKAQAKQLLNAHQVFGRLSSGCDLEAIGGKTRSAATIGLSTVISNWKKYYKDVRIIDPSASGLWERTSGNLLELL

SEQ ID NO: 20244 - protein, 954 aa, unidentified
  REGION 1..954: note = Cas Enzyme sequence
VMRERLDFKKFMPKQVNGDNRIVPQQVYYVELRRILEQAANYLPFLTESDADGLTPAEKILSVFSFRVPYFVGPLNNASEHAWIRRKAEGRILPWNFEEKVDMDASEQAFIARMTNKCTYLPGKDVLPELSLCYERYKVLNEINTIKINGRSLPAEVKQGIYNDLFMNMKKVTPKRIKDYLLSNNHCTAEDLNTFSGLDETVKSDLAMHRAFARLMNDTLNEEDVEKIIRQAACCEDKGRLRLWLKKEFPALSEEDRRYIAGLKIKGFGRLSEKFLAGMLGVEKSTGEVNTVLGWMWERNLNLMQLLSDRFDFAEQIEKMRAEYYDANKLTLNERLDSMYISNSVKRPIIRAMDIVHEVVKAKGCPPKKIFVEMARGGNAEDKGKRTRSRYQQLCELYAKVDTEDVRQLQAELEAMGEARDSRLQSERLFLYFLQLGKCMYSGEAIDLSKLAGETYNVDHIYPQSKVKDDSIVNNKVLVKSEINGSKNNDYPIAADIRRKMGAQWKLLRELGLINEEKYRRLTRDTPFDENEEWGFINRQLVETRQSTKAVTTLLSEKYPETEIVYVKAGIVSEFRQEFDILKCRSVNDLHHAKDAYLNVVVGNVYSEKFTHQWYLSNKNNYSVKIETIFTNPVTVNGALIWNGKTALEKVINTVRKNNAVHLTRYAFCKGGGFFDLQPRKAGENLVPRKLGLPAEKYGGYRKPAVSFYILAAFTVKKKREVMFVPIELHSRQVMKDELLAREYVCGQAEKIIGKSVNYFELPLGLRPIKINTMLEADGYRMTLSGKSDGGKKVIVSGMMPLIVGDNREGYIKRLERFAEKKKQNPSMIWSEKYDKISTAENIELYDMLCDKLENNMYRKRPANPINDLKGVREKFIKLDISQQVQCLLQMVALFGRTASGCDLSGVGGKPNAGATTRSSCLSNWAKVYKDVRIVDQSVAGLFEKRSMNLLELL

SEQ ID NO: 20245 - protein, 1355 aa, unidentified
  REGION 1..1355: note = Cas Enzyme sequence
MRIKSNYYLGLDIGTDSVGYAATDEEYKILKFNGEPIWGVHLFEEAGTGEERRGFRAARRRLDRRQQRVTLVQEIFAKEIYKMDPTFYMRIAESHKFAEDSEYGVALFQDADYTDEQYLRDYPTIHHLICELMDTSVPHDVRLVYLACAWLVAHRGHFLKEVSVDNLEELTDIQSVYREFMDFFESEKPWGEVDAENFGKILRKKIGKAAKYKELSRLIYGNVKVAKEVSEEFPYSREGILKLLCGSQYTVSALFDNKEYAELGSISLDMNDESFDALLADIGDDGEILVKLKSIYDWTVLCDVLRGNKYISQAKVEDYEQHREDLQQLKRLVKKYIPREYNEIFRVSVKKLNNYTAYSGNFQNTEEAEENSGTTQGEFCKYILKKFESVIPQPEDEQELAVMRERLDFKKFMPKQVNGDNRIVPQQVYYVELRRILEQAANYLPFLTESDADGLTPAEKILSVFSFRVPYFVGPLNNASEHAWIRRKAEGRILPWNFEEKVDMDASEQAFIARMTNKCTYLPGKDVLPELSLCYERYKVLNEINTIKINGRSLPAEVKQGIYNDLFMNMKKVTPKRIKDYLLSNNHCTAEDLNTFSGLDETVKSDLAMHRAFARLMNDTLNEEDVEKIIRQAACCEDKGRLRLWLKKEFPALSEEDRRYIAGLKIKGFGRLSEKFLAGMLGVEKSTGEVNTVLGWMWERNLNLMQLLSDRFDFAEQIEKMRAEYYDANKLTLNERLDSMYISNSVKRPIIRAMDIVHEVVKAKGCPPKKIFVEMARGGNAEDKGKRTRSRYQQLCELYAKVDTEDVRQLQAELEAMGEARDSRLQSERLFLYFLQLGKCMYSGEAIDLSKLAGETYNVDHIYPQSKVKDDSIVNNKVLVKSEINGSKNNDYPIAADIRRKMGAQWKLLRELGLINEEKYRRLTRDTPFDENEEWGFINRQLVETRQSTKAVTTLLSEKYPETEIVYVKAGIVSEFRQEFDILKCRSVNDLHHAKDAYLNVVVGNVYSEKFTHQWYLSNKNNYSVKIETIFTNPVTVNGALIWNGKTALEKVINTVRKNNAVHLTRYAFCKGGGFFDLQPRKAGENLVPRKLGLPAEKYGGYRKPAVSFYILAAFTVKKKREVMFVPIELHSRQVMKDELLAREYVCGQAEKIIGKSVNYFELPLGLRPIKINTMLEADGYRMTLSGKSDGGKKVIVSGMMPLIVGDNREGYIKRLERFAEKKKQNPSMIWSEKYDKISTAENIELYDMLCDKLENNMYRKRPANPINDLKGVREKFIKLDISQQVQCLLQMVALFGRTASGCDLSGVGGKPNAGATTRSSCLSNWAKVYKDVRIVDQSVAGLFEKRSMNLLELL

SEQ ID NO: 20246 - protein, 1355 aa, unidentified
  REGION 1..1355: note = Cas Enzyme sequence
MADSGYFLGIDIGTNSIGYAATDSEYTLKKLHGEPVWGVHLFDSALTCSERRTFRTARRRLERRKQRIRLLRELMAEEIYKKDPDFFIRQDKSALYAEDCGERYSLFNDPSYTDKQYHEQYPTIHHLICDLMENTAEHDVRLVYLACAWLIAHRGHFLSDISMDNIEAASDFSEVYSGLTDMLVRRAGGNVSLPWTLSEANLLGNILKRQTGITKKKREASQLLFGGKAPKYSEEYLLNIDSMLGLMCGGKVSAEEFFDNEDYDDIESFSLDSDDEKLAEIIGRLGEDGEVIRRLKEVFDWSQLAASLEGASSVSDAKVKIYKQHRKDLALLKRVIRKYAPDQYDSVFRSTDKENYVSYSYHTDNPDVKKIPAEKFCKFIGKILKDITPDAEDAALFEDMLSRVDAKTFMPKQKKPENRVIPHQLYLYELKKILENAAHYLPFLSEKDDDGQSVADKIISVFSFRVPYYVGPLNAGSPYAWLKRKAEGKIYPWNFSRLVDEDQSEQEFIRRMVNRCTYIPSADVLPKESLLYHRYTVLNEINNIKIDGQPISVEQKQEIYNKLFMCRRRVTYKALVDFLLSRNIMTAGQKLEGIDEQIKSDLKPYHDFARLLSSGILNEAQAEEIILRLTCTDEKQRFVRWLRQRHPELCDEDVKYISGLKYKDFGRLSREFLGGIAGTGKDSATGEAFTVISAMWNTNENLMQLMSGRYTFADTVNKLRREYYDANPATLDERLDKMYVPTSVRRPIKRALEIAKEVAKAMGAAPARIFVEMPRGNTRDDSKSKRTKTRREQIAELYSGCDGQEVRLLQEQLEALGEAADTRLRGDKLFLYFMQFGRCAYSGQAIDIGELAGKAYDIEHIYPRSLVKDDSIHNNKVLVLSELNGLKSDTYPVPADIRSKMAPVWEHWHKTGTISDEKYKRLTRSTGFTEEEKRDFINRQLVETSQASKAVAELLKERYPETDIVYVKSSQTSDFRKGFGLIKSRTFNDLHHAKDAYICIVAGNAYYMRFTRFGFDTNQKYSLNTDAIFGSDPRSIRGIKYWDGTRTIEKVKNTLSKNNAHCTKYAFCRNGGFFDQLPYPKAAGLIPRKANLPPEKYGGYNKPSISFFVLVKYACGNKSSAMILPVELLHRDEMLRGTADAERYAQRRIEAITGKKARDIGFPLGLRPIKINTVLSFDGFRFTLSGVSDGGKRLIAAPFMMFSASRSTEAYIKHLEKLSEAKAENPDHVYSEQYDKVTAAQNLELYELYCRKLKDSIYSKRLNPPVKIFEDGREKFANADIYAQTAALLNMHSVFGRVSNGCDLTIIGGTARAAATMGLSSTIDNWKKSYSDVRIIDASASGLWEKRSENLLELI

SEQ ID NO: 20247 - protein, 1355 aa, unidentified
  REGION 1..1355: note = Cas Enzyme sequence
MKNKKYYLGLDIGSDSVGYAVADEEYNLLKFHGEPAWGATLFDAPASKAERRGYRTARRRLERRKQRVQLVRELFAEEIAKVDRRFYIRQQESALFREDAGDAYSIFNDPDYTDREYYAEYPTIHHLIFELMKNPAPHDVRLVYLACAWLVAHRGHFLSNISKDNMDSFRDFNLVYKSFISFFTDNGYDVPWNECDEKELGNILKKKIRVTDKKKELTDLLYGGKKPSSEATEDFPFSRAAIIGLFAGSKVRPKDLFQNSDYENLEGITLDMDDEKFINLSTELGDDYELIAAMRAVYDWIVLADILGNYSCISEAKAAVYEQHRKDLRSLKDVIAKYRPEKYSEVFRAADKDNYVAYAYHTDEVSGSNLKRKDKEAFSKYILGIVKNISPDASDKQNFDDMITRLEDRTFMPKQKDGDNRVIPQQLYAYELDAILKNAAQYLLFLNETDEDGLSVADKKSSVFSFRVPYFVGPLNSNSPRAWLARKSGKIYPWNFEKMVDLDASEQNFIEQLTNTCTYIPGEPVLPKDSLLYHKFSVLNEINNLCINEKRISVELKQEIYNNVFMCRRKVTRKQLISYLVANGYVEKGKEDTVTGVDININSNLAPQISFKRLIESRVLSEQDVERIIERASYSEDKTRLAAWLKREYPNVNDADRKYICSLRIHDFGRLSRRFLSGVEGVRKETGEVMTVISALWETQYNLMEIVADADRFTFKDELKTIRDDYYSEHPQTLDSRLDDMYVSDAVRRPIHRTLDIIKDVVKAFGEPEKIFVETTRDASGKKKGERTTSRKEQILELYKKCGSEDVRLLQEQLEAMGEAANTKLQSEKLFLYYMQLGRCMYTNQPIKLEALGTKLYDIDHIYPQCFVKDDSIINNKVLVLSEANGAKGNVYPINSDIRKKMHGIWESYKAHGLISEEKFKRLTRTTPFTEEEKYNFINRQLTETSQSTKAVATLLNEFYPDTEIVYSKAGPVSDFRKEFEIYKSRLFNDLHHAVDAYLNIVVGNVYHMKFTRRWFNVNSNYSMKAKTIFTHPVICGGQTVWDGAHMLEKVKTTAAKNNAHITKFATFKNGGLFDQNPISAKEGLTPLKKGLPTEKYGGYNKAGSMFFIPVRYRVGKKTDIIIMPVELLYGKKFLEDAAFAKEYTFDRLGRILKKTVDEVSFPLGMRPWKVNTVLSLDGFRVCITGGAGGGTRLIAQTLTQFAASKDWAFYLKKLEEFNKKNSKNPNYIYDEKYDKISAEKNLELYDLYIDKLENSIFSKRANCPTEILKKGRDKFIALGIKEQAQALLNIHQVFGRISRGCDLSAVGGTSRSAATESLSTKISNWKKDYKDVRIIDSSASGLWEKRSCNLLDLL

SEQ ID NO: 20248 - protein, 1355 aa, unidentified
  REGION 1..1355: note = Cas Enzyme sequence
MKNKKYYLGLDIGSDSVGYAVTDEEYNLLKFHGEPAWGATLFDAPASKAERRGYRTARRRLERRKQRVQLVRELFAEEIAQVDVRFYIRQQESALFREDAGDAYSIFNDPDYTDREYYAEYPTMHHLIFELMKNPAPHDVRLVYLACAWLVAHRGHFLSNISKDNMDSFRDFNLVYKSFISFFTDNGYDVPWNKCDEKELGNILKKKIRVTDKKKELIDLLYGGKKTSSEATEDFPFSRAAIIGLFAGSKVRPKDLFQNSDYENLEGITLDMDDEKFINLSTELGDDYELIAAMRAVYDWTVLADILGNYSCISEAKAAVYEQHRKDLRFLKDVIAKYRPEKYSEVFRAADKDNYVAYAYHTDEVSGSNLKRKDKEAFSKYILGIVKNISPDASDKQNFDDMITRLEDRTFMPKQKDGDNRVIPQQLYAYELDAILKNAAQYLPFLTETDEDGLSVADKISSVFSFRVPYFVGPLNSNSPRAWLARKSGKIYPWNFEKMVDLDASEQNFIEQLTNTCTYIPGEPVLPKDSLLYHKFSVLNEINNLCINEKRISVELKQEIYNNVFMCRRKVTRKQLISYLVANGYVEKGKENTVTGVDININSNLAPQISFKRLIESRVLSEQDVERIIERASYSEDKTRLAAWLKREYPNVNDTDRKYICSLRIHDFGRLSRRFLSGVEGVRKETGEVMTVISALWETQYNLMEIVADADRFTFKDELKTIRDDYYSEHPQTLDSRLDDMYVSDAVRRPIHRTLDIIKDVVKAFGEPEKIFVETTRDASGKKKGERTTSRKEQILELYKKCGSEDVRLLQEQLEAMGEAANTKLQSEKLFLYYMQLGRCMYTNQPIKLEALGTKLYDIDHIYPQCFVKDDSIINNKVLVLSEANGAKGNVYPINSDIRKKMHGIWESYKAHGLISEEKFKRLTRTTPFTEEEKYNFINRQLTETSQSTKAVATLLNEFYPDTEIVYSKAGPVSDFRKEFEIYKSRLFNDLHHAVDAYLNIVVGNVYHMKFTRRWFNVNSNYSMKAKTIFTHPVICGGQTVWDGAHMLEKVKATAAKNNAHITKFATFKNGGLFDQNPISAKEGLTPLKKGLPTEKYGGYNKAGSMFFIPVRYRVGKKTDIIIMPVELLYGKKFLEDAAFAKEYTFDRLGRLLKKTVDEFSFPLGMRPWKVNTVLSLDGFRVCITGGAGGGTKLITQTLTQFAANKDWAFYLKKLEEFNKKNSKNPNYIYNEKYDKISAEKNLELYDLYIDKLENSIFSKRVNCPTELLKKGRDKFIALGIKEQAQALLNIHQVFGRISRGCDLSAVGGTSRSAATESFSTKISNWKKDYKDVRIIDSSASGLWEKRSCNLLDLL

SEQ ID NO: 20249 - protein, 944 aa, unidentified
  REGION 1..944: note = Cas Enzyme sequence
MPKQKDGDNRVIPQQLYAYELDAILKNAAQYLPFLNETDEDGLSVADKISSVFSFRVPYFVGPLNSNSPRAWLARKSGKIYPWNFEKMVDLDASEQNFIEQLTNTCTYIPGEPVLPKDSLLYHKFSVLNEINNLCINEKRISVELKQEIYNNVFMCRRKVTRKQLISYLVANGYVEKGKENTVTGVDININSNLAPQISFKRLIESRVLSEQDVERIIERASYSEDKTRLAAWLKREYPNVNDADRKYICSLRIHDFGRLSRRFLSGVEGVRKETGEVITVISALWETQYNLMEIVADADRFTFKDELKTIRDDYYSEHPQTLDSRLDDMYVSDAVRRPIHRTLDIIKDVVKAFGEPEKIFVETTRDASGKKKGERTTSRKEQILELYKKCGSEDVRLLQEQLEAMGEAANTKLQSEKLFLYYMQLGRCMYTNQPIKLEALGTKLYDIDHIYPQCFVKDDSIINNKVLVLSEANGAKGNVYPINSDIRKNMHGIWESYKAHGLISEEKFKRLTRTTPFTEEEKYNFINRQLTETSQSTKAVATLLNEFYPDTEIVYSKAGPVSDFRKEFEIYKSRLFNDLHHAVDAYLNIVVGNVYHMKFTRRWFNVNSNYSMKAKTIFTHPVICGGQTVWDGAHMLEKVKTTAAKNNAHITKFATFKNGGLFDQNPISAKEGLTPLKKGLPTEKYGGYNKAGSMFFIPVRYRVGKKTDIIIMPVELLYGKKFLEDAAFAKEYTFDRLGRLLKKTVDEVSFPLGMRPWKVNTMLSLDGFRVCITGGANGGKSIITQTLTQFAASKDWAFYLKKLEEFNKKNSKNPNYIYDEKYDKISAEKNLELYDLYIDKLENSIFSKRVNCPTEILKKGRDKFIALGIKEQAQALLNIHQVFGRISSGCDLSAVGGTSRSAATIGLSSMVSNWKKRYKDVRIIDTSASGLWEKRSCNLLDLL

SEQ ID NO: 20250 - protein, 926 aa, unidentified
  REGION 1..926: note = Cas Enzyme sequence
  REGION 355..358: note = misc_feature - Xaa can be any naturally occurring amino acid
LYAYELDAILKNAAQYLPFLNETDEDGLSVADKISSVFSFRVPYFVGPLNSNSPRAWLARKSGKIYPWNFEKMVDLDASEQNFIEQLTNTCTYIPGEPVLPKDSLLYHKFSVLNEINNLCINEKRISVELKQEIYNNVFMCRRKVTRKQLISYLVANGYVEKGKENTVTGVDININSNLAPQISFKRLIESRVLSEQDVERIIERASYSEDKTRLAAWLKREYPNVNDADRKYICSLRIHDFGRLSRRFLSGVEGVRKETGEVITVISALWETQYNLMEIVADADRFTFKDELKTIRDDYYSEHPQTLDSRLDDMYVSDAVRRPIHRTLDIIKDVVKAFGEPEKIFVETTRDASXXXXTTSRKEQILELYKKCGSEDVRLLQEQLEAMGEAANTKLQSEKLFLYYMQLGRCMYTNQPIKLEALGTKLYDIDHIYPQCFVKDDSIINNKVLVLSEANGAKGNVYPINSDIRKNMHGIWESYKAHGLISEEKFKRLTRTTPFTEEEKYNFINRQLTETSQSTKAVATLLNEFYPDTEIVYSKAGPVSDFRKEFEIYKSRLFNDLHHAVDAYLNIVVGNVYHMKFTRRWFNVNSNYSMKAKTIFTHPVICGGQTVWDGAHMLEKVKTTAAKNNAHITKFATFKNGGLFDQNPISAKEGLTPLKKGLPTEKYGGYNKAGSMFFIPVRYRVGKKTDIIIMPVELLYGKKFLEDAAFAKEYTFDRLGRLLKKTVDEVSFPLGMRPWKVNTMLSLDGFRVCITGGANGGKSIITQTLTQFAASKDWAFYLKKLEEFNKKNSKNPNYIYDEKYDKISAEKNLELYDLYIDKLENSIFSKRVNCPTEILKKGRDKFIALGIKEQAQALLNIHQVFGRISSGCDLSAVGGTSRSAATIGLSSMVSNWKKRYKDVRIIDTSASGLWEKRSCNLLDLL

SEQ ID NO: 20251 - protein, 1355 aa, unidentified
  REGION 1..1355: note = Cas Enzyme sequence
MKNKKYYLGLDIGSDSVGYAVTDEEYNLLKFHGEPAWGATLFDAPASKAERRGYRTARRRLERRKQRVQLVRELFAEEIAKVDGRFYIRQQESALFREDAGDAYSIFNDPDYTDREYYAEYPTIHHLIFELMKNPAPHDVRLVYLACVWLVAHRGHFLSNISKDNMDSFRDFNLVYKSFISFFTDNGYDVPWNECDEKELGNILKKKIRVTDKKKELTDLLYGGKKPSSEATEDFPFSRAAIIGLFAGSKVRPKDLFQNSDYENLEGITLDMDDEKFINLSTELGDDYELIADMRAVYDWTVLADILGNYSCISEAKAAVYEQHRKDLRFLKDVIAKYRPEKYSEVFRAADKDNYVAYAYHTDEVSGSNLKRKDKEAFSKYILGIVKNISPDASDKQNFDDMITRLEDRTFMPKQKDGDNRVIPQQLYAYELDAILKNAAQYLPFLNETDEDGLSVADKISSVFSFRVPYFVGPLNSNSPRAWLARKSGKIYPWNFEKMVDLDASEQNFIEQLTNTCTYIPGEPVLPKDSLLYHKFSVLNEINNLCINEKRISVELKQEIYNNVFMCRRKVTRKQLISYLVANGYVENGKENTVTGVDININSNLAPQISFKRLMESRVLSEQDVERIIERASYSEDKTRLAAWLKREYPNVNDADRKYICSLRIHDFGRLSRRFLSGVEGVRKETGEVMTVISALWETQYNLMEIVADADRFTFKDELKTIRDDYYSEHPQTLDSRLDDMYVSDAVRRPIHRTLDIIKDVVKAFGEPEKIFVETTRDASGKKKGERTTPRKEQILELYKKCGSEDVRLLQEQLEAMGEAANTKLQSEKLFLYYMQLGRCMYTNQPIKLEALGTKLYDIDHIYPQCFVKDDSIINNKVLVLSEANGAKGNVYPINSDIRKKMHGIWESYKAHGLISEEKFKRLTRTTPFTEEEKYNFINRQLTETSQSTKAVATLLNEFYPDTEIVYSKAGTVSDFRKEFEIYKSRLFNDLHHAVDAYLNIVVGNVYHMKFTRRWFNVNSDYSMKAKTIFTHPVICGGQTVWDGAHMLEKVKTTAAKNNAHITKFATFKNGGLFDQNPISAKEGLTPLKKGLPTEKYGGYNKAGSMFFIPVRYRVGKKTDIIIMPVELLYGKKFLEDAAFAKEYTFDRLGRILKKTVDEFSFPLGMRPWKVNTVLSLDGFRVCITGGAGGGTKLIAQTLTQFAASKDWAFYLKKLEEFNKKNSKNPNYIYDEKYDKISAEKNLKLYDLYIDKLENSIFSKRVNCPTEILKKGRDKFIALGIKEQAQALLNIHQVFGRISSGCDLSAVGGTPKSAATVSFSSTVSNWKKRYKDVRIIDSSASGLWEKRSCNLLDLL

SEQ ID NO: 20252 - protein, 1355 aa, unidentified
  REGION 1..1355: note = Cas Enzyme sequence
MKNKKYYLGLDIGSDSVGYAVTDDEYNLLKFHGEPAWGATLFDAPASKAERRGYRTARRRLERRKQRVQLVRELFAEEIAKVDGRFYIRQQESALFREDAGDAYSIFNDPDYTDREYYAEYPTIHHLIFELMKNPAPHGVRLVYLACAWLVAHRGHFLSNISKDNMDSFRDFNLVYKSFISFFTDNGYDVPWNECDEKELGNIMKKKIRVTDKKKELTDLLYGGKKPSSEATEDFPFSRAAIIGLFAGSKVRPKDLCQNSDYENLEGITLDMDDEKFINLSTELGDDYELIAAMRAVYDWTVLADILGNYSCISEAKAAVYEQHRKDLRFLKDVIAKYRPEKYSEVFRAADKDNYVAYAYHTDEVSGSNLKRKDKEAFSKYILGIVKNISPDASDKQNFDDMITRLEDRTFMPKQKDGDNRVIPQQLYAYELDAILKNAAQYLPFLNETDEDGLSVADKISSVFSFRVPYFVGPLNSNSPRAWLARKSGKIYPWNFEKMVDLDASEQNFIEQLTNTCTYIPGEPVLPKDSLLYHKFSVLNEINNLCINEKRISVELKQEIYNNVFMCRRKVTRKQLISYLVANGYVEKGKEDTVTGVDININSNLAPQISFKRLIESRVLSEQDVERIIERASYSEDKTRLAAWLKREYPNVNDADRKYICSLRIHDFGRLSRRFLSGVEGVRKETGEVMTVISALWETQYNLMEIVADADRFTFKDELKTIRDDYYSEHPQTLDSRLDDMYVSDAVRRPIHRTLDIIKDVVKAFGEPEKIFVETTRDASGKKKGERTTPRKEQILELYKKCGSEDVRLLQEQLEAMGEAANTKLQSEKLFLYYMQLGRCMYTNQPIKLEALGTKLYDIDHIYPQCFVKDDSIINNKVLVLSEANGAKGNVYPINSDIRKKMHGIWESYKAHGLISEEKFKRLTRTTPFTEEEKYNFINRQLTETSQSTKAVATLLNEFYPDTEIVYSKAGPVSDFRKEFEIYKSRLFNDLHHAVDAYLNIVVGNVYHMKFTRRWFNVNSDYSMKAKTIFTHPVICGGQTVWDGAHMLEKVKTTAAKNNAHITKFATFKNGGLFDQNPISAKEGLTPLKKGLPTEKYGGYNKAGSMFFIPVRYRVGKKTDIIIMPVELLYGKKFLEDAAFAKEYTFDRLGRVLKKTVDEFSFPLGMRPWKVNTVLSLDGFRVCITGGANGGKSIITQTLTQFAANKDWAFYLKKLEEFNKKNSKNPNYIYDEKYDKISAEKNLELYALYIDKLENSIFSKRVNCPTELLKKGRDKFITLGIKEQAQALLNIHQVFGRISSGCDLSAVGGTPKSAATIGLSSTVSNWKKRYKDVRIIDSSASGLWEKRSCNLLDLL

SEQ ID NO: 20253 - protein, 1355 aa, unidentified
  REGION 1..1355: note = Cas Enzyme sequence
MKNKKYYLGLDIGSDSVGYAVADEEYNLLKFHGEPAWGATLFDAPASKAERRGYRTARRRLERRKQRVQLVRELFAEEIAKVDGRFYIRQQESALFREDAGDAYSIFNDPDYTDREYYAEYPTIHHLIFELMKNPAPHDVRLVYLACAWLVAHRGHFLSNISKDNMDSFRDFNLVYKSFISFFTDNGYDVPWNECDEKELGNILKKKIRVTDKKKELTDLLYGGKKPSSEATEDFPFSRAAIIGLFAGSKVRPKDLFQNSDYENLEGITLDMDDEKFINLSTELGDDYELIADMRAVYDWTVLADILGNYSCISEAKAAVYEQHRKDLHFLKDVIAKYRPEKYSEVFRAADKDNYVAYAYHTDEVSGSNLKRKDKEAFSKYILGIVKNISPDASDKQNFDDMITRLEDRTFMPKQKDGDNRVIPQQLYAYELDAILKNAAQYLPFLNETDEDGLSVADKISSVFSFRVPYFVGPLNSNSPRAWLARKSGKIYPWNFEKMVDLDASEQNFIEQLTNTCTYIPGEPVLPKDSLLYHKFSVLNEINNLCINEKRISVELKQEIYNSVFMCRRKVTRKQLISYLVANGYVEKGKEDTVTGVDININSNLAPQISFKRLIGSRVLSEQDVERIIERASYSEDKTRLAAWLKREYPNVNDADRKYICSLRIHDFGRLSRRFLSGVEGVRKETGEVMTVISALWETQYNLMEIVADADRFTFKDELKTIRDDYYSEHPQTLDSRLDDMYVSDAVRRPIHRTLDIIKDVVKAFGEPEKIFVETTRDASGKKKGERTTSRKEQILELYKKCGSEDVRLLQEQLEAMGEAANTKLQSEKLFLYYMQLGRCMYTNQPIKLEALGTKLYDIDHIYPQCFVKDDSIINNKVLVLSEANGAKGNVYPINSDIRKNMHGIWESYKAHGLISEEKFKRLTRTTPFTEEEKYNFINRQLTETSQSTKAVATLLNEFYPDTEIVYSKAGPVSDFRKEFEIYKSRLFNDLHHAVDAYLNIVVGNVYHMKFTRRWFNVNSDYSMKAKTIFTHPVICGGQTVWDGAHMLEKVKTTAAKNNAHITKFATFKNGGLFDQNPISAKEGLTPLKKGLSTEKYGGYNKAGSMFFIPVRYRVGKKTDIIIMPVELLYGKKFLEDAAFAKEYTFDRLGRVLKKTVDEFSFPLGMRPWKVNTVLSLDGFRVCISGGKGGGTQLITQTLTQFAASKDWAFYLKKLEEFNKKNSKNPNHIYDEKYDKISAEKNLELYDLYIDKLENSIFSKRVNCPTELLKKGRDKFIALGIKEQAQALLNIHQVFGRISRGCDLSAVGGTSRSAATESLSTKISNWKKDYKDVRIIDSSASGLWEKRSCNLLDLL

SEQ ID NO: 20254 - protein, 1355 aa, unidentified
  REGION 1..1355: note = Cas Enzyme sequence
MKNKKYYLGLDIGSDSVGYAVTDEEYNLLKFHGEPAWGSTLFDAPASKAERRGYRTARRRLERRKQRVQLVRELFAEEIAKVDGRFYIRQQESALFREDAGDAYSIFNDPDYTDREYYAEYPTIHHLIFELMKNPAPHDVRLVYLACVWLVAHRGHFLSNISKDNMDSFRDFNLVYKSFISFFTDNGYDVPWNECDEKELGNIMKKKIRVTDKKKELTDLLYGGKKPSSEATEDFPFSRAAIIGLFAGSKVRPKDLCQNSDYENLEGITLDMDDEKFINLSTELGDDYELIADMRAVYDWTVLADILGNYSCISEAKAAVYEQHRKDLRFLKDVIAKYRPEKYSEVFRAADKDNYVAYAYHTDEVSGSNLKRKDKEAFSKYILGIVKNISPDASDKQNFDDMITRLEDRTFMPKQKDGDNRVIPQQLYAYELDAILKNAAQHLPFLTETDEDGLSVADKISSVFSFRVPYFVGPLNSNSPRAWLARKRGKIYPWNFERMVDLDASEQNFIEQLTNTCTYIPGEPVLPKDSLLYHKFSVLNEINNLCINEKRISVELKQEIYNNVFMCRRKVTRKQLISYLVANGYVEKGKENTVTGVDININSNLAPQISFKRLIESRVLSEQDVERIIERASYSEDKTRLAAWLKREYPNVNDADRKYICSLRIHDFGRLSRRFLSGVEGVRKETGEVMTVISALWETQYNLMEIVADADRFTFKDELKTIRDDYYSEHPQTLDSRLDDMYVSDAVRRPIHRTLDIIKDVVKAFGEPEKIFVETTRDASGKKKGERTTSRKEQILELYKKCGSEDVRLLQEQLEAMGEAANTKLQSEKLFLYYMQLGRCMYTNQPIKLEALGTKLYDIDHIYPQCFVKDDSIINNKVLVLSEANGAKGNVYPINSDIRKNMHGIWESYKAHGLISEEKFKRLTRTTPFTEEEKYNFINRQLTETSQSTKAVATLLNEFYPDTEIVYSKAGPVSDFRKEFEIYKSRLFNDLHHAVDAYLNIVVGNVYHMKFTRRWFNVNSDYSMKAKTIFTHPVICGGQTVWDGAHMLEKVKMTAAKNNAHITKFATFKNGGLFDQNPISAKEGLTPLKKGLPTEKYGGYNKAGSMFFIPVRYRVGKKTDIIIMPVELLYGKKFLEDAAFAKEYTFDRLGRLLKKTVDEVSFPLGMRPWKVNTVLSLDGFRVCITGGANGGKSIITQTLTQFASSKDWAFYLKKLEEFNKKNSKNPNHIYDEKYDKISAEKNLELYDLYIDKLENSIFSKRVNCPTEILKKGRDKFIALGIKEQTQALLNIHQVFGRISSGCDLSAVGGTPKSAATVSFSSTVSNWKKRYKDVRIIDSSASGLWEKRSCNLLDLL

SEQ ID NO: 20255 - protein, 1355 aa, unidentified
  REGION 1..1355: note = Cas Enzyme sequence
MKNKKYYLGLDIGSDSVGYAVTDEEYNLLKFHGEPAWGATLFDAPASKAERRGYRTARRRLERRKQRVQLVRELFAEEIAKVDGRFYIRQQESALFREDAGDAYSIFNDPDYTDREYYAEYPTIHHLIFELMKNPAPHDVRLVYLACVWLVAHRGHFLSNISKDNMDSFRDFNLVYKSFISFFTDNGYDVPWNECDEKELGNILKKKIRVTDKKKELTDLLYGGKKPSSEATEDFPFSRAAIIGLFAGSKVRPKDLFQNSEYENLEGITLDMDDEKFINLSTELGDDYELIADMRAVYDWTVLADILGNYSCISEAKAAVYEQHRKDLRFLKDVIAKYRPEKYSEVFRAADKDNYVAYAYHTDEVSGSNLKRKDKEAFSKYILGIVKNISPDASDKQNFDDMITRLEDRTFMPKQKDGDNRVIPQQLYAYELDAILKNAAQYLPFLNETDEDGLSVADKISSVFSFRVPYFVGPLNSNSPRAWLARKSGKIYPWNFEKMVDLDASEQNFIEQLTNTCTYIPGEPVLPKDSLLYHKFSVLNEINNLCINEKRISVELKQEIYNNVFMCRRKVTRKQLVSYLVANGYVEKGKENTVTGVDININSNLAPQISFKRLIESRVLSEQDVERIIERASYSEDKTRLAAWLKREYPNVNDADRKYICSLRIHDFGRLSRRFLSGVEGVRKETGEVMTVISALWETQYNLMEIVADADRFTFKDELKTIRDDYYSEHPQTMDSRLDDMYVSDAVRRPIHRTLDIIKDVVKAFGEPEKIFVETTRDASGKKKGERTTPRKEQILELYKKCGSEDVRLLQEQLEAMGEAANTKLQSEKLFLYYMQLGRCMYTNQPIKLEALGTKLYDIDHIYPQCFVKDDSIINNKVLVLSEANGAKGNVYPINSDIRKNMHGIWESYKAHGLISEEKFKRLTRTTPFTEEEKYNFINRQITETSQSTKAVATLLNEFYPDTEIVYSKAGPVSDFRKEFEIYKSRLFNDLHHAVDAYLNIVVGNVYHMKFTRRWFNVNSDYSMKAKTIFTHPVICGGQTVWDGAHMLEKVKATAAKNNAHITKFATFKNGGLFDQNPISAKEGLTPLKKGLPTEKYGGYNKAGSMFFIPVRYRVGKKTDIIIMPVELLYGKKFLEDAAFAKEYTFDRLGRLLKKTVDEVSFPLGMRPWKVNTMLSLDGFRVCITGGAGGGTKLIAQTLTQFAASKDWAFYLKKLEEFNKKNSKNPNYIYDEKYDKISAEKNLELYDLYIDKLENSIFSKRVNCPTEILKKGRDKFIALGIKEQAQALLNIHQVFGRISSGCDLSAVGGTSRSAATVSFSSTVSNWKKRYKDVRIIDSSASGLWEKRSCNLLDLL

SEQ ID NO: 20256 - protein, 1355 aa, unidentified
  REGION 1..1355: note = Cas Enzyme sequence
MKNKKYYLGLDIGSDSVGYAVADEEYNLLKFHGEPAWGATLFDAPASKAERRGYRTARRRLERRKQRVQLVRELFAEEIAKVDRRFYIRQQESALFREDAGDAYSIFNDPDYTDREYYAEYPTIHHLIFELMKNPAPHDVRLVYLACAWLVAHRGHFLSNISKDNMDSFRDFNLVYKSFISFFTDNGYDVPWNECDEKELGNILKKKMRVTDKKKELTDLLYGGKKPSSEATEDFPFSRAAIIGLFAGSKVRPKDLFQNSDYENLEGITLDMDDEKFINLSTELGDDYELIADMRAVYDWTVLADILGNYSCISEAKAAVYEQHRKDLRFLKDVIAKYRPEKYSEVFRAADKDNYVAYAYHTDEVSGSNLKRKDKEAFSKYILGIVKNISPDASDKQNFDDMITRLEDRTFMPKQKDGDNRVIPQQLYAYELDAILKNAAQYLPFLNETDEDGLSVADKISSVFSFRVPYFVGPLNSNSPRAWLARKSGKIYPWNFEKMVDLDASEQNFIEQLTNTCTYIPGEPVLPKDSLLYHKFSVLNEINNLCINEKRISVELKQEIYNNVFMCRRKVTRKQLISYLVANGYVEKGKENTVTGVDININSNLVPQISFKRLIESRVLSEQDVERIIERASYSEDKTRLAAWLKREYPNVNDADRKYICSLRIHDFGRLSRRFLSGVEGVRKETGEVMTVISALWETQYNLMEIVADADRFTFKDELKTIRDDYYSEHPQTLDSRLDDMYVSDAVRRPIHRTLDIIKDVVKAFGEPEKIFVETTRDASGKKKGERTTPRKEQILELYKKCGSEDVRLLQEQLEAMGEAANTKLQSEKLFLYYMQLGRCMYTNQPIKLEALGTKLYDIDHIYPQCFVKDDSIINNKVLVLSEANGAKGNVYPINSDIRKKMHGIWESYKAHGLISEEKFKRLTRTTPFTEEEKYNFINRQLTETSQSTKAVATLLNEFYPDTEIVYSKAGPVSDFRKEFEIYKSRLFNDLHHAVDAYLNIVVGNVYHMKFTRRWFNVNSNYSMKAKTIFTHPVICGGQTVWDGAHMLEKVKTTAAKNNAHITKFATFKNGGLFDQNPISAKEGLTPLKKGLPTEKYGGYNKAGSMFFIPVRYRVGKKTDIIIMPVELLYGKKFLEDAAFAKEYTFDRLGRLLKKTVDEFSFPLGMRPWKVNTMLSLDGFRVCITGGANGGKNIITQTLTQFAASKDWAFYLKKLEEFNKKNSKNPNHIYDEKYDKISAEKNLELYDLYIDKLENSIFSKRVNCPTEILKKGRDKFIALGIKEQAQALLNIHQVFGRISSGCDLSAVGGTSRSAATIGLSSMVSNWKKRYKDVRIIDSSASGLWEKRSCNLLDLL

SEQ ID NO: 20257 - protein, 1355 aa, unidentified
  REGION 1..1355: note = Cas Enzyme sequence
MKNKKYYLGLDIGSDSVGYAVTDEEYNLLKFHGEPAWGATLFDAPASKAERRGYRTARRRLERRKQRVQLVRELFAEEIAKVDGRFYIRQQESALFREDAGDAYSIFNDPDYTDREYYAEYPTIHHLIFELMKNPAPHDVRLVYLACAWLVAHRGHFLSNISKDNMDSFRDFNLVYKSFISFFTDNGYDVPWNECDEKELGNILKKKIRVTDKKKELTDLLYGGKKPSSEATEDFPFSRAAIIGLFAGSKVRPKDLFQNSDYENLEGITLDMDDEKFINLSTELGDDYELIADMRAVYDWTVLADILGNYSCISEAKAAVYEQHRKDLRFLKDVIAKYRPEKYSEIFRAADKDNYVAYAYHTDEVSGSNLKRKDKEAFSKYILGIVKNISPDASDKQNFDDMITRLEDRTFMPKQKDGDNRVIPQQLYAYELDAILKNAAQYLPFLNETDEDGLSVADKISSVFSFRVPYFVGPLNSNSPRAWLARKSGKIYPWNFEKMVDLDASEQNFIEQLTNTCTYIPGEPVLPKDSLLYHKFSVLNEINNLCINEKRISVELKQEIYNNVFMCRRKVTRKQLISYLVANGYVEKGKENTVTGVDININSNLAPQISFKRLIESRVLSEQDVERIIERASYSEDKTRLAAWLKREYPNVNDADRKYICSLRIHDFGRLSRRFLSGVEGVRKETGEVMTVISALWETQYNLMEIVADADRFTFKDELKTIRDDYYSEHPQTLDRRLDDMYVSDAVRRPIHRTLDIIKDVVKAFGEPEKIFVETTRDASGKKKGERTTSRKEQILELYKKCGSEDVRLLQEQLEAMGEAANTKLQSEKLFLYYMQLGRCMYTNQPIKLEALGTKLYDIDHIYPQCFVKDDSIINNKVLVLSEANGAKGNVYPINSDIRKKMHGIWESYKAHGLISEEKFKRLTRTTPFTEEEKYNFINRQLTETSQSTKAVATLLNEFYPDTEIVYSKAGPVSDFRKEFEIYKSRLFNDLHHAVDAYLNIVVGNVYHMKFTRRWFNVNSDYSMKAKTIFTHPVICGGQTVWDGAHMLEKVKTTAAKNNAHITKFATFKNGGLFDQNPISAKEGLTPLKKGLPTEKYGGYNKAGSMFFIPVRYRVGKKTDIIIMPVELLYGKKFLEDAAFAKEYTFDRLGRLLKKTVDEVSFPLGMRPWKVNTMLSLDGFRVCITGGAGGGTKLIAQTLTQFAASKDWAFYLKKLEEFNKKNSKNPNYIYDEKYDKISAEKNLELYDLYIDKLENSIFSKRVNCPTEILKKGRDKFIALGIKEQAQALLNIHQVFGRISSGCDLSAVGGTPKSAATVSFSSTVSNWKKRYKDVRIIDSSASGLWEKRSCNLLDLL

SEQ ID NO: 20258 - protein, 1346 aa, unidentified
  REGION 1..1346: note = Cas Enzyme sequence
MNGQSYYLGIDGGTSSVGWAVSTPDYKIIKKGGRALWGTRLFEEAETGEKRRTNRIARRRRGRQVNRKKLLRELFSHEIAKVDPAFYLRLDESKFWEEDKKTPTKYCLFADKDWTDRDYYKKYPTIYHLRLELMEKTDPHDVRLVYLAISHIISHRGHFLYAGQQFSSTPDFAPLWMETVQCLKDALDLEVSCDTNALQDALSEQMKIAQKQKVLAGIFENSKDERIKCITELLSGKKSDISKLLGIKPDKEDLSSLKISFHEDAMDSDETLDTILSYSEEGIAVLEHLKGVYDWGILNHLLGCSNTFSAAQKAIYEKHSRDLKRLKMVIRRVSPENYSRVFRKTDKEGNYALYSGHYNRTDKNPDSKYKSQEELYKTLKKILGKSEDKDAKDIMAEIDRGSFLPKQHTKANSVIPYQLHLNELRKILDNASAYLPFLNEKDEDGYSVREKIESLVTFRIPYYVGPLDHHGDTLGKHWAVKKRNARVLPWNFDLIVDKKASAEAFMDQLTNTCTYLTGETVLPKDSIRYSRFMVLNELNNVRIHGEKMSAACKQNVFLELFCKKQKVTFKALCDYLEKNGYIEKGERDSVTGTDGDFKASLRSEIRMMQIFGDHLPDVDVMEDLIRAVLLLKQEPVMLQDRIRTIMPDITDEQMRKVCRMSFSGWGRLSKAFLCDIKSEVCAGSGSQLNILEALWQTDNNLMQLLSSRFSYTKRIDEHNRELAGEAALTYKTVENLAVSPATRRTIWQTLKIVKEIEHIMGCAPKKVFIEVARGAENGGRTVSRRLQLMDCYKKLSEEVRGDRDWLGEFESRSDADFRRDALYLYYTQMGRCMYTGEPIDLNDLMNKKRFDALYDIDHIWPQSKIKDDSIENRVLVKKMANQNKKDRYPIEADIRHARFLFWKSLYDNGLIGKKKWERLIRSKPFEEEELAGFISRQLVETRQSTKAIAAILKEALPDTNIVYVKAGNVSDFRHLFDFVKVRELNDLHHAKDAYLNIVVGNVFDTKFTANPLNFIKSNEKYSLRPEVLFREWNVERNGEQAWIKGEHGSIETVQAVMRKNNIMVTRQTVRKNSGQNGGLFDQNPKRGGVIPLKGSEPRLQNTERYGGYNGDTGAYMTFVEHTVRKKRVRSFVPVYLRFAEKIDKDPEKMIWYCEEILGLQDVRILVKEMKYNTLLNLRGFSIYVTGRTDNRLIGQQEFQLVLSPEMERYVKKVLKVAQRRKAAGADIAVSEQYDGVTLDMNQKLYEELLHKHDASVYQHRPSSQKSTMEKGKDKFAQLSISKQCEVLEQILQLFYGRGQADLSDIGGSPHAGKVVLTGSLDGKNGAKMILSSVTGFYRKEIDLMKL

SEQ ID NO: 20259 - protein, 1346 aa, unidentified
  REGION 1..1346: note = Cas Enzyme sequence
MNGQSYYLGIDGGTSSVGWAVSAPDYKIIKKGGRALWGTRLFEEAETGEKRRTNRIARRRRGRQVNRKKLLRELFSHEIAKVDPAFYLRLDESKFWEEDKKTPTKYCLFADKDWTDRDYYKKYPTIYHLRLELMEKTDPHDVRLVYLAISHIISHRGHFLYAGQQFSSTPDFAPLWMETVQCLKDALDLEVSCDTNALQDALSEQMKIAQKQKVLAGIFENSKDERIKCITELLSGKKSDISKLLGIKPDKEDLSSLKISFHEDAMDSDETLDTILSYSEEGIAVLEHLKGVYDWGILNHLLGCSNTFSAAQKAIYEKHSRDLKRLKMVIRRVSPENYSRVFRKTDKEGNYALYSGHYNRTDKNPDSKYKSQEELYKTLKKILGKSEDKDAKDIMAEIDRGSFLPKQHTKANSVIPYQLHLNELRKILDNASAYLPFLNEKDEDGYSVREKIESLVTFRIPYYVGPLDHHGDTLGKHWAVKKRNARVLPWNFDLIVDKKASAEAFMDQLTNTCTYLTGETVLPKDSIRYSRFMVLNELNNVRIHGEKMSAACKQNVFLELFCKKQKVTFKALCDYLEKNGYIEKGERDSVTGTDGDFKASLRSEIRMMQIFGDHLPDVDVMEDLIRAVLLLKQEPVMLQDRIRTIMPDITDEQMRKVCRMSFSGWGRLSKAFLCDIKSEVCAGSGSQLNILEALWQTDNNLMQLLSSRFSYTKRIDEHNRELAGEAALTYKTVENLAVSPATRRTIWQTLKIVKEIEHIMGCAPKKVFIEVARGAENGGRTVSRRLQLMDCYKKLSEEVRGDRDWLGEFESRSDADFRRDALYLYYTQMGRCMYTGEPIDLNDLMNKKRFDALYDIDHIWPQSKIKDDSIENRVLVKKMANQNKKDRYPIEADIRHARFLFWKSLYDNGLIGKKKWERLIRSKPFEEEELAGFISRQLVETRQSTKAIAAILKEALPDTNIVYVKAGNVSDFRHLFDFVKVRELNDLHHAKDAYLNIVVGNVFDTKFTANPLNFIKSNEKYSLRPEVLFREWNVERNGEQAWIKGEHGSIETVQAVMRKNNIMVTRQTVRKNSGQNGGLFDQNPKRGGVIPLKGSEPRLQNTERYGGYNGDTGAYMTFVEHTVRKKRVRSFVPVYLRFAEKIDKDPEKMIWYCEEILGLQDVRILVKEMKYNTLLNLRGFSIYVTGRTDNRLIGQQEFQLVLSPEMERYVKKVLKVAQRRKAAGADIAVSEQYDGVTLDMNQKLYEELLHKHDASVYQHRPSSQKSTMEKGKDKFAQLSISKQCEVLEQILQLFYGRGQADLSDIGGSPHAGKVVLTGSLDGKNGAKMILSSVTGFYRKEIDLMKL

SEQ ID NO: 20260 - protein, 1204 aa, unidentified
  REGION 1..1204: note = Cas Enzyme sequence
NAKCTLLTGCPVKRVHFSFDAFYPEFLAFLSDNGVSPWVCESKALQATLLSRNSVNDKYKALKSLIFGSQKPEDNFDANISEDGLIQLLAGKKVKVNKLFPQESNDASFTLNDKEDAIEEILGTLTPDECEWIAHIRRLFDWAIMKHALKDGRTISESKVKLYEQHHHDLTQLKYFVKTYLAKEYDDIFRNVDSETTKNYVAYSYHVKEVKGTLPKNKATQEEFCKYVLGKVKNIECSEADKVDFDEMIQRLTDNSFMPKQVSGENRVIPYQLYYYELKTILNKAASYLPFLTQCGKDAISNQDKLLSIMTFRIPYFVGPLRKDNSEHAWLERKAGKIYPWNFNDKVDLDKSEEAFIRRMTNTCTYYPGEDVLPLDSLIYEKFMILNEINNIRIDGYPISVDVKQQVFGLFEKKRRVTVKDIQNLLLSLGALDKHGKLTGIDTTIHSNYNTYHHFKSLMERGVLTRDDVERIVERMTYSDDTKRVRLWLNNSYGTLTADDVKHISRLRKHDFGRLSKMFLTGLKGVHKETGERASILDFMWNTNDNLMQLLSECYTFSDEITKLQEAYYAKAQLSLNDFLDSMYISNAVKRPIYRTLAVVNDIRKACGTAPKRIFIEMARDGESKKKRSVTRREQIKNLYRSIRKDFQQEVDFLEKILENKSDGQLQSDALYLYFAQLGRDMYTGDPIKLEHIKDQSFYNIDHIYPQSMVKDDSLDNKVLVQSEINGEKSSRYPLDAAIRNKMKPLWDAYYNHGLISLKKYQRLTRSTPFTDDEKWDFINRQLVETRQSTKALAILLKRKFPDTEIVYSKAGLSSDFRHEFGLVKSRNINDLHHAKDAFLAIVTGNVYHERFNRRWFMVNQPYSVKTKTLFTHSIKNGNFVAWNGEEDLGRIVKMLKQNKNNIHFTRFSFDRKEGLFDIQPLKASTGLVPRKAGLDVVKYGGYDKSTAAYYLLVRFTLEDKKTQHKLMMIPVEGLYKARIDHDKEFLTDYAQTTISEILQKDKQKVINIMFPMGTRHIKLNSMISIDGFYLSIGGKSSKGKSVLCHAMVPLIVPHKIECYIKAMESFARKFKENNKLRIVEKFDKITVEDNLNLYELFLQKLQHNPYNKFFSTQFDVLTNGRSTFTKLSPEEQVQTLLNILSIFKTCRSSGCDLKSINGSAQAARIMISADLTGLSKKYSDIRLVEQSASGLFVSKSQNLLEYL

SEQ ID NO: 20261 - protein, 1184 aa, unidentified
  REGION 1..1184: note = Cas Enzyme sequence
AFYPEFLAFLSDNGVSPWVCESKALQATLLSRNSVNDKYKALKSLIFGSQKPEDNFDANISEDGLIQLLAGKKVKVNKLFPQESNDASFTLNDKEDAIEEILGTLTPDECEWIAHIRRLFDWAIMKHALKDGRTISESKVKLYEQHHHDLTQLKYFVKTYLAKEYDDIFRNVDSETTKNYVAYSYHVKEVKGTLPKNKATQEEFCKYVLGKVKNIECSEADKVDFDEMIQRLTDNSFMPKQVSGENRVIPYQLYYYELKTILNKAASYLPFLTQCGKDAISNQDKLLSIMTFRIPYFVGPLRKDNSEHAWLERKAGKIYPWNFNDKVDLDKSEEAFIRRMTNTCTYYPGEDVLPLDSLIYEKFMILNEINNIRIDGYPISVDVKQQVFGLFEKKRRVTVKDIQNLLLSLGALDKHGKLTGIDTTIHSNYNTYHHFKSLMERGVLTRDDVERIVERMTYSDDTKRVRLWLNNNYGTLTADDVKHISRLRKHDFGRLSKMFLTGLKGVHKETGERASILDFMWNTNDNLMQLLSECYTFSDEITKLQEAYYAKAQLSLNDFLDSMYISNAVKRPIYRTLAVVNDIRKACGTAPKRIFIEMARDGESKKKRSVTRREQIKNLYRSIRKDFQQEVDFLEKILENKSDGQLQSDALYLYFAQLGRDMYTGDPIKLEHIKDQSFYNIDHIYPQSMVKDDSLDNKVLVQSEINGEKSSRYPLDAAIRNKMKPLWDAYYNHGLISLKKYQRLTRSTPFTDDEKWDFINRQLVETRQSTKALAILLKRKFPDTEIVYSKAGLSSDFRHEFGLVKSRNINDLHHAKDAFLAIVTGNVYHERFNRRWFMVNQPYSVKTKTLFTHSIKNGNFVAWNGEEDLGRIVKMLKQNKNNIHFTRFSFDRKEGLFDIQPLKASTGLVPRKAGLDVVKYGGYDKSTAAYYLLVRFTLEDKKTQHKLMMIPVEGLYKARIDHDKEFLTDYAQTTISEILQKDKQKVINIMFPMGTRHIKLNSMISIDGFYLSIGGKSSKGKSVLCHAMVPLIVPHKIECYIKAMESFARKFKENNKLRIVEKFDKITVEDNLNLYELFLQKLQHNPYNKFFSTQFDVLTNGRSTFTKLSPEEQVQTLLNILSIFKTCRSSGCDLKSINGSAQAARIMISADLTGLSKKYSDIRLVEQSASGLFVSKSQNLLEYL

SEQ ID NO: 20262 - protein, 1312 aa, unidentified
  REGION 1..1312: note = Cas Enzyme sequence
SAERRSFRTSRRRLDRRQQRVKLVQEIFAPVISPIDPRFFIRLHESALWRDDVAETDKHIFFNDPTYTDKEYYSDYPTIHHLIVDLMESSEKHDPRLVYLAVAWLVAHRGHFLNEVDKDNIGDVLSFDAFYPEFLAFLSDNGVSPWVCESKALQATLLSRNSVNDKYKALKSLIFGSQKPEDNFDANISEDGLIQLLAGKKVKVNKLFPQESNDASFTLNDKEDAIEEILGTLTPDECEWIAHIRRLFDWAIMKHALKDGRTISESKVKLYEQHHHDLTQLKYFVKTYLAKEYDDIFRNVDSETTKNYVAYSYHVKEVKGTLPKNKATQEEFCKYVLGKVKNIECSEADKVDFDEMIQRLTDNSFMPKQVSGENRVIPYQLYYYELKTILNKAASYLPFLTQCGKDAISNQDKLLSIMTFRIPYFVGPLRKDNSEHAWLERKAGKIYPWNFNDKVDLDKSEEAFIRRMTNTCTYYPGEDVLPLDSLIYEKFMILNEINNIRIDGYPISVDVKQQVFGLFEKKRRVTVKDIQNLLLSLGALDKHGKLTGIDTTIHSNYNTYHHFKSLMERGVLTRDDVERIVERMTYSDDTKRVRLWLNNNYGTLTADDVKHISRLRKHDFGRLSKMFLTGLKGVHKETGERASILDFMWNTNDNLMQLLSECYTFSDEITKLQEAYYAKAQLSLNDFLDSMYISNAVKRPIYRTLAVVNDIRKACGTAPKRIFIEMARDGESKKKRSVTRREQIKNLYRSIRKDFQQEVDFLEKILENKSDGQLQSDALYLYFAQLGRDMYTGDPIKLEHIKDQSFYNIDHIYPQSMVKDDSLDNKVLVQSEINGEKSSRYPLDAAIRNKMKPLWDAYYNHGLISLKKYQRLTRSTPFTDDEKWDFINRQLVETRQSTKALAILLKRKFPDTEIVYSKAGLSSDFRHEFGLVKSRNINDLHHAKDAFLAIVTGNVYHERFNRRWFMVNQPYSVKTKTLFTHSIKNGNFVAWNGEEDLGRIVKMLKQNKNNIHFTRFSFDRKEGLFDIQPLKASTGLVPRKAGLDVVKYGGYDKSTAAYYLLVRFTLEDKKTQHKLMMIPVEGLYKARIDHDKEFLTDYAQTTISEILQKDKQKVINIMFPMGTRHIKLNSMISIDGFYLSIGGKSSKGKSVLCHAMVPLIVPHKIECYIKAMESFARKFKENNKLRIVEKFDKITVEDNLNLYELFLQKLQHNPYNKFFSTQFDVLTNGRSTFTKLSPEEQVQTLLNILSIFKTCRSSGCDLKSINGSAQAARIMISADLTGLSKKYSDIRLVEQSASGLFVSKSQNLLEYL

SEQ ID NO: 20263 - protein, 1358 aa, unidentified
  REGION 1..1358: note = Cas Enzyme sequence
MGKMYYLGLDIGTNSVGYAVTDPSYHLLKFKGEPMWGAHVFAAGNQSAERRSFRTSRRRLDRRQQRVKLVQEIFAPVISPIDPRFFIRLHESALWRDDVAETDKHIFFNDPTYTDKEYYSDYPTIHHLIVDLMESSEKHDPRLVYLAVAWLVAHRGHFLNEVDKDNIGDVLSFDAFYPEFLAFLSDNGVSPWVCESKALQATLLSRNSVNDKYKALKSLIFGSQKPEDNFDANISEDGLIQLLAGKKVKVNKLFPQESNDASFTLNDKEDAIEEILGTLTPDECEWIAHIRRLFDWAIMKHALKDGRTISESKVKLYEQHHHDLTQLKYFVKTYLAKEYDDIFRNVDSETTKNYVAYSYHVKEVKGTLPKNKATQEEFCKYVLGKVKNIECSEADKVDFDEMIQRLTDNSFMPKQVSGENRVIPYQLYYYELKTILNKAASYLPFLTQCGKDAISNQDKLLSIMTFRIPYFVGPLRKDNSEHAWLERKAGKIYPWNFNDKVDLDKSEEAFIRRMTNTCTYYPGEDVLPLDSLIYEKFMILNEINNIRIDGYPISVDVKQQVFGLFEKKRRVTVKDIQNLLLSLGALDKHGKLTGIDTTIHSNYNTYHHFKSLMERGVLTRDDVERIVERMTYSDDTKRVRLWLNNNYGTLTADDVKHISRLRKHDFGRLSKMFLTGLKGVHKETGERASILDFMWNTNDNLMQLLSECYTFSDEITKLQEAYYAKAQLSLNDFLDSMYISNAVKRPIYRTLAVVNDIRKACGTAPKRIFIEMARDGESKKKRSVTRREQIKNLYRSIRKDFQQEVDFLEKILENKSDGQLQSDALYLYFAQLGRDMYTGDPIKLEHIKDQSFYNIDHIYPQSMVKDDSLDNKVLVQSEINGEKSSRYPLDAAIRNKMKPLWDAYYNHGLISLKKYQRLTRSTPFTDDEKWDFINRQLVETRQSTKALAILLKRKFPDTEIVYSKAGLSSDFRHEFGLVKSRNINDLHHAKDAFLAIVTGNVYHERFNRRWFMVNQPYSVKTKTLFTHSIKNGNFVAWNGEEDLGRIVKMLKQNKNNIHFTRFSFDRKEGLFDIQPLKASTGLVPRKAGLDVVKYGGYDKSTAAYYLLVRFTLEDKKTQHKLMMIPVEGLYKARIDHDKEFLTDYAQTTISEILQKDKQKVINIMFPMGTRHIKLNSMISIDGFYLSIGGKSSKGKSVLCHAMVPLIVPHKIECYIKAMESFARKFKENNKLRIVEKFDKITVEDNLNLYELFLQKLQHNPYNKFFSTQFDVLTNGRSTFTKLSPEEQVLTLLNILSIFKTCRSSGCDLKSINGSAQAARIMISADLTGLSKKYSDIRLVEQSASGLFVSKSQNLLEYL

SEQ ID NO: 20264 - protein, 1358 aa, unidentified
  REGION 1..1358: note = Cas Enzyme sequence
MGKMYYLGLDIGTNSVGYAVTDPSYHLLKFKGEPMWGAHVFAAGNQSAERRSFRTSRRRLDRRQQRVKLVQEIFAPVISPIDPRFFIRLHESALWRDDVAETDKHIFFNDPTYTDKEYYSDYPTIHHLIVDLMESSEKHDPRLVYLAVAWLVAHRGHFLNEVDKDNIGDVLSFDAFYPEFLAFLSDNGVSPWVCESKALQATLLSRNSVNDKYKALKSLIFGSQKPEDNFDANISEDGLIQLLAGKKVKVNKLFPQESNDASFTLNDKEDAIEEILGTLTPDECEWIAHIRRLFDWAIMKHALKDGRTISESKVKLYEQHHHDLTQLKYFVKTYLAKEYDDIFRNVDSETTKNYVAYSYHVKEVKGTLPKNKATQEEFCKYVLGKVKNIECSEADKVDFDEMIQRLTDNSFMPKQVSGENRVIPYQLYYYELKTILNKAASYLPFLTQCGKDAISNQDKLLSIMTFRIPYFVGPLRKDNSEHAWLERKAGKIYPWNFNDKVDLDKSEEAFIRRMTNTCTYYPGEDVLPLDSLIYEKFMILNEINNIRIDGYPISVDVKQQVFGLFEKKRRVTVKDIQNLLLSLGALDKHGKLTGIDTTIHSNYNTYHHFKSLMERGVLTRDDVERIVERMTYSDDTKRVRLWLNNNYGTLTADDVKHISRLRKHDFGRLSKMFLTGLKGVHKETGERASILDFMWNTNDNLMQLLSECYTFSDEITKLQEAYYAKAQLSLNDFLDSMYISNAVKRPIYRTLAVVNDIRKACGTAPKRIFIEMARDGESKKKRSVTRREQIKNLYRSIRKDFQQEVDFLEKILENKSDGQLQSDALYLYFAQLGRDMYTGDPIKLEHIKDQSFYNIDHIYPQSMVKDDSLDNKVLVQSEINGEKSSRYPLDAAIRNKMKPLWDAYYNHGLISLKKYQRLTRSTPFTDDEKWDFINRQLVETRQSTKALAILLKRKFPDTEIVYSKAGLSSDFRHEFGLVKSRNINDLHHAKDAFLAIVTGNVYHERFNRRWFMVNQPYSVKTKTLFTHSIKNGNFVAWNGEEDLGRIVKMLKQNKNNIHFTRFSFDRKEGLFDIQPLKASTGLVPRKAGLDVVKYGGYDKSTAAYYLLVRFTLEDKKTQHKLMMIPVEGLYKARIDHDKEFLTDYAQTTISEILQKDKQKVINIMFPMGTRHIKLNSMISIDGFYLSIGGKSSKGKSVLCHAMVPLIVPHKIECYIKAMESFARKFKENNKLRIVEKFDKITVEDNLNLYELFLQKLQHNPYNKFFSTQFDVLTNGRSTFTKLSPEEQVQTLLNILSIFKTCRSSGCDLKSINGSAQAARIMISADLTGLSKKYSDIRLVEQSASGLFVSKSQNLLEYL

SEQ ID NO: 20265 - protein, 1358 aa, unidentified
  REGION 1..1358: note = Cas Enzyme sequence
MGKMYYLGLDIGTNSVGYAVTDPSYHLLKFKGEPMWGAHVFAAGNQSAERRSFRTSRRRLDRRQQRVKLVQEIFAPVISPIDPRFFIRLHESALWRDDVAETDKHIFFNDPTYTDKEYYSDYPTIHHLIVDLMESSEKHDPRLVYLAVAWLVAHRGHFLNEVDKDNIGDVLSFDAFYPEFLAFLSDNGVSPWVCESKALQATLLSRNSVNDKYKALKSLIFGSQKPEDNFDANISEDGLIQLLAGKKVKVNKLFPQESNDASFTLNDKEDAIEEILGTLTPDECEWIAHIRRLFDWAIMKHALKDGRTISESKVKLYEQHHHDLTQLKYFVKTYLAKEYDDIFRNVDSETTKNYVAYSYHVKEVKGTLPKNKATQEEFCKYVLGKVKNIECSEADKVDFDEMIQRLTDNSFMPKQVSGENRVIPYQLYYYELKTILNKAASYLPFLTQCGKDAISNQDKLLSIMTFRIPYFVGPLRKDNSEHAWLERKAGKIYPWNFNDKVDLDKSEEAFIRRMTNTCTYYPGEDVLPLDSLIYEKFMILNEINNIRIDGYPISVDVKQQVFGLFEKKRRVTVKDIQNLLLSLGALDKHGKLTGIDTTIHSNYNTYHHFKSLMERGVLTRDDVERIVERMTYSDDTKRVRLWLNNNYGTLTADDVKHISRLRKHDFGRLSKMFLTGLKGVHKETGERASILDFMWNTNDNLMQLLSECYTFSDEITKLQEAYYAKAQLSLNDFLDSMYISNAVKRPIYRTLAVVNDIRKACGTAPKRIFIEMARDGESKKKRSVTRREQIKNLYRSIRKDFQQEVDFLEKILENKSDGQLQSDALYLYFAQLGRDMYTGDPIKLEHIKDQSFYNIDHIYPQSMVKDDSLDNKVLVQSEINGEKSSRYPLDAAIRNKMKPLWDAYYNHGLISLKKYQRLTRSTPFTDDEKWDFINRQLVETRQSTKALAILLKRKFPDTEIVYSKAGLSSDFRHEFGLVKSRNINDLHHAKDAFLAIVTGNVYHERFNRRWFMVNQPYSVKTKTLFTHSIKNGNFVAWNGEEDLGRIVKMLKQNKNTIHFTRFSFDRKEGLFDIQPLKASTGLVPRKAGLDVVKYGGYDKSTAAYYLLVRFTLEDKKTQHKLMMIPVEGLYKARIDHDKEFLTDYAQTTISEILQKDKQKVINIMFPMGTRHIKLNSMISIDGFYLSIGGKSSKGKSVLCHAMVPLIVPHKIECYIKAMESFARKFKENNKLRIVEKFDKITVEDNLNLYELFLQKLQHNPYNKFFSTQFDVLTNGRSTFTKLSPEEQVQTLLNILSIFKTCRSSGCDLKSINGSAQAARIMISADLTGLSKKYSDIRLVEQSASGLFVSKSQNLLEYL

SEQ ID NO: 20266 - protein, 1358 aa, unidentified
  REGION 1..1358: note = Cas Enzyme sequence
MGKMYYLGLDIGTNSVGYAVTDPSYHLLKFKGEPMWGAHVFAAGNQSAERRSFRTSRRRLDRRQQRVKLVQEIFAPVISPIDPRFFIRLHESALWRDDVAETDKHIFFNDPTYTDKEYYSDYPTIHHLIVDLMESSEKHDPRLVYLAVAWLVAHRGHFLNEVDKDNIGDVLSFDAFYPEFLAFLSDNGVSPWVCESKALQATLLSRNSVNDKYKALKSLIFGSQKTEDNFDANISEDGLIQLLAGKKVKVNKLFPQESNDASFTLNDKEDAIEEILGTLTPDECEWIAHIRRLFDWAIMKHALKDGRTISESKVKLYEQHHHDLTQLKYFVKTYLAKEYDDIFRNVDSETTKNYVAYSYHVKEVKGTLPKNKATQEEFCKYVLGKVKNIECSEADKVDFDEMIQRLTDNSFMPKQVSGENRVIPYQLYYYELKTILNKAASYLPFLTQCGKDAISNQDKLLSIMTFRIPYFVGPLRKDNSEHAWLERKAGKIYPWNFNDKVDLDKSEEAFIRRMTNTCTYYPGEDVLPLDSLIYEKFMILNEINNIRIDGYPISVDVKQQVFGLFEKKRRVTVKDIQNLLLSLGALDKHGKLTGIDTTIHSNYNTYHHFKSLMERGVLTRDDVERIVERMTYSDDTKRVRLWLNNNYGTLTADDVKHISRLRKHDFGRLSKMFLTGLKGVHKETGERASILDFMWNTNDNLMQLLSECYTFSDEITKLQEAYYAKAQLSLNDFLDSMYISNAVKRPIYRTLAVVNDIRKACGTAPKRIFIEMARDGESKKKRSVTRREQIKNLYRSIRKDFQQEVDFLEKILENKSDGQLQSDALYLYFAQLGRDMYTGDPIKLEHIKDQSFYNIDHIYPQSMVKDDSLDNKVLVQSEINGEKSSRYPLDAAIRNKMKPLWDAYYNHGLISLKKYQRLTRSTPFTDDEKWDFINRQLVETRQSMKALAILLKRKFPDTEIVYSKAGLSSDFRHEFGLVKSRNINDLHHAKDAFLAIVTGNVYHERFNRRWFMVNQPYSVKTKTLFTHSIKNGNFVAWNGEEDLGRIVKMLKQNKNNIHFTRFSFDRKEGLFDIQPLKASTGLVPRKAGLDVVKYGGYDKSTAAYYLLVRFTLEDKKTQHKLMMIPVEGLYKARIDHDKEFLTDYAQTTISEILQKDKQKVINIMFPMGTRHIKLNSMISIDGFYLSIGGKSSKGKSVLCHAMVPLIVPHKIECYIKAMESFARKFKENNKLRIVEKFDKITVEDNLNLYELFLQKLQHNPYNKFFSTQFDVLTNGRSTFTKLSPEEQVQTLLNILSIFKTCRSSGCDLKSINGSAQAARIMISADLTGLSKKYSDIRLVEQSASGLFVSKSQNLLEYL

SEQ ID NO: 20267 - protein, 1392 aa, unidentified
  REGION 1..1392: note = Cas Enzyme sequence
MANKTWYLGLDIGSASVGWAATDTEYKIIRKNKKRLWGVRLFEEATTAEDRRGYRSSRRRLARRKWRLNLLGELFASKVKKVDENFFLRLKESQYHYEDKTHKVPYAIFNDKDYTDKDFYNDYPTIYHLRSKLMTEKIPDIRKVFLAIHHIIKNRGHFLLQGQSFKDGNLNNLIKELLELDILHVGFEVTEEVVGKIADISLEKKTLTDKVNDLKKLYPKEKQLLEVFRLIFGGKTSLDKLFAIDEYKELDTAIKSVSFKEKIYEEVRHDYEQVLSNYIELLDLTKLVYDSIILSDIKKEGKTLSESKVELYEKHRDDLLKLKNLVKNDSKLAEDKKVELYASIFKEDKDKGTNYVNYIRKSEEGKGCNYEDFKKFLVKELAKLEESSVKDEIIKELNLEQFLPLQRTKDNSVVPYQIHKEELIKILDNAAKYHSFIDKNDESGYSVKEKVVQLLEFRIPYYVGPLNSSKKTKEDGFAWSVRNKGYEKTPVTPWNYSKVIDESASAEKFITNLTNKCTYLKGEDVLPKNSLLYSEFAVLNELNALKYEGNRISLEARNTIIEKLFKQQGKKVTKNSIKNLLKAEGYIDGKGEIEGIDITVKNDLKAYRDFKKILGDKFNSEHVENIILWITLYGESRKLIKAKIESVYGDIYSKDEINKMSRLVYKDWGRFSRKLLTELVSKKLYNEETGECLNIIGAMRQNNILFMELLADRFDYSEQISKFNKELQEDVTEITPEILDDLYVSPAVKRSIWQTVRIVEELKKIIGCAPAKIFIETTRSNQGKKEPTDSRKKQLELAYKAVKKDVKELEKEIGAINFDVLNDRLSSVEPSKLKAKKLYLYYTQLGRCMYSGESIIIGELFDNNKYDIDHIYPQAKIKDDSFTNTVLVKRGRNAKKEDRYPLSSDIQTPSNRKFWKFLKEKKLITDEKYNRLVRTEEFSDEELSGFIARQLVETSQSIKAVAKILEELNPKTSICYSKAENVSSFRQNFGKIKEGNRKSKNGEQLVKVREINDYHHAKDAYLNVVVGNVYDTKFTRNVFNFIKDKKDGRKYSLNNVFYENVSDSKTVAWEMDKTIYQVEKVMNNNNILVTRRTSEQKGGLFDATVYKAKVAAKAKDGVYYPLKTSNSVVKDVAKYGGFTKIKIAYYSIFEYVLVNKKGEEKITRIIPIPIYISQNIKDDNTLLEFGKTQINLKSGEEIKDLKLKYRKLCIGGLVKINNFFNFIGGKTNDYFVYDGAIQVILDTESEKYIKNLSKYQNWKKENKDGELWESITEERNNELYNTLVAKMNSGIFVKKKPNKFSELNSEEIRNKFNNCSIEDQVKLLLEILNLLTNKKSTFDLKLVDLKTSRGVASFIVSNLEQFSIIEQSVTGFNEKEITIIGDKGNDMENNNS

SEQ ID NO: 20268 - protein, 1366 aa, unidentified
  REGION 1..1366: note = Cas Enzyme sequence
GWAATDTEYKIIRKNKKRLWGVRLFEVANTAEKRRTYRSNRRRLARRKWRLNLLEELFSEEIAKVDPNFFLKLKESKYYSEDKTHKLPFTIFNDKGYTDKDYYKEYPTIYHLRSSLMTEKEPDIRKVFLAIHHILKNRGHFLLQGQSFKDENINNLIKELLELDILHHDLEVSEEIVENIKNIAVEKKNLTDKVNDFKKLYPKEKQLLEILKVIIGDKSSLDKIFSIDEYKELDASVKSISFKEKVYEEVRHDYEQILSNYIKLLDLAKLVYDNIILSDVKKEGKTLSESKVELFEKHKTDLAKLKALVKNDSKLSEEKKDEIYRVILKVDKEKGTNYVNYVKTTKKGAGCTYEEFKIFLKKELAKLQDCEEKNIIIKELDLETFLPLQRTKDNSVVPYQIHREELIKILDNAEKYHSFLKEKDNSGYTVKEKIIQLLEFRIPYYVGPLNSHKKANEGGYAWSVRNKGKEKTPVTPWNYSKVIDETASAEKFITNLTNKCTYLKGEEVLPKHSLLYSEFALLNELNALRYDGNRISVEARNTIIEKLFKEQGKKVRKETIKELLKTEGYIDGKGEISGIDITVKNDLESYRDFKKILGDKFNTEHVENIILWLTIFDNREGKKFVKEKIKNDYRNIYTEGEISEILKLNYSGWGKFSRNLLTEITSKKLVNESTGECLNIINAMRCNNILFMELLADRFDYMSQIEEYNKALQKEVTEITPDILENLYVSPVVRRSIWQTIRIVEELKKIIGCAPAKIFVETTRTNTADKKPTDSRKKQLESLYKKIKDEEIKELENEINSTLDFSIKKDRLNAVESSKLKSKKLYLYYTQLGRCMYSGESIDINELFDNNKYDIDHIYPQSKVKDDSFTNTVLVKKVSNAEKTDKYPLGKNIQTKENKRFWKFLKEKKLITEEKYNRLVRTEEFSDEELSGFIARQLVETSQSVKAVASILGELNPETAICYSKAENVSAFRQNFGKIKEGNRKSKNTEQLIKVREINDYHHAKDAYLNIVVGNVFDVRFTRNAYNFIKDKKDGRKYSLNNMFYIDVRNSNTIAWEMDKTVHQVDKVMNNNNILVTRRTSEQKGALYYATIYKKTIAKEGAYYPIKTSDNIMKNVTKYGGFTKIKIAYYSIFEYILESKKGEEKITRIIPIPIHISQNIKEDSTLEEYAKEQLTFKSGEVIKDLRLKYRKLCIGDVIKINNFYNYIGGKTNDSFMYDSAVQVVLDKNSELYIKELAKYQNWKKENKDGQLWESITAEKNIDLYNTLVEKMNTGIFIKKKPNKFNDLDSEEIRSNFIGISEEEQAKVLLEILNLITNKKSTFDLKSIGITAARGKTSFNLTLQNSFSIIEQSVTGFYEKEIIIIGE

SEQ ID NO: 20269 - protein, 1374 aa, unidentified
  REGION 1..1374: note = Cas Enzyme sequence
GWAATDTEYKIIRKNKKRLWGVRLFEEATTAQERRTYRSNRRRLARRKWRLYLLEELFSEEIAKVDPNFFLKLKESKYHNEDKTHKLPYTIFNDKDYTDKDYYKEYPTIYHLRSSLMTENEPDIRKVFLAIHHILKNRGHFLLQGQSFKDGNINNLIKELLELDILHHDLEVNDEFVENIKNIAIEKKNLTEKINDLKKLFPKEKQLLEVFRVILGGKSSLDKIFAIEEYKELDASVKSISFKEKVYEEVRHDYEQILSNYIELLDLAKLVYDSIILSDVKKEGKTLSESKVELFEKHKADLAKLKALVKSDSKLSEERKDEIYRIIFKDDNDKGTNYVNYIKNSKEGKGCSYEDFKKFLIKELAKLEDSEEKNKILTDLELETFLPLQRTKDNSVVPYQIHREELIKILDNAEKYHSFLKAKDESGYTVKERIIQLLEFRIPYYVGPLNSHKKANEGGYAWSVRNKGEENTPVTPWNYSKVINESASAEKFITNLTNKCTYLKGEEVLPKHSLLYSEFALLNEINALRYDGNRISVEARNTIIEKLFKEQGKKVTKKSIKELLKAEGFINGKGEISGIDITVKNDLKSYRDFKKILGDKFNTEHVENIILWITLYGESRKLIESKIEAVYGDKYTKEEIAKMSRLSYKDWGRFSRKLLTEIVSEKLFNEETGECLNIINAMRNNNILFMELLADRFNYMSQIEEYNKALQKEVTEITPDILEDLYVSPAVKRSIWQTIRIVEELKKIIGCAPSKIFVETTRSNTTDKKPTDSRKKQLEAVYKNIKDKEIQELEKEINSTIDFSIKKDRLSAVEPSKLKAKKLYLYYTQLGRCMYSGESIDINKLFDNNKYDIDHIYPQSKVKDDSFTNTVLVKKVSNAEKTDKYPLGQDIQTKENKRFWKFLKEKKLISEEKYNRLVRTEEFSDEELSGFIARQLVETSQSVKAVASVLGELNTETVICYSKAENVSAFRQNFGKIKDGNRKSKNTEQLIKVREINDYHHAKDACLNVVVGNVFDVRFTRNAYNFIKDKKDGRKYSLNNMFYTDVRNSNTIAWEMDKTVHQVDKVMNNNIILVTRRTAEQKGALYDATIYKKTKAKEGAYYPIKTSDSIMKDVTKYGGFTKIKIAYYSIFEYILDSKKGSEKITRIIPIPVHISQNISEDSTLIEYAKEQLTLKPGEEIKEFRLKYRKLCIGDLIKLENYFYSVGGKTDDNFVYDSAVQVVLEKNSELYIKELSKYQNWKKENKDGLLWESITAEKNIELYNTLVKKMNTGIFIKKKHSKYTELNSEKIRNNFINLKVEEQAQVLLEILNLITNKKSTFDLKLIDMKVGRGRISFNLSKLNSVNVIEQSVTGFYEKEITIIGDKGNDVENNNS

SEQ ID NO: 20270 - protein, 1392 aa, unidentified
  REGION 1..1392: note = Cas Enzyme sequence
MANKTWYLGLDIGSASVGWAATDTGYKIIRKNKKRLWGVRLFEEAKTAEDRRGYRSSRRRLARRKWRLNLLEELFTSEVKKVDENFFLRLKESQYHYEDKTHKVPYAIFNDKDYTDKDYYKDYPTIYHLRSKLMTEKTPDIRKVFLAIHHIIKNRGHFLLQGQSFKDGNLNNLIKELLELDILHVGFEVTEEVVGKIADISLEKKTLTDKVNDLKKLYPKEKQLLEVFRLIFGGKTSLDKLFAIDEYKELDTSIKSVSFKEKIYEEVRHDYEQVLSNYIELLDLAKLVYDSIILSDIKKEGKTLSESKVELFEKHRDDLLKLKNLVKNDSKLAEDKKVELYASIFKEDKDKGTNYVNYIRKSEEGKGCNYEDFKKFLVKELAKLEESSVKTEIIKDLELEQFLPLQRTKDNSVVPYQIHKEELVKILDNAARYHSFLNEKDESGYNVREKVIQLLEFRIPYYVGPLNSSKKAKEGGFAWSVRNTGCENTPVTPWNYSKVIDESASAEKFITNLTNKCTYLKGEDVLPKSSLLYSEFALLNELNALKYDGNRISLEARNTIIEKLFKQQGKKVTKTSIKNLLKAEGYIDGKGEITGIDITVKNDFKSYRDFKKILGNKFNSEHVENIILWITLYGESRKLIKAKIESVYGEVYSKNEITKMSRLVYKDWGRFSRKLLTELVSKKLYNEETGECLNIIGAMRQNNILFMELLADRFDYSKQIVKFNKELQEDVTEITPEILDDLYVSPAVKRSIWQTVRIVEELKKIIGCAPTKIFVETTRSNQEKKKPTDSRKKQLELAYKAVKKDVKELEKEIGAINFDVLNDRLSSVEPSKLKAKKLYLYYTQLGRCMYSEEPINISELFDNNKYDIDHIYPQSKIKDDSFTNTVLVKRESNAAKTDRYPLGSDIQTPSNRKFWKFLKEKGLISDEKYNRLVRTEEFSDEELSGFIARQLVETSQSVKAVASILGELNPETSICYSKAENVSSFRQNFGKIKKGDRDSKNNDQLIKVREINDYHHAKDAYLNVVVGNVYDTKFTRNVFNFIKDKKDGRKYSLNKVFYENVSDSKTVAWEMDKTIHQVEKVMNNNNIMVTRRTSEQKGGLFDATVYKAKVAAKAKDGVYYPLKTSNSVVKDVAKYGGYTSIGIAYYSIFEYTIVNKKGEEKITRIIPIPIYISQNIKDSTALIEFGKSQIFCRAYEKIKDFKLLYRKLCIGSKININNYQYYIGGKSDERFYYDSAIQVTLDKKSEKYLKILSKYQNWKKENKDGELWENITKENNIELYNKLVEKMNSEIFTKKKSNKYNELNSEEIRNNFIKISVEEQAKVLLEILNLLTNKKSIFDLKSIDIKAARGKISFNLTSLIQFSIIEQSITGFYEKEITIIGDKGNDMENNNS

SEQ ID NO: 20271 - protein, 1394 aa, unidentified
  REGION 1..1394: note = Cas Enzyme sequence
MENKVWYLGLDIGTASVGWAATDTEYKIIRKNKKRLWGVRLFEEATTAQERRTYRSNRRRLARRKWRLNLLEELFSEEIAKVDPSFFLKLKESKYHYEDKTYKLPYTIFNEKDYTDKDYYKEYPTIYHLRSSLMTEKEPDIRKVFLAIHHILKNRGHFLLQGQSFKDGNINNLIKELLELDILHHDIEVNDEIVENIKNIAIEKKNLTEKVNGLKKLFPKEKQLLEVFRVILGGKSSLDKVFAIEEYKELDASVKSISFKEKVYEEVRHDYEQILSNYIELLDLAKLVYDSIILSDVKKEGKTLSESKVELFEKHKDDLMKLKALVKNDSKLTEEKRDDLYRIIFKEDNDKGTNYVNYIKDSKEGKGCSYEDFKKFLVKELAKLEDSEEKNSILADLELETFLPLQRTKDNSVVPYQIHREELIKILDNAEKYHSFLKEKDESGYTVKEKIIQLLEFRIPYYVGPLNSQKKANEGGYAWSVRNKGEEKTPVTPWNYSKVIDESASAEKFITNLTNKCTYLKGEEVLPKHSLLYSEFALLNELNALRYDGNRISIEARNTIIEKLFKEQGKKVTKKSIKELLKAEGYINGKGEITGIDITVKNDLKSYRDFKKILGDKFNTEHVENIILWITLYGESRKLIKAKIEAIYGDKYTKEEIAKMSRLTYKDWGRFSRKLLTEIVSEKLFNEETGECLNIINAMRNNNILFMELLADRFDYMKQIEDFNKTLQKEVTEITPEILEDLYVSPAVKRSIWQTIRIVEELKKIIGCAPAKIFVETTRSNTADKKPTDSRKKQLEAVYKNIKDKEIQELEKEINSTIDFSIKKDRLSAVEPSKLKAKKLYLYYTQLGRCMYSGESIDINELFDNNKYDIDHIYPQSKVKDDSFTNTVLVKKVSNAEKTDKYPLGLDIQTKENKRFWKFLKEKKLITEEKYNRLVRTEEFSDEELSGFIARQLVETSQSVKAVANVLDELNPETAICYSKAENVSAFRQNFGKIKEGNRKSKNTEQLIKVREINDYHHAKDAYLNIVVGNVFDVRFTRNAYNFIKDKKDGRKYSLNNMFYTDVRNSNTIAWEMDKTVHQVDKVMNNNNILVTRRTSEQKGALYNATVYKAKVAAKAKEGTYYPLKTSDKIINDVTKYGGFTSIGIAYYSIFEYILQTNKGEEKITRIIPIPIYISQNIIDDNTIIEYAKKQIILKSNEKLKDFKLKYKKLSIGNLINLDDYIYVIGGKTGDRFYYDAAVQVVIDKNSELYIKELSKYQNWKKENKDGLLWESITAEKNINLYNTLVEKMNTGIFIKKKPNKYNELNSEEIRNNFISISEEEQGKVLLEILNLITNKKSTFDLKSIKLGAARGMNNFNISNQNKFSIIEQSVTGFYEKEITIIGDKGNDVENSNS

SEQ ID NO: 20272 - protein, 1405 aa, unidentified
  REGION 1..1405: note = Cas Enzyme sequence
KRLQKNIIKLRRKYMENKVWYLGLDIGTASVGWAATDTEYKIIRKNKKRLWGVRLFEEATTAQERRTYRSNRRRLARRKWRLNLLEELFSEEIAKVDPNFFLKLKESKYHKEDKTHKLPYTIFNDKEYSDKDYYKEYPTIYHLRSSLMTEKEPDIRKVFLAIHHILKNRGHFLLQGQNFKDGDINNLIKELLELDILHHDLEVNDEIVDNIKNIAVEKKNLTDKINGLKKLFPKEKQLLEVFRVILGGKSSLDKIFAIEEYKELDTSVKSISFKEKVYEEVRHDYEQILSNYIELLDLAKLVYDSIILSDVKKEGKTLSESKVELFEKHKNDLAKLKALIKNDSKLSEEKKDELYRIIFKEDNDKGTNYVNYIKDSKEGKGCSYEDFKKFLVKELAKLQDTEEKNIILTELELETFLPLQRTKDNSVVPYQIHREELIKILDNVENYHSFLKEKDDSGYTVKEKIIQLLEFRIPYYVGPLNSHKKANEGGYAWSVRNKGEENTPVTPWNYSKVIDESASAEKFITNLTNKCTYLKGEEVLPKHSLLYSEFALLNELNALRYDGNRISVEARNTIIEKLFKEQGKKVTKKSIKELLKAEGFINGKGEISGIDITVKNDLKSYRDFKKILGDKFDTEHVENIILWITLYGESRKLIKAKIEAVYGEKYTKEEIAKMSRLTYKDWGRFSRKLLTEIVSEKLFNEETGECLNIINAMRYNNILFMELLADRFDYMSQIEDFNKTLQKEVTEITPDILEDLYVSPAVKRSIWQTIRIVEELKKIIGCAPSKIFVETTRSNTADKKPTDSRKKQLEAVYKNIKDKEIQELEKEINSTIDFSIKKDRLSAVEPSKLKAKKLYLYYTQLGRCMYSGESIDINELFDNNKYDIDHIYPQSKVKDDSFTNTVLVKKVSNAEKTDKYPLGLDIQTKENKRFWKFLKEKKLITEEKYNRLVRTEEFSDEELSGFIARQLVETSQSVKAVASVLGELNPETAICYSKAENVSAFRQNFGKIKDGNRKSKNTEQLIKVREINDYHHAKDAYLNVVVGNVFDVRFTRNAYNFIKDKKDGRKYSLNNMFYTDVRNSNTIAWEMDKTVHQVDKVMNNNSILVTRRTAEQKGALYDATIYKKTKAKEGSYYPIKTSDSIMKDVTKYGGFTKIKIAYYSIFEYVLESKKGVEKITRIIPIPVHISQNIREDSTLVEYAKKQLTLKPGEVIKDLRLKYRKLCIGDLINLENYFYSVGGKTDDNFVYDSAVQVVLDCNSEYYIKELSKYQNWKKENKDGQLWKTITAEDNIKLYNTLVEKMNTGIFIKKKHNKYIELNSERIRNNFINLTIEEQAQVLLEILNLITNKKSTFDLKLIDMKVGRGRFSFNLSKLNTVIVIEQSVTGFYEKEITIIGDKGNDVENNNS

SEQ ID NO: 20273 - protein, 972 aa, unidentified
  REGION 1..972: note = Cas Enzyme sequence
IKILENVEKYYSFLKEKDESGYTVKEKIIQLLEFRIPYYVGPLNSHKKANEGGYAWSVRNKGEENTPVTPWNYSNVIDESASAEKFITNLTNKCTYLKGEEVLPKHSLLYSEFALLNELNALRYDGNRISIEARNTIIEKLFKEQGKKVTKKSIKELLKAEGYINGKGEITGIDITVKNDLKSYRDFKKILGDKFNTEHVENIILWITLYGESRKLIKAKIEAVYGDKYTKEEIAKMSRLPYKDWGRFSRKLLTEIVSEKLFNEETGECLNIINAMRNNNILFMELLADRFDYMKQIEDFNKTLQKEVTEITPEILEDLYVSPAVKRSIWQTIRIVEELKKIIGCAPSKIFVETTRSNTADKKPTDSRKKQLEAVYKNIKDKEIQELEKEINSTIDFSIKKDRLIAVEPSKLKAKKLYLYYTQLGRCMYSGESIDINELFDNNKYDIDHIYPQSKVKDDSFTNTVLVKKENNAEKTDKYPLGQDIQTKENKRFWKFLKEKKLITEEKYNRLVRTEEFSDEELSGFIARQLVETSQSVKAVASVLGELNPETAICYSKAENVSAFRQNFGKIKDGNRKSKNTEQLIKVREINDYHHAKDAYLNVVVGNVFDVRFTRNAYNFIKDKKDGRKYSLNNMFYTDVRNTNTIAWEMGKTVHQVDKVMNNNNILVTRRTSEQKGALYNATVYKAKVAAKAKEGTYYPLKTSDKVINDVTKYGGFTSIGIAYYSIFEYILETKKGEEEITRIIPIPIYISQNITDDNILLEYARKQIILKQNEKLKDFKLKYKKLCIGTLIIIDNYPYYIGGKFNNNIYIDSAVQILVDSNTEKYIKVIFKYKDWKEKSKDGKVWEVITDKKNIKLYIMLVEKMNTSIFKKKKQNKYSELIDNQSVEKFKKLDIDTQIIVISQVLNLLTNKVQPKLDRKLIGVTASRGNCNSIISNLNQFSIIEQSVTGFYEKEITIIGDKGNDMENNNS

SEQ ID NO: 20274 - protein, 1392 aa, unidentified
  REGION 1..1392: note = Cas Enzyme sequence
MANKTWYLGLDIGTASVGWAATDTEYKIIRKNKKRLWGVRLFEEAKTAEERRGYRSSRRRLARRKWRLNLLEELFTQEIAKIDSNFFLRLKESQYHYEDKTHQVPYAIFNDKDYTDKDYYKEYPTIYHLRTKLMTEENPDIRKVFLAIHHILKNRGHFLLQGQSFKAGNLNNLIKELLELDILHVGFEVTEKVVDKIADISLEKKTSKDKLNDIKELYPKEKQLLEVFRLIFGGKPSLDKLFAIDEYKELDAAIKSVSFKEKIYEEVRHDYEQVLSNYIELLDLAKLVYDSIILSDIKKEGKTLSESKVDFYNKHRDDLTKLKNLVKNDSKLAEDKKVELYASIFKEDKDKGTNYVNYIRKSEEGKGCNYEDFKKFLVKELAKLEESSVKDEIIKELNLEQFLPLQRTKDNSVVPYQIHKEELIKILDNAAKYHSFIDKNDESGYSVKEKVVQLLEFRIPYYVGPLNSSKKTKEDGFAWSVRNKGYEKTPVTPWNYSKVIDESASAEKFITNLTNKCTYLKGEDVLPKNSLLYSEFAVLNELNALKYEGNRISLEARNTIIEKLFKQQGKKVTKNSIKNLLKAEGYIDGKGEIEGIDITVKNDLKAYRDFKKILGDKFNSEHVENIILWITLYGESRKLIKAKIESVYGDIYSKDEINKMSRLVYKDWGRFSRKLLTELVSKKLYNEETGECLNIIGAMRQNNILFMELLADRFDYSEQISKFNKELQEDVTEITPEILDDLYVSPAVKRSIWQTVRIVEELKKIIGCAPAKIFIETTRSNQGKKEPTDSRKKQLELAYKAVKKDVKELEKEIGAINFDVLNDRLSSVEPSKLKAKKLYLYYTQLGRCMYSGESIIIGELFDNNKYDIDHIYPQAKIKDDSFTNTVLVKRDRNAKKEDRYPLSSDIQTPSNRKFWKFLKEKKLITDEKYNRLVRTEEFSDEELSGFIARQLVETSQSIKAVAKILEELNPKTSICYSKAENVSSFRQNFGKIKEGNRKSKNGEQLVKVREINDYHHAKDAYLNVVVGNVYDTKFTRNVFNFIKDKKDGRKYSLNNVFYENVSDSKTVAWEMDKTIYQVEKVMNNNNILVTRRTSEQKGGLFDATVYKAKVAAKAKDGVYYPLKTSNSVVKDVAKYGGFTKIKIAYYSIFEYVLVNKKGEEKITRIIPIPIYISQNIKDDNTLLEFGKTQINLKSGEEIKDLKLKYRKLCIGGLVKINNFFNFIGGKTNDYFVYDGAIQVILDTESEKYIKNLSKYQNWKKENKDGELWESITEERNNELYNTLVAKMNSGIFVKKKPNKFSELNSEEIRNKFNNCSIEDQVKLLLEILNLLTNKKSTFDLKLVDLKTSRGVASFIVSNLEQFSIIEQSVTGFNEKEITIIGDKGNDMENNNS

SEQ ID NO: 20275 - protein, 1392 aa, unidentified
  REGION 1..1392: note = Cas Enzyme sequence
MANKTWYLGLDIGTASVGWAATDTEYKIIRKNKKRLWGVRLFEEAKTAEERRGYRSSRRRLARRKWRLNLLEELFTQEIAKIDSNFFLRLKESQYHYEDKTHQVPYAIFNDKDYTDKDYYKEYPTIYHLRTKLMTEENPDIRKVFLAIHHILKNRGHFLLQGQSFKAGNLNNLIKELLELDILHVGFEVTEKVVDKIADISLEKKTSKDKLNDIKELYPKEKQLLEVFRLIFGGKPSLDKLFAIDEYKELDAAIKSVSFKEKIYEEVRHDYEQVLSNYIELLDLAKLVYDSIILSDIKKEGKTLSESKVDFYNKHRDDLTKLKNLVKNDSKLSEDKKVELYTAIFKEDKDKGSNYVNYIRKSDEGKGCNYEDFKNFLVKELAKLEESAAKEEILRDLELELFLPLQRTKDNSVVPYQIHKEELVRILDNAAKYHNFLDEKDESGYSIREKVIQLLEFRIPYYVGPLNSSKKAREDGFAWSVRNKGYENTPVTPWNYEKVIDESASAEKFTTNLTNKCTYLKGEDVLPKSSLLYSEFALLNELNALKYDGNRISLEARNAIMEKLFKQQGKKVTKTSIKNLLKAEGYIDGKGEITGIDITVKNDLKSYRDFKKILGNKFNSEHVENIILWITLYGESRKLIKAKIEAVYGDIYSKEEIAKMSRLVYKDWGRFSRKLLTELVSKKLYNEETGECLNIIGAMRQNNILFMELMADRFDYSQQIVKFNKELQEDVTEITPEILDDLYVSPSVKRSIWQTVRIVEELKKIIGCAPAKIFVETTRSNQGKKEPTSSREKQLKLAYKAVKKDVKELEKEIGAINFDVLNDRLSSEEQSKLKAKKLYLYYTQLGRCMYSGKQIDLENLYTPEYDIDHIYPQSKVKDDSFTNTVLVERELNAKKGDRYPLSSDFQTPSNRKLWKFLKEKGLITDEKYNRLVRTEEFSDEELSGFIARQLVETSQSVKAVASILGELNPETSICYSKAENVSSFRQNFGKIKKGNRDSKNNDQLVKVREINDYHHAKDAYLNIVVGNVYDTKFTRNVFNFIKDKKDGRKYSLNKVFYENVSDSKIVAWEMDKTIYQVEKVMNNNNILVTRRIAEKKGELYNATRHKAKKVKKAKGVGYVPFKSSDNVLKNILDYGGFNSINIAYFSIVRYLLINKQGEINIIRIVPMPVYIENSLQSKRDLFNYIKKQLDDIENEKVKNIEIMYEKLREKTLLRLNDFKYISGGKSGNRIYCDSALQILLSEETEKYIKTIIKFRNWKNENKNGNLWENVSKEENYKLYSKLLEKLNSGIFFNKKSNKFVELNEETTRNKFKQLKEEDQIKVLIEILNLLTCKKQPGKDLSLIGMTASRDLQNFDLSNLNQFSIIEQSVTGFYEKEITIIGDKGNDMENNNS

SEQ ID NO: 20276 - protein, 1393 aa, unidentified
  REGION 1..1393: note = Cas Enzyme sequence
MANKTWYLGLDIGSASVGWAATDTEYKIIRKNKKRLWGVRIFEEATTAEDRRGYRSSRRRLARRKWRLNLLEELFATEVKIVDENFFLRLKESQYHYEDKTHKVPYAIFNDKDYTDKDYYKDYPTIYHLRSKLMTENNPDIRKVFLAIHHILKNRGHFLLQGQSFKDGNLNNLIKELLELDIFHVGFEVTEEVVGKIADISLEKKTLTDKVNDLKKLYPKEKQLLEVFRLIFGGKTSLDKLFAIDEYKELDASIKSVSFKEKIYEEVRHDYEQVLSNYIELLDLAKLVYDSIILSDIKKEGKTLSESKVELYEKHRDDLLKLKNLVKNDSKLAEDKKVELYALIFKEDKDKGTNYVNYIRKSEEGKGCNYEDFKKFLVKELAKLEESSVKAEIIKDLELEQFLPLQRTKDNSVVPYQIHKEELVKILDNAAKYHNFLDEKDESGFSIREKVIQLLEFRIPYYVGPLNSSKKAKEGGFAWSVRNKGYEDTPVTPWNYSKVIDESASAEKFITNLTNKCTYLKGEDVLPKSSLLYSEFALLNELNALKYDGNRISLEARNTIIEKLFKQQGKKVTKTSIKNLLKAEGYIDGKGEITGIDITVKNDLKSYRDFKKILGNKFNSEHVENIILWITLYGESRKLIKAKIESVYGEVYSKDEITKMSRFVYKDWGRFSRKLLTELVSKKLYNEETGECLNIIGAMRQNNILFMELLADRFDYSKQIVEFNKELQEDVTEITPEILDDLYVSPAVKRSIWQTVRIVEELKMIIGCAPIKIFVETTRSNQEKKKPTDSRKKQLELAYKAVKKDVKELEKEIGAINFDVLNDRLSSVEPSKLKAKKLYLYYTQLGRCMYSEEPIKISELFDNNKYDIDHIYPQSKIKDDSFTNTVLVKRESNAAKTDRYPLGSDIQTPSNRRFWKFLKEKGLISDEKYNRLVRTEEFSDEELSGFIARQLVETSQSVKAVASILGELNPETSICYSKAENVSSFRQNFGKIKDGNSKSNNNEQLVKVREINDFHHAKDAYLNIVVGNVYDTKFTRNVFNFIKDKKDGRKYSLNKVFYENVSDSKTVAWEMDKTIYQVEKVMNNNNILVTRRTAEKKGELYNATRHKAKKVKKAKGVGYVPFKSSDNVLKNILDYGGFNSINIAYFSIVRYLLINKQGEINIIRIIPIPVYIENSLQSKRDLFNYIKKQLDDIENEKVKNIEIMYEKLREKTLLKLNDFKYISGGKSGNRIYCDSALQILLSEETEKYIKTIIKFRNWKNENKNGNLWENVSKEDNYKLYSKLLEKLNSGIFFNKKSNKFVELNEETTRNKFKQLKEEDQIKVLIEILNLLTCKKQPGKDLSLIGMTASRDLQNFDLSNLNQFSIIEQSVTGFYEKEITIIGDKGNDMENNNS

SEQ ID NO: 20277 - protein, 1029 aa, unidentified
  REGION 1..1029: note = Cas Enzyme sequence
MANKTWYLGLDIGSASVGWAATDTEYKIIRKNKKRLWGVRIFEEATTAEDRRGYRSSRRRLARRKWRLNLLEELFATEVKIVDENFFLRLKESQYHYEDKTHKVPYAIFNDKDYTDKDYYKDYPTIYHLRSKLMTENNPDIRKVFLAIHHILKNRGHFLLQGQSFKDGNLNNLIKELLELDIFHVGFEVTEEVVGKIADISLEKKTLTDKVNDLKKLYPKEKQLLEVFRLIFGGKTSLDKLFAIDEYKELDASIKSVSFKEKIYEEVRHDYEQVLSNYIELLDLAKLVYDSIILSDIKKEGKTLSESKVELYEKHRDDLLKLKNLVKNDSKLAEDKKVELYALIFKEDKDKGTNYVNYIRKSEEGKGCNYEDFKKFLVKELAKLEESSVKAEIIKDLELEQFLPLQRTKDNSVVPYQIHKEELVKILDNAAKYHNFLDEKDESGFSIREKVIQLLEFRIPYYVGPLNSSKKAKEGGFAWSVRNKGYEDTPVTPWNYSKVIDESASAEKFITNLTNKCTYLKGEDVLPKSSLLYSEFALLNELNALKYDGNRISLEARNTIIEKLFKQQGKKVTKTSIKNLLKAEGYIDGKGEITGIDITVKNDLKSYRDFKKILGNKFNSEHVENIILWITLYGESRKLIKAKIESVYGEVYSKDEITKMSRFVYKDWGRFSRKLLTELVSKKLYNEETGECLNIIGAMRQNNILFMELLADRFDYSKQIVEFNKELQEDVTEITPEILDDLYVSPAVKRSIWQTVRIVEELKMIIGCAPIKIFVETTRSNQEKKKPTDSRKKQLELAYKAVKKDVKELEKEIGAINFDVLNDRLSSVEPSKLKAKKLYLYYTQLGRCMYSEEPIKISELFDNNKYDIDHIYPQSKIKDDSFTNTVLVKRESNAAKTDRYPLGSDIQTPSNRRFWKFLKEKGLISDEKYNRLVRTEEFSDEELSGFIARQLVETSQSVKAVASILGELNPETSICYSKAENVSSFRQNFGKIKDGNSKSNNNEQLVKVREINDFHHAKVFISIQKALLN

SEQ ID NO: 20278 - protein, 1388 aa, unidentified
  REGION 1..1388: note = Cas Enzyme sequence
MKNKEWYLGLDVGSASVGWAATDINYKLLRKNKKRLWGARLFEEATTAADRRVFRAGRRRLARRKWRISLLEELFAKEVSKNDPNFFLRLKESKYHFEDKSLMNEYILFNDKDYTDKDYYKEYPTIYHLRSSLMTEENPDIRKVYLAVHSMLKNRGHFLLQGQSFSDSNIDNVIKELLELSIVKTNLEVTDEVIYSLKEIALQKKNLSDKNTDIKRLYPKEKQLQEIFKLVFGGKTSLDKLYDIEEYKELDTSVKSISFKEKVYEEVRPDYEQILSNYIELLDLAKLVYDSIVLADIKKEGKTISESKVELYNKHKDDLANLKKLVKTDSKLSEDKKKEVYFAIFKEDKEKGTNYVNYTHRSQEGKSCSYEDFKKFLKKELEKLEDTPTKTTILEELDLETFLPLQRTKDNSVVPYQIHKEELVKILDNVAKYHSFLDEKDDSGYSTREKVVQLFEFRIPYYIGPLNAQHNTENGGYSWAIRKKGMESVPVTPWNFKDVIDESASAEAFINNLTNKCTYLAGEDVLPKNSLLYSEYALLNELNALRYEGNRISVEARDIIVTKLFKEQGKKVTKKTIKELLKTEGFIDGKGEIAGIDNIVKNDLKSYRDFKKILGDKFDKEHVENIILWITLYGESRKLIKEKIIKVYGDVYTVDEIEKMSRLTYKDWGTLSRKLLTELVSEKLYNEETGECLNIIGAMRQSTILFMELLADKFDYMSQIKNHNKENKDDITEITPDILENLYASPAVKRSIWQTVRIVEELKTIIGSAPTKIFVETTRSNKAPNKVTTSRQNDLIAKYKTIKDQEIFELEKELNSSIDFPTNKDRLSKEESSRLKAKKLYLYYTQLGRCMYTGQKIELSDLLKNNQYDIDHIYPQSKVKDDSFNNTVLVKKESNANKKDVYPLGSSIQTKENKRFWRFLKEKKLITEEKYNRLVRTEEFSDDELTGFIARQLVETSQAIKAISTILSELNPETTICYSKAENVSAFRQNFGKIKEGNRKSENNEKLIKVREINDYHHAKDAYLNIVVGNVYDVKFTRNVYNFIKNKKDARKYSLNSLFYTDVKNANTIAWEMDKTVHVVEKTMNNNNILITRRASEQKGALYDATVYKAKVAEKAKEGTYYPLKTTDSKIKDVSKYGGFTKVKIAYYSIFEYTIEDKRGESRITRIVPIPIYISQNIKDDKALLEYAKAQQLGKDLKLKYRKLCIGSVIKINNFNYYIGGKTNDNFTFDSAIQVVLDKESELYVKEVSKYLDWKKENKDGKFWESINKEKNIQLYNALVEKMNTGIFIRKKPNKYDELSTEEVREKFKNISEDEQAKVLLEVLNLLTNKKSTFDLKNIGITASRGKCGFNLSNQSDFSIIEQSITGVYEKEIVIVGEKNNDLENSSN

SEQ ID NO: 20279 - protein, 1391 aa, unidentified
  REGION 1..1391: note = Cas Enzyme sequence
MTNKTWYLGLDIGTASVGWAATDTKYKIIRKNKKRLWGVRLFEEATTAEERRGYRSSRRRLARRKSRLNLLEELFTQEIAKIDANFFLRLKESQYHYEDKTHQVPYAIFNDKDYTDKDYYKEYPTIYHLRTKLMTEENPDIRKVFLAIHHILKNRGHFLLQGQSFKDGNLNNLIKELLDLDILHIGFDVTEEVASKIATISLEKKTLTDKVNDLKKLYPKEKQLLEVFRLIFGGKTSLDKLFVIDEYKELDASVKSVSFKEKIYEEVRHDYEQVLSNYIELLDLAKLVYDSIILSDIKKEGKTLSESKVDLYNKHRDDLTKLKNLVKNDSKLSEDKKVELYSVIFKEDKDKGTNYVNYIRKSEEWKGCNYEDFKKFLVKELAKLEESTAKDEILRDLELELFLPLQRTKDNSVVPYQIHKEELVKILDNAAKYHSFLDEKDESGYSIREKVIQLLEFRIPYYVGPLNSSKKAKEDGFAWSVRNKGYENTPVTPWNYEKVIDESASAEKFITNLTNKCTYLKGEDVLPKSSLLYSEFALLNELNALKYDGNRISLEARNVIIEKLFKQQGKKVTKTSIKNLLKAEGYIDGKGEITGIDITVKNDLKSYRDFKKILGDKFNTKHVEDIILWITLYGESRKLIKAKIEAVYGDIYSKEEIAKMSRLVYKDWGRFSRKLLTELVSKKLYNEETGECLNIIGSMRQNNRLFMELLADRFDYSQQIIDYNKELQKEVTEITPEILDDLYVSPSVKRSIWQTVRIVEELKKIIGCAPTKIFVETTRSNQEKKKPTDSRKKQLELFYKAVKKDVKELEKEIGSLNFDKLNERLSSVEPSKLKAKKLYLYYTQLGRCMYSGETIDITQLNTTAYDIDHIYPQSKVKDDSFTNTVLVKREYNAAKTDRYPLGSDIQTPSNRKFWKFLKEKGLITDEKYNRLVRTEEFSDEELTGFIARQLVETSQSVKAVASILGELNPETSICYSKAENVSSFRQNFGKIKDGNRKSENTEQLIKVREINDYHHAKDAYLNVVVGNVYDTKFTRNVFNFIKDKKDGRKYSLNNVFYENVSNSNTVAWEMNKTVHQVEKVMNNNNILVTRRTSEQKGGLFNATVYKAKVASKAKEGVYYPLKTSNNVIKDVTKYGGYTSIGIAYYSIFEYILVNKKGEEKITRIIPIPIYISQNIKDDSTLLEFGKTQINIKSNEEIKDFKLKYKKLCIGSIIFINNYPYYIGGKSGDTFYYDNTVQVILDKESEKYIKNISKYQNWKKENKDGELWESITKEKNIKLYNTLVEKMNSGIFTKKKPNKFEELNIDEVRNNFNNVSLDDQAKVLLEILNLLTNKKSIFDLKLINIALGRSRYNFNITSQSQFSIVEQSVTGFYEKEITIIGDKENDMENNNS

SEQ ID NO: 20280 - protein, 1392 aa, unidentified
  REGION 1..1392: note = Cas Enzyme sequence
MTNKTWYLGLDIGSASVGWAATDTEYKIIRKNKKRLWGVRLFEEATTAEDRRGYRSSRRRLARRKWRLNLLEELFAAEVEKVDENFFLRLKESQYHYEDKTHKVPYAIFNDKDYTDKDYYKDYPTIYHLRSKLMSEKNPDIRKVFLAIHHILKNRGHFLLQGQSFKEGNLNNLIKELLKLDILHVGFDVTEEVVSKITDISLEKKTLTDKVNDLKKLYPKEKQLLEVFRLIFGGKTSLDKLFAIEEYKELDATIKSISFKEKIYEEVRHDYEQVLSNYIELLDLAKKVYDSIILSDIKKEGKTLSESKVELYEKHKNDLLKLKNLVKNDSKLSEEKKVEVYTSIFKEDKDKGTNYVNYIRKSEEGKGCNYEDFKKFLVKELAKLEESIVKAEIIKELDLEQFLPLQRTKDNSVLPYQIHKEELVKILDNAVKYHDFLDKKDESGYSVREKVVQLLEFRIPYYVGPLNSSKKAKEDGFAWSVRNKGYENTPVTPWNYSKVIDESASAEKFITNLTNKCTYLKGEDVLPKNSLLYSEFALLNELNALKYDGNRISLEARNTIIEKLFKQQGKKVTKNSIKNLLKAEGYIDGKGEISGIDITVKNDIKAYRDFKKILGDKFNSEHVENIILWITLYGESRKLIKAKIESVYGDIYSNDEITKMSRLDYKDWGRFSRKLLTELVSKKLYNEETGECLNIIRAMRQNNILFMELLADRFDYSEQISKFNKELQEEVTEITPEILDDLYVSPAVKRSIWQTVRIVEELKKIIGCAPAKIFVETTRSNQGKKKPTDSRKKQLELAYKAAKKDVKELEKEIDELKFDTLNNRLSAEEPSKLKAKKLYLYYTQLGRCMYSGEPITFKDLNTTEYDIDHIYPQSKTKDDSFTNTVLVKRECNAKKEDRYPLGSDFQTPSNRRLWKFLKEKGLITDEKYNRLVRTEEFSDEELSGFIARQLVETSQSVKAVASILGELNPEASICYSKAENVSSFRQNFGKIKDGNSKSKNNEQLVKVREINDLHHAKDAYLNVVVGNVYDTKFTRNVFNFIKDKKDGRKYSLNKVFYENVSDSKTVAWEMDKTIHQVKKVMDNNSILVTRRASEQKGGLFDATVYKAKVAAKAKEGVYYPLKTSNSIVKDVDKYGGFTKIKIAYYSIFEYVLVNKKGEEKITRIIPIPIYISQNIKDDTTLLEFGRSQIITKSGEEIKDFKLRYRKLCKDSYILLNDYPYYVGGKFNDYIYIDSAVQLILNNDIEKYIKLISKYQNWKKDNKDGELWGEITAEKNIDLYCKLVEKMNKQIFVKKKQNKYGEFIDESSLRNFEKLGIDNQVIVLMEVLNILTNKRQPSLDKKLIGVTVSRGYSSLDLSKLNQYSIVEQSITGFYEKEITIIGDKGNDMENNNS

SEQ ID NO: 20281 - protein, 962 aa, unidentified
  REGION 1..962: note = Cas Enzyme sequence
IKVDDEDKVEYEDMMFRLDTYSFMPKQVENDNRVIPYQLHYYELKKILDNASSYLEFLDEKDMDGYTSREKLLSIMEFRIPYYVGPLRTDNGQHGWMKRKTEGRIYPWNFEDKVDLDASEQEFINRMTNSCTYLPGETVVPKYSLLYCKFNVLNEINNIKINDCSIPIEHKQEIYKLFERYRKVTPKKIKDYLVSNNLLHPEDVISGIDVTIKSSLKSYHDFKKMLESGVLKEKQVEAIIERLTYSEDKGRIIRWLHIEFPDLSDDDVKYISKLKYSDFGRLSRKLLVGIRGCNKDTGEVDSIMGMLWSTNDNMMKLLSNSYTFVEEIEAIKNEYYVEHPANLDSMLDEMYVSNAVRRPIHRTLDILSDIRKVCGKNPSKIFVEMARGGGEKGVRTKSRRDQISELYKNMDKAEVRELSEQLEGKTDNELQSEVLFLYFMQLGKCAYTQKTIDIDKLKTNIYNVDHIYPQSYVKDDSITNKVLVISEENGQKGDKYPISKDIREKMQPFWYRLLSNKLISEEKYRRLTRCTSFTEEELTGFINRQLVETHQSTKAVTTVFRTLFPDVEIVYSKAGLVSDFRKEFDMLKTRSVNDLHHAKDAYLNIVVGNVYHCKFTKNFYVTQKYSLKTKTLFTHNVKSGDVMIWDGQESIGEIRKVLTKNNIHYTKYSFMRKGKLFAQNPIKAKEGLIPRKEGLSSEKYGGYSDTTATAFLLVKFRDRKGTDAMIIPIDLMYSNKVFSDKKYAIAYAKDRIKKIWGMSEGQITDVTLPLGLRMLKINTMLSFDGFKSCITGKASLGKQLGLTSMMPLVIGNEWENYVKKIDRFIEKKQNNKKLLLNTIYDNITKEKNEQLYQILVNKVVNGIYNSAFKSQIKILKNGHEIFNKLELEEQVMALANIILLLKSGRAGNCDMTLLGGSKKAGTYVCSTKISNLQKNYKEVWLIDSSASGIYESKVCNLLEVIE

SEQ ID NO: 20282 - protein, 1358 aa, unidentified; identical to SEQ ID NO: 15830
  REGION 1..1358: note = Cas Enzyme sequence

SEQ ID NO: 20283 - protein, 959 aa, unidentified
  REGION 1..959: note = Cas Enzyme sequence
LQSYEDMCERLKLNIFLPKQKNTDNRVIPHQLYEYELIRILKNASLYLPFLNEVRNGISEMDKVVSIFRYKLPYYVGPLNKKSDFAWISRKAGKITPWNYKDMIDEDASENAFIKRMTNKCTYLPGEDVLPKDSLCYQKFMVLNELNNLKIDGRKVPVEVKQGIYHELFEKKKKVRRKDIEEYLISNNYLAKGSTELTSGIDEQVHSCLSSYYAFRNLLSREILSENDVEKIIERASYAEDKSRVKKWLRKEYPDLSQDDVRYITKIKIKEFGKLSRKFLTELKGCNKQDGEMTTILRIMWETNDNLMEILSDKYTFREVVEMFTQEYYTGKNQSLKERLDEMRVSNSVRRPVYRTLAVVKDIEKAFGKPDKIFVEMTRGGLSDQKGKRTKSRKQQILELYAKCREEDVRDLKQQLESMGERVDSRLQGEHLFLYFMQFGKCAYSGMPIELEKLMSGSKEYDIDHIYPQAYVKDDSIINNKVLVLSKINGTKGNVYPISPEIRNRMQGQWNWWHHIGVISDEKYKRLIRSTPFTDDEKYGFINRQLTETSQSTKLIAGLLKERFQNIDIVYVKAGLVSDFRHEFDLPKSRTYNDLHHAVDAYLNIVAGNVYNMRFSKRWFSVDSKYSIKTKTVFSHPVNCQGTIVWDGASMLAKVKKIAKKNTAHFVKFATFKTGGLFDQNPVKKGTGLIPLKAGLPTEKYGGYNKAGIMFLMPVKYKIRKKCAIIIMPVELLHGKHFLEDETFAREYTFNRLESILGKKVDEISFPLGMRPWKINTMLSLDGFRVCITGTGGKGKCLVAQSIMQFSSEDCWKGYMKKLEKFIEKFKKNPDFIYDKEYDKVSVEENQKLYELYIEKLQNTIYSKRVNSPVQILMDGQERFEKLNIKEQCVVLMNIQTVFGRMTSGCDLSLIGGSPNSGATVNFSSTISNWRKNYSDVRIIDQSPSGIWEKRSENILELL

SEQ ID NO: 20284 - protein, 1099 aa, unidentified
  REGION 1..1099: note = Cas Enzyme sequence
  REGION 374..381: note = misc_feature - Xaa can be any naturally occurring amino acid
  REGION 1097..1099: note = misc_feature - Xaa can be any naturally occurring amino acid
MEKKSKKIYLGLDIGTDSVGYAVTDDQYNLLRVHGDDAWGSVIFDAASLSDERRSHRSARRRLDRRQQRINLLQEIFAKEISKIDDRFFIRLSESYRWREDVKDRYVFFNDEEYTDVQYMGEYPTIHHLICELMNNKNPHDVRLVYLACAWLITHRGHFLNNLNVEKLDEIMDISSVYQNFINYFTENGYRRPWGEIDVSALAEVLKQKTGVTAKNKELQNILLEGKKPEKSGTEEFPFSQDSIIRLLAGGQCKLKDVFCKEEYLDLGSVSLGMDEEKFGEISGNIGEDYDLLIALRGLYDWSVLADILNGHSETISMAKVQIYEQHGKDLQILKYFVRKYVPDKYNEVFRKAKADNYVAYTGHMDKDTASQIXXXXXXXXEDFSKYVLKLMRLIKPEKTDLQSYEDMCERLNLNSFLPKQKNTDNRVIPHQLYEYELIRILKNASLYLPFLNEVRNGISEMDKVVSIFRYKLPYYVGPLNKKSDFAWISRKAGKITPWNYKVMIDEDASENSFIKRMTNKCTYLPGEDVLPKDSLCYQKFMVLNELNNLKIDGRKVPVEVKQGIYHELFEKKKKVRRKDIEEYLISNNYLAKGSTELISGIDEQVHSCLSSYYAFRNLLSREILSENDVEKIIERASYAEDKSRVKKWLRKEYPDLSQDDVRYITKIKIKEFGKLSRKFLTELKGCNKQDGEMTTILRIMWETNDNLMEILSDKYTFREAVEMFTQEYYTGKNQSLKERLDEMRVSNSVRRPVYRTLAVVKDIEKAFGKPDKIFVEMTRGGLSDQKGKRTKSRKQQILELYAKCREEDVRDLKQQLESMGERVDSRLQGEHLFLYFMQFGKCAYSGMPIELEKLMSGSKEYDIDHIYPQAYVKDDSIINNKVLVLSKINGTKGNVYPISPEIRNRMQGQWNWWHHIGVISDEKYKRLIRSTPFTDDEKYGFINRQLTETSQSTKLIAGLLKERFQNIDIVYVKAGLVSDFRHEFDLPKSRTYNDLHHAVDAYLNIVAGNVYNMRFSKRWFSVDSKYSIKTKTVFSHPVNCQGTIVWDGASMLAKVKKIAKKNTAHFVKFATFKTGGLFDQNPVKKGTGLIPLKAGXXX

SEQ ID NO: 20285 - protein, 1358 aa, unidentified
  REGION 1..1358: note = Cas Enzyme sequence
MEKKSKKIYLGLDIGTDSVGYAVTDDQYNLLRVHGDDAWGSVIFDAASLSDERRSHRSARRRLDRRQQRINLLQEIFAKEISKVDDRFFIRLSESYRWREDVQDRYVFFNDEEYTDVQYMGEYPTIHHLICELMNNKNPHDVRLIYLACAWLITHRGHFLNNLNVEKLDEIMDISSVYQNFINYFTENGYRRPWGEIDVSALSEVLKQKTGVTVKNKELQNILLEGKNPEKSGTEEFPFSQDSIIRLLAGGQCKLKDVFCKEEYLDLGSVSLGMDEEKFGEISGNIGEDYDLLIALRGLYDWSVLADILNGHSETISMAKVQIYEQHGKDLQILKYFIRKYVPDKYNEVFRKAKADNYVAYTGHMDKDTASQIKKKAKAEEFSKYVLKLMSPIKPEKTDLQSYEDMCERLKLNIFLPKQKNTDNRVIPHQLYEYELIRILKNASLYLPFLNEVRNGISEMDKVVSIFRYKLPYYVGPLNKKSDFAWISRKAGKITPWNYKDMIDEDASENAFIKRMTNKCTYLPGEDVLPKDSLCYQKFMVLNELNNLKIDGRKVPVEVKQGIYHELFEKKKKVRRKDIEEYLISNNYLAKGSTELTSGIDEQVHSCLSSYYAFRNLLSREILSENDVEKIIERASYAEDKSRVKKWLRKEYPDLSQDDVRYITKIKIKEFGKLSRKFLTELKGCNKQDGEMTTILRIMWETNDNLMEILSDKYTFREVVEMFTQEYYTGKNQSLKERLDEMRVSNSVRRPVYRTLAVVKDIEKAFGKPDKIFVEMTRGGLSDQKGKRTKSRKQQILELYAKCREEDVRDLKQQLESMGERVDSRLQGEHLFLYFMQFGKCAYSGMPIELEKLMSGSKEYDIDHIYPQAYVKDDSIINNKVLVLSKINGTKGNVYPISPEIRNRMQGQWNWWHHIGVISDEKYKRLIRSTPFTDDEKYGFINRQLTETSQSTKLIAGLLKERFQNIDIVYVKAGLVSDFRHEFDLPKSRTYNDLHHAVDAYLNIVAGNVYNMRFSKRWFSVDSKYSIKTKTVFSHPVNCQGTIVWDGASMLAKVKKIAKKNTAHFVKFATFKTGGLFDQNPVKKGTGLIPLKAGLPTEKYGGYNKAGIMFLMPVKYKIRKKCAIIIMPVELLHGKHFLEDETFAREYTFNRLESILGKKVDEISFPLGMRPWKINTMLSLDGFRVCITGTGGKGKCLVAQSIMQFSSEDCWKGYMKKLEKFIEKFKKNPDFIYDKEYDKISVEENQKLYELYIEKLQNTIYSKRVNSPVQILMDGQERFEKLNIKEQCVVLMNIQTVFGRMTSGCDLSLIGGSPNSGATVNFSSTISNWRKNYSDVRIIDQSPSGIWEKRSENILELL

SEQ ID NO: 20286 - protein, 1358 aa, unidentified
  REGION 1..1358: note = Cas Enzyme sequence
MEKKSKKIYLGLDIGTDSVGYAVTDDQYNLLRVHGDDAWGSVIFDAASLSDERRSHRSARRRLDRRQQRINLLQEIFAKEISKIDDRFFIRLSESYRWREDVKDRYVFFNDEEYTDVQYMGEYPTIHHLICELMNNKNPHDVRLVYLACAWLITHRGHFLNNLNVEKLDEIMDISSVYQNFINYFTENGYRRPWGEIDVSALAEVLKQKTGVTAKNKELQNILLEGKKPEKSGTEEFPFSQDSIIRLLAGGQCKLKDVFCKEEYLDLGSVSLGMDEEKFGEISGNIGEDYDLLIALRGLYDWSVLADILNGHSETISMAKVQIYEQHGKDLQILKYFVRKYVPDKYNEVFRKAKADNYVAYTGHMDKDTASQIKKKAKAEDFSKYVLKLMRLIKPEKTDLQSYEDMCERLNLNSFLPKQKNTDNRVIPHQLYEYELIRILKNASLYLPFLNEVRNGISEMDKVVSIFRYKLPYYVGPLNKKSDFAWISRKAGKITPWNYKVMIDEDASENSFIKRMTNKCTYLPGEDVLPKDSLCYQKFMVLNELNNLKIDGRKVPVEVKQGIYHELFEKKKKVRRKDIEEYLISNNYLAKGSTELISGIDEQVHSCLSSYYAFRNLLSREILSENDVEKIIERASYAEDKSRVKKWLRKEYPDLSQDDVRYITKIKIKEFGKLSRKFLTELKGCNKQDGEMTTILRIMWETNDNLMEILSDKYTFREAVEMFTQEYYTGKNQSLKERLDEMRVSNSVRRPVYRTLAVVKDIEKAFGKPDKIFVEMTRGGLSDQKGKRTKSRKQQILELYAKCREEDVRDLKQQLESMGERVDSRLQGEHLFLYFMQFGKCAYSGMPIELEKLMSGSKEYDIDHIYPQAYVKDDSIINNKVLVLSKINGTKGNVYPISPEIRNRMQGQWNWWHHIGVISDEKYKRLIRSTPFTDDEKYGFINRQLTETSQSTKLIAGLLKERFQNIDIVYVKAGLVSDFRHEFDLPKSRTYNDLHHAVDAYLNIVAGNVYNMRFSKRWFSVDSKYSIKTKTVFSHPVNCQGTIVWDGASMLAKVKKIAKKNTAHFVKFATFKTGGLFDQNPVKKGTGLIPLKAGLPTEKYGGYNKAGIMFLMPVKYKIRKKCAIIIMPVELLHGKHFLEDETFAREYTFNRLESILGKKVDEISFPLGMRPWKINTMLSLDGFRVCITGTGGKGKCLVAQSIMQFSSEDCWKGYMKKLEKFIEKFKKNPDFIYDKEYDKVSVEENQKLYELYIEKLQNTIYSKRINSPVQILMDGQEWFEKLNIKEQCVVLMNIQTVFGRMTSGCDLSLIGGSPNSGATVNFSSTISNWRKNYSDVRIIDQSPSGIWEKRSENILELL

SEQ ID NO: 20287 - protein, 1358 aa, unidentified
  REGION 1..1358: note = Cas Enzyme sequence
MEKKSKKIYLGLDIGTDSVGYAVTDDQYNLLRVHGDDAWGSVIFDAASLSDERRSHRSARRRLDRRQQRINLLQEIFAKEISKIDDRFFIRLSESYRWREDVKDRYVFFNDEEYTDVQYMGEYPTIHHLICELMNNKNPHDVRLIYLACAWLITHRGHFLNNLNVEKLDEIMDISSVYQNFINYFTENGYRRPWGEIDVSALSEVLKQKTGVTAKNKELQNILLEGKKPEKSGTEEFPFSQDSIIRLLAGGQCKLKDVFCKEEYLDLGSVSLGMDEEKFGEISGNIGEDYDLLIALRGLYDWSVLADILNGHSETISMAKVQIYEQHGKDLQILKYFVRKYVPDKYNEVFRKAKADNYVAYTSHMDKDTASQIKKKAKAEDFSKYVLKLMRPIKPEKTDLQSYEDMCERLNLNSFLPKQKNTDNRVIPHQLYEYELIRILKNASLYLPFLNEVRNGISEMDKVVSIFRYKLPYYVGPLNKKSDFAWISRKAGKITPWNYKVMIDEDASENSFIKRMTNKCTYLPGEDVLPKDSLCYQKFMVLNELNNLKIDGRKVPVEVKQGIYHELFEKKKKVRRKDIEEYLISNNYLAKGSTELISGIDEQVHSCLSSYYAFRNLLSREILSENDVEKIIERASYAEDKSRVKKWLRKEYPDLSQDDVRYITKIKIKEFGKLSRKFLTELKGCNKQDGEMTTILRIMWETNDNLMEILSDKYTFREAVEMFTQEYYTGKNQSLKERLDEMRVSNSVRRPVYRTLAVVKDIEKAFGKPDKIFVEMTRGGLSDQKGKRTKSRKQQILELYAKCREEDVRDLKQQLESMGERVDSRLQGEHLFLYFMQFGKCAYSGMPIELEKLMSGSKEYDIDHIYPQAYVKDDSIINNKVLVLSKINGTKGNVYPISPEIRNRMQGQWNWWHHIGVISDEKYKRLIRSTPFTDDEKYGFINRQLTETSQSTKLIAGLLKERFQNIDIVYVKAGLVSDFRHEFDLPKSRTYNDLHHAVDAYLNIVAGNVYNMRFSKRWFSVDSKYSIKTKTVFSHPVNCQGTIVWDGASMLAKVKKIAKKNTAHFVKFATFKTGGLFDQNPVKKGTGLIPLKAGLPTEKYGGYNKAGIMFLMPVKYKIRKKCAIIIMPVELLHGKHFLEDETFAREYTFNRLKSILGKKVDEISFPLGMRPWKINTMLSLDGFRVCITGIGGKGKCLVAQSVMQFSSEDCWKGYMKKLEKFTEKFKKNSDFIYDKEYDKVSVEENQKLYELYIEKLQNTIYSKRVNSPVQILMDGQERFEKLNIKEQCVVLMNIQTVFGRMTSGCDLSLIGGSPNSGATVNFSSTISNWRKNYSDVRIIDQSPSGIWEKRSENILELL

SEQ ID NO: 20288 - protein, 1358 aa, unidentified
  REGION 1..1358: note = Cas Enzyme sequence
MEKKSKKIYLGLDIGTDSVGYAVTDDQYNLLRVHGDDAWGSVIFDAASLSDERRSHRSARRRLDRRQQRINLLQEIFAKEISKVDDRFFIRLSESYRWREDVQDRYVFFNDEEYTDVQYMGEYPTIHHLICELMNNKNPHDVRLIYLACAWLITHRGHFLNNLNVEKLDEIMDISSVYQNFINYFTENGYRRPWGEIDVSALSEVLKQKTGVTVKNKELQNILLEGKKPEKSGTEEFPFSQDSIIRLLAGGQCKLKDVFCKEEYLDLGSVSLGMDEEKFGEISGNIGEDYDLLIALRGLYDWSVLADILNGHSETISMAKVQIYEQHGKDLQILKYFVRKYVPDKYNEVFRKAKADNYVAYTGHMDKDTASQIKKKAKAEEFSKYVLKLMSPIKPEKTDLQSYEDMCERLKLNIFLPKQKNTDNRVIPHQLYEYELIRILKNASLYLPFLNEVRNGISEMDKVVSIFRYKLPYYVGPLNKKSDFAWISRKAGKITPWNYKDMIDEDASENAFIKRMTNKCTYLPGEDVLPKDSLCYQKFMVLNELNNLKIDGRKVPVEVKQGIYHELFEKKKKVRRKDIEEYLISNNYLAKGSTELTSGIDEQVHSCLSSYYAFRNLLSREILSENDVEKIIERASYAEDKSRVKKWLRKEYPDLSQDDVRYITKIKIKEFGKLSRKFLTELKGCNKQDGEMTTILRIMWETNDNLMEILSDKYTFREVVEMFTQEYYTGKNQSLKERLDEMRVSNSVRRPVYRTLAVVKDIEKAFGKPDKIFVEMTRGGLSDQKGKRTKSRKQQILELYAKCREEDVRDLKQQLESMGERVDSRLQGEHLFLYFMQFGKCAYSGMPIELEKLMSGSKEYDIDHIYPQAYVKDDSIINNKVLVLSKINGTKGNVYPISPEIRNRMQGQWNWWHHIGVISDEKYKRLIRSTPFTDDEKYGFINRQLTETSQSTKLIAGLLKERFQNIDIVYVKAGLVSDFRHEFDLPKSRTYNDLHHAVDAYLNIVAGNVYNMRFSKRWFSVDSKYSIKTKTVFSHPVNCQGTIVWDGASMLAKVKKIAKKNTAHFVKFATFKTGGLFDQNPVKKGTGLIPLKAGLPTEKYGGYNKAGIMFLMPVKYKIRKKCAIIIMPVELLHGKHFLEDETFAREYTFNRLESILGKKVDEISFPLGMRPWKINTMLSLDGFRVCITGTGGKGKCLVAQSIMQFSSEDCWKGYMKKLEKFIEKFKKNPDFIYDKEYDKVSVEENQKLYELYIEKLQNTIYSKRVNSPVQILMDGQERFEKLNIKEQCVVLMNIQTVFGRMTSGCDLSLIGGSPNSGATVNFSSTISNWRKNYSDVRIIDQSPSGIWEKRSENILELL

SEQ ID NO: 20289 - protein, 1358 aa, unidentified
  REGION 1..1358: note = Cas Enzyme sequence
  REGION 133..146: note = misc_feature - Xaa can be any naturally occurring amino acid
MEKKSKKIYLGLDIGTDSVGYAVTDDQYNLLRVHGDDAWGSVIFDAASLSDERRSHRSARRRLDRRQQRINLLQEIFAKEISKVDDRFFIRLSESYRWREDVQDRYVFFNDEEYTDVQYMGEYPTIHHLICEXXXXXXXXXXXXXXLACAWLITHRGHFLNNLNVEKLDEIMDISSVYQNFINYFTENGYRRPWGEIDVSALSEVLKQKTGVTVKNKELQNILLEGKNPEKSGTEEFPFSQDSIIRLLAGGQCKLKDVFCKEEYLDLGSVSLGMDEEKFGEISGNIGEDYDLLIALRGLYDWSVLADILNGHSETISMAKVQIYEQHGKDLQILKYFIRKYVPDKYNEVFRKAKADNYVAYTGHMDKDTASQIKKKAKAEEFSKYVLKLMSPIKPEKTDLQSYEDMCERLKLNIFLPKQKNTDNRVIPHQLYEYELIRILKNASLYLPFLNEVRNGISEMDKVVSIFRYKLPYYVGPLNKKSDFAWISRKAGKITPWNYKDMIDEDASENAFIKRMTNKCTYLPGEDVLPKDSLCYQKFMVLNELNNLKIDGRKVPVEVKQGIYHELFEKKKKVRRKDIEEYLISNNYLAKGSTELTSGIDEQVHSCLSSYYAFRNLLSREILSENDVEKIIERASYAEDKSRVKKWLRKEYPDLSQDDVRYITKIKIKEFGKLSRKFLTELKGCNKQDGEMTTILRIMWETNDNLMEILSDKYTFREVVEMFTQEYYTGKNQSLKERLDEMRVSNSVRRPVYRTLAVVKDIEKAFGKPDKIFVEMTRGGLSDQKGKRTKSRKQQILELYAKCREEDVRDLKQQLESMGERVDSRLQGEHLFLYFMQFGKCAYSGMPIELEKLMSGSKEYDIDHIYPQAYVKDDSIINNKVLVLSKINGTKGNVYPISPEIRNRMQGQWNWWHHIGVISDEKYKRLIRSTPFTDDEKYGFINRQLTETSQSTKLIAGLLKERFQNIDIVYVKAGLVSDFRHEFDLPKSRTYNDLHHAVDAYLNIVAGNVYNMRFSKRWFSVDSKYSIKTKTVFSHPVNCQGTIVWDGASMLAKVKKIAKKNTAHFVKFATFKTGGLFDQNPVKKGTGLIPLKAGLPTEKYGGYNKAGIMFLMPVKYKIRKKCAIIIMPVELLHGKHFLEDETFAREYTFNRLESILGKKVDEISFPLGMRPWKINTMLSLDGFRVCITGTGGKGKCLVAQSIMQFSSEDCWKGYMKKLEKFIEKFKKNPDFIYDKEYDKVSVEENQKLYELYIEKLQNTIYSKRVNSPVQILMDGQERFEKLNIKEQCVVLMNIQTVFGRMTSGCDLSLIGGSPNSGATVNFSSTISNWRKNYSDVRIIDQSPSGIWEKRSENILELL

SEQ ID NO: 20290 - protein, 1356 aa, unidentified
  REGION 1..1356: note = Cas Enzyme sequence
MKNSKKSDYFVGLDIGTNSVGYAAAYESYQLIKYRQHPVWGVHLFEEAQLANERRTFRAARRRLDRRQQRIQLLRELFASEIGAVDPGFFHRINSSSLKKGPDEIPYGIFADSNYTDRNFYKQYPTIHHLIAELIDSNEPHDIRLIYVACAWLLAHRGHFFSDVAKEKVDEIIDFQAIYSELESFTEEHNSVLPWKHCDIAVEHIGHILKSSNSRTDKYKTLAEYLQVKNKKSDEEQWFDASEFLRMLCGLEGKFSKLFPNTDLEDIKLSLDADDEKITEAISQLDEDNASLLLIMKKIFDWSVLADIVGDDKNLSSSKVRIYEKHKSDLKALKYLVKKYLSPQDYRDIFRAADKNNYAAYCGRDKLRKIKREDFYTFIKGKLKNIKIEDTDVPEAAADKAVLDQINQDIAIEKFLPKQVVSDNRTVPYQLYWNELRNLLLKASVYLPFLIERDPDGLSVMDKVLSIMEFRIPYFVGPLNAHSDFSWLRRKAEGRILPWNFKEKVDLDACENEFINRMINRCTYLPNELVLPEHSLLYQRFKVLNLINMIHINGSPVSVECKQKIYGLFLQYSKVTKKTIVSFLISNNFYSDITENSIIGIDDTVTAALSSWKIFMPFLESKKLTENEVEQIISQRAFTEDRTRFQNFLKKFPNLDSGDIKKISSKNFQGFGRLSEKFLTEPLYFDPVTGNQLSIINMLWEYNFNLQQLMSDKFPFAKYVERERKAYYSNSPLSLSDRLDEMYISNSVKRPIIRTLTILDEITRTMGYPPAKIFVEMARDVDGTKKKQRTVSRMAQLQELYREIADDDTRRLSQELERYDESALQRDVLYLYFMQLGRDMYTGDPITDLKLCDKEHIYPQSKVKDDSILDNIVLVNSKANGAKSDSYPIDAEIRHKMLPFWQSLRDKKLISDEKFYRLTRSTPFSDDEQWGFINRQLVETRQSTKVITELLKERYPESEVVYVKAGLVSDFRHEFGFAKSRTINDLHHAKDAYLNIVVGNVYSSFFTRNWFAGHTGNYSLKIGKLFSGTVKTITGSVVWNGEQDIASVAKNMQRNYLHLSNYSYCQHGGLFDQNPLSAAEDLIPLKKGKPTGIYGGYRKPSASFFIFALTEIPGKKKTVKELTLVPVDLMVADRFLRDENVAVEYVKKFTDPTGKKELTVQFPLGLKPIKIKTVFEVDNGLRFMLNGKSGGGRKLLIAMASSLLLDNKWEAYIKHLESYCEKKKKNPKHIYSEEFDRFSILGNIELYDILLNKLSSGLFSKRPANPAECLKTGRETFISLTPEKQAEILLGIINSFGRGSGSGVDLSQLGGVANAAVTTISSNLSNWKKIFSAVHIVYSDASGLHETKSINLLELM

SEQ ID NO: 20291 - protein, 1361 aa, unidentified
  REGION 1..1361: note = Cas Enzyme sequence
MKNEENIYLGLDIGTDSVGYAVTDDKYKIMKYHGNAAWGSTIFDAGALGADRRVFRSARRRLDRRQERIQLLQEIFANEIAKVDERFFIRLLESGLWRADAEDRYVFFNDKEYTDVQYMRDYPTIHHLICELIYNPNKHDVRLVYLACAWLVTHRGHFLSNINTENIADLVDIHNVYNGFMRFFEENEIICDWREVNVEELGRVLAANIGINEKYRNLSTVLFATRKPDKKAKEGFPYSEDAIVRLLAGGTCKLKDVYIKEEYDEFGSITLGMDDEKMTEVMADIGDDFDLIKALRSLYDWGILANILVNENNSPLISQSKVKVYEQHREDLANLKYLVHKYIPHKYNEIFREIRGDNYVAYSYHYELKNDEKMGKKADVEKFSKFLLKILEGISVDEQDKVVYDDMIERLTLRLFLPKQKNTDNRVIPHQLYEYELKSILKNTKNYLPFLKEKDSDGISNEDKIISIFKFKIPYFVGPLNCNSQFAWIQRKADGKIFPWNFEDKVDFDASEQAFIQRMTNQCTYLPEESVLPKQSLYYQKFMVLNEINNIKIDGRKISVAMKQELYNEIFEKKKRVRKKDVIDFFVSNGYLEGGKEALISGLDEQIHTNLSSFHAFRRLLQNHILSVEDVESIIERASYSDDKGRVLLFLKNKYSFLTDEDIKYICKIKIKDFGRLSKKFLVDFEGTCKETGEISTVLRLMWETNNNLMELLSDKYTFANGIKENRKKYYTEQQKTLDDRLDEMYISNSVKRTIYRTLSVVKDVTKAFGVPKKIFVEMARTNKPDLKGKRTRTRQQQVIELYAKCDEEDVRELKHQMESLGEYVDNKLQSDKLFLYFIQFGKSAYSGKMIDLEKLMSGSKVYDIEHIYPQAYVKDDSIINNKVLVFSEENGAKQDIYPIKTEIRKQMSGIWTTWHHVGAISDEKYKRLTRSTPFNEDEKYGFINRQLTETSQSTKAIAQILNEKYPETEIVYVKAGLVSDFRHEFGLCKCRSYNDLHHATDAYLNVVVGNVYNMKFNRKWFSVDSKYSIKSKTIFSHSLVCNGKIIWDKEKMLPMVLKNAKKNNAHFTKYQFMKTGGFFDQMPCKKASGLVPRKKGLDTERYGGYNKSGIMFLLPMKYKIGKKSDIIILSVELLYGKLFLKDEVFAKKYAEERLQKIIGKKADEVSFPMGMKPWKINTVLSLDGFNVCITGIGGGGKCLSAQPIMQLSLPYELVKYLKKIEKFVEKNKNNANYIYDEQYDSVSVDGNIKLYDVYLDKLENSIYNKRINSPEAILKNGREKFCKLNVLEQAVTLINIQSIFGRMTGGCDLENIGGKKHSAATVNFSSNVSNWKKYYKDVRVVYQSPSGIWERRSQNIFELL

SEQ ID NO: 20292 - protein, 1371 aa, unidentified
  REGION 1..1371: note = Cas Enzyme sequence
MELKKSNKIYGDYYIGLDIGTNSVGIAATDLNYNLIKYKGEPVWCSHLFEEGHQCADRRGFRTARRRLDRRQQRVQLIDELFASEVGKVDKNFYIRKKESALWREDKTDSSTGNMYFNDEDYKDVDYHKEYPTIHHLIVALMEQDKAFDIRLVNIAIDWLVAHRGHFLSEISVKNVDKITDFETVYNKFIDFFNMEGLQDSYNAWIEADCKELEKIIKSKSGITTKKRELKQVIYGGKVPKEESVPYKYESMINFLAGGKIKAKDLFQQSEYESDFSFSISDDMEEILPQLGDDAEFVSKMTAIYEWSVLTDVLNGEKYISKAKVEVYDQHKKDLEQLKKFVRKYVPKEYYKIFKESGKELKNYTAYSYNLKSVDTTKDKVELPKQKANQKEFNDFLKKTLKLDKIEEQIEEEDLDFYEDMVSRIENAGFMPKQVNSDNRVIPHQLYQIELERILDKAENYLPFLKEKDADGLTITEKIKSVFTFRVPYYVGPLRRDNSENAWIKRKAEGKILPWNFDQMVDKDASEKEFIRRMTNTCTYLPGESVLPKWSLLYSGFMVLNEINNIKVNGQSISVEAKQRIYHELFEKKAKVTVKMIRGFLESNNYMQKEDVLEGIDVTIKSSLKAHYEFRNLLAAGTLDKKDVERIIEHNTYVEDRGRYRNWINREFPNLSAEDKKYIGKLKYNDFGRISKKMLNDLRGDDKTTGEMGSIMHFLWTTNDNFMQLLSNDRYTFAERIEEERKKYYESKEFSVEEQLDEMYVSNAVKRPILRTLDVVDDVVSTLGHAPKKFFVEMARGADPDQKGRTTTRKQQLLELYKNVEEDTRILEKELEDMGDMANNRLQSEAIFLYYLQLGRCAYSGQAIDLSQIKSGKYNIDHIYPQCYVKDDSIVNNKVLVLSGINGDKKDIYPISEEIRTSQKAFWSKLRKANLMSDEKYKRLTRNTPFSDEEKQGFINRQLVETRQSMKAVTQILKQKYKDTEIVYVKARLASQFRQEFLTPKSRLINDLHHAKDAYLNAVVGNVYHERFTRKWFNISDKYTVNPKSLFKRTVQHGEEVIWDPDVHMDKVKSIYKKNNIKMTRYSFCQKGGLFDQMPLKKKADLVPLKKGMDPVKYGGYNKSGATFFIVAAYDKGTKKEVSFVPIELMFSEQFLKDEDFAKQYVQEQLQKLSAKTVSNVWFPLGMRKIKFKTVLSLDGYEVWVNGKASGGKQLLLSSAESLLVSKEMEAYIKKLENYKRKEDERKNVLLDEAYDGISKSENIRLYDCFISKLQNSMFSQMPGCQKDVVADGKQKFMNIAIEEQVAVLISIITLLKSGRAGGIDLTAIGGKSKSGAMVLGTSLSTAIYDDIRIVDYSPAGLHRKESVNLKDFLK

SEQ ID NO: 20293 - protein, 1137 aa, unidentified
  REGION 1..1137: note = Cas Enzyme sequence
IHVILGELRTLLADEYNTEIKFGEEYISALLRSDIGVTAKAKLVKGALGEISFDEAIDTVVMSEALAGKTIKFDALFKDPALKESEEKTLCLRGDIEEKYDSYAEILGERIEIVTAMKAVFDSARLAQILGGDKYISDAKVRQWNENRADLVGLKAYVREYESEKYDNIFICKSEKLNNYASYSRYNHGSAEHTCTQEEFCKYLKKELDSMKEHSEYSELWQKIQNNELLPKLRGADNGVIPKQLHLIELKKVLDNASKYLGFLSETDSDGLSVTQKIIKLFDFRIPYYVGPLNKKSPNAWVIRTDEKITPWNFEHVVDTKASANEFMVRLTGKCTYTGEDVLPRDSLLYSEYAVLNEINPICVNGNPLPVDVKQRIFEDMFVVSNSKVTKRRIKDYLIGHCLIQPSDEITGIDDTVKSKLKSYHDFKKILVKTHDTAMVEDMISHILIFGDDKKLLREWLRDNCNGLDAKDIEYVSRLKYKDWGRLSRAFLTELYTPDERGEALSVIDMMRATNCNLMQLMSDKYKFSEAAEAYRNNKFGTDETLEQRLDTLYVSPAVKRSIRQTLRIVDEITDIRKAAPEKIFIEMARGADESQKGKRTESRKNRLISLYKACKEDSGALYEALESEPEGRLRHDALYLYYTQFGRCMYSGEEIDLSQIDKAYDVDHIYPQSKIKDDSLDNRVLVAKRLNMDKTNVYPVSAEIRNKMRPMWHMLKEKGMISEKKYERLVRSTPLSEDELASFVGRQLVETRQSTKALATVLGELYPDTRLVYSKAGNVSTFRQKYNIVKCRDVNDLHHAKDAYLNIVVGNVYCTKFTDAFFKNISRENYSLNRLFDYDVPGAWNASIDLGRVKNIVSKNNILVTRMAYEVKGEIAKRQISPKGKGQLPIKEGMDIAAYGGYDKIAGAYFFVVEHASKKKRVRTVEPVYIYKKALYESDPVRYCTEILGLEGPIIVYPRILKDSLLELDARKMYITGRSGVKLLGKHPYQLSLSMDAEQKIKRISKYIERCETAKRELEITTYDDITADGNIEIYDLLINKLSTPVYGGYFSDICRTCENGRDIFISLSLYQQCVQLLELLKLFKCDRTTANLCAINGVKTAGIIQPIKTISSRGSAYIINQSVTGLFETKVDLLS

SEQ ID NO: 20294 - protein, 1361 aa, unidentified
  REGION 1..1361: note = Cas Enzyme sequence
MKNEENIYLGLDIGTDSVGYAVTDDKYKIMKYHGNAAWGSTIFDAGALGADRRVFRSARRRLDRRQERIQLLQEIFANEIAKVDERFFIRLLESGLWRDDAEDRYVFFNDKEYTDVQYMREYPTIHHLICELIYNSNKHDVRLVYLACAWLVTHRGHFLSNINTENIADLVDIHNVYNGFMRFFEENEIICDWREVNVEELGRVLAANIGINEKYRNLSTVLFATRKPDKKAKEGFPYSEDAIVRLLAGGTCKLKDVYIKEEYDEFGSITLGMDDEKMTEVMADIGDDFDLIKALRSLYDWGILANILVNENNSPLISQSKVKVYEQHREDLANLKYLVHKYIPHKYNEIFREIRGDNYVAYSYHYELKNDEKMGKKADVEKFSKFLLKILEGISVDEQDKVVYDNMIERLTLRLFLPKQKNTDNRVIPHQLYEYELISILKNTKNYLPFLKEKDSDGISNEDKIISIFKFKIPYFVGPLNCNSQFAWIQRKADGKIFPWNFEDKVDFDASEQAFIQRMTNQCTYLPEESVLPKQSLYYQKFMVLNEINNIKIDGRKISVAMKQELYNEIFEKKKRVRKKDVIDFFVSNGYLEGGKEALISGLDEQIHTNLSSFHAFHRLLQNHILSVEDVESIIERASYSDDKGRVLLFLKNKYSFLTDEDIKYICKIKIKDFGRLSKKFLVDFEGMCKETGEISTVLRLMWETNNNLMELLSDKYTFANGIKENRKKYYTEQQKTLDDRLDEMYISNSVKRTIYRTLSVVKDVTKAFGVPKKIFVEMARTNNPDLKGKRTRTRQQQVIELYAKCDEEDVRELKHQMESLGEYVDNKLQSDKLFLYFIQFGKSAYSGKMIDLEKLMSGSKVYDIEHIYPQAYVKDDSIINNKVLVFSEENGAKQDIYPIKTEIRKQMSGIWTTWHHVGAVSDEKYKRLTRSTPFNEDEKYGFINRQLTETSQSTKAIAQILNEKYPETEIVYVKAGLVSDFRHEFGLYKCRSYNDLHHATDAYLNVVVGNVYNMKFNRKWFSVDSKYSIKTKTIFSHSLVCNGKTIWDKEKMLPMVLKNAKKNNAHFTKYQFMKTGGFFDQMPCKKASGLVPRKKGLDTERYGGYNKSGIMFLTPMRYKIGKKSDIIILSVELLYGKLFLKDEVFAKKYAEERLQKIIGKKADEVSFPMGMKPWKINTVLSLDGFNVCITGIGGGGKCLSAQPIMQLSLPYELVKYLKKIEKFVEKNKNNANYIYDEQYDSVSVDENIKLYDVYLDKLENSIYNKRINSPEAILKNGREKFCKLNVLEQAVTLINIQSIFGRMTGGCDLENIGGKKHSAATVNFSSNVSNWKKYYNDVRVVYQSPSGIWERRSQNILELL

SEQ ID NO: 20295 - protein, 1361 aa, unidentified
  REGION 1..1361: note = Cas Enzyme sequence
MKNEENIYLGLDIGTDSVGYAVTDDKYKIMKYHGNAAWGSTIFDAGALGADRRVFRSARRRLDRRQERIQLLQEIFANEIAKVDERFFIRLLESGLWRADAEDRYVFFNDKEYTDVQYMRDYPTIHHLICELIYNPNKHDVRLVYLACAWLVTHRGHFLSNINTENIADLVDIHNVYNGFMRFFEENEIICDWREVNVEELGRVLAANIGINEKYRNLSTVLFATRKPDKKAKEGFPYSEDAIVRLLAGGTCKLKDVYIKEEYDEFGSITLGMDDEKMTEVMADIGDDFDLIKALRSLYDWGILANILVNENNSPLISQSKVKVYEQHREDLANLKYLVHKYIPHKYNEIFREIRGDNYVAYSYHYELKNDEKMGKKADVEKFSKFLLKILEGISVDEQDKVVYDNMIERLTLRIFLPKQKNTDNRVIPHQLYEYELKSILKNTKNYLPFLKEKDSDGISNEDKIISIFKFKIPYFVGPLNCNSQFAWIQRKADGKIFPWNFEDKVDFDASEQAFIQRMTNQCTYLPEESVLPKQSLYYQKFMVLNEINNIKIDGRKISVAMKQELYNEIFEKKKRVRKKDVIDFFVSNGYLEGGKEALISGLDEQIHTNLSSFHAFRRLLQNHILSVEDVESIIERASYSDDKRRVLLFLKNKYSFLTDEDIKYICKIKIKDFGRLSKKFLVDFEGTCKETGEISTVLRLMWETNNNLMELLSDKYTFANGIKENRKKYYTEQQKTLDDRLDEMYISNSVKRTIYRTLSVVKDVTKAFGVPKKIFVEMARTNNPDLKGKRTRTRQQQVIELYAKCDEEDVRELKHQMESLGEYVDNKLQSDKLFLYFIQFGKSAYSGKMIDLEKLMSGSKVYDIEHIYPQAYVKDDSIINNKVLVFSEENGAKQDIYPIKTEIRKQMSGIWTTWHHVGAISDEKYKRLTRSTPFNEDEKYGFINRQLTETSQSTKAIAQILNEKYPETEIVYVKAGLVSDFRHEFGLCKCRSYNDLHHATDAYLNVVVGNVYNMKFNRKWFSVDSKYSIKSKTIFSHSLVCNGKIIWDKEKMLPMVLKNAKKNNAHFTKYQFMKTGGFFDQMPCKKASGLVPRKKGLDTERYGGYNKSGIMFLTPMRYKIGKKSDIIILSVELLYGKLFLKDEVFAKKYAEERLQKIIGKKADEVSFPMGMKPWKINTVLSLDGFNVCITGIGGGGKCLSAQPIMQLSLPYELMKYLKKIEKFVEKNKNNANYIYDEQYDSVSVDENIKLYDVYLDKLENSIYNKRINSPEAILKNGREKFCKLNVLEQAVTLINIQSIFGRMTGGCDLENIGGKKHSAATVNFSSNVSNWKKYYNDVRVVYQSPSGIWEKRSQNILKLL

SEQ ID NO: 20296 - protein, 1361 aa, unidentified
  REGION 1..1361: note = Cas Enzyme sequence
MKNEENIYLGLDIGTDSVGYAVTDDKYKIMKYHGNAAWGSTIFDAGALGADRRVFRSARRRLDRRQERIQLLQEIFANEIAKVDERFFIRLLESGLWRADAEDRYVFFNDKEYTDVQYMRDYPTIHHLICELIYNPNKHDVRLVYLACAWLVTHRGHFLSNINTENIADLVDIHNVYNGFMRFFEENEIICDWREVDVDELGKILAANIGINEKYRNLSTLLFATRKPDKKAKEGFPYSEDAIVRLMAGGTCKLKDIFIKEEYDEFGSITLGMDDEKMTEVMADIGDDFELIKALRSLYDWGILANILVNKNNSPLISKSKVKVYEQHREDLANLKYLVHKYIPYKYNEVFRELRSDNYVAYSYHYELKNDEKMGKKADLEKFSKFLLKILVGISVEEEDKVVYDNMIERLTLRLFLPKQKNTDNRVIPHQLYEYELKSILKNAKNYLPFLKVKDSDGISNEDKIISIFKFKVPYYVGPLNCNSQFAWIQRKADGKIFPWNFEDKVDFDASEQAFIQRMTNQCTYLPEESVLPKQSLYYQKFMVLNEINNIKIDGRKISVAMKQELYNEIFEKKKRVRKKDVVDFFVSNGYLEGGKEALISGLDEQIHTNLSSFHAFRRLLQNNILSVEDVESIIERASYSDDKGRVLLFLKNKYSFLTDEDIKYICKIKIKDFGRLSKKFLVDFEGMCKETGEISTVLRLMWETNNNLMELLSDKYTFSNGIKENRKKYYTEQQKTLDARLDEMYISNSVKRTIFRTLSVVEDVTKAFGVPKKIFVEMTRTNNPDLKGKRTKTRQQRVLELYAKCDEEDVRELKHQMESLGEYVDNKLQSDKLFLYFIQFGKSAYSGKMIDLEKLMSGSKVYDIEHIYPQAYVKDDSIINNKVLVFSEENGAKQDIYPIKTEIRKQMSGIWAVWHHVGAVSDEKYKRLTRSTPFNDDEKYGFINRQLTETSQSTKAVAQILNEKYPETEIVYVKAGLVSDFRHEFGLYKCRSYNDLHHATDAYLNVVVGNVYNMKFNRKWFSVDSKYSIKTKTIFSHSLVCDGKTVWDKEKMLPMVLKNAKKNNAHFTKYQFMKTGGFFDQMPCKKAPGLVPRKKGLDTERYGGYNKSGIMFLLPMRYQIGKKSDIIILSVELLYGKKFLKDEVFAKKYAEERLQKIIGKKADEVFFPMGMKPWKINTVLSLDGFNVCITGIGGGGKCLSAQPIMQLSLPYELVKYLKKIEKFVEKNKNNANYIYDEQYDLVSADKNIKLYDVYLDKLENSIYNKRINSPEAILKNGREKFCELNVLEQSLTLINIQSIFGRMTGGCDLENIGGKKHSAATVNFSSNVSNWKKYYNDVRVVYQSPSGIWERRSQNILELL

SEQ ID NO: 20297 - protein, 1361 aa, unidentified
  REGION 1..1361: note = Cas Enzyme sequence
MKNEENIYLGLDIGTDSVGYAVTDDKYKIMKYHGNAAWGSTIFDAGALGADRRTFRSARRRLDRRQERIQLLQEIFANEIAKVDERFFIRLLESGLWRVDAEDRYVFFNDKEYTDVQYMRDYPTIHHLICELIDNPNKHDVRLVYLACAWLMAHRGHFLSNINTENIADLVDIHNVYSAFMHFFEENEIICDWREVDVDELGKILAANIGINEKYRNLSTLLFATRKPDKKAKEGFPYSEDAIVRLMAGGTCKLKDIFIKEEYDEFGSITLGMDDEKMTEVMADIGDDFELIKALRSLYDWGILANILVNKNNSPLISKSKVKVYEQHREDLANLKYLVHKYIPYKYNEIFRELRGDNYVAYSYHYELKNDEKMGKKTDLEKFSKFLLKILEGISVEEEDKVVYDNMIERLKLRLFLPKQKNTDNRVIPHQLYEYELKSILKNAKTYLPFLKEKDSDGISNEDKIISIFKFKIPYYVGPLNCNSQFAWIQRKADGKIFPWNFEDKVDFDASEQAFIQRMTNQCTYLPEESVLPKQSLYYQKFMVLNEINNIKIDGRKISVAMKQELYNEIFEKKKRVRKKDVIDFFVSNGYLEGGKEALISGLDEQIHTNLSSFHAFRRLLQNHILSVEDVESIIERASYSDDKGRVLLFLKNKYSFLTDEDIKYICKIKIKDFGRLSKKFLVDFEGMCKETGEISTVLRLMWETNNNLMELLSDKYTFSNGIKENRKKYYTEQQKTLDARLDEMYISNSVKRTIFRTLSVVKDVTKAFGVPKKIFVEMTRTDNPDLKGKRTKTRQQRVLELYAKCDEEDVRELKHQMESLGENVDNKLQSDKLFLYFIQFGKSAYSGKMIDLEKLMSGSKVYDIEHIYPQAYVKDDSIINNKVLVFSEENGAKQDKYPIKTEIRKQMSGIWTTWHHVGAVSDEKYKRLTRSTPFNEDEKYGFINRQLTETSQSTKAVAQILNEKYPETEIVYVKAGLVSDFRHEFGLYKCRSYNDLHHATDAYLNVVVGNVYNMKFNRKWFSVDSKYSIKTKTIFSHSLVCDGKTVWDKEKMLPMVLKNAKKNNAHFTKYQFMKTGGFFDQMPCKKAPGLVPRKKGLDTERYGGYNKSGIMFLLPMRYQIGKKSDIIILSVELLYGKKFLKDEVFAKKYAEERLQKIIGKKADEVSFPMGMKPWKINTVLSLDGFNVCITGIGGGGKCLSAQPIMQLSLPYELVKYLKKIEKFVEKNKNNANYIYDEQYDSVSVDGNIKLYDVYLDKLENSIYNKRINSPEAILKNGREKFCKLNVLGQAVTLINIQSIFGRMTGGCDLENIGGKKHSAATVNFSSNVSNWKKYYNDVRVVYQSPSGIWERRSQNILELL

SEQ ID NO: 20298 - protein, 1361 aa, unidentified; identical to SEQ ID NO: 16023
  REGION 1..1361: note = Cas Enzyme sequence

SEQ ID NO: 20299 - protein, 1335 aa, unidentified
  REGION 1..1335: note = Cas Enzyme sequence
TDEQYHLLRFHGNDAWGSHVFDSASLCDERRGFRSARRRLDRRQQRVKLLQEIFAKEIANIDPRFFIRLSESYRWRDDTDDRYIYFNEEEYTDIQYMRDYPTIHHLICELMENEEEHDIHLVYLACAWLVAHRGHFLSQLSVDNIDSLIDIESVYQKFLHFFIDNGCENPWIQDAELVGGILKEHIGVTEKHNRLGEIMLGNRKPSKDVRETFLYSEYCIIRLLAGGTCKLRDLYGKEEYEDFGSVSLEMDDDKLAEIMINIGEDYELIAVLRSLHDWSVLADILDGQNGLTNISTAKVAIYEQHKKDLATLKYFIRKYCPEKYNAIFKDAREDNYVAYSYHYNNKLDGQIKKKADTETFSKSLIKIINSIKCDKEDEIIYQDMNNRLGLRQFLPKQRNTDNRVIPHQLYEYELKKILENAAKYLPFLNQKEDGISNTEKIISIFKFKIPYYVGPLNKHSEFAWIDRKSGKILPWNYENMIDDDASEEAFIKKMTNQCTYLPGESVLPKDSLCYQKFMVLNEINNIKVDGRKISVGAKQGIYSDLFLKYKKVKRSQIEEYLISNGQLEKNRRETLSGIDIQIKSSLSSHIAFRRLLEQKILNEADVERIIERASYAEDKGRVAKWLRAKYPHLTEADIKYICKVKIKDFGRLSRTFLTGIEGACKETGEVATIISMMWESNDNLMELLSERYTFADTILEFKSDYYTERKQTLSERLDEMYVSNAVRRPIYRTLDIVKDLEKAFGKPEKIFIEMTRGAMPELKGKRTKSRQQQLLEYYDKCKEEDVRDLKQQLEALGEYVDNKLQSDRLFLYFMQFGKCAYSGMPISLERLMAGSKEYDIDHIYPQAYVKDDSIINNKVLVLSVANGEKKDVYPIKSEIRNKMQKTWSFWHHVGTISDEKYKRLIRSTPFTEDEKYGFINRQLTETSQSTKVVAELLKERYPEAEIVYSKAGLISDFRHEFDLYKSRSYNDLHHAVDAYLNIVVGNVYHMRFSRQWFNINSSYSIKTKTLFTHTVNCNGKEVWNKDMLPGVLKTAKKNTAHFTKHATFKTGGLFDQNPVKKAPGLTPLKAGLPTEKYGGYNKAGVMFFIPVRYKSGKKTVLMVLSVELLYGNRFLEDEIFAKEYAKDRLQRIIGKSVDEIDFPIGMRPWKVNTILSLDGFRICITGNASGGKCLIAQPIMQFSSDEYWKYYLKKLEKFVEKVKNNSSYVYDVDYDVVHHEDNLKLYDLYLDKLQNSIYRKRINAPIQTLIEGREKFIDCSVIEQCQVLLNIHQVFGRMTSGCDLTLIGGKSHSAATVSFSSTISNWKKNYTDVRIIDQSASGLWEVVSENILEYL

SEQ ID NO: 20300 - protein, 1358 aa, unidentified
  REGION 1..1358: note = Cas Enzyme sequence
MKQGKRGYYLGLDIGTDSIGYAVTDEQYHLLRFHGNDVWGSHVFDSASLCDERRGFRSARRRLDRRQQRVKLLQEIFAKEIANIDPRFFIRLSESYRWRDDTDDRYIYFNEEEYTDIQYMRDYPTIHHLICELMENEEEHDIRLVYLACAWLVAHRGHFLSQLSVDNIDSLIDIESVYQKFLHFFIDNGCENPWIQDAELVGGILKEHIGVTEKHNRLGEIMLGNRKPSKDVRDTFLYSEYCIIRLLAGGTCKLRDLYGKEEYEDFGSVSLEMDDDKLAEIMINIGEDYELIAVLRSLHDWSVLADILDGQNGLTNISTAKVAIYEQHKKDLATLKYFIRKYCPEKYNAIFKDAREDNYVAYSYHYNNKLDGQIKKKADTETFSKFLIKIINSIKPDKEDEIIYQDMDNRLGLRQFLPKQRNTDNRVIPHQLYEYELKKILENAAKYLPFLNQKEDGISNTEKIISIFKFKIPYYVGPLNKHSEFAWIDRKSGKILPWNYENMIDDDASEEAFIKKMTNQCTYLPGESVLPKDSLCYQKFMVLNEINNIKVDGRKISVGAKQGIYSDLFLKYKKVKRSQIEEYLISNGQLEKNRRETLSGIDIQIKSSLSSHIAFRRLLEQKILNEADVERIIERASYAEDKGRVAKWLRAKYPHLTEADIKYICKVKIKDFGRLSRTFLTGIEGACKETGEVATIISMMWESNDNLMELLSERYTFADTILEFKSDYYTERKQTLSERLDEMYVSNAVRRPIYRTLDIVKDLEKAFGKPEKIFIEMTRGAMPELKGKRTKSRQQQLLEYYDKCKEEDVRDLKQQLEALGEYVDNKLQSDRLFLYFMQFGKCAYSGMPISLERLMAGSKEYDIDHIYPQAYVKDDSIINNKVLVLSVANGEKKDVYPIKSEIRNKMQKTWSFWHHVGTISDEKYKRLIRSTPFTEDEKYGFINRQLTETSQSTKVVAELLKERYPEAEIVYSKAGLISDFRHEFDLYKSRSYNDLHHAVDAYLNIVVGNVYHMRFSRQWFNVNSSYSIKTKTLFTHTVNCNGKEVWNKDMLPGVLKTAKKNTAHFTKHATFKTGGLFDQNPVKKAPGLTPLKAGLPTEKYGGYNKAGVMFFIPVRYKSGKKTVLMVLSVELLYGDRFLEDEIFAKEYAKDRLQRIIGKSVDEIDFPIGMRPWKVNTILSLDGFRICITGNASGGKCLIAQPIMQFSSDEYWKYYLKKLEKFVEKVKNNSSYVYDVDYDVVHHEDNLKLYDLYLDKLQNSIYRKRINAPIQTLIEGREKFIDCSVIEQCQVLLNIHQVFGRMTSGCDLTLIGGKSHSAATVSFSSTISNWKKNYTDVRIIDQSASGLWEVVSENILEYL

SEQ ID NO: 20301 - protein, 1358 aa, unidentified
  REGION 1..1358: note = Cas Enzyme sequence
MKQGKRGYYLGLDIGTDSIGYAVTDEQYHLLRFHGNDVWGSHVFDSASLCDERRGFRSARRRLDRRQQRVKLLQEIFAKEIANIDPRFFIRLSESYRWRDDTDDRYIYFNEEEYTDVQYMRDYPTIHHLICELMENEEEHDIRLVYLACAWLVAHRGHFLSQLSVDNIDSLIDIESVYQKFLHFFIDNGCENPWIQDAELVGGILKEHIGVTEKHNRLGEIMLGNRKPSKDVRETFLYSEYCIIRLLAGGTCKLRDLYGKEEYEDFGSVSLEMDDDKLAEIMINIGEDYELIAVLRSLHDWSVLADILDGQNGLTNISTAKVAIYEQHKKDLATLKYFIRKYCPEKYNAIFKDAREDNYVAYSYHYNNKLDGQIKKKADTETFSKFLIKIITSIQPDEEDEIIYQDMDNRLGLRQFLPKQRNTDNRVIPHQLYEYELKKILENAAKYLSFLNQKEDSISNTEKIISIFKFKIPYYVGPLNKHSEFAWIDRKSGKILPWNYENMIDDDASEEAFIKKMTNQCTYLPGESVLPKDSLCYQKFMVLNEINNIKVDGRKISVGAKQGIYSDLFLKYKKVKRSQIEEYLISNGQLEKSRRETLSGIDIQIKSSLSSHIAFRRLLEQKILNEADVERIIERASYAEDKGRVAKWLRAKYPHLTEADIKYICKVKIKDFGRLSRTFLTGIEGTCKETGEVATVISMMWESNDNLMELLSERYTFADTILEFKSDYYTERKQTLSERLDEMYVSNAVRRPIYRTLDIVKDLEKAFGKPEKIFIEMTRGAMPELKGKRTKSRQQQLLEYYDKCKEEDVRDLKQQLEALGEYVDNKLQSDRLFLYFMQFGKCAYSGMPISLERLMAGSKEYDIDHIYPQAYVKDDSIINNKVLVLSVANGEKKDVYPIKSEIRNKMQKTWSFWHHVGTISDEKYKRLIRSTPFTEDEKYGFINRQLTETSQSTKVVAELLKERYPEAEIVYSKAGLISDFRHEFDLYKSRSYNDLHHAVDAYLNIVVGNVYHMRFSRQWFNINSSYSIKTKTLFTHTVNCNGKEVWNKDMLPGVLKTAKKNTAHFTKHATFKTGGLFDQNPVKKAPGLTPLKAGLPTEKYGGYNKAGVMFFIPVRYKSGKKTVLMVLSVELLYGNRFLEDEIFAKEYAKDRLQRIIGKSVDEIDFPIGMRPWKVNTILSLDGFRICITGNASGGKCLIAQPIMQFSSDEYWKYYLKKLEKFVEKVKNNSSYVYDVDYDVVHHEDNLKLYDLYLDKLQNSIYRKRINAPIQTLIEGREKFIDCSVIEQCQVLLNIHQVFGRMTSGCDLTLIGGKSHSAATVSFSSTISNWKKNYTDVRIIDQSASGLWEVVSENILEYL

SEQ ID NO: 20302 - protein, 1358 aa, unidentified
  REGION 1..1358: note = Cas Enzyme sequence
MKQGKRGYYLGLDIGTDSIGYAVTDEQYHLLRFHGNDVWGSHVFDSASLCDERRGFRSARRRLDRRQQRVKLLQEIFAKEIANIDPRFFIRLSESYRWRDDTDDRYIYFNEEEYTDVQYMRDYPTIHHLICELMENEEEHDIRLVYLACAWLVAHRGHFLSQLSVDNIDSLIDIESVYQKFLHFFIDNGCENPWIQDAELVGGILKEHIGVTEKHNRLGEIMLGNRKPSKDVRETFLYSEYCIIRLLAGGTCKLRDLYGKEEYEDFGSVSLEMDDDKLAEIMINIGEDYELIAVLRSLHDWSVLADILDGQNGLTNISTAKVAIYEQHKKDLATLKYFIRKYCPEKYNAIFKDAREDNYVAYSYHYNNKLDGQIKKKADTETFSKSLIKIINSIKCDKEDEIIYQDMNNRLGLRQFLPKQRNTDNRVIPHQLYEYELKKILENAAKYLPFLNQKEDGISNTEKIISIFKFKIPYYVGPLNKHSEFAWIDRKSGKILPWNYENMIDDDASEEAFIKKMTNQCTYLPGESVLPKDSLCYQKFMVLNEINNIKVDGRKISVGAKQGIYSDLFLKYKKVKRSQIEEYLISNGQLEKNRRETLSGIDIQIKSSLSSHIAFRRLLEQKILNEADVERIIERASYAEDKGRVAKWLRAKYPHLTEADIKYICKVKIKDFGRLSRTFLTGIEGACKETGEVATIISMMWESNDNLMELLSERYTFADTILEFKSDYYTERKQTLSERLDEMYVSNAVRRPIYRTLDIVKDLEKAFGKPEKIFIEMTRGAMPELKGKRTKSRQQQLLEYYDKCKEEDVRDLKQQLEALGEYVDNKLQSDRLFLYFMQFGKCAYSGMPISLERLMAGSKEYDIDHIYPQAYVKDDSIINNKVLVLSVANGEKKDVYPIKSEIRNKMQKTWSFWHHVGTISDEKYKRLIRSTPFTEDEKYGFINRQLTETSQSTKVVAELLKERYPEAEIVYSKAGLISDFRHEFDLYKSRSYNDLHHAVDAYLNIVVGNVYHMRFSRQWFNINSSYSIKTKTLFTHTVNCNGKEVWNKDMLPGVLKTAKKNTAHFTKHATFKTGGLFDQNPVKKAPGLTPLKAGLPTEKYGGYNKAGVMFFIPVRYKSGKKTVLMVLSVELLYGNRFLEDEIFAKEYAKDRLQRIIGKSVDEIDFPIGMRPWKVNTILSLDGFRICITGNASGGKCLIAQPIMQFSSDEYWKYYLKKLEKFVEKVKNNSSYVYDVDYDVVHHEDNLKLYDLYLDKLQNSIYRKRINAPIQTLIEGREKFIDCSVIEQCQVLLNIHQVFGRMTSGCDLTLIGGKSHSAATVSFSSTISNWKKNYTDVRIIDQSASGLWEVVSENILEYL

SEQ ID NO: 20303 - protein, 948 aa, unidentified
  REGION 1..948: note = Cas Enzyme sequence
LGLRQFLPKQRNTDNRVIPHQLYEYELKKILENAAKYLPFLNQKEDGISNTEKIISIFKFKIPYYVGPLNKHSEFAWIDRKSGKILPWNYENMIDDDASEEAFIKKMTNQCTYLPGESVLPKDSLCYQKFMVLNEINNIKVDGRKISVGAKQGIYSDLFLKYKKVKRSQIEEYLISNGQLEKNRRETLSGIDIQIKSSLSSHIAFRRLLEQKILNEADVERIIERASYAEDKGRVAKWLRAKYPHLTEADIKYICKVKIKDFGRLSRTFLTGIEGACKETGEVATIISMMWESNDNLMELLSERYTFADTILEFKSDYYTERKQTLSERLDEMYVSNAVRRPIYRTLDIVKDLEKAFGKPEKIFIEMTRGAMPELKGKRTKSRQQQLLEYYDKCKEEDVRDLKQQLEALGEYVDNKLQSDRLFLYFMQFGKCAYSGMPISLERLMAGSKEYDIDHIYPQAYVKDDSIINNKVLVLSVANGEKKDVYPIKSEIRNKMQKTWSFWHHVGTISDEKYKRLIRSTPFTEDEKYGFINRQLTETSQSTKVVAELLKERYPEAEIVYSKAGLISDFRHEFDLYKSRSYNDLHHAVDAYLNIVVGNVYHMRFSRQWFNINSSYSIKTKTLFTHTVNCNGKEVWNKDMLPGVLKTAKKNTAHFTKHATFKTGGLFDQNPVKKAPGLTPLKAGLPTEKYGGYNKAGVMFFIPVRYKSGKKTVLMVLSVELLYGNRFLEDEIFAKEYAKDRLQRIIGKSVDEIDFPIGMRPWKVNTILSLDGFRICITGNASGGKCLIAQPIMQFSSDEYWKYYLKKLEKFVEKVKNNSSYVYDVDYDVVHHEDNLKLYDLYLDKLQNSIYRKRINAPIQTLIEGREKFIDCSVIEQCQVLLNIHQVFGRMTSGCDLTLIGGKSHSAATVSFSSTISNWKKNYTDVRIIDQSASGLWEVVSENILEYL

SEQ ID NO: 20304 - protein, 1363 aa, unidentified
  REGION 1..1363: note = Cas Enzyme sequence
MEECQMKNEKKYYLGLDIGTDSVGYAVTDTEYRLLKFHGSDAWGSHVFSAAALCDERRNFRSARRRLDRRQQRVKLLQEIFADEIAKIDPRFFIRLSESYLWREDTSDRYIFFNDEEYTDVQYMGEYPTIHHLISDLMHDKKKHDVRLVYLACAWLVAHRGHFLNQISVEHMDSLLDIQEVYQNFLGFFIENGFENPWSSDAQAVGAILKEHVRVTEKHNLLAATILDDRKPNKNVSETFPYSEYHIIRLLAGGTCKLQDLYGKDEYEAFGSLSLEMDDDKMAEIMVNIGDDYELISVLRNLHDWSVLAEVLDAESGITTISEAKVKIYEQHKADLKTLKYFIRKYCPTKYDMVFREARNNNYVAYSYHVNREIADQIKSKADIETFSKFLEKIVGIIQPDEEDEAVYQEMCERLVLRQFLPKQKNTDNRVIPHQLYEYELKKILDNASEYLPFLKQNEDGISNKDKILSVFKFKIPYYVGPLNTNSDFAWIQRKAGKILPWNFQSMIDDDASEEAFIKKMTNQCTYLPGEAVLPKDSLCYQKFMVLNEINNLKIDGRKIPVEAKQGLYTCLFLKYKRVKKKQIEDYLISNGYLDKNHRESLSGIDVTIKSSLSSYLSFKRLLDKKILSEQEVERIIERSSYAEDKGRVGKWLRKNYPDLSDEDVTYICKIKTKDFGRLSRKFLTGMEGVCKATGEIATIINIMWETNDNLMELLSERYTFVETIDACRKEYYTGRKQTLEERLDEMYVSNAVRRPIYRTLDIVKDIEKAFGTPEKIFVEMARGGLPEQKGRRTKSRYQQILDYYAKCREEDVRDLKHQLETMGEYVDNRLQSDRLFLYFMQFGKSAYSGTPISIERLMAGSKEYDIDHIYPQAYVKDDSIINNKVLVLSEENGAKQDVYPIKAEIRNQMQSTWAYWHHLGTISDEKYKRLIRSTPFTEDEKYGFINRQLTETSQSTKVVAELLKERFPQTIIVYSKAGLVSEFRHEFDLYKSRTYNDLHHAVDAYLNVVVGNVYHMRFSRQWFRVESRYSVKTKTLFTHTVKCQDQIVWNKEEMLPRVLKTAKKNTAHFTKYASFKTGGLFDQQPVKKGANLIPLKAGLPTEKYGGYNKAGVMFFIPVRYKAGKKTALMILSVELIYGKRFLEDASFAKEYAKDRLQRILGKKVDDVTFPLGMRPWKVNTVLSLDGFRACITGVASGGTKLIAQPIMQFSSDEYWKYYLKKVERLTEKVSNNPRYVYDVDYDVVQAEDNLKLYDLYIDKLQNTIYKKRINSPLQLLIDGRERFIGCNVIEQCQVLLNIHQVFGRMTAGCNLEKIGGKAHSAATVNFSSTVSNWKKNYSDVRIIDQSASGLWAVVSDNILEYV

SEQ ID NO: 20305 - protein, 1358 aa, unidentified
  REGION 1..1358: note = Cas Enzyme sequence
MKQGEMGYYLGLDIGTDSIGYAVTDEQYHLLRFHGNDVWGSHVFDSASLCDERRGFRSARRRLDRRQQRVKLLQEIFAKEIANIDPRFFIRLSESYRWRDDTDDRYIYFNEEEYTDIQYMRDYPTIHHLICELMENEEEHDIRLVYLACAWLVAHRGHFLSQLSVDNIDSLIDIESVYQKFLHFFIDNGCENPWIQDAELVGGILKEHIGVTEKHNRLGEIMLGNRKPSKDVRDTFLYSEYCIIRLLAGGTCKLRDLYGKEEYEDFGSVSLEMDDDKLAEIMINIGEDYELIAVLRSLHDWSVLADILDGQNGLTNISTAKVAIYEQHKKDLATLKYFIRKYCPEKYNAIFKDAREDNYVAYSYHYNNKLDGQIKKKADTETFSKFLIKIINSIKPDKEDEIIYQDMDNRLGLRQFLPKQRNTDNRVIPHQLYEYELKKILENAAKYLPFLNQKEDGISNTEKIISIFKFKIPYYVGPLNKHSEFAWIDRKSGKILPWNYENMIDDDASEEAFIKKMTNQCTYLPGESVLPKDSLCYQKFMVLNEINNIKVDGRKISVGAKQGIYSDLFLKYKKVKRSQIEEYLISNGQLEKNRRETLSGIDIQIKSSLSSHIAFRRLLEQKILNEADVERIIERASYAEDKGRVAKWLRAKYPHLTEADIKYICKVKIKDFGRLSRTFLTGIEGACKETGEVATIISMMWESNDNLMELLSERYTFADTILEFKSDYYTERKQTLSERLDEMYVSNAVRRPIYRTLDIVKDLEKAFGKPEKIFIEMTRGAMPELKGKRTKSRQQQLLEYYDKCKEEDVRDLKQQLEALGEYVDNKLQSDRLFLYFMQFGKCAYSGMPISLERLMAGSKEYDIDHIYPQAYVKDDSIINNKVLVLSVANGEKKDVYPIKSEIRNKMQKTWSFWHHVGTISDEKYKRLIRSTPFTEDEKYGFINRQLTETSQSTKVVAELLKERYPEAEIVYSKAGLISDFRHEFDLYKSRSYNDLHHAVDAYLNIVVGNVYHMRFSRQWFNVNSSYSIKTKTLFTHTVNCNGKEVWNKDMLPGVLKTAKKNTAHFTKYATFKTGGLFDQNPVKKALGLTPLKAGLPTEKYGGYNKAGVMFFIPVRYKSGKKTVLMVLSVELLYGNRFLEDEIFAKEYTKDRLQRIIGKPVEEVDFPIGMRPWKVNTVLSLDGFRVCITGNASGGKCLIAQPIMQFSSDEYWKYYLKKVERLVEKVKNNSRYIYDVDYDVVHPEDNLKLYDLYLDKLQNSIYRKRINTPIQTLIEGREKFIDCSVIEQCQVLLNIHQVFGRMTSGCDLTLIGGKSHSAATVNFSSTISNWKKNYTDVRIIDQSASGLWEVVSENILEYL

SEQ ID NO: 20306 - protein, 1358 aa, unidentified
  REGION 1..1358: note = Cas Enzyme sequence
MKQGKRGYYLGLDIGTDSIGYAVTDEQYHLLRFHGNDVWGSHVFDSASLCDERRGFRSARRRLDRRQQRVKLLQEIFAKEIANIDPRFFIRLSESYRWRDDTDDRYIYFNEEEYTDIQYMRDYPTIHHLICELMENEEEHDIRLVYLACAWLVAHRGHFLSQLSVDNIDSLIDIESVYQKFLHFFIDNGCENPWIQDAELVGGILKEHIGVTEKHNRLGEIMLGNRKPSKDVRDTFLYSEYCIIRLLAGGTCKLRDLYGKEEYEDFGSVSLEMDDDKLAEIMINIGEDYELIAVLRSLHDWSVLADILDGQNGLTNISTAKVAIYEQHKKDLATLKYFIRKYCPEKYNAIFKDAREDNYVAYSYHYNNKLDGQIKKKADTETFSKFLIKIINSIKPDKEDEIIYQDMDNRLGLRQFLPKQRNTDNRVIPHQLYEYELKKILENAAKYLPFLNQKEDGISNTEKIISIFKFKIPYYVGPLNKHSEFAWIDRKSGKILPWNYENMIDDDASEEAFIKKMTNQCTYLPGESVLPKDSLCYQKFMVLNEINNIKVDGRKISVGAKQGIYSDLFLKYKKVKRSQIEEYLISNGQLEKNRRETLSGIDIQIKSSLSSHIAFRRLLEQKILNEADVERIIERASYAEDKGRVAKWLRAKYPHLTEADIKYICKVKIKDFGRLSRTFLTGIEGACKETGEVATIISMMWESNDNLMELLSERYTFADTILEFKSDYYTERKQTLSERLDEMYVSNAVRRPIYRTLDIVKDLEKAFGKPEKIFIEMTRGAMPELKGKRTKSRQQQLLEYYDKCKEEDARDLKQQLEALGEYVDNKLQSDRLFLYFMQFGKCAYSGVPISLEQLMAGSKEYDIDHIYPQAYVKDDSIINNKVLVLSVANGEKKDVYPIKSEIRNKMQKTWSFWHHVGTISDEKYKRLIRSTPFTEDEKYGFINRQLTETSQSTKVVAELLKERYPEAEIVYSKAGLISDFRHEFDLYKSRSYNDLHHAVDAYLNIVVGNVYHMRFSRQWFNVNSSYSIKTKTLFTHTVNCNGKEVWNNDMLQGVLKTAKKNTAHFTKHATFKTGGLFDQNPVKKAPGLTPLKAGLPTEKYGGYNKAGVMFFIPVRYKSGKKTVLMVLSVELLYGNRFLEDEIFAKEYAKDRLQRIIGKSVDEIDFPIGMRPWKVNTILSLDGFRICITGNASGGKCLIAQPIMQFSSDEYWKYYLKKVEKFVEKVKNNSSYVYDVDYDAVQHEDNLKLYDLYLDKLQNSIYRKRINAPIQTLIEGREKFIDCSVIEQCQVLLNIHQVFGRMTSGCDLTLIGGKSHSAATVSFSSTISNWKKNYTDVRIIDQSASGLWEVVSENILEYL

SEQ ID NO: 20307 - protein, 1156 aa, unidentified
  REGION 1..1156: note = Cas Enzyme sequence
ILKEHVRVTEKQNLLAATILDDRKPNKNVSETFPYSEYHIIRLLAGGTCKLQDLYGKDEYEAFGSLSLEMDDDKMAEIMVNIGDDYELISVLRNLHDWSVLAEVLDAESGITTISEAKVKIYEQHKADLKTLKYFIRKYCPTKYDMVFREARNDNYVAYSYHVNRDIADQVKSKADVETFSKFLEKIVGKIQPDEEDEAVYQEMCERLVLRQFLPKQKNTDNRVIPHQLYEYELKKILDNASEYLPFLKQNEDGISNKDKILSVFKFKIPYYVGPLNTNSDFAWIQRKAGKILPWNFQSMIDDDASEEAFIKKMTNQCTYLPGEAVLPKDSLCYQKFMVLNEINNLKIDGRKIPVEAKQGLYTCLFLKYKRVKKKQIEDYLISNGYLDKNHRESLSGIDVTIKSSLSSYLSFKRLLDKKILSEQEVERIIERSSYAEDKGRVGKWLRKNYPDLSDEDVTYICKIKTKDFGRLSRKFLTGMEGVCKATGEIATIINMMWETNDNLMELLSERYTFVETIDACRKEYYTGRKQTLEERLDEMYVSNAVRRPIYRTLDIVKDIEKAFGTPEKIFVEMARGGLPEQKGRRTKSRYQQILDYYAKCREEDVRDLKHQLETMGEYVDNRLQSDRLFLYFMQFGKSAYSGTPISIERLMAGSKEYDIDHIYPQAYVKDDSIINNKVLVLSEENGAKQDVYPIKAEIRNQMQSTWAYWHHLGTISDEKYKRLIRSTPFTEDEKYGFINRQLTETSQSTKVVAELLKERFPQTIIVYSKAGLVSEFRHEFDLYKSRTYNDLHHAVDAYLNVVVGNVYHMRFSRQWFRVESRYSVKTKTLFTHTVKCQDQIVWNKEEMLPRVLKTAKKNTAHFTKYASFKTGGLFDQQPVKKGANLIPLKAGLPTEKYGGYNKAGVMFFIPVQYRTGKKSTLMVLSVELLYGKRFLEDTTFAREYAKDRLQRITGKPVDIVDFPMGMRPWKVNTILSLDGFRVCITGNASGGKCLIAQPVVQFSSDEYWKYYLKKVERLTEKVSNNPRYVYDVDYDVVHAEDNLKLYDLYIDKLQNTIYKKRINSPLQLLIDGRERFMGCNVIEQCQVLLNIHQVFGRMTAGCNLEKIGGKAHSAATVSFSSTMSNWKKNYSDVRIIDQSASGLWEVVSDNILEYV

SEQ ID NO: 20308 - protein, 1358 aa, unidentified
  REGION 1..1358: note = Cas Enzyme sequence
MKNEKKYYLGLDIGTDSVGYAVTDTEYRLLKFHGSDAWGSHVFSAAALCDERRNFRSARRRLDRRQQRVQLLQEIFADEIAKIDPRFFIRLSESYLWREDTADRYIFFNDKEYTDVQYMGEYPTIHHLISDLMHDKKKHDVRLVYLACAWLVAHRGHFLNQISVEHMDSLLDIQEVYQNFLGFFIENGFENPWSSDAQAIGAILKEHVRVTEKHNLLAATILDDRKPNKNVSETFPYSEYHIIRLLAGGTCKLQDLYGKDEYEAFGSLSLEMDDDKMAEIMVNIGDDYELISVLRNLHDWSVLAEVLDAESGITTISEAKVKIYEQHKADLKTLKYFIRKYCPTKYDMVFREARNDNYVAYSYHVNRDIADQVKSKADVETFSKFLEKIVGKIQPDEEDEAAYQEMYGRLELRQFLPKQKNTDNRVIPHQLYEYELKKILDNASKYLPFLKQNEDGISNKDKILSVFKFKIPYYVGPLNTNSDFAWIQRKAGKILPWNFQSMIDDDASEEAFIKKMTNQCTYLPGEAVLPKDSLCYQKFMVLNEINNLKIDGRKIPVEAKQGLYTCLFLKYKRVKKKQIEDYLISNGYLDKNHRESLSGIDVTIKSSLSSYLSFKRLLDKKILSEQEVERIIERSSYAEDKGRVGKWLRKNYPDLSDEDVTYICKIKIKDFGRLSRKFLTGMEGVCKATGEIATIINMMWETNDNLMELLSERYTFVETIDACRKEYYTGRKQTLEERLDEMYVSNAVRRPIYRTLDIVKDIEKAFGTPEKIFVEMARGGLPEQKGRRTKSRYQQILDYYAKCREEDVRDLKHQLETMGEYVDNRLQSDRLFLYFMQFGKSTYSGTPISIERLMAGSKEYDIDHIYPQAYVKDDSIINNKVLVLSEENGAKQDVYPIKAEIRNQMQSTWAYWHHLGTISDEKYKRLIRSTPFTEDEKYGFINRQLTETSQSTKVVAELLKERFPQAIIVYSKAGLVSEFRHEFDLYKSRTYNDLHHAVDAYLNVVVGNVYHMRFSRQWFRVESRYSVKTKTLFTHTVKCQDQIVWNKEEMLPRVLKTAKKNTAHFTKYASFKTGGLFDQQPVKKGANLIPLKAGLPTEKYGGYNKAGVMFFIPVRYKAGKKTALMILSVELIYGKRFLEDASFAKEYAKDRLQRILGKKVDDVTFPLGMRPWKVNTVLSLDGFRACITGVASGGTKLIAQPIMQFSSDEYWKYYLKKVERLTEKVSNNPRYVYDVDYDVVQAEDNLKLYDLYIDKLQNTIYKKRINSPLQLLIDGRERFIGCNVIEQCQVLLNIHQVFGRMTAGCNLEKIGGKAHSAATVNFSSTVSNWKKNYSDVRLIDQSASGLWEVVSDNILEYV

SEQ ID NO: 20309 - protein, 1355 aa, unidentified
  REGION 1..1355: note = Cas Enzyme sequence
MKNKKYYLGLDIGSDSVGYAVTDEEYNLLKFHGEPAWGATLFDAPASKAERRGYRTARRRLERRKQRVQLVRELFAEEIAKVDGRFYIRQQESALFREDAGDAYSIFNDPDYTDREYYAEYPTIHHLIFELMKNPAPHDVRLVYLACAWLVAHRGHFLSNISKDNMDSFRNFNLVYKSFISFFTDNGYDVPWNECDEKELGNILKKKIRVTDKKKELTDLLYSGKKPSSEATEDFPFSRAAIIGLFAGSKVRPKDLFQNSDYENLEGITLDMDDEKFINLSTELGDDYELIADMRAVYDWTVLADILGNYSCISEAKAAVYEQHRKDLRFLKDVIAKYRPEKYSEVFRAADKDNYVAYAYHTDEVSGSNLKRKDKEAFSKYILGIVKNISPDASDKQNFDDMITRLEDRTFMPKQKDGDNRVIPQQLYAYELDAILKNAAQYLLFLNETDEDGLSVADKISSVFSFRVPYFVGPLNSNSPRAWLARKSGKIYPWNFEKMVDLDASEQNFIEQLTNTCTYIPGEPVLPKDSLLYHKFSVLNEINNLCINEKRISVELKQEIYNNVFMCRRKVTRKQLISYLVANGYVEKGKENTVTGVDININSNLAPQISFKRLIESRVLSEQDVERIIERASYSEDKTRLAAWLKREYPNVNDADRKYICSLRIHDFGRLSRRFLSGVEGVRKETGEVMTVISALWETQYNLMEIVADADRFTFKDELKTIRDDYYSEHPQTLDSHLDDMYVSDAVRRPIHRTLDIIKDVVKAFGEPEKIFVETTRDASGKKKGERTTSRKEQILELYKKCGSEDVRLLQEQLEAMGEAANTKLQSEKLFLYYMQLGRCMYTNQPIKLEALGTKLYDIDHIYPQCFVKDDSIINNKVLVLSEANGAKGNVYPINSDIRKKMHGIWESYKAHGLISEEKFKRLTRTTPFTEEEKYNFINRQLTETSQSTKAVATLLNEFYPDTEIVYSKAGPVSDFRKEFEIYKSRLFNDLHHAVDAYLNIVVGNVYHMKFTRRWFNVNSNYSMKAKTIFTHPVICGGQTVWDGAHMLEKVKTTAAKNNAHITKFATFKNGGLFDQNPISAKEGLTPLKKGLPTEKYGGYNKAGSMFFIPVRYRVGKKTDIIIMPVELLYGKKFLEDAAFAKEYTFDRLGRLLKKTVDEFSFPLGMRPWKVNTVLSLDGFKVCITGGAGGGKCIIIQTLTQFAASKDWAFYLKKLEEFNKKNSKNPNYIYDEKYDKISAEKNLELYDLYIDKLENSIFSKRVNCPTEILKKGRDKFIALGIKEQAQTLLNIHQVFGRISSGCDLSEIDGTPKSAATVNFSSTVSNWKKRYKDVRIIDSSASGLWEKRSCNLLDLL

SEQ ID NO: 20310 - protein, 1354 aa, unidentified
  REGION 1..1354: note = Cas Enzyme sequence
MKNKKYYLGLDIGSDSVGYAVTDEEYNLLKLHGEPAWGATLFDAPASKAERRGYRTARRRLERRKQRVQLVRELFAEEIAKVDGRFYIRQQESALFREDAGDAYSIFNDPDYTDREYYAEYPTIHHLIFELMKNPAPHDVRLVYLACAWLVAHRGHFLSNISKDNMDSFRDFNLVYKSFISFFTDNGYDVPWNECDEKELGNILKNKIRVTDKKKELTDLLYGGKKPSSEATEDFPFSRAAIIGLFAGSKVRPKDLFQNSDYENLEGITLDMDDEKFINLSTELGDDYELIAAMRAVYDWTVLADILGNYSCISEAKAAVYEQHRKDLRFLKDVIAKYRPEKYSEVFRAADKDNYVAYAYHTDEVSGSNLKRKDKEAFSKYILGIVKNISPDASDKQNFDDMITRLEDRTFMPKQKDGDNRVIPQQLYAYELDAILKNAAQYLPFLNETDEDGLSVADKISSVFSFRVPYFVGPLNSNSPRAWLARKSGKIYPWNFEKMVDLDASEQNFIEQLTNTCTYIPGEPVLPKDSLLYHKFSVLNEINNLCINEKRISVELKQEIYNNVFMCRRKVTRKQLISYLVANGYVEKGKENTVTGVDININSNLAPQISFKRLIESRVLSEQDVGRIIERASYSEDKTRLAAWLKREYPNVNDADRKYICSLRIHDFGRLSRRFLSGVEGVRKETGEVMTVISALWETQYNLMEIVADADRFTFKDELKTIRDDYYSEHPQTLDSRLDDMYVSDAVRRPIHRTLDIIKDVVKAFGEPEKIFVETTRDASGKKKGERTTSRKEQILELYKKCGSEDVRLLQEQLEAMGEAANTKLQSEKLFLYYMQLGRCMYTNQPIKLEALGTKLYDIDHIYPQCFVKDDSIINNKVLVLSEANAEKGNKPVKCYVQEKMHCIWESYKAHGLISEEKFKRLTRTTPFTEEEKYNFINRQLTETSQSTKAVATLLNEFYPDTEIVYSKAGPVSDFRKEFEIYKSRLFNDLHHAVDAYLNIVVGNVYHMKFTRRWFNVNSDYSMKAKTIFTHPVICGGQTVWDGAHMLEKVKTTAAKNNAHITKFATFKNGGLFDQNPISAKEGLTPLKKGLPTEKYGGYNKAGSMFFIPVRYRVGKKTDIIIMPVELLCGKKFLEDAAFAKEYTFDRLGRLLKRTVDEFSFPLGMRPWKVNTVLSLDGFRVCISGGKGGGTQLITQTLTQFAASKDWAFYLKKLEEFNKKNSKNPNHIYDEKYDKISAEKNLELYDLYIDKLENSIFSKRVNCPTELLKKGRDKFIALGIKEQAQALLNIHQVFGRISRGCDLSAVGGTSRSAATESLSTKISNWKKDYKDVRIIDSSASGLWEKRSCNLLDLL

SEQ ID NO: 20311 - protein, 1355 aa, unidentified
  REGION 1..1355: note = Cas Enzyme sequence
MKNKKYYLGLDIGSDSVGYAVTDEEYNLLKFHGEPAWGATLFDAPASKAERRGYRTARRRLERRKQRVQLVRELFAEEIAKVDGRFYIRQQESALFREDAGDAYSIFNDPDYTDREYYAEYPTIHHLIFELMKNPASHDVRLVYLACAWLVAHRGHFLSNISKDNMDSFRDFNLVYKSFISFFTDNGYDVPWNECDEKELGNILKKKIRVTDKKKELTDLLYGGKKPSSEATEDFPFSRAAIIGLFAGSKVRPKDLFQNSDYENLEGITLDMDDEKFINLSTELGDDYELIAAMRAVYDWTVLADILGNYSCISEAKAAVYEQHRKDLRFLKDFIAKYRPEKYSEVFRAADKDNYVAYAYHTDEVSGSNLKRKDKEAFSKYILGIVKNISPDASDKQNFDDMITRLEDRTFMPKQKDGDNRVIPQQLYAYELDAILKNAAQYLPFLNETDEDGLSVADKISSVFSFRVPYFVGPLNSNSPRAWLARKSGKIYPWNFEKMVDLDASEQNFIEQLTNTCTYIPGEPVLPKDSLLYHKFSVLNEINNLCINEKRISVELKQEIYNNVFMCRRKVTRKQLISYLVANGYVEKGKENTVTGVDININSNLAPQISFKRLIESRVLSEQDVERIIERASYSEDKTRLAAWLKREYPNVNDADRKYICSLRIHDFGRLSRRFLSDVEGVRKETGEVMTVISALWETQYNLMEIVADADRFTFKDELKTIRDDYYSEHPQTLDSRLDDMYVSDAVRRPIHRTLDIIKDVVKAFGEPEKIFVETTRDASGKKKGERTTSRKEQILELYKKCGSEDVRLLQEQLEAMGEAANTKLQSEKLFLYYMQLGRCMYTNQPIKLEALGTKLYDIDHIYPQCFVKDDSIINNKVLVLSEANGAKGNVYPINSDIRKKMHGIWESYKAHGLISEEKFKRLTRTTPFTEEEKYNFINRQLTETSQSTKAVATLLNEFYPDTEIVYSKAGPVSDFRKEFEIYKSRLFNDLHHAVDAYLNIVVGNVYHMKFTRRWFNVNSDYSMKAKTIFTHPVICGGQTVWDGAHMLEKVKMTAAKNNAHITKFATFKNGGLFDQNPISAKEGLTPLKKGLPTEKYGGYNKAGSMFFIPVRYRVGKKTDIIIMPVELLYGKKFLEDAAFAKEYTFDRLGRLLKKTVDEVSFPLGMRPWKVNTVLSLDGFRVCITGGANGGKSIITQTLTQFASSKDWAFYLKKLEEFNKKNSKNPNHIYDEKYDKISAEKNLELYDLYIDKLENSIFSKRVNCPTEILKKGRDKFIALGIKEQTQALLNIHQVFGRISSGCDLSAVGGTPKSAATVSFSSTVSNWKKRYKDVRIIDSSASGLWEKRSCNLLDLL

SEQ ID NO: 20312 - protein, 1355 aa, unidentified
  REGION 1..1355: note = Cas Enzyme sequence
MKNKKYYLGLDIGSDSVGYAVTDEEYNLLKLHGEPAWGATLFDAPASKAERRGYRTARRRLERRKQRVQLVRELFAEEIAKVDGRFYIRQQESALFREDAGDAYSIFNDPDYTDREYYAEYPTIHHLIFELMKNPAPHDVRLVYLACAWLVAHRGHFLSNISKDNMDSFRDFNLVYKSFISFFTDNGYDVPWNECDEKELGNILKNKIRVTDKKKELTDLLYGGKKPSSEATEDFPFSRAAIIGLFAGSKVRPKDLFQNSDYENLEGITLDMDDEKFINLSTELGDDYELIAAMRAVYDWTVLADILGNYSCISEAKAAVYEQHRKDLRFLKDVIAKYRPEKYSEVFRAADKDNYVAYAYHTDEVSGSNLKRKDKEAFSKYILGIVKNISPDASDKQNFDDMITRLEDRTFMPKQKDGDNRVIPQQLYAYELDAILKNAAQYLPFLNETDEDGLSVADKISSVFSFRVPYFVGPLNSNSPRAWLARKSGKIYPWNFEKMVDLDASEQNFIEQLTNTCTYIPGEPVLPKDSLLYHKFSVLNEINNLCINEKRISVELKQEIYNSVFMCRRKVTRKQLISYLVANGYVEKGKENTVTGVDININSNLAPQISFKRLIESRVLSEQDVERIIERASYSEDKTRLAAWLKREYPNVNDADRKYICSLRIHDFGRLSRRFLSGVEGVRKETGEVMTVISALWETQYNLMEIVADADRFTFKDELKTIRDDYYSEHPQTLDSRLDDMYVSDAVRRPIHRTLDIIKDVVKAFGEPEKIFVETTRDASGKKKGERTTSRKEQILELYKKCGSEDVRLLQEQLEAMGEAANTKLQSEKLFLYYMQLGRCMYTNQPIKLEALGTKLYDIDHIYPQCFVKDDSIINNKVLVLSEANGAKGNVYPINSDIRKKMHGIWESYKAHGLISEEKFKRLTRTTPFTEEEKYNFINRQLTETSQSTKAVATLLNEFYPDTEIVYSKAGPVSDFRKEFEIYKSRLFNDLHHAVDAYLNVVVGNVYHMKFTRRWFNVNSDYSMKAKTIFTHPVICGGQTVWDGAHMLEKVKTTAAKNNAHITKFATFKNGGLFDQNPISAKEGLTPLKKGLPTEKYGGYNKAGSMFFIPVRYRVGKKMDIIIMPVELLYGKKFLEDAAFAKEYTFDRLGRILKKTVDEVSFPLGMRPWKVNTVLSLDGFRVCITGGAGGGTKLIAQTLTQFAASKDWAFYLKKLEEFNKKNSKNPNHIYDEKYDKISAEKNLELYDLYIDKLEKSIFSKRVNCPTEILKKGRDKFIALGIKEQAQALLNIHQVFGRISSGCDLSAVGGTPKSAATVSFSSTVSNWKKRYKDVRIIDSSASGLWEKRSCNLLDLL

SEQ ID NO: 20313 - protein, 1355 aa, unidentified
  REGION 1..1355: note = Cas Enzyme sequence
MKNKKYYLGLDIGSDSVGYAVTDEEYNLLKFHGEPAWGATLFDAPASKAERRGYRTARRRLERRKQRVQLVRELFAEEIAKVDGRFYIRQQESALFREDAGDAYSIFNDPDYTDREYYAEYPTIHHLIFELMKNPAPHDVRLVYLACAWLVAHRGHFLSNISKDNMDSFRDFNLVYKSFISFFTDNGYDVPWNECDEKELGNIMKKKIRVTDKKKELTDLLYGGKKPSSEATEDFPFSRAAIIGLFAGSKVRPKDLFQNSDYENLEGITLDMDDEKFINLSTELGDDYELIADMRAVYDWTVLADILGNYSCISEAKAAVYEQHRKDLRFLKDVIAKYRPEKYSEVFRAADKDNYVAYAYHTDEVSGSNLKRKDKEAFSKYILGIVKNISPDASDKQNFDDMIMRLEDRTFMPKQKDGDNRVIPQQLYAYELDAILKNAAQYLPFLIETDEDGLSVADKISSVFSFRVPYFVGPLNSNSPRAWLARKSGKIYPWNFEKMVDLDVSEQNFIEQLTNTCTYIPGEPVLPKDSLLYHKFSVLNEINNLCINEKRISVELKQEIYNSVFMCRRKVTRKQLISYLVANGYVEKGKENTVTGVDININSNLAPQISFKRLIESRVLSEQDVERIIERASYSEDKTRLAAWLKREYPNVNDADRKYICSLRIHDFGRLSRRFLSGVEGVRKETGEVMTVISALWETQYNLMEIVADADRFTFKDELKTIRDDYYSEHPQTLDSRLDDMYVSDAVRRPIHRTLDIIKDVVKAFGEPEKIFVETTRDASGKKKGERTTSRKEQILELYKKCGSEDVRLLQEQLEAMGEAANTKLQSEKLFLYYMQLGRCMYTNQPIKLEALGTKLYDIDHIYPQCFVKDDSIINNKVLVLSEANGAKGNVYPINSDIRKNMHGIWESYKAHGLISEEKFKRLTRTTPFTEEEKYNFINRQLTETSQSTKAVATLLNEFYPDTEIVYSKAGPVSDFRKEFEIYKSRLFNDLHHAVDAYLNIVVGNVYHMKFTRRWFNVNSDYSMKAKTIFTHPVICGGQTVWDGAHMLEKVKTTAAKNNAHITKFATFKNGGLFDQNPISAKEGLTPLKKGLPTEKYGGYNKAGSMFFIPVRYRVGKKTDIIIMPVELLYGKKFLEDAAFAKEYTFDRLGRLLKKTVDEVSFPLGMRPWKVNTMLSLDGFRVCITGGAGGGTKLIAQTLTQFAASKDWAFYLKKLEEFNKKNSKNPNYIYDEKYDKISAEKNLELYDLYIDKLENSIFSKRVNCPTELLKKGRDKFIALGIKKQVQTLLNIHQVFGRISSGCDLSEVDGTPKSAATVNFSSTVSNWKKRYKDVRIIDSSASGLWEKRSCNLLDLL

SEQ ID NO: 20314 - protein, 1355 aa, unidentified
  REGION 1..1355: note = Cas Enzyme sequence
MKNKKYYLGLDIGSDSVGYAVTDEEYNLLKFHGEPAWGATLFDAPASKAERRGYRTARRRLERRKQRVQLVRELFAEEIAKVDGRFYIRQQESALFREDAGDAYSIFNDPDYTDREYYAEYPTIHHLIFELMKNPAPHDVRLVYLACAWLVAHRGHFLSNISKDNMDSFRDFNLVYKSFISFFTDNGYDVPWNECDEKELGNILKKKIRVTDKKKELTDLLYGGKKPSSEATEDFPFSRAAIIGLFAGSKVRPKDLFQNSDYENLEGITLDMDDEKFINLSTELGDDYELIADMRAVYDWTVLADILGNYSCISEAKAAVYEQHRKDLRFLKDVIAKYRPEKYSEIFRAADKDNYVAYAYHTDEVSGSNLKRKDKEAFSKYILGIVKNISPDASDKQNFDDMITRLEDRTFMPKQKDGDNRVIPQQLYAYELDAILKNAAQYLPFLNETDEDGLSVADKISSVFSFRVPYFVGPLNSNSPRAWLARKSGKIYPWNFEKMVDLDASEQNFIEQLTNTCTYIPGEPVLPKDSLLYHKFSVLNEINNLCINEKRISVELKQEIYNNVFMCRRKVTRKQLISYLVANGYVEKGKENTVTGVDININSNLAPQISFKRLIESRVLSEQDVERIIERASYSEDKTRLAAWLKREYPNVNDADRKYICSLRIHDFGRLSRRFLSGVEGVRKETGEVMTVISALWETQYNLMEIVADADRFTFKDELKTIRDDYYSEHPQTLDSRLDDMYVSDAVRRLIHRTLDIIKDVVKAFGEPEKIFVETTRDASGKKKGERTTPRKEQILELYKKCGSEDVRLLQEQLEAMGEAANTKLQSEKLFLYYMQLGRCMYTNQPIKLEALGTKLYDIDHIYPQCFVKDDSIINNKVLVLSEANGAKGNVYPINSDIRKNMHGIWESYKAHGLISEEKFKRLTRTTPFTEEEKYNFINRQLTETSQSTKAVATLLNEFYPDTEIVYSKAGPVSDFRKEFEIYKSRLFNDLHHAVDAYLNIVVGNVYHMKFTRRWFNVNSDYSMKAKTIFTHPVICGGQTVWDGTHMLEKVKTTAAKNNAHITKFATFKNGGLFDQNPVSAKEGLTPLKKGLPTEKYGGYNKAGSMFFIPVRYRVGKKTDIIIMPVELLYGKKFLEDAAFAKEYTFDRLGRLLKKTVDEVSFPLGMRPWKVNTMLSLDGFRVCITGGAGGGTKLIAQTLTQFAASKDWAFYLKKLEEFNKKNSKNPNYIYDEKYDKISAEKNLELYDLYIDKLENSIFSKRVNCPTEILKKGRDKFIALGIKEQAQALLNIHQVFGRISSGCDLSAVGGTPKSAATVSFSSTVSNWKKRYKDVRIIDSSASGLWEKRSCNLLDLL

SEQ ID NO: 20315 - protein, 1355 aa, unidentified
  REGION 1..1355: note = Cas Enzyme sequence
MKNKKYYLGLDIGSDSVGYAVTDEEYNLLKFHGEPAWGATLFDAPASKAERRGYRTARRRLERRKQRVQLVRELFAEEIAKVDGRFYIRQQESALFREDAGDAYSIFNDPDYTDREYYAEYPTIHHLIFELMKNPAPHDVRLVYLACAWLVAHRGHFLSNISKDNMDSFRDFNLVYKSFISFFTDNGYDVPWNECDEKELGNILKKKMRVTDKKKELTDLLYGGKKPSSEATEDFPFSRAAIIGLFAGSKVRPKDLFQNSDYENLEGITLDMDDEKFINLSTELGDDYELIADMRAVYDWTVLADILGNYSCISEAKAAVYEQHRKDLRFLKDVIAKYRPEKYSEVFRAADKDNYVAYAYHTDEVSGSNLKRKDKEAFSKYILGIVKNISPDASDKQNFDDMITRLEDRTFMPKQKDGDNRVIPQQLYAYELDAILKNAAQYLLFLNETDEDGLSVADKISSVFSFRVPYFVGPLNSNSPRAWLARKSGKIYPWNFEKMVDLDASEQNFIEQLTNTCTYIPGEPVLPKDSLLYHKFSVLNEINNLCINEKRISVELKQEIYNNVFMCRRKVTRKQLISYLVANGYVEKGKEDTVTGVDININSNLAPQISFKRLIESRVLSEQDVERIIERASYSEDKTRLAAWLKREYPNVNDADRKYICSLRIHDFGRLSRRFLSGVEGVRKETGEVMTVISALWETQYNLMEIVADADRFTFKDELKTIRDDYYSEHPQTLDSRLDDMYVSDAVRRPIHRTLDIIKDVVKAFGEPEKIFVETTRDASGKKKGERTTPRKEQILELYKKCGSEDVRLLQEQLEAMGEAANTKLQSEKLFLYYMQLGRCMYTNQPIKLEALGTKLYDIDHIYPQCFVKDDSIINNEVLVLSEANGAKGNVYPINSDIRKKMHGIWESYKAHGLISEEKFKRLTRTTPFTEEEKYNFINRQLTETSQSTKAVATLLNEFYPDTEIVYSKAGPVSDFRKEFEIYKSRLFNDLHHAVDAYLNIVVGNVYHMKFTRRWFNVNSDYSMKAKTIFTHPVICGGQTVWDGAHMLEKVKTTAAKNNAHITKFATFKNGGLFDQNPISAKEGLTPLKKGLPTEKYGGYNKAGSMFFIPVRYRVGKKTDIIIMPVELLCGKKFLEDAAFAKEYTFDRLGRILKKTVDEVSFPLGMRPWKVNTMLSLDGFRVCITGGANGGKNIITQTLTQFASSKDWAFYLKKLEEFNKKNSKNPNYIYDEKYDKISAEKNLELYDLYIDKLENSIFSKRVNCPTEILKKGRDKFIALGIKEQAQALLNIHQVFGRISSGCDLSAVGGTSRSAATIGLSSMVSNWKKRYKDVRIIDSSASGLWEKRSCNLLDLL

SEQ ID NO: 20316 - protein, 1355 aa, unidentified
  REGION 1..1355: note = Cas Enzyme sequence
MKNKKYYLGLDIGSDSVGYAVTDEEYNLLKFHGEPAWGATLFDAPASKAERRGYRTARRRLERRKQRVQLVRELFAEEIAQVDVRFYIRQQESALFREDAGDAYSIFNDPDYTDREYYAEYPTMHHLIFELMKNPAPHDVRLVYLACAWLVAHRGHFLSNISKDNMDSFRDFNLVYKSFISFFTDNGYDVPWNECDEKELGNILKKKIRVTDKKKELIDLLYGGKKTSSEATEDFPFSRAAIIGLFAGSKVRPKDLFQNSDYENLEGITLDMDDEKFINLSTELGDDYELIAAMRAVYDWTVLADILGNYSCISEAKAAVYEQHRKDLRFLKDVIAKYRPEKYSEVFRAADKDNYVAYAYHTDEVSGSNLKRKDKEAFSKYILGIVKNISPDASDKQNFDDMITRLEDRTFMPKQKDGDNRVIPQQLYAYELDAILKNAAQYLPFLTETDEDGLSVADKISSVFSFRVPYFVGPLNSNSPRAWLARKSGKIYPWNFEKMVDLDASEQNFIEQLTNTCTYIPGEPVLPKDSLLYHKFSVLNEINNLCINEKRISVELKQEIYNNVFMCRRKVTRKQLISYLVANGYVEKGKENTVTGVDININSNLAPQISFKRLIESRVLSEQDVERIIERASYSEDKTRLAAWLKREYPNVNDADRKYICSLRIHDFGRLSRRFLSGVEGVRKETGEVMTVISALWETQYNLMEIVADADRFTFKDELKTIRDDYYSEHPQTLDSRLDDMYVSDAVRRPIHRTLDIIKDVVKAFGEPEKIFVETTRDASGKKKGERTTSRKEQILELYKKCGSEDVRLLQEQLEAMGEAANTKLQSEKLFLYYMQLGRCMYTNQPIKLEALGTKLYDIDHIYPQCFVKDDSIINNKVLVLSEANGAKGNVYPINSDIRKKMHGIWESYKAHGLISEEKFKRLTRTTPFTEEEKYNFINRQLTETSQSTKAVATLLNEFYPDTEIVYSKAGPVSDFRKEFEIYKSRLFNDLHHAVDAYLNIVVGNVYHMKFTRRWFNVNSDYSMKAKTIFTHPVICGGQTVWDGAHMLEKVKMTAAKNNAHITKFATFKNGGLFDQNPISAKEGLTPLKKGLPTEKYGGYNKAGSMFFIPVRYRVGKKTDIIIMPVELLYGKKFLEDAAFAKEYTFDRLGRLLKKTVDEVSFPLGMRPWKVNTVLSLDGFRVCITGGANGGKSIITQTLTQFASSKDWAFYLKKLEEFNKKNSKNPNHIYDEKYDKISAEKNLELYDLYIDKLENSIFSKRVNCPTEILKKGRDKFIALGIKEQTQALLNIHQVFGRISSGCDLSAVGGTPKSAATVSFSSTVSNWKKRYKDVRIIDSSASGLWEKRSCNLLDLL

SEQ ID NO: 20317 - protein, 1355 aa, unidentified
  REGION 1..1355: note = Cas Enzyme sequence
MKNKKYYLGLDIGSDSVGYAVTDEEYNLLKFHGEPAWGATLFDAPASKAERRGYRTARRRLERRKQRVQLVRELFAEEIAKVDGRFYIRQQESALFREDAGDAYSIFNDPDYTDREYYAEYPTIHHLIFELMKNPASHDVRLVYLACAWLVAHRGHFLSNISKDNMDSFRNFNLVYKSFISFFTDNGYDVPWNECDEKELGNILKKKIRVTDKKKELTDLLYSGKKTSSEATEDFPFSRAAIIGLFAGSKVRPKDLFQNSDYENLEGITLDMDDEKFINLSTELGDDYELIADMRAVYDWTVLADILGNYSCISEAKAAVYEQHRKDLRFLKDVIAKYRPEKYSEVFRAADKDNYVAYAYHTDEVSGSNLKRKDKEAFSKYILGIVKNISPDASDKQNFDDMITRLEDRTFMPKQKDGDNRVIPQQLYAYELDAILKNAAQYLLFLNETDEDGLSVADKISSVFSFRVPYFVGPLNSNSPRAWLARKSGKIYPWNFEKMVDLDASEQNFIEQLTNTCTYIPGEPVLPKDSLLYHKFSVLNEINNLCINEKRISVELKQEIYNNVFMCRRKVTRKQLISYLVANGYVEKGKENTVTGVDININSNLAPQISFKRLIESRVLSEQDVERIIERASYSEDKTRLAAWLKREYPNVNDADRKYICSLRIHDFGRLSRRFISGVEGVRKETGEVMTVISALWETQYNLMEIVADADRFTFKDELKTIRDDYYSEHPQTLDSRLDDMYVSDAVRRPIHRTLDIIKDVVKAFGEPEKIFVETTRDASGKKKGERTTSRKEQILELYKKCGSEDVRLLQEQLEAMGEAANTKLQSEKLFLYYMQLGRCMYTNQPIKLEALGTKLYDIDHIYPQCFVKDDSIINNKVLVLSEANGAKGNVYPINSDIRKKMHGIWESYKAHGLISEEKFKRLTRTTPFTEEEKYNFINRQLTETSQSTKAVATLLNEFYPDTEIVYSKAGPVSDFRKEFEIYKSRLFNDLHHAVDAYLNIVVGNVYHMKFTRRWFNVNSNYSMKAKTIFTHPVICGGQTVWDGAHMLEKVKTTAAKNNAHITKFATFKNGGLFDQNPISAKEGLTPLKKGLPTEKYGGYNKAGSMFFIPVRYRVGKKTDIIIMPVELLYGKKFLEDAAFAKEYTFDRLGRLLKKTVDEVSFPLGMRPWKVNTVLSLDGFRVCITGGANGGKSIITQTLTQFAASKDWAFYLKKLEEFNKKNSKNPNYIYDEKYDKISAEKNLELYDLYIDKLENSIFSKRVNCPTEILKKGRDKFIALGIKEQAQALLNIHQVFGRISSGCDLSAVGGTSRSAATVSFSSTVSNWKKRYKDVRIIDSSASGLWEKRSCNLLDLL

SEQ ID NO: 20318 - protein, 1353 aa, unidentified
  REGION 1..1353: note = Cas Enzyme sequence
MKRGNYYLGLDIGTDSVGYAVTDESYNLLKYNGSFAWGTTVFDAVSSNAERRSFRSARRRLDRRQQRVNLLQDLFAREIANVDENFYKRIRGSQLYREDVGDKYILFNDTDYTDTDYFAEYPTIHHLINELVKNPAPHDVRLVYLACSWLVAHRGHFLNNMEKGNISDVKDFEKVYKKFLEYFTETRKCAAPWECDDIEAFGKTVKAKKNVTAKNKELIEVLLNGQKPSKETTEEFPFRQDCIIKLLAGGTCKLSDLFACEEYSDYGSISLGMDEDTMKEISSKIGDDYELISAMRGIYDWSLLVDILGEYSTISEAKAAVYEQHKKDLGTLKAFIKEYKPEKYNEVFREIGKDNYAAYSYHTDEPNSAGLKRKNVEDFSKYILGIINKIEPKEEDIEKFNDMKSRLELRTFLPKQRNTNNRVIPHQLYWHELNEILKNASEYLDFLNKKDEDGISVKDKILSVFMFKIPYFVGPLNDKSPNAWIVRKTGRIYPWNFESMVDLDASEDAFIRKMTNRCTYLPDEYVLPKDSLCYHKFMVLNEINNLKINGEKISVELKQRIYNELFLQKKKVTRKRIMDFLICNGYLENGSEDLVSGIDINIKSNLEPQIAFRRLFENNILSEAEAERIIERSSYAEDKLRFLKWLKREFPQLNDDDREYIGRLKFKDFGRLSRKFLCDFEGTDRKTGEVFTILEALWSTQNNLMELLSNSFTFAERIEEYQKEYYSENPKTLNDRLNEMYISDSVKRPIYRTLDIVKDVVKAFGVPKKIFVEMTRGGSADQKGKRTKSRKQQILDLYEKCDEEDVRELKQQLESMGELADNKLQGDKLFLYYMQLGKCMYSGEPIKLEELGTKSYDIDHIYPQAYVKDDSIINNKVLVLSELNGEKGDIYPIKSNIRQKMFGWWKHLKDKELISGEKYKRLTRSTLFSDDEKLGFINRQLTETSQSTKAVATLLGEKYDTEIVYCKARLTSEFRQEFDLLKSRTFNDLHHAKDAYLNIVCGNVYNMKFTKKWFNIDSQYNIKTKALFSHPVICGEKTVWDGEPMLAKVKATVAKNNAHFTKYKFFKRGGLFDQNPVHAGADKTPLKKGLPTEKYGGYNKAGVMFFIPVKYTAGKKTEIIIMSVELLVGKKFLADKNFALEYSYSRLQRILGKPVDAISFPMGMTPWKVNTVLSLDGFRVCITGIGSGGKCLSAQPIMQFSDDKFWEYYLKKLEAVSEKIARNPKYVYSEYFDKVSTEKNIELYDLYLNKLKSTIYSKRINNPVAIVESGREKFVSLNIRDQVLTLLNLHTVFGRMTGGCDLSCIGGSKKTAATVNFSSTVSNWKKYYSDVRIIDQSASGLWEKKSKNLLDLL

SEQ ID NO: 20319 - protein, 1353 aa, unidentified
  REGION 1..1353: note = Cas Enzyme sequence
MKRGNYYLGLDIGTDSVGYAVTDESYNLLKYNGSFAWGTTVFDAVSSNAERRSFRSARRRLDRRQQRVNLLQDLFARGIAKVDENFYKRIRESQLYREDVGDKYILFNDTNYTDTDYFAEYPTIHHLINELVKNPAPHDVRLVYLACSWLVAHRGHFLNNMEKGSISDVKDFEKVYKKFLEYFTETRKCAAPWECDDIEAFGKAVKAKKNVTAKNKELIEVLLNGQKPSKETTEEFPFRQDCIIKLLAGGTCKLSDLFACEEYSDYGSISLGMDEDTMKEISSKIGDDYELISAMRGIYDWSLLVDILGEYSTISEAKVAVYEQHKKDLGTLKAFIKEYKPEIYNEVFREIGKDNYAAYSYHTDEPNLAELKRKNVEDFSKYILGIINKIEPKEEDIEKFNDMKSRLELRTFLPKQRNTNNRVIPHQLYWHELNEILKNASEYLDFLNEKDEDGIIVKDKILSVFMFKIPYFVGPLNDKSPNAWIVRKAGRIYPWNFESMVDLDASEDAFIRKMTNRCTYLPDEYVLPKDSLCYHKFAVLNEINNLKINGEKISVELKQRIYNELFLQKKKVTRKRIMDFLICNGYLEKGSEDLVSGIDINIKSNLEPQIAFRRLFENNILSESEAERIIERSSYAEDKLRFLKWLKREFPQLNDDDREYIGRLKFKDFGRLSRKFLCDFEGADRKTGEVFTILEALWSTQNNLMELLSNSFTFAERIEEYQKEYYSENPKTLNDRLNEMYISDSVKRPIYRTLDIVKDVVKAFGVPKKIFVEMTRGGSADQKGKRTKSRKQQILDLYEKCDEEDVRELKQQLESMGELADNKLQGDKLFLYYMQLGKCMYSGEPIKLEELGTKSYDIDHIYPQAYVKDDSIINNKVLVLSELNGEKGDIYPIKSNIRQKMFGWWKHLKDKELISGEKYKRLTRSTPFSDDEKLGFINRQLTETSQSTKAVATLLGEKYDTEIVYCKARLTSEFRQEFDLLKSRTFNDLHHAKDAYLNIVCGNVYNMKFTKKWFNIDSQYNIKTKALFSHPVICGEKTVWDGEPMLAKVKATVAKNNAHFTKYKFFKRGGLFDQNPVHAGADKTPLKKGLPTEKYGGYNKAGVMFFIPVKYTAGKKTEIIIMSVELLVGKKFLADKNFALEYSYSRLQRILGKPVDSISFPMGMTPWKVNTVLSLDGFRVCITGIGSGGKCLSALPIMQFSDDKFWEYYLKKLEAVSEKIARNPKYVYSEYFDKVSTEKNIELYDLYLNKLKSTIYSKRINNPVAIVESGREKFVSLNIRDQVLTLLNLHTVFGRMTGGCDLSCIGGSKKTAATVSFSSTVSNWKKYYSDVRIIDQSASGLWEKKSENLLDLL

SEQ ID NO: 20320 - protein, 1354 aa, unidentified
  REGION 1..1354: note = Cas Enzyme sequence
MQGEKIYLGLDIGSDSVGYAVTDGEYNILKYHGKPAWGVTLFDAAAPKANRRSFRTARRRLDRRQQRVQLIRELFAGEIAKVDPKFYIRLQAAALYREEAGEAYTIFNDVGYTDREYHEDYPTIHHLIYELMTDSKPHDVRLVYLACAWLVAHRGHFLSNVSKDNLASIKDFSIVYEGFMNYFSDNEYAFPWRECDAAELGKKLKVKSTVTAKKKALVKFLYGTEKPSKEASEDFPFSREAIVGLLAGGKVKPKELFQNDEYAEMESISLGMDDEKYDASAAALGDDFELLSLMRSIYDWAVLADILADGSCISEAKVAVYERHKADLRLLKDLIAQYRPEKYREVFRDTDKSNYAAYVYHTDEKECDKFKKKNKEDFSKYILGIVKGIVPKDEDKEKFDDMLARLEACTFMPKQKDSDNRVIPQQLYWYELDRILKNAAGYLPFLAEADEDGLAAADKIESVFSFRVPYFVGPLNPNSDRAWLERKAGKIYPWNFEKMVDLDASEKKFIDCMTNTCSHLPGEPVLPKDSLLYHKFTVLNEINNLRINGERISVELKQRIYNELFLAKKKVTKKSLLEYLIRENIIANGDEDTVSGIDININSNLVPQIAFKNLLGSSVITEADAEEIIKRLTYSEDKARFKKWLEKEYPNISETDRKYICSLKFKDFGRLSRTLLCGMEGVCKETGEVMTVIGALWETQYNLMEIIADNSRFTFKAEIEAFKADYYCKNPKTLQARLDEMYISNSVRRPIYRTLAIVKDVEKAFGKPDKIFIEVTRGATDEQKGKRTKTRKQQILELYDKCSCEDVPMLREQIESMGDLADNKLQSDRLFLYYMQLGRCLYTGKAIKLEELGSGLYNIEHIYPQAYIKDDSIINNEVLVDSNINGIKDDVYPISSDIRRNMAGFWHYLKDHEFISEEKYKRLTRATGFTAEEKYGFINRQLTETSQSTKAVANLLHECYPDADIVYSKARLVSDFRQEFDLLKSRLFNDLHHAVDAYLNIVVGNVYKMKFNRSWFSVDSNYSVKTRTIFTHPLVCAGETVWDGEKMLAKVKANAVKNNANVTKYSFMRHGGFFDQNPLPASEGLTPLKKDLPTEKYGGYNKPAVMFFIPVRYKAGRKSEIIIMSVELLYGKEFLADAEFARTYTFDRLRRILGKPVDEVSFPLGMRPWKINTMLSLDGLRVWVTANNSGGKKIKVEIATQFSANGFWQSYLKKLEKFAEKTAKNPEYHFSEKYDKISAEKNLELYDIYIDKLENSIFKKRINDPLELLKKSRDIFIELDIKAQVKQLLDIHRVFRRNSGGCNFKEIGGDSDAASTKHSTAISNWKKYYKDVRIIDPSASGLWERTSGNLLELL

SEQ ID NO: 20321 - protein, 1354 aa, unidentified
  REGION 1..1354: note = Cas Enzyme sequence
MQDEKIYLGLDIGSDSVGYAVTDGEYNILKYHGKPAWGVTLFDAAAPKANRRSFRTARRRLDRRQQRVQLIRELFAGEIAKVDPKFYIRLQAAALYREEAGEAYTIFNDVGYTDREYHEDYPTIHHLIYELMTDSKPHDVRLVYLACAWLVAHRGHFLSNVSKDNLASIKDFSIVYEGFMNYFSDNEYAFPWRECDAAELGKKLKVKSTVTAKKKALVKFLYGTEKPSKEASEDFPFSREAIVGLLAGGKVKPKELFQNDEYAEMESISLGMDDEKYDASAAALGDDFELLSLMRSIYDWAVLADILADGSCISEAKVAVYERHKADLRLLKDLIAQYRPEKYREVFRDTDKSNYAAYVYHTDEKECDKFKKKNKEDFSKYILGIVKGIVPKDEDKEKFDDMLARLEACTFMPKQKDSDNRVIPQQLYWYELDRILKNAAGYLPFLAEADEDGLAAADKIESVFSFRVPYFVGPLNPNSDRAWLERKAGKIYPWNFEKMVDLDASEKKFIDCMTNTCSHLPGEPVLPKDSLLYHKFTVLNEINNLRINGERISVELKQRIYNELFLAKKKVTKKSLLEYLIRENIIANGDEDTVSGIDININSNLVPQIAFKNLLGSSVITEADAEEIIKRLTYSEDKARFKKWLEKEYPNISETDRKYICSLKFKDFGRLSRTLLCGMEGVCKETGEVMTVIGALWETQYNLMEIIADNSRFTFKAEIEAFKADYYCKNPKTLQARLDEMYISNSVRRPIYRTLAIVKDVEKAFGKPDKIFIEVTRGATDEQKGKRTKTRKQQILELYDKCSCEDVPMLREQIESMGDLADNKLQSDRLFLYYMQLGRCLYTGKAIKLEELGSGLYNIEHIYPQAYIKDDSIINNEVLVDSNINGIKDDVYPISSDIRRNMAGFWHYLKDHEFISEEKYKRLTRATGFTAEEKYGFINRQLTETSQSTKAVANLLHECYPDADIVYSKARLVSDFRQEFDLLKSRLFNDLHHAVDAYLNIVVGNVYKMKFNRSWFSVDSNYSVKTRTIFTHPLVCAGETVWDGEKMLAKVKANAVKNNANVTKYSFMRHGGFFDQNPLPASEGLTPLKKDLPTEKYGGYNKPAVMFFIPVRYKAGRKSEIIIMSVELLYGKEFLADAEFARTYTFDRLRRILGKPVDEVSFPLGMRPWKINTMLSLDGLRVWVTANNSGGKKIKVEIATQFSANGFWQSYLKKLEKFAEKTAKNPEYHFSEKYDKISAEKNLELYDIYIDKLENSIFKKRINDPLELLKKSRDIFIELDIKAQVKQLLDIHRVFRRNSGGCNFKEIGGDSDAASTKHSTAISNWKKYYKDVRIIDPSASGLWERTSGNLLELL

SEQ ID NO: 20322 - protein, 1375 aa, unidentified
  REGION 1..1375: note = Cas Enzyme sequence
MKKRTIEEYYLGLDIGTNSVGYAVTDPQYKILKYHGEPMWGSHVFEEGSQCAERRGFRTARRRLNRRQQRVRFVQEIFAHEIEKVDSRFFLRIKESALYREDANGNDPFILFNDNGYTDKEYYLKYPTIHHLIMDLIDDENPHDVRLVYLAVAWLVAHRGHFLSDVEKTNVEKVLDFSTSYNAFKEMYHSIGQDIPWVDEEETFKNILLKKCGVKDKEKAFKDELFKNNSNKKTSEGTEENDILGTNSVITLLSGGTVTADKLFVQAEFQDKISISFKKNEDEFEQILTELDEYAEYLLKIRAVYDWAVLYEASQGQVYISKAKIEVYEQHKKDLAGLKVFIRKYCPDKYNEIFRDAGDNNYVAYSYNFNSLNLDEGEKRPKRKALQEDFCTYIRKIVKDIKCEMEDKEFYEDMGKRLELGTFMPKQVNTDNRVLPYQLYYFELARLLEKVSSYLPFINEKDSEGYITKEKLLSIMEFRIPYYVGPLHRDHKENNSFAWIKRKAQGRIYPWNYEEKIDLDASEQAFIDKMTNQCSYLPGEDVLPKYSLLYCKYEVLNEINNIKINGQRITVDCKKEIFGLFKRNKKVTVKRIRDFLVSNNYMSDSDEITGLDISVKSSLKSYHDFRRMLENKTVNEEDVEEIIKRLTYTEDKKRINKYLEENYPNISGEDRRYISKLKYKDFGRLSEKFLTGIKGVVKETGEILSVIQIMWETNDNLMQIIFSDHYTIKDALEREDYYSEHPASVEQILSDMYVSNAVKRPIYRTLDIIGDVTKACQNAPRKIFVEMARGGGEKGKRTVSRRDKIKELYKHMDKQEVREISKEISELLGELDKKTDNELQSEVLFLYFMQLGICMYSGDPIDITKLKSDAYVNVDHIYPQAYVKDDSLNNKVLVKSKLNGEKSDNYPINKDIRDKMSSIWKHYRKEGLISEEKYNRLTRKTPFTDEEKQGFVNRQLVETRQSTKAVAEILKTMFPETEVVYVKAGLASEFRHAFGIIKSRQINDLHHAKDAYLNVVCGNVYHSTFTKKFFQNNLKYSIKTETVYKRKIEVDGKPIWNGQESLSFVIKMLGKNNIHYTRYAFCRKGGFFDQMPVTAKEGLVSRKKNLPSEKYGGYNKPTASYFIMAKYTEKVKKEKQDIMIVPVELMVGEKVLNDKNFAVGYIQQQIAQISNRKVEEIVNVSFPLGLRPLKVNTRFSFDGFEACVTGKDSGGKQISMSSLTSLKVSQANEKYIKKVERFAEKKEVNNKITLDEKYDEINENLNFEIYRMLQQKITKSCFGVAFGNLSNVFEKGENKFVALKTDMQCEVLLNIINVFKTGRSGTCNLKSIGGVEKAASYRISAKVSNWKKNYTCVKIIDESASGIFRKESENILEWL

SEQ ID NO: 20323 - protein, 1359 aa, unidentified
  REGION 1..1359: note = Cas Enzyme sequence
MSNEKLFVGLDVGSDSVGWAATNENYDILRLKGKTAWGASIFDEAQSAAQRRTFRCSGRRYERRKYRLSLLNDMFDSHLKTIDPTFLLRLSESAYTFEDKSQGANQGSLLFLDREKEKDFYTIYPTIWHLRSHLIEGDPKAFSDLRNVYLALHHIIKYRGNFLSESSLDATKFDETVFDRINDFFRSLLAEETESDESDVDFVWIGKDGRQDFLNCLLDKRTNKTEKKKTLKKLLGTNETADPYTDMAIALVCGGVFDLSKLGDGFEKNKIAFGKDFDEKEEEYRGYLGTSFELVEEIKAIYDYVELHEILNGEKLLSKAFANLYDAHKIQLHGDKTKGLSGLKNLLIGIDRKQGNKTPESRFYYKVFKDPNLEKNYAAFVHVGTTKKRPTIHEFNAFVLDILKSNSADVADQKSLLMLENLAENDELLQTIAYRSTSVIPHQLHEKELGLILDQCQKFYPWLFEMKRKILDLFLFRIPYYFGPLDSRSQNSSVVRNSNVTITPWNIDAVVDKDQTRAKFMGSLTNRCTYLREENVLPKQSLLFEEYEILNKVNGLKVNGLFLDKDIKGKLVTALLAKSKTTFSGLKKLLLWFNPNLKKDGVSVSGLNEKDDFVASSHACLAKAFDLTKDYATAERIIFLATIFCDSKIETDRAIRKEFPALSEEQRKAVGSLVCKGWAPFSRKLLTGLKHTDENGVVMSILDVLREENLTFMAVLHDQRFGFEELITEENRKAFGERPTFEVVKEIFESIPPKMQRSTEQAIRIVDDVVKASKRKPNRIFIEVTRNEDEKKKNQLTISRKKELEAFLKGLFKEKAEGIADRAKHVYDELEKRDVSDLKGKHLYLYFKQNGLDLYTGRPIDIGDVLDATKYDTDHIVPQSVIKDDSLDNLALVNREANQRLKGKRYPLPPEIRNNQDVLRVWKILKEKKQLSDKKFNNLMRTTPITDEEIATFVSSQINVVNHSNIAIRDIFAIKYPQAKLVFSKAQYPSHIRQTYSIPKLRHLNDCHHAVDAYLNVVAGNILYEQFGDLRLIKARNSMSEEEREQSFNMERTLERILGLNKLGEKVKNNCYRHDFLLTYRHLYQDSSFYDMTIYPVGAKSGLVPLHTKKGDPRSNVSKYGGYNGLATEYFVIGTKKNGKRVLVSVPHLYASLYKKMAELSAAVAALQGEPGLQLDTSHKIPSNQKVLINGCYYLLCPFNESIVTLKPIVPLFFPVEESLYLLRLQKLLLDDPLFKNLESPEFSFYSDKKKEHKQSVSSQKNVEILQEIIKDAESKKYDFCPMICAIRRFDVSGFAQKKMCDQAVDLFSLISLFGRKSLSLCKNHMNNYFSKAKNAFFSENVISIDESPSGLFEQRRIL

SEQ ID NO: 20324 - protein, 1361 aa, unidentified
  REGION 1..1361: note = Cas Enzyme sequence
MIKQEYYLGLDCGTDSIGYAVTDEAYALLKNKGEPMIGVMTFDEPYSAQERRANRTGRRRLHRRQQRVQLLQELFAPAIAARDPDFFQRLRESALWRQDVTTSATGGVFFNDDDFTDREYHRMYPTIHHLICELMESEAPHDVRLVYLACAWLVAHRGHFLSAISEDNLESATDIRGVYADFMNWFEAEKPWECEAEAFGSVLKARVRIRDKEAQLNELLFNGAKNPPVLAFDAEDPDAPVLSRAAMVKLLSGGKVKASDLFLHRAEEYAEVGSISLGGKEEDLAMALSRLGEDAELVLRLKALFDWAVLADILRNEPYISRAKVLVYDRHREDLARLKAFIRKYLPARYDEVFNASGGVNYAAYSRHAPTGGTAPKYVSKEDFCDYLRKLVAGVSVEEEDLPAYEDMTARLEACAFLPKQRDRDNRVIPYQLYAYELRMILARAERYLPFLAQRDADGLSVSDKIISIFKFRIPYYVGPLNQNSSYAWLERKAERIYPWNFEKIVDLDASEDAFIRRMTGRCTYLPSEYVLPKNALCYARFNVLNEINLLKINSVPITVAQKQAIYTQLFERRSRVTFKALQSFCIAEGYMKPGDTISGIDKEGIKSSLRPQQAFARLLRRGDLTEAQAEQIVERITCTEERPRLHRWLCRTFPQLAAEDIDYLSRLKFSDFGRLSRRFLCELEGMCRETGEVFTVLEAMWETNCTLMELLSDRFTFAERVREEAQAYYAEHPRTLEARMDDLYLSNGARRPIYRTLEIVKDVVHAAGGPPKKIFVEMARGGTADQKGKRTKSRKEQIREYYKRFAREEVRDLLSLLDARDENELQSEKLYLYFMQLGRCMYSGEPIDLQHLSDRKFYDVDHIFPQCRVKDDSVLNNKVLCLSVLNGQKGDVYPIAPEIRQRMGGFWAALHGKGLITDEKYRRLTRTTPFTDEELMGFIQRQLVETRQSTKAIATILKERYPDTQIVYVKAGLVSEFRQEFGMLKSRILNDLHHAKDAYLNIVVGNVYYERFNKNYFRLNETYSMKTRELFTHSVWSGGARVWRGGADIGLVREVVSRNHIHVTRFAFCRRGALFDQQPLRAQPDGGDLIPRKANLPVERYGGYRKPTATFFALARFTAGRKRELMVVPIDLMAEADFRRDDECALAVVRAAVEKIVGKPVDAVELPLGMRVLKVNTVFSLDGFRVALSGKASGGKLLLISPLMPLWLDARWERYVKRIESFQNKRSKRPGLSLQPAFDRLTPEENLLLYDLLRGKLAAWPYSKRPGTEAMRRTLEERREAFSALPPEAQVALLAALLGAFGRSGQGVDLTPIGGVSKAGVPTLSSALSNWKKLYADVRIVDPSPAGLFERASVNLLTLL

SEQ ID NO: 20325 - protein, 973 aa, unidentified
  REGION 1..973: note = Cas Enzyme sequence
LERETFLPKQLTFANGVIPNQLHEREVRKILENASVTLPFLSEVGADGISNQEKIIRLFTFRLPYFIGPVSRNIGREDYKGNGWAVRREGSENDVVYPWNIENVIDYDATRAEFITRMVRECSYLAGEKVLPKESMEYQAFMVLNTINNIRINGEKISCALKQDIYHDVFEKKGGRITKKKILEYLNHRGIAVEEKELGGIDTTIGCQLSTYQRFHGVFGENMAKDSVRHMVEDIVFKGTVYGESKAMLKEMLKSTYEDMLTEQQLKQVLGFKYRDWGNLSKAFLELEGCNCETGEAISLIRALWEDADNLNMMELLHSEKYTFSEVLKEKHQSCMKPMTEFTYQDLDEMYFSAPVKRMIWQTLLLIREITEVLGCYPKKIFVEMTRTEEEKKGDAGRKDSREKELLNLYKFIKDDRSWDEEIREAGSSGRLRSKKLYLYYKQMGRDMYTGLPIDLQGLFDDNKYDIDHIYPRHYVKDDSIHNNLVLVDKRKNSRKSDNYPLDEDIRKKETPLWSMLHKKGFLNDEKYRRLTGSRSFTEEQKADFIARQLVETGQATKGVNDLLKEILPEGTRLVYSKAGNVSDFRRDFGFYKSRIINDFHHAHDAYLNIVVGNVYDTKFTTNPLNFIKNERTGYHMGKMFDRDVVRNGYMAWQAPIRDDVTGEVVDAKESLTMVRTMLAKNTPLMTRLTRPQQGKLSEATIYCATDAKEGSYLPLKSKNDRKREDVTKYGGLKSIQNAYCFLVEHEVVEGKGKNKGKTIKVRTLEYLPIYKRAEVEGSADGLLNYCLELGLKNPSIRLKKINPKSLMVVNGFPVCLAGKNQSQFSMENACNLILQPQWTEYIHFIDKSNRICRLSQEITAEKNLMLYDELVKKHTEGIFAKRPNPIGEKLKKDREKFMELSAERQILVLTEILKLSSIGSISSSGANLKDIGESPSTGTIKLNRNISKLEQCKLVHTSVTGLFEKEVDLLTV

SEQ ID NO: 20326 - protein, 1352 aa, unidentified
  REGION 1..1352: note = Cas Enzyme sequence
MEKYYLGLDMGTSTVGWAVTDENYQLLRKKGKDLWGVREFEEAKTSVDRRTHRISRRRRQREQVRIGLLKEYFEDEINKIDPNFYIRLENSKYHLEDKDASVRTANSIFSDDNYTDKDYFAQYPTIFHLRKELIHNPEPHDARLVYLSILNMFKHRGHFLNSGSLEASGRMDEALIRLNQLLEEKLDLSFPWVKPAEVEMIIGDRNLSRSTKAEKLCSLYGIEKKQKQQVAIIKTICGLKGDPSIIFNIELEEKVPVEFSSFGYDEKEPEFQAAVGDEYFEIIEAMKTVYSIGALSSIMKGFEYLSDARVSDYEKHGEDLKLLKSAVRKYAKPQVYDKLFRSEENGSYSAYVNSVSFDKLYATGEKSKHRRNMKGRSRDEFYKNVKNILKSAPENEDVLYIRREIELETFMPKQLTASNGIIPYQVHEKELKVILKNAEGYLPFLLSVDESGLSVSERILKLFSFQIPYYVGPITEDSAKYNGNGWVIRKSEGPVLPWSIDEKIDLKRTSEEFISRMVRRCTYISGEQVMPKSALMYEKYCVLNEINNLKIDGERIPVELKQEIFDGLFKKGKKVTRKKLAEFLLCRGIIVDESQISGIDSTINNSLSSYGKFHAIFGDEIDTDAGIKKVEDIIFWCTVYGDSKHFLVQNIQERFPEVSKEQIKKITGIKFKDWGRFSKEFLQMQGIDKSTGECVSLINALWETQHNLMELLHSEDFTFAEVLAEKQQKKLSSLTELTFENLNDYYFSAPVKKMIWQTFAIIKEISQIMGKEPDNIFIEMTRSEGEKGDAGRKNSRKKELLERYKNIKDDVQNWKQFIEDADEGGLLRSKKMYLYITQMGRDMYTGERINLDELFTQNMYDIDHIYPRHFVKDDSIHNNLVLVRKVDNAHKSDTYPLETGIRNNPKVKELWYMLRSKDLISEEKYRRLSGHKEFTEEQKAEFIARQIVETGQATKGVADLLKETMPQTEIVYAKAGNVSDFRKKYSLLKSRAVNDFHHAHDAYLNIVVGNVYLTKFTKNPRWFIQKEHTSGVDYHLSNMFNKDIIRNGYCAWKASTEGNSGTIETVRAMLSKNTPLITRKSFIGHGGIADQTLYSHRKAKDTGYIPLKASDERLQDVKKYGGFSSVSTAYFFLVEHEVKGKMVRTIETLPIIYADKIEKNSESLNWYCEEVLKLKNHSIRVAKIGMQSLIKLNGYYVHITGKTGNQIILRNAVSLCLKQPWINYIKKIEKYQEQQIMDKDITVERNIALYDELIKKHNSSIFKKRPNAIVDKLCVGRESFIALEITEQVKVLFEILKLTMLGSLTADLTLVKASANTGKMLMSKEISKNEGIALIHQSVTGIFENSIDLLTV

SEQ ID NO: 20327 - protein, 1362 aa, unidentified
  REGION 1..1362: note = Cas Enzyme sequence
MGNKNYYLGLDMGTSSVGWAVTDQNYQLLRKKGKDMWGIREFDEANSAADRRSHRIDRRRRQRQTARIGLLKEYFADAIMAVDENFFIRLENSKYFLEDKDQKLHSKNGIFDDDNYKDVDYYREYPTIFHLRKALLDLKGEGTVYDVRLVYLALLNMFKHRGHFLLSTENEELNTEQIDIAYQELIELVNRDYELGLECKPLEGVISIISDKETGRKRKHEAMVELFGIAKSNKKANEFLKCMCGLSVNANVILNPDAEEKVPLCFHDFSYTDKIPELMEQLGDTSYAVVEQMKIIYDYAILAGTLKGYDYLSLARVDAYEKHSQDLKCLKELYRKYKTPQEYDEMFRSNKDGTYSAYVNSLNSSDSTAESKKYRRNMKGRKAEDLYKTIQKAFKDNTEDSQVQYVFKQIEEEQFLPKQLTGANGIIPNQVHKKEMERILKNAENYLPFLKETDESELTVSERILRLFSFQIPYYVGPLGKHSKTGWAVRSEEGSILPWNIEEKLDMKATSEKFIEHLIRSCTYISGEKVMPKASLAYERYCVLNEINNIRIDGERIETELKQRLYKECFCKGKRITRKQLCKFLEAQGAIQSAEQVTGIDITINNSLSSYGKMYAIFGEKLKEDKYRDIAEDIIYWGTIFADSRERFQSHLAKYVEQDILTESDVKRISGYKFKDWGRFSKALLELQGCDKSTGELISISQAMWENSLNFMELVNSDAFTFKEALEEKKKRAVSSLADFKYEDLEDYYFSSPVKRMVWQTILVVREIEQVMGCTPRRVFVEMTRNDEEKGDRGRKASRGNQLLEAYKNIKNTEIHNWKEEISAADSSGKLRSKKLYLYYMQMGRDMYTGEEIDLARLFDDNLYDIDHIYPRHYVKDDSIINNLVLVNKAANEHLKKDLYPIPQQIVANPKVHELWSVLHRSKLISDEKYSRLMSRTPFTEKQMGDFIARQLVETSQGTKGVAELLKQLMSGMGTEVVYAKASNVSDFRNKNGFIKSRLVNDFHHAHDAYLNIVVGNVYYTKFTKNPWNFIQKDYARDKKKNHYNLDKMFTWDVVRGDETAWIAKTDKTEGTIAIVRKVLSKNTPLMTRMNFEQHGEIANATLYSAKKAKSENYFALKTSDERMADVTKYGGYTSASIAYYFIVRHREGKKQNISIEGLPLYQKRAVEKTADGLEQYCSSKLGYENVEILCRKLKIQSLLEMNGYRMHLSGKTGNQLIMRNAMNLCISQDWVKYIKKLEKKAETDIQDKLISETANLELYGLLTEKHQSTVFARKPNPFGEKLKNGRTKFEELEVSKQCEVLHQILQLTQIGTTVANLTAIGESPNSGKILISKNMKETDNVKIICQSVTGLYEKEIQVYSL

SEQ ID NO: 20328 - protein, 1383 aa, unidentified
  REGION 1..1383: note = Cas Enzyme sequence
MEKQNYYIGLDMGTSSVGWAVTDDSYHIIRRKGKDMWGIREFEEAKTSAERRSHRISRRRLQRSKVRIGLIKMYFDEEIRKVDPFFYERLDNSKYYQEDKDEIVKSPNGVFNDKEYTDKDYYNQYPTIFHLRKELINNENAPYDVRIVYLAVLNLFKRRGHFLNSSLRLDDESAEFSLKDAYSNLLTIMADNLPEELSIAFPEIDSDNTYLELQNILGTREFGRKQKGEKVAKLLGIDRKQKKEMEIVNGMVGLSIDCCKLFDIEADSKITAKFSDFGYAEKEPEILDQLGDNYGSILMAIKTVYDIGSLTEILKGQKYLSFARVEDYEQHKADLRKLKKVVKKYALERYDYFFRQKEDGTYSAYVNSVNSEKYNDLGSKDTKPNRRNMKARSRDDFYKGVKKLLKGMPEDDADVIEINKKIENETFMPKQLTAGNGIIPNQLHAMELKKILDNASGYLDFLNDVDESGFAVKERILRLYTFTFPYYVGPISSGSKTGWAIRKPGFEKGVILPWELDEKIDRTETAKRFIDRMVRRCTYLNDEMVLPKSSLKYERYCVLNEINNIRIDNTRIDNDLKKRLFNEIYLNGKKPGRKKIESFLYRNGVPRDAQVTGIDKELNNALSSYGKFKEIFGDELEKDSVKKMVDDIIFHCTVYGDSKKFIYDYIQKNYPESEYPLLNKKTIKRIIGFKFKDWGRFSEEMLDLQGCNYETGEVYSILTALWETNNNFMELINSDSFEYKKLLEEKSGSAISSLAEVTPELLDEYYFSAPVKKMILQTMGVIKEIVQIMKCEPDRIFIEMTRSDGEKGDKGRKDSRKKALLDLYKNIIDELHDKNYWKDLIENADKDGRLRSKRMYLYIKQMGMDMYTGEPIDLDYLFDENRYDIDHIYPRHFVKDDNIENNLVLVNKASNAKKTDIYPIPGFIKDNPKVWKLWEMLHKRGLINDVKYSRLRNSEPFTDEQKAGFIARQLVETSQGTKGVSDILKQVLPQTKLVYSKAGNVSRFRSDNKFYKSRLINDYHHANDAYLNIVVGNVYYTKFTSSPMNFIKNEYSKDSKKFEYNLDKMFAWKVERDGYTAWIPLKKGNEYIATIKTVEKMLAKNTPLLTRQSFVKSGVINKVTLYGKNTATHETYIPLKMSDPKMQDVTKYGGYTSVNICYFFLVEHEKKGKKVRTIEALPGYLEKKVENDPAELERYCVEGLGLESPSVRYRKIRIQSLLKVDGYYMHLSGKSGNSLIVRNACALSIGKKWQDYIHYIEKSEENGFKYDDSRITKENNIELYDIISEKHIDGVYKKRPCGIGDAVKNGKKKFKELTKENQCKVILQILQISSIGNYKADLSLIGGASMMGNMRISKEITKNEKVMLIHQSVTGLFEDKLVDLKSI

SEQ ID NO: 20329 - protein, 1383 aa, unidentified; identical to SEQ ID NO: 20328
  REGION 1..1383: note = Cas Enzyme sequence

SEQ ID NO: 20330 - protein, 1316 aa, unidentified
  REGION 1..1316: note = Cas Enzyme sequence
MEKFYLGMDIGTNSVGMACTDENYRLLRACGKDCWAVRLFDESQTAAERRVSRTARRRLARRKQRLGFLQTLFAPYIADKTFFIRLNNSQFLSEDKDERLKKDINTLFADDGFTDKDYHKKYPTIYHLRKALMTEDISDMRLYYLALHHIVKYRGHFLFEGSMADIRDMTKLIFDLNAACADVFFEDAPSFNVSVCGQAKALLMSVERNKNAKLEDIFGLHDKRAKEIIKGICGYSVKPSTLFSERYKEEKSFSFKDLTDETFDGMQAVYGDDFALLTAIRAIYNYITFEKILEGQADISSAMVNIYEKHKRDLKKLKDFLLENATREEYNRFFKSVEEGANYVNYIGYTKKGGDKKKVKHCKDEEFFAYVKKFILSLKGVKDEIAAAEFISEAENGALLPKILHADNGLFPHQINEDELNKIVANMVRNCPETDEISEKIAPVFLFRIPYYVGPLTGKNSWAVREKDKITPWNFNQVVDLAKSNEAFMRQMTNKCSILHGEDVLPKASIYYQRYNVLNQINKLKKNDVPIDVETKQKIFNELFLTRRKVTDNAIKDVLVRSGLISEAEKKQVTISGKDGELSASMSSYIQLKTILGDFVDQDLLCGGEVCEKIILWHTLNTDKNIVVELINKNYGHIPQIKSNIKALKGLVFKDFGRLSKKLLTGLCFTDNQTGQVYSVLDLLYETNKNLNEILFDKDYGFEDMIREENGENDTKVDYEDVAKLYVSPSVRRGIWQSLKMADEYVERIGKAPDKIFIEVTREEGKKGDAGRTVSRQKQLLEKYKGIEGISELDAELKEKTDLQLRQERLYLYFRQLGKCMYSGERIDLELLNTNRYDVDHILPRTYVKDDSLDNKVLVLRVKNAQKSDQYPIPFSLVTDEARNHWAVLRAKGLISETTLNRLTRTEPLTENDFNDFINRQKTITDQTVKAVAELLSRKYPTAKIVYSKAKNVSDFRQKFDLFKCRETNDLHHARDAYLNVVVGNVFDTCFSTPFATYYKDGDKWREYNLKTMFARNVKGAWVQDNAQSISIVKRTVQKTSMAVTRYAYRNKGGFYDQTVYGKHDASITAPRKENGPLADHTKYGGYKSQKTAYFAIVQSNDKKGRTIKTIEAVPIMIDYQSVNNPDRLSGYFATYLNEPTVIVPKIKVKQLIKFNGTLCFMAGDKTDEYLKEVVKLVNSAKSGSIDTTLAEYVMKTNKDGVIKLVIDSERNVSVFNLLIDKLRSSRYTGVGAAITFCKTLIAGAENFKALKTFDQAVVLLQILRFFKCNAELSDLSLIGGPRFIGVLRVNKNITEIDFRIVHQSPCGLFECEQKV

SEQ ID NO: 20331 - protein, 1399 aa, unidentified
  REGION 1..1399: note = Cas Enzyme sequence
LSCIILYNRAKQNKRGGDGKKNALPKRKSGSHTAKSGQTKFLFELALLFCKYILPHKKIKVKGKTTMEKFYLGMDIGTNSVGMACTDENYKLLRAKGKDCWSVRLFDESKTALERRTYRTSRRRLQRRKYRLALLQELFAPFIDDKNFFIRLNNSQFLPEDKDGALFGDKNNLFNDPALDDKTFHGQFPTIYHLRKALINGGDYDLRLYYLALHHIIKYRGHFLFEGSMNDIRNINRLFTALNDTLKNVYGDDEAPEFAATSAEKAKEILLDPKKNIRDKEQELEKLFGAESKLEKEIIKGMCGAKISPSVLFGESFKEEKSFSFKELNDESFDAMRQTYGDNFALPEALRAIYSFVTFEKLLVGKPDISSAMIAVYEKHKSDLKLLKDFLRAESGEIYGKVFKNTGEKANYVNYVGYTKKGGDKKKVKTCGYEEFRQYLKKTIAAIDAKDKETQNLILSELENGSFLPKILHSDNGLFPHQVNEDELVKIADNMAKNHPETTDMAKKLRKLFLFRVPYFVGPLAGENSWAVRKTDEKVTPWNFDDVIDKAASNEEFMRRMTNHCSILHAEDVLPKCSMIYQKYNVLNQLNKLKINDCPLPSVELKQKIFNELFLKYNKVSDKKIIDLLVRSGEVSPEEARAITLTGKDGELNASMSSYITFKNILGDFADKPENTEILEKIILWHTLNTDKKIVEDLILKHFGKIPEIKNNVKALKGLVFKDFGRLSEKLLTELKAADKETGELLSIIDILYETNQNLNEILANERYNFAELIKAENGEESDEIGYKDIEELYVSPAVRRGIWQSLIMADEYINAVGKVPDRIFIEFTRTDETKGEAGKKLSRKKQLSDKFKAIKDAEFQDIIAKLNSDEITDMKLRQERLYLYFRQLGKCMYSGMQIDLSALNTDMYDVDHILPRSYTKDDSIDNKVLVRRTCNAKKTDIYPVPAEFRQVKLWKLLHEKELISKKTFDRLMRTEPLGEGDYEDFINRQKVITDQTAKAVAELLQRKYPTSQIVYSKAKNVVDFKNKFDLYKCRETNNLHHARDAYLNIVVGNVYHTCFSTPMAMFYKKDDGWRENNLKTMFTRNVKGAWDENSLQLVQSTFKKHTMAVSQYAFCYNGMFYDQTVYPKGDPGITAPRKGSGALANVEKYGGYKSQKTSYFAIVQSKGKKGQTIKTIEAVPVLTAYRQRTNPDALLDYFKTYLTEPTILIPKLKVRQLVSYNGTPVYIAGITGDYIIAHNANELFTDNKTDEYVNQLSKLVEMAKNGTISEENGEYIIKTNRNKDVKLTINRQSNIELYDTLKNKLSKPSYQGLSPFSTFRKNLESGEEKFANLSVADQCTVLLQILKFFKCNAETADIVLIGGSKISGKILFNKDIAGVNFEVVSKSPAGLTERIKKV

SEQ ID NO: 20332 - protein, 1336 aa, unidentified
  REGION 1..1336: note = Cas Enzyme sequence
MNKKDFYVGLDIGTNSVGIACTDQDYNLRRSNGKDCWAVRLFDTANTAAERRVFRTARRRLQRRKYRLGQLQALFAPYIADDKFFIRLNNSQFFVDDKDECLSADKNTLFADSGYTDKEFHEAFPTIYHLRLALQNGHASDIRLYYLALHHIVKYRGHFLFEGSVGDIRDIKKLFVDLNTACEAVYADEVPYFDTQLCEQAKNTLMKPSGIRDKQKALEALFDGTSKAQSEIIKAMCGGKLAPKTMFEGRYEEEKSFSLSEMQDEAFDALAEVFGDDFVLLQALRNLCNFVKFEKLFAGQPNISSAMIAVYDKHAADLAMLKIFLKTYAPQMYNKVFRSVTESANYVNYIGYNKKKSAKTKVAPCKYEDFLAFVKKIVAAVDCADTELRDKILAEIDNKTFLPKILHADNGLIPHQVNEDELVKIVKSMTEAFPETQAMAKQILPLFRFRIPYYVGPLVGENSWAVRKSDERITPWNFNEVIDLAASNEQFMRRMTNKCTYLHGEDVLPKCSIVYQKFNTLNQINKLQVDGRAISVELKKKIFDQLFLAKSKVSDKMIVDLLVREGVVSPQERTQAVLSGKDGDVKASMSSYIQLKRILGDFVDEDISSGGNVCENIILWHTLNTDKSIVEDLLKRNYGDNPHITPYIKQLKGLMFADFGRLSNKLLTGLRTVDKSTGELRSILDLLYDTNQNFNEIIFDERYDFAELIRKENSGESTEITYEEDIATMRVSPALKRGIWQSLQLVDEYVAALGGSPDKIFVEVTREDGVKGNDGRTVSRKKQLLEKYKGVEGIDELVAELQSDDVSDMRLRQEKLYLYFRQLGRCMYTGKRIDLSQLNTDLYDVDHILPRTYIKDDSLDNKVLVLRSKNAEKSDAYPLPQGFSNQAPFWKLLLGKGLIGEKTYKRLTRTAPLTDDDYNDFINRQKTITDQTAKAVVELLKRKYPQAKVVFSKAKNVSDFKQKFDLHKCRETNDLHHARDAYLNIVVGNVYDACFTTPMAQFRKDGDVWRTYNLKTMFTRNVKGTWDENSLATVKKTYSKCSMSVTEYTYCGKGAFYNQTVYGAGDTSVTAPRKANGPLANTARYGGYKSQNTAYFAIVDSLGKKGVTQRTMEAIPVMVAYRATTDTNAVYDYLTNTLQLRDVKVVVPKVKKNQLVSYNGSLVRLTGVTGVYITTNNDRQLFTDNKTDEYVNQLLKLLEMDKNGRVDKTASEYVMKTNRMGDVKLVVDKAHNENLYNCFVEKLQGGKYGKLSSFVTFGKNLQSGKEKFANLTTLEQAYVIVQILRFFKCDAQTADIRLIGGSGLSGKVLFNKDITTVDFQLIDQSPCGLTVRTRKL

SEQ ID NO: 20333 - protein, 1347 aa, unidentified
  REGION 1..1347: note = Cas Enzyme sequence
MEKEQKFYLGLDIGTNSVGIACTDENYNLLRVKGKDCWAVRLFDEAQTAADRRTARTARRRLQRRRYRINQLQGLFAPFMQDNLFFLRLNNSQFFADDKAGELDGDVNNLFADSGFTDRNFHEKYPTIYHLRFALQQSPVDDIRLYYLALHHIIKYRGHFLYDGNVSEVRDVHKLFDALNTVCENTFAENTPHFDIEKADEAKDMLLRSKGKLKDTVKSIKQLFSVQNDECGKIRTEIINGFCGAKFSPEKLLGDAYSEEKSFAFRDVEEDAFEAMQSTYGDDFALLKAMREIYNFVTFERLFNGQPNISSAMIAVYDKHKSDLKKLKGFIKKNYDTDGGKKCREMFSDVTQKANYVNYVGHVGYGKSRKRVKTCDYDSFIAYVKKFLMDGNFAHDETYDEIMAEIEAKTFLPKILHSDNGLVPHQVNEDELVKIVAQMVRAFPETAQMANKILPLFLFRIPYYVGPLAGSNSWAVRKSDEKITPWNFRDVVDEAASNEEFMRRMTNKCTYLHGVDVLPKCSIAYQKFNTLNQINKLKVNDCAISVPLKQKIFAELFLVKPRVSDKMIASLIVREGAVAPGDSVVLSGKDGGDIKASMSSYIQLKRILGDFVDYDLASGGNVCENIILWHTLNTDKRLVEDLIVKNYGDNPAVAPYVKQLKGLVFNDFGKLSGRLLTELDVVDKQTGELCTVTDLLWNTNENFNELMFDKRYNLEEVIAAENNDDDGKVDYEDVQKLYVSPAVRRGIWQSLQMVDEYVAALGKEPDKVFVEVSREEGVKGDKGRTHSRKKQLLEKYKNINPKDVENIDELTGELNSDKISDMRLRQERLYLYFRQLGRCMYSGEPIDLDHINDSKLYDVDHILPRSYIKDDSLDNKVLVLRSKNAEKSDTYPLPLGFTNQQGWWKMLRAKDLISSGTYDRLMRTAPLTDDDYNDFINRQKVITDQTSKSVIELLKRKYPGATLVYSKAVNVADFKSKFDLYKCRETNDLHHARDAYLNVVVGNVYSTVFGVRIETYVKDGEKWKTYNLKKMFTRDLPGAWNENSIRTVKGVYNSSSMCVTRYAYCNKGAFYKQTVYSGNENITAPRKGKGPLANMERYGGYMTQSTAYFAIVESQGKKGRIKTIEAVPVMVDYQSRNDPDRVVKYFEENGLVDVKLIVPRMKVRQLISYNGSCVYLASATGSQIGAYNAMELFTDNRTDMYVKQFVKLLEMAKNPTFDVNCEKYEFTPNRERGEKITIDRNSNIKLYDFLLLKFENKKFRGISSYLSFERNLYSGREKFIELTVLQQVWILSQIIQFFKCNDKSADIELIGGSKGSGKIVFGKNITDVDFRIISQSPCGLTVHVKRV

SEQ ID NO: 20334 - protein, 1362 aa, unidentified
  REGION 1..1362: note = Cas Enzyme sequence
MKKKAEKIYLGLNVGTNSIGYAVTDEQYNLLKFNGNDAWGSIVFDAASSNEDRRNHRLARRNLDRRQQRIVWLQEIFAKEISKVDDRFFIRLSESFRWREDVQDQYVFFNDKEYTDVQYMKENPTIHHLICELMDNKAPHDVRLVYLACAWLIAHRGHFLNNLNVEKLDEIMDISSVYQNFINYFTENGYKRPWGEIDVSVLAEALKRRSGVTAKTKELLKILLNGKKPEKSGTEEFPFSQDSIIRLLAGGQCKLKDVFCKEEYLDLGSISLDMDEDKFGEISGSIGEDYDLLMALRGLYDWSVLADLLNGHSKTISAAKVQMYEQHKEDLRVLKYFMHKYLPGKYNEVFRKAKADNYVAYTGHMDKETASQLKKKANVEDFSRYIQKLVRSINPEEKDQQTYQDMCERLELKCFLPKQRSTNNRVIPHQLYEYELIRILKNASLYLPFLNEVRNGVSEIDKVVSIFRYKLPYYVGPLNEESSFAWISRKQGKITPWNFKDMVDEDTSENAFIRRMTNKCTYLPTEDVLPKDSLCYQKFMVLNEINNLQIDGLKIPVKAKQGIYHELFEKNKKVKRKDIEEYLIRNNYLDKDSTKLISGIDEQIHSGLSSYCAFFNLLNKKILSEDDVERIIERASYAEDKSRVIKWLRKEYPGLSEDDIRYIARIKIRDFGRLSKTFLTGLKGCDVSKGFDGQDVEMISILQTMWETNDNLMEILSDKYTFLEAVEAFTQEYYTGKKKSLKERLDEMSVSNSVRRPVYRTLAVVKDIEKAFGKPDKIFLEMTRGGQADQKGKRIKSRKQQILDLYDKCKDDVHDLIRQLEAMGEYADSRLQSDRLYLYFMQFGKCAYSGAHIGFEQLMAGSVEYDIDHIYPQSYVKDDSLNNKVLVLSDLNGTKDNIYPVSPEIRGKMQGLWSWWNHVGAISDEKYKRLIRSAPFTDEEKMGFINRQLTETSQSTKFIADLLKERFPDAEVVYVKAGLVSDFRHEFDLPKSRSYNDLHNAADAFLSVVAGNVYDMRFSKKWFRIDEKYSVKVKTIFTHEVKCRGDIIWDGMPMLEKVEDTARKNTAHFVKYAAFKTGGLFDQNPVKKGTGLIPLKAGLPTEKYGGYNKAGIMFLIPVRYNIGKKSEILILPVELMHGKHFLEDKVFARNYTFTRLENILGKKVGEVSFPMGMRPWKINTMLSFDGFRVCLTGTSGRGKCLVAQPVMQFSADEHWRFYVKRLERFVEKIGINPDLLYDKDHDKVSKDENLKLYELYVDKLQNTIYKKRVNSPVQTLLKGKEEFKKLSIEEQCQVLLNIQSVFGRMTGGCDLTLIGGSAHSAATGSLSTTISNWKKKYSTVRIIDQSPSGMWEKSSENLLDFL

SEQ ID NO: 20335 - protein, 1356 aa, unidentified
  REGION 1..1356: note = Cas Enzyme sequence
MKKKAEKIYLGLNVGTNSIGYAVTDEQYNLLKFNGNDAWGSIVFDAASSNEDRRNHRLARRNLDRRQQRIVWLQEIFAKEISKVDDRFFIRLSESFRWREDVQDQYVFFNDKEYTDVQYMKENPTIHHLICELMDNKAPHDVRLVYLACAWLIAHRGHFLNNLNVEKLDEIMDISSVYQNFINYFTENGYKRPWGEIDVSALAEALKRRSGVTAKTKELLKILLNGKKPEKSGTEEFPFSQDSIIRLLAGGQCKLKDVFCKEEYLDLGSISLDMDEDKFGEISGSIGEDYDLLMALRGLYDWSVLADLLNGHSKTISAAKVQMYEQHKEDLRVLKYFMHKYLPGKYNEVFRKAKADNYVAYTGHMDKETASQLKKKANVEDFSRYIQKLVRSINPEEKDQQTYQDMCERLELKCFLPKQRSTNNRVIPHQLYEYELIRILKNASLYLPFLNEVRNGVSEIDKVVSIFRYKLPYYVGPLNEESSFAWISRKQGKITPWNFKDMVDEDTSENVFIRRMTNKCTYLPGEDVLPKDSLCYQKFMVLNELNNLKIDGRKVPVEVKQGIYHELFEKKKKVRRKDIEEYLISNNYLAKGSTELISGIDEQVHSCLSSYSAFRNLLSREILSENDVEKIIERASYAEDKSRVKKWLRKEYPDLSQDDVRYITKIKIKEFGKLSRTFLTELKGCNKQDGEMTTILRIMWETNDNLMEILSDKYTFREAVEAFTQEYYTGKKKSLKERLDEMRVSNSVRRPVYRTLAVVKDIEKAFGKPDKIFVEMTRGGQTDQKRKRTKSRKQQILDLYDKCKDDVHDLMQQLESMGEYADSRLQSDRLYLYFMQFGKCAYSGAHIGFDQLMAGSVEYDIDHIYPQSYVKDDSLNNKVLVLSDLNGTKDNIYPVSPEIRGKMQGLWSWWNHVGAISDEKYKRLIRSAPFTDEEKMGFINRQLTETSQSTKFIADLLKERFPDAEVVYVKAGLVSDFRHEFDLPKSRSYNDLHNAADAFLSVVAGNVYDMRFSKKWFRIDEKYSVKVKTIFTHEVKCRGDIIWDGMPMLEKVEDTARKNTAHFVKYAAFKTGGLFDQNPVKKGTGLIPLKAGLPTEKYGGYNKAGIMFLIPVRYNIGKKSEILILPVELMHGKHFLEDKVFARNYTFTRLENILGKKVGEVSFPMGMRPWKINTMLSFDGFRVCLTGTSGRGKCLVAQPVMQFSADEHWRFYVKRLERFVEKIGINPDLLYDKDHDKVSKDENLKLYELYVDKLQNTIYKKRVNSPVQTLLKGKEEFKKLSIEEQCQVLLNIQSVFGRMTGGCDLTLIGGSAHSAATGSLSTTISNWKKKYSTVRIIDQSPSGMWEKSSENLLDFL

SEQ ID NO: 20336 - protein, 1355 aa, unidentified
  REGION 1..1355: note = Cas Enzyme sequence
MEVQQSRAYYLGLDCGTDSVGYAAADTDYALLRCGGEPVIGVTTFDGAVTAQERRAYRVTRRRLQRRRQRVQLVQELFAPAIAAVDAQFFLRLRESALYRDDRRIGGDAIPRALQKPYPTIHHLLVELMESDEPHDVRLVYAACAWLVAHRGHFLSNVSEDDLGAVLNVRGAYDALMEYFSGEKPWDCGAEAFGAALREKLNVRAKEARLRELLFAGKKPTDLVYDPDDPDAPRYSRAKMLTLLSGGRVKPGELFVHRSAEYEQIGSFSLGGKEEELAAALAQLGDDAELVLRLKALFDWAVLTDVLQGEPCISRAKVRVYEQHRADLACLKALLRKYAPEKYDAVFNGTGKEANYAAYSRHAPSRGAAPEAYAARESFSEFLKKQVRDLPVSQDDRPAYEDMLARLDTCSFLPRQRNADNRVIPRQLYAYELRAILARAERYLPFLAERDADGLSVSDKIVSVFNFRIPYFVGPLDPRSSHAWLTRKAGRIYPWNFESMVDLDRSEDAFIRRMTGRCSYLPGEPVLPKNALCYARFTVLNEINPLKVNGAPLTPAQKQAVYTGLFEKRQRVTLKALREFLLSEGYMQRGDTLSGVDEAGIKSALRPQLAFRRLLEKGLLTQEQAEQIIERLACTEDRMRLRRYLTREFPQLPEADVNYLARLPFKDFGRLSRRFLCGLEGADRETGEVYTVLQAMWETNCTLMELLSDRFTFAEAVQQEAQAYYAAHPQTLEARMDSLYLSPAVRRPIHRALAIVKDVVKAAGGPPSRIFIEMARGATEQQKGRRTVSRKEQLLALYRKFGDEEVRALREQLEAKEENDLQSEKLFLYFMQLGRCMYSGQPISLDALFADKRYDIDHIRPQSRVKDDSVWNNKALCLAELNGNKGDTYPIRADIRQRMTPFWSLLHSRGLMSDEKYRRLTRATPFTEEELMGFIQRQLVETRQSTKALATLLAERYPGTEIVYVKAGLVSDFRHEFNLLKCRAVNDLHHGKDAYLNIVVGNVYHERFSRQFFRLDQPYTLKTRELFSHRVMSGGRCVWRGGEDVARVRAIVQKDALHVTRFAFCRHGGLFDQQPRRAGSSDELLPRKAGLPVERYGGYRRPTASFFVLARYAAGRRGGLMVVPIDLMAAPRFLSGGAEAEAAVRAALEGVLKQPVDAVSLPLGGRILRVNTVFSLDGFRVALAGKSNGGKTLLLSPLMPLRLGPELERYVKRLESFQKKRADNPALRLDPGFDRLTPEEDLALYDTLRQKLTAWPYSKRPAGQSVAEALDAGRERFLALAPEARAAQLLALLPVFGRSGAGCNLTAIGGAANVGVPTLSWALVNWKKAYDDVRIIDQSASGLFAAASMNLLELL

SEQ ID NO: 20337 - protein, 1355 aa, unidentified
  REGION 1..1355: note = Cas Enzyme sequence
MEVQQSRAYYLGLDCGTDSVGYAAADTDYALLRCGGEPVIGVTTFDGAVTAQERRAYRVTRRRLQRRRQRVQLVQELFAPAIATVDAQFFLRLRESALYRDDRRIGGDAIPRALQKPYPTIHHLLVELMESDEPHDVRLVYAACAWLVAHRGHFLSNVSEDDLGAVLDVRGAYDALMEYFSGEKPWDCGAEAFGAALREKLNVRAKEARLRELLFAGKKPPDLVYDPDDPDAPRYSRAKMLTLLSGGRVKPGELFVHRSAEYEQIGSFSLGGKEEELAVALAQLGDDAELVLRLKALFDWAVLTDVLQGEPCISRAKVRVYEQHRADLAFLKALLRKYAPEKYDAVFNGTGKEANYAAYSRHAPSRGAAPEAYAAREAFSEFLKKQVRDLPVSQDDRPAYEDMLARLDTCSFLPRQRNADNRVIPRQLYAYELRAILARAERYLPFLAERDADGLSVSDKIVSVFNFRIPYFVGPLDPRSSHAWLTRKAGRIYPWNFESMVDLDRSEDAFIRRMTGRCSYLPGEPVLPKNALCYARFTVLNEINPLKVNGAPLTPAQKQAVYTGLFEKRQRVTLKALREFLLSEGYMQRGDTLSGVDEAGIKSALRPQLAFRRLLEKGLLTQEQAEQIIERLACTEDRMRLRRYLTREFPQLPEADVNYLARLPFKDFGRLSRRFLCGLEGADRETGEVYTVLQAMWETNCTLMELLSDRFTFAEAVQQEAQAYYAAHPQTLEARMDSLYLSPAVRRPIHRALAIVKDVVKAAGGPPSRIFIEMARDATEQQKGRRTVSRKEQLLALYRKFGDEEARALREQLEAKEENDLQSEKLFLYFMQLGRCMYSGQPISLDALFADKRYDIDHIRPQSRVKDDSVWNNKALCLAELNGNKGDTYPIRADIRQRMTPFWSLLHSRGLMSDEKYRRLTRATPFTEEELMGFIQRQLVETRQSTKALATLLAERYPGTEIVYVKAGLVSDFRHEFNLLKCRAVNDLHHGKDAYLNIVVGNVYHERFSRQFFRLDQPYTLKTRELFSHRVMSGGRCVWRGGEDVARVRAIVQKDALRVTRFAFCRHGGLFDQQPRRAGSSDELLPRKAGLPVERYGGYRKPTASFFVLARYAAGRRSGLMVVPIDLMAAPRFLSGGAEAEAAVRAALEGVLKQPVDAVSLPLGGRILRVNTVFSLDGFRVALAGKSDGGKKLLLSPLMPLRLGPELERYVKRLESFQKKRADNPALRLDPGFDRLTPEEDLALYDALRQKLAAWPYSKRPTGQSVAEALDAGRERFLALAPEARAAQLLALLPVFGRSGAGCNLTAIGGAANVGVPTLSSALVNWKKAYDDVRIIDQSASGLFAAASMNLLELL

SEQ ID NO: 20338 - protein, 983 aa, unidentified
  REGION 1..983: note = Cas Enzyme sequence
LSQTEEISLINAQLDNGEFLPKQVTKDNGVIPHQLHEMELRRILEKAAAYLPFLNETHSSGLTRSQEIIRMFLFRIPYYVGPLNENSPYSWITRTSQGRIYPWNFEEKVNLEKCAESFIARMTAKCSYTRQDVLPKNSLLYSRFAALNQLNNLRINGQKPPVEIKQKIFNEHLVLSKGRNIKSYLLSEGLIEQDWILSGIDGDIRSELASTRAFKWLLERPGGKAAAEDLIKRITLFKEDKKLLEGYIARTYSGLLNKDERQKVMNMKFDGWGRLSKEFLTQIYHIDKTTGECMNILDALWKTNDNLMELLSRRYTFSSALEEYIKANSDKISYTLQDYLDQSYAPPAIRRAVRQAIAIAGEIEQILKRPPKRIFIETTRGEGDKSPASSRKERLLDLYKKCGEEANPLFQSLSGRTDAELRRDKLYLYYTQLGKCMYSGESIEITELETNYDIDHIYPQSVTKDDSLDNRVLVKRTLNAKKGDSYPLSDEVRGKMREYWAMLNDKKLISDKKYARLTRRTPLTDEELAGFISRQLVETSQSAKLIAELLQQRFSSGATQIVYVKAGCVSSFRQDMRIDSQERQRQSGQCAKNEHTRQDPVFIKCREVNHLHHAKDAYLNIVAGNVYHTKFTANPYNFISQARKERQANSQNIKGSYGYSLNTVFDFDVARNGEMAWKAGENGSIATVRRTMLKNNVLFTRLPYEQKGGFFDQTFIPKGKGQFPIKREMVNNGDIDAAIQKYGGYNNLSGAYFFLAEHQNNKKRVRSIESVYLVYRGLYESDPVKYCETVLGLKQPQIIIPKIRIDSLLKMDGSRIHISGRTNDSIRYKNANQLILSPQWNAYIKGIVKYLERCRIARKNLEITSFDRITAQENLTLYQLFLDKLRVPQYAALYPTPLKELEARREKFAALEIKAQCEVLVQILNLFACTSDKMNLKLLGGKENMGIVQRTKNLKADSDMRLIHQSVTGVFEKEIDLLTVQPI

SEQ ID NO: 20339 - protein, 1353 aa, unidentified
  REGION 1..1353: note = Cas Enzyme sequence
MAAFKYYLGLDMGTNSVGWAVTDPNYNLFKAKGKDLWGIREFNEASTAVERRTHRISRRRRQREQVRIGLLKDYFHDTIGEVDPDFFQRLANSKYHLEDKDTEVRYKNNVFNDDDYTDKDYFDQYPTIYHLRKELIESTDKHDVRLVFLALLNMFKHRGHFLNSGLGENSGENNINNAYLELTNLLSEFTQYNLNETIDGKKIEDLLSRRDMSRTRKAEGLAEILGVDYKNKPYKELIRGLCGLKFNACAIFPEIQSDEVPKLDICLSEASFDEKSDEIANILGEDYFEIIMAMKDIYDIGSLAGIMKGHNYLSQARVASYEKHKEDLKLLKNVIRKYCSKEDYDNFFNSEADGSYASYVGSYNSKTKQRRVGNKRSSEELYKAIKKLLKNVPAEDADVQRILMSIENETFLPKQLTASNGVIPNQVHAKEMKKILSNAERYLPFLREKDETGLSVSEKIMKLFSFQIPYYVGPTTEKSNKDGGNGWVVRKEEGQVLPWNIDEKIDMKATSEAFISRMVRRCTYISGEPVLPKSSLEYQSFCVLNEINNIKIDGERISVQLKQDIYKEVFQKGKRVTKKQLCKYLHTRGIIEAEEQVTGIDVTINNALTTYGKFKAILGDDISKDSVQKMVEDIVFWCTVYGDSKKFLKDRIEEKYGEKLTKEQIKRIVGFKFKDWGNLSKNFLELNGADVSTGESVSIIRALWNNNLNLMELINSRLYNYKERLAEYQNTMMKTLSDIEAEDLDEYYFSAPVKRMIWQTILIIKELVKVLGCEPDRIFVEMTRRPDERKMRTESRRKKFEELYKKVKDEDVDWMKVIAHADETGSIRSKKMYLYLTQKGRCMYTGKHIELSDLFNNNLYDIDHVYPRHFVKDDNIDNNLVLVCKEKNAHKSDIYPLEDEILASQKNMWSELRRSGFITEEKYNRLIGRNSFTDEQKAGFIARQLVETSQGTKGVANILQQLLPESKMVYAKASNVSEFRNTRDIPKSRLINEFHHAHDAYLNIVVGNVYYVKFTQNPLNFIKNDYDRDKTKNNYNLSKMFDWDVERNGEVAWIAQKKDGEAGTIATVKKVLGRNTPLMTRYSFEGKGALTNETLYSAKKAKEEGYIPFKSSDEKMKDVTKYGGFTSVTGAYFFLVEHTEKKKRSRTIESVPLYLAQKIEQNPHELEKYCEQVLGLIDFDIRVRKIKIGSLVKRNGYFFYITGKNGKQLIVRNAVNMYLKREWVKYISKLEKAVDKNIVEEVIAKDKNELLYSELINKFKTGIFANRPNPVGDKLDKAKEKFLSLDIEQQCTVLCQILQLSSILGSASDMTLLGESAHCGKMQISKKIGDEDIYLINQSVTGLYEKKINLRIV

SEQ ID NO: 20340 - protein, 1357 aa, unidentified
  REGION 1..1357: note = Cas Enzyme sequence
MAAFKYYLGLDMGTNSVGWAVTDPNYNLLKAKGKDLWGIREFNEASTAVERRTHRISRRRRQREQVRIGLLKDYFHDAIGEVDPDFFQRLANSKYHLEDKDTEVRYKNNVFNDDDYTDKDYFDQYPTIYHLRKELIESTDKHDVRLVFLALLNMFKHRGHFLNSGLGENSGENNINNAYLELANLLSELTQYNLNETIECKKIEDVLSRRDMSRTRKAEGLAEILGVDYKNKPYKELIRGLCGLKFNACAIFPEIQSDEVPKLDICLSEASFDEKSDEIANILGEDYFEIIMAMKDIYDIGSLAGIRKGYNYLSQARVASYERHKEDLKLLKEVIKKYCSKDDYDSFFNSDADGSYASYVGSYNSKTKQRRVGNKRSSEELYKAIKKLFKNVPVEDADVQSILTSIENETFLPKQLTVSNGVIPNQVHAEEMKKILSNAENYLPFLKEKDETGLSVSEKILKLFSFQIPYYVGPTTEKSNKDGGNGWVVRKEEGQVLPWNIDEKIDMKATSEAFISRMVRRCTYISGEPVLPKASLEYQSFCVLNEINNIKIDGERISVELKQDIYKEVFQKGKRTKKQLCKYLHTRGIIEAEEQVTGIDVTINNALTTYGKFKAILGDDISKDSVQKMVEDIVFWCTVYGDSKKFLKDRIEEKYGEKLTKEQIKRIVGFKFKDWGNLSKNFLELSGADVSTGESVSIIRALWNNNLNLMELINSRLYNYKERLAEYQNTMMKTLSDIEAEDLDEYYFSAPVKRMIWQTILIIKELVKVLGCEPDRIFVEMTRRPDERKMRTESRRKKFEELYKKVKDEDVDWMKVIAHADETGSIRSKKMYLYLTQKGRCMYTGKHIELSDLFNNNLYDIDHIYPRHFVKDDNIDNNLVLVCKEKNAHKSDIYPLEDEILASQKNMWSELRRSELRRSGFITEEKYNRLIGRNPFTDEQKAGFIARQLVETSQGTKGVANILQQLLPESKIVYAKASNVSEFRNTRDIPKSRLINEFHHAHDAYLNIVVGNVYYVKFTQNPLNFIKNDYDRDKTKNNYNLSKMFDWDVERNGEVAWIAQKKDGEAGTIATVKKVLERNTPLMTRYSFEKKGRLTKEERHSAIDAKKDQYLPFKTSDSKMQDVTKYGGFNDIAGTYFFLVEHTEKKNRIRTIESVPLYIAKKIDQNPIELEKYCEQVLGLVDFDIRVRKIKIGSLIKRNNYFCYITGKKPGRLIVRNAVNLCLKNEWIKYISKLEKYNEKNVIDEMITKEKNQLLYLELINKFRNSIFSKRPNGIGKKLEDARNIFNDLSTEEQCIVLYKVLQLSAVMGYEADLSLIKYSKSAGAMQISKKIGDEDIYLINQSVTGLYEKKINLRTV

SEQ ID NO: 20341 - protein, 1353 aa, unidentified
  REGION 1..1353: note = Cas Enzyme sequence
MAAFKYYLGLDMGTNSVGWAVTDPNYNLFKAKGKDLWGIREFNEASTAVERRTHRISRRRRQREQVRIGLLKDYFHDTIGEVDPDFFQRLANSKYHLEDKDTEVRYKNNVFNDDDYTDKDYFDQYPTIYHLRKELIESTDKHDVRLVFLALLNMFKHRGHFLNSGLGENSGENNINNAYLELTNLLSEFTQYNLNETIDGKKIEDLLSRRDMSRTRKAEGLAEILGVDYKNKPYKELIRGLCGLKFNACAIFSEIQSDEVPKVDICLSEASFDEKSDEIANILGEDYFEIIMAMKDIYDIGSLAGIMKGHNYLSQARVASYEKHKEDLKLLKNVIRKYCSKEDYDNFFNSEADGSYASYVGSYNSKTKQRRVGNKRSSEELYKAIKKLLKNVPAEDADVQRILMSIENETFLPKQLTASNGVIPNQVHAKEMKKILSNAERYLPFLREKDETGLSVSEKIMKLFSFQIPYYVGPTTEKSNKDGGNGWVVRKEEGQVLPWNIDEKIDMKATSEAFISRMVRRCTYISGEPVLPKSSLEYQSFCVLNEINNIKIDGERISVQLKQDIYKEVFQKGKRVTKKQLCKYLHTRGIIEAEEQVTGIDVTINNALTTYGKFKAILGDDISKDSVQKMVEDIVFWCTVYGDSKKFLKDRIEEKYGEKLTKEQIKRIVGFKFKDWGNLSKNFLELNGADVSTGESVSIIRALWNNNLNLMELINSRLYNYKERLAEYQNTMMKTLSDIEAEDLDEYYFSAPVKRMIWQTILIIKELVKVLGCEPDRIFVEMTRRPDERKMRTESRRKKFEELYKKVKDEDVDWMKVIAHADETGSIRSKKMYLYLTQKGRCMYTGKHIELSDLFNNNLYDIDHVYPRHFVKDDNIDNNLVLVCKEKNAHKSDIYPLEDEILASQKNMWSELRRSGFITEEKYNRLIGRNSFTDEQKAGFIARQLVETSQGTKGVANILQQLLPESKMVYAKASNVSEFRNTRDIPKSRLINEFHHAHDAYLNIVVGNVYYVKFTQNPLNFIKNDYDRDKTKNNYNLSKMFDWDVERNGEVAWIAQKKDGEAGTIATVKKVLGRNTPLMTRYSFEGKGGLTNETLYSAKKAKEEGYIPFKSSDEKMKDVTKYGGFTSVTGAYFFLVEHTEKKKRSRTIESVPLYLAQKIEQNPHELEKYCEQVLGLIDFDIRVRKIKIGSLVKRNGYFFYITGKNGKQLIVRNAVNMYLKREWVKYISKLEKAVDKNIVEEVIAKDKNELLYSELINKFKTGIFANRPNPVGDKLDKAKEKFLSLDIEQQCTVLCQILQLSSILGSASDMTLLGESAHCGKMQISKKIGDEDIYLINQSVTGLYEKKINLRIV

SEQ ID NO: 20342 - protein, 1358 aa, unidentified
  REGION 1..1358: note = Cas Enzyme sequence
MAAFKYYLGLDMGTNSVGWAVTDPNYNLLKAKGKDLWGIREFNEASTAVERRTHRISRRRRQREQVRIGLLKDYFHDAIGEVDPDFFQRLANSKYHLEDKDTEVRYKNNVFNDDDYTDKDYFDQYPTIYHLRKELIESTDKHDVRLVFLALLNMFKHRGHFLNSGLGENSGENNINNAYLELANLLSELTQYNLNETIECKKIEDVLSRRDMSRTRKAEGLAEILGVDYKNKPYKELIRGLCGLKFNACAIFPEIQSDEVPKLDICLSEASFDEKSDEIANILGEDYFEIIMAMKDIYDIGSLAGIRKGYNYLSQARVASYERHKEDLKLLKEVIKKYCSKDDYDSFFNSDADGSYASYVGSYNSKTKQRRVGNKRSSEELYKAIKKLFKNVPVEDADVQSILTSIENETFLPKQLTVSNGVIPNQVHAEEMKKILSNAENYLPFLKEKDETGLSVSEKILKLFSFQIPYYVGPTTEKSNKDGGNGWVVRKEEGQVLPWNIDEKIDMKATSEAFISRMVRRCTYISGEPVLPKSSLEYQSFCVLNEINNIKIDGERISVELKQDIYKEVFQKGKRVTKKQLCKYLHTRGIIEAEEQVTGIDVTINNALTTYGKFKAILGDDISKDSVQKMIEDIVFWCTVYGDSKKFLKDRIEEKYGEKLTKEQIKRIIGFKFKDWGNLSKNFLELSGADVSTGESVSIIRALWNDNLNLMELINSRLYNYKERLAECQNTMMKTLSDIEAEDLDEYYFSAPVKRMIWQTILIIKELVKVLGCEPDRIFVEMTRRPDERKMRTESRRKKFEELYKKVKDEDVDWMKVIAHADETGSIRSKKMYLYLTQKGRCMYTGKHIELSDLFNNNLYDIDHIYPRHFVKDDNIDNNLVLVCKEKNAHKSDIYPLEDEILASQKNMWSELRRSELRRSGFITEEKYNRLIGRNPFTDEQKAGFIARQLVETSQGTKGVANILQQLLPESKIVYAKASNVSEFRNTRDIPKSRLINEFHHAHDAYLNIVVGNVYYVKFTQNPLNFIKNDYDRDKTKNNYNLSKMFDWDVERNGEVAWIAQKKDGEAGTIATVKKVLERNTPLMTRYSFEKKGRLTKEERHSAIDAKKDQYLPFKTSDSKMQDVTKYGGFNDIAGTYFFLVEHTEKKNRIRTIESVPLYIAKKIDQNPIELEKYCEQVLGLVDFDIRVRKIKIGSLIKRNNYFCYITGKKPGRLIVRNAVNLCLKNEWIKYISKLEKYNEKNVIDEMITKEKNQLLYLELINKFRNSIFSKRPNGIGKKLEDARNIFNDLSTEEQCIVLYKVLQLSAVMGYEADLSLIKYSKSAGAMQISKKIGDEDIYLINQSVTGLYEKKINLRTV

SEQ ID NO: 20343 - protein, 1353 aa, unidentified
  REGION 1..1353: note = Cas Enzyme sequence
MAAFKYYLGLDMGTNSVGWAVTDPNYNLFKAKGKDLWGIREFNEASTAVERRTHRISRRRRQREQVRIGLLKDYFHDTIGEVDPDFFQRLANSKYHLEDKDTEVRYKNNVFNDDDYTDKDYFDQYPTIYHLRKELIESTDKHDVRLVFLALLNMFKHRGHFLNSGLGENSGENNINNAYLELTNLLSEFTQYNLNETIDGKKIEDLLSRRDMSRTRKAEGLAEILGVDYKNKPYKELIRGLCGLKFNACAIFPEIQSDEVLKVDICLSEASFDEKSDEIANILGEDYFEIIMAMKDIYDIGSLAGIMKGHNYLSQARVASYEKHKEDLKLLKNVIRKYCSKEDYDNFFNSEADGSYASYVGSYNSKTKQRRVGNKRSSEELYKAIKKLLKNVPAEDADVQRILMSIENETFLPKQLTASNGVIPNQVHAKEMKKILSNAERYLPFLREKDETGLSVSEKIMKLFSFQIPYYVGPTTEKSNKDGGNGWVVRKEEGQVLPWNIDEKIDMKATSEAFISRMVRRCTYISGEPVLPKSSLEYQSFCVLNEINNIKIDGERISVQLKQDIYKEVFQKGKRVTKKQLCKYLHTRGIIEAEEQVTGIDVTINNALTTYGKFKAILGDDISKDSVQKMVEDIVFWCTVYGDSKKFLKDRIEEKYGEKLTKEQIKRIVGFKFKDWGNLSKNFLELNGADVSTGESVSIIRALWNDNLNLMELINSRLYNYKERLAEYQNTMMKTLSDIEAEDLDEYYFSAPVKRMIWQTILIIKELVKVLGCEPDRIFVEMTRRPDERKMRTESRRKKFEELYKKVKDEDVDWMKVIAHADETGSIRSKKMYLYLTQKGRCMYTGKHIELSDLFNNNLYDIDHVYPRHFVKDDNIDNNLVLVCKEKNAHKSDIYPLEDEILASQKNMWSELRRSGFITEEKYNRLIGRNSFTDEQKAGFIARQLVETSQGTKGVANILQQLLPESKIVYAKASNVSEFRNTRDIPKSRLINEFHHAHDAYLNIVVGNVYYVKFTQNPLNFIKNDYDRDKTKNNYNLSKMFDWDVERNGEVAWIAQKKDGEAGTIATVKKVLGRNTPLMTRYSFEGKGGLTNETLYSAKKAKEEGYIPFKSSDEKMKDVTKYGGFTSVTGAYFFLVEHTEKKKRSRMIESVPLYLAQKIEQNPHELEKYCEQVLGLIDFDIRVRKIKIGSLVKRNGYFFYITGKNGKQLIVRNAVNMYLKSEWVKYISKLEKAVDKNIVEEVIAKNKNELLYSELINKFKNSIFSNRPNPVGDKLDKAKEKFLSLDIEQQCTVLCQILQLSSILGSASDMTLLGESAHCGKMQISKKIGDEDIYLINQSVTGLYEKKINLRTV

SEQ ID NO: 20344 - protein, 1353 aa, unidentified
  REGION 1..1353: note = Cas Enzyme sequence
MAAFKYYLGLDMGTNSVGWAVTDPNYNLLKAKGKDLWGIREFNEASTAVERRTHRISRRRRQREQVRIGLLKDYFHDAIGEVDPDFFQRLANSKYHLEDKDTEVRYKNNVFNDDDYTDKDYFDQYPTIYHLRKELIESTDKHDVRLVFLALLNMFKHRGHFLNSGLGENSGENNINNAYLELANLLSELTQYNLNETIECKKIEDVLSRRDMSRTRKAEGLAEILGVDYKNKPYKELIRGLCGLKFNACAIFPEIQSDEVPKLDICLSEASFDEKSDEIANILGEDYFEIIMAMKDIYDIGSLAGIRKGYNYLSQARVASYERHKEDLKLLKEVIKKYCSKDDYDSFFNSDADGSYASYVGSYNSKTKQRRVGNKRSSEELYKAIKKLFKNVPVEDADVQSILTSIENETFLPKQLTVSNGVIPNQVHAEEMKKILSNAENYLPFLKEKDETGLSVSEKILKLFSFQIPYYVGPTTEKSNKDGGNGWVVRKEEGQVLPWNIDEKIDMKATSEAFISRMVRRCTYISGEPVLPKASLEYQSFCVLNEINNIKIDGERISVELKQDIYKEVFQKGKRVTKKQLCKYLHTRGIIEAEEQVTGIDVTINNALTTYGKFKAILGDDISKDSVQKMIEDIVFWCTVYGDSKKFLKDRIEEKYGEKLTKEQIKRIVGFKFKDWGNLSKNFLELSGADVSTGESVSIIRALWNDNLNLMELINSRLYNYKERLAEYQNTMMKTLSDIEAEDLDEYYFSAPVKRMIWQTILIIKELVKVLGCEPDRIFVEMTRRPDERKMRTESRRKKFEELYKKVKDEDVDWMKVIAHADETGSIRSKKMYLYLTQKGRCMYTGKHIELSDLFNNNLYDIDHVYPRHFVKDDNIDNNLVLVCKEKNAHKSDIYPLEDEILASQKNMWSELRRSGFITEEKYNRLIGRNPFTDEQKAGFIARQLVETSQGTKGVANILQQLLPESKIVYAKASNVSEFRNTRDIPKSRLINEFHHAHDAYLNIVVGNVYYVKFTQNPLNFIKNDYDRDKTKNNYNLSKMFDWDVERNGEVAWIAQKKDGEAGTIATVKKVLERNTPLMTRYSFEKKGRLTKEERHSAIDAKKDQYLPFKTSDSKMQDVTKYGGFNDIAGTYFFLVEHTEKKNRIRTIESVPLYIAKKIDQNPIELEKYCEQVLGLVDFDIRVRKIKIGSLIKRNNYFCYITGKKPGRLIVRNAVNLCLKNEWIKYISKLEKYNEKNVIDEMITKEKNQLLYLELINKFRNSIFSKRPNGIGKKLEDARNIFNDLSTEEQCIVLYKVLQLSAVMGYEADLSLIKYSKSAGAMQISKKIGDEDIYLINQSVTGLYEKKINLRTV

SEQ ID NO: 20345 - protein, 1358 aa, unidentified
  REGION 1..1358: note = Cas Enzyme sequence
MAAFKYYLGLDMGTNSVGWAVTDPNYNLLKAKGKDLWGIREFNEASTAVERRTHRISRRRRQREQVRIGLLKDYFHDAIGEVDPDFFQRLANSKYHLEDKDTEVRYKNNVFNDDDYTDKDYFDQYPTIYHLRKELIESTDKHDVRLVFLALLNMFKHRGHFLNSGLGENSGENNINNAYLELANLLSELTQYNLNETIECKKIEDVLSRRDMSRTRKAEGLAEILGVDYKNKPYKELIRGLCGLKFNACAIFPEIQSDEVPKLDICLSEASFDEKSDEIANILGEDYFEIIMAMKDIYDIGSLAGIRKGYNYLSQARVASYERHKEDLKLLKEVIKKYCSKDDYDSFFNSDADGSYASYVGSYNSKTKQRRVGNKRSSEELYKAIKKLLKNVPAEDADVQRILMSIENETFLPKQLTASNGVIPNQVHAKEMKKILSNTERYLPFLREKDETGLSVSEKIMKLFSFQIPYYVGPTTEKSNKDGGNGWVVRKEEGQVLPWDIDEKIDMKATSEAFISRMVRRCTYISGEPVLPKSSLEYQSFCVLNEINNIKIDGERISVQLKQDIYKEVFQKGKRVTKKQLCKYLHTRGIIEAEEQVTGIDVTINNALTTYGKFKAILGDDISKDSVQKMVEDIVFWCTVYGDSKKFLKDRIEEKYGEKLTKEQIKRIVGFKFKDWGNLSKNFLELNGADVSTGESVSIIRALWNNNLNLMELINSRLYNYKERLAEYQNTMMKTLSDIEAEDLDEYYFSAPVKRMIWQTILIIKELVKVLGCEPDRIFVEMTRRPDERKMRTESRRKKFEELYKKVKDEDVDWMKVIAHADETGSIRSKKMYLYLTQKGRCMYTGKHIELSDLFNNNLYDIDHIYPRHFVKDDNIDNNLVLVCKEKNAHKSDIYPLEDEILASQKNMWSELRRSELRRSGFITEEKYNRLIGRNPFTDEQKAGFIARQLVETSQGTKGVANILQQLLPESKIVYAKASNVSEFRNTRDIPKSRLINEFHHAHDAYLNIVVGNVYYVKFTQNPLNFIKNDYDRDKTKNNYNLSKMFDWDVERNGEVAWIAQKKDGEAGTIATVKKVLERNTPLMTRYSFEKKGRLTKEERHSAIDAKKDQYLPFKTSDSKMQDVTKYGGFNDIAGTYFFLVEHTEKKNRIRTIESVPLYIAKKIDQNPIELEKYCEQVLGLVDFDIRVRKIKIGSLIKRNNYFCYITGKKPGRLIVRNAVNLCLKNEWIKYISKLEKYNEKNVIDEMITKEKNQLLYLELINKFRNSIFSKRPNGIGKKLEDARNIFNDLSTEEQCIVLYKVLQLSAVMGYEADLSLIKYSKSAGAMQISKKIGDEDIYLINQSVTGLYEKKINLRTV

SEQ ID NO: 20346 - protein, 1358 aa, unidentified
  REGION 1..1358: note = Cas Enzyme sequence
MAAFKYYLGLDMGTNSVGWAVTDPNYNLLKAKGKDLWGIREFNEASTAVERRTHRISRRRRQREQVRIGLLKDYFHDAIGEVDPDFFQRLANSKYHLEDKDTEVRYKNNVFNDDDYTDKDYFDQYPTIYHLRKELIESTDKHDVRLVFLALLNMFKHRGHFLNSGLGENSGENNINNAYLELANLLSELTQYNLNETIECKKIEDVLSRRDMSRTRKAEGLAEILGVDYKNKPYKELIRGLCGLKFNACAIFPEIQSDEVPKLDICLSEASFDEKSDEIANILGEDYFEIIMAMKDIYDIGSLAGIRKGYNYLSQARVASYERHKEDLKLLKEVIKKYCSKDDYDSFFNSDADGSYASYVGSYNSKTKQRRVGNKRSSEELYKAIKKLFKNVPVEDADVQSILTSIENETFLPKQLTVSNGVIPNQVHAEEMKKILSNAENYLPFLKEKDETGLSVSEKILKLFSFQIPYYVGPTTEKSNKDGGNGWVVRKEEGQVLPWNIDEKIDMKATSEAFISRMVRRCTYISGELVLPKSSLEYQSFCVLNEINNIKIDGERISVELKQDIYKEVFQKGKRVTKKQLCKYLHTRGIIEAEEQVTGIDVTINNALTTYGKFKAILGDDISKDSVQKMIEDIVFWCTVYGDSKKFLKDRIEEKYGEKLTKEQIKRIIGFKFKDWGNLSKNFLELSGADVSTGESVSIIRALRNDNLNLIELINSRLYNYKERLAECQNTMMKTLSDIEAEDLDEYYFSAPVKRMIWQTILIIKELVKVLGCEPDRIFVEMTRRPDERKMRTESRRKKFEELYKKVKDEDVDWMKVIAHADETGSIRSKKMYLYLTQKGRCMYTGKHIELSDLFNNNLYDIDHIYPRHFVKDDNIDNNLVLVCKEKNAHKSDIYPLEDEILASQKNMWSELRRSELRRSGFITEEKYNRLIGRNPFTDEQKAGFIARQLVETSQGTKGVANILQQLLPESKIVYAKASNVSEFRNTRDIPKSRLINEFHHAHDAYLNIVVGNVYYVKFTQNPLNFIKNDYDRDKTKNNYNLSKMFDWDVERNGEVAWIAQKKDGEAGTIATVKKVLERNTPLMTRYSFEKKGRLTKEERHSAIDAKKDQYLPFKTSDSKMQDVTKYGGFNDIAGTYFFLVEHTEKKNRIRTIESVPLYIAKKIDQNPIELEKYCEQVLGLVDFDIRVRKIKIGSLIKRNNYFCYITGKKPGRLIVRNAVNLCLKNEWIKYISKLEKYNEKNVIDEMITKEKNQLLYLELINKFRNSIFSKRPNGIGKKLEDARNIFNDLSTEEQCIVLYKVLQLSAVMGYEADLSLIKYSKSAGAMQISKKIGDEDIYLINQSVTGLYEKKINLRTV

SEQ ID NO: 20347 - protein, 1358 aa, unidentified
  REGION 1..1358: note = Cas Enzyme sequence
MAAFKYYLGLDMGTNSVGWAVTDPNYNLLKAKGKDLWGIREFNEASTAVERRTHRISRRRRQREQVRIGLLKDYFHDAIGEVDPDFFQRLANSKYHLEDKDTEVRYKNNVFNDDDYTDKDYFDQYPTIYHLRKELIESTDKHDVRLVFLALLNMFKHRGHFLNSGLGENSGENNINNAYLELANLLSELTQYNLNETIECKKIEDVLSRRDMSRTRKAEGLAEILGVDYKNKPYKELIRGLCGLKFNACAIFPEIQSDEVPKLDICLSEASFDEKSDEIANILGEDYFEIIMAMKDIYDIGSLAGIRKGYNYLSQARVASYERHKEDLKLLKEVIKKYCSKDDYDSFFNSDADGSYASYVGSYNSKTKQRRVGNKRSSEELYKAIKKLFKNVPVEDADVQSILTSIENETFLPKQLTVSNGVIPNQVHAEEMKKILSNAENYLPFLKEKDETGLSVSEKILKLFSFQIPYYVGPTTEKSNKDGGNGWVVRKEEGQVLPWNIDEKIDMKATSEAFISRMVRRCTYISGELVLPKSSLEYQSFCVLNEINNIKIDGERISVELKQDIYKEVFQKGKRVTKKQLCKYLHTRGIIEAEEQVTGIDVTINNALTTYGKFKAILGDDISKDSVQKMIEDIVFWCTVYGDSKKFLKDRIEEKYGEKLTKEQIKRIIGFKFKDWGNLSKNFLELSGADVSTGESVSIIRALWNDNLNLMELINSRLYNYKERLAECQNTMMKTLSDIEAEDLDEYYFSAPVKRMIWQTILIIKELVKVLGCEPDRIFVEMTRRPDERKMRTESRRKKFEELYKKVKDEDVDWMKVIAHADETGSIRSKKMYLYLTQKGRCMYTGKHIELSDLFNNNLYDIDHIYPRHFVKDDNIDNNLVLVCKEKNAHKSDIYPLEDEILASQKNMWSELRRSELRRSGFITEEKYNRLIGRNPFTDEQKAGFIARQLVETSQGTKGVANILQQLLPESKIVYAKASNVSEFRNTRDIPKSRLINEFHHAHDAYLNIVVGNVYYVKFTQNPLNFIKNDYDRDKTKNNYNLSKMFDWDVERNGEVAWIAQKKDGEAGTIATVKKVLERNTPLMTRYSFEKKGRLTKEERHSAIDAKKDQYLPFKTSDSKMQDVTKYGGFNDIAGTYFFLVEHTEKKNRIRTIESVPLYIAKKIDQNPIELEKYCEQVLGLVDFDIRVRKIKIGSLIKRNNYFCYITGKKPGRLIVRNAVNLCLKNEWIKYISKLEKYNEKNVIDEMITKEKNQLLYLELINKFRNSIFSKRPNGIGKKLEDARNIFNDLSTEEQCIVLYKVLQLSAVMGYEADLSLIKYSKSAGAMQISKKIGDEDIYLINQSVTGLYEKKINLRTV

SEQ ID NO: 20348 - protein, 1353 aa, unidentified
  REGION 1..1353: note = Cas Enzyme sequence
MAAFKYYLGLDMGTNSVGWAVTDPNYNLLKAKGKDLWGIREFNEASTAVERRTHRISRRRRQREQVRIGLLKDYFHDAIGEVDPDFFQRLANSKYHLEDKDTEVRYKNNVFNDDDYTDKDYFDQYPTIYHLRKELIESTDKHDVRLVFLALLNMFKHRGHFLNSGLGENSGENNINNAYLELTNLLSEFTQYNLNETIDGKKIEDLLSRRDMSRTRKAEGLAEILGVDYKNKPYKELIRGLCGLKFNACAIFPEIQSDEVPKLDICLSEASFDEKSDEIANILGEDYFEIIMAMKDIYDIGSLAGIMKGHNYLSQARVTSYEKHKEDLRLLKNVIRKYCSKEDYDNFFNSEADGSYASYVGSYNSKTKQRRVGNKRSSEELYKAIKKLLKNVPAEDADVQRILMSIENETFLPKQLTASNGVIPNQVHAKEIKKILSNAERYLPFLREKDETGLSVSEKIMKLFSFQIPYYVGPTTEKSSKDGGNGWVVRKEEGQVLPWNIDEKIDMKATSEAFISRMVRRCTYISGEPVLPKSSLEYQSFCVLNEINNIKIDGERISVELKQDIYKEVFQKGKRVTKKQLCKYLHTRGIIEAEEQVTGIDVTINNALTTYGKFKAILGDDISKDSVQKMVEDIVFWCTVYGDSKKFLKDRIEEKYGEKLTKEQIKRIVGFKFKDWGNLSKNFLELSGADVSTGESVSIIRALWNNNLNLMELINSRLYNYKERLAEYQNTMMKTLSDIEAEDLDEYYFSAPVKRMIWQTILIIKELVKVLGCEPDRIFVEMTRRPDERKMRTESRRKKFEELYKKVKDEDVDWMKVIAHADETGSIRSKKMYLYLTQKGRCMYTGKHIELSDLFNNNLYDIDHVYPRHFVKDDNIDNNLVLVCKEKNAHKSDIYPLEDEILASQKNMWSELRRSGFITEEKYNRLIGRNPFTDEQKAGFIARQLVETSQGTKGVANILQQLLPESKIVYAKASNVSEFRNTRDIPKSRLINEFHHAHDAYLNIVVGNVYYVKFTQNPLNFIKNDYDRDKTKNNYNLSKMFDWDVERNGEVAWIAQKKDGEAGTIATVKKVLGRNTPLMTRYSFEGKGGLTNETLYGAKKAKEEGYIPFKSSDEKMKDVTKYGGFTSVTGAYFFLVEHTEKKKRSRMIESVPLYLAQKIEQNPHELEKYCEQVLGLIDFDIRVRKIKIGSLIKRKGYFFYITGKTGKQLIVRNAVNMYLKREWVKYISKLEKAVDKNIVEGIITKEKNELLYSELIEKFKNSIFSNRPNPVGDKLDKAKEKFINLDIEKQCIVLCQILQLSSVLGSECDMTLLGESAHCGKILISKKIGDEDIYLINQSVTGLYEKKINLRTV

SEQ ID NO: 20349 - protein, 1352 aa, unidentified
  REGION 1..1352: note = Cas Enzyme sequence
MTAFKYYLGLDMGTNSVGWAATDPGYRLLKAKGKDLWGIREFNEASGAVERRTHRISRRRRQREQVRIGILKEYFHDAICEVDPSFFQRLENSKYHEEDKDVEVRYKNNIFNDSNYTDKDYYNEYPTIYHLRNELISSTEKHDVRLVFLALLNMFKHRGHFLNAGLGENNGESNIDNVYFELTELLSELTEYHLSQDIDCKQIEAILSRRDMSRTHKAEELAGVLHVDLKNKPYKELIRGLCGLKFNACVVFPDVQSEEVTKLDICLSESTFDEKSDEIANIIGEDYFEIIMAMKEMFDIGSLASIMKGHNYLSQARVASYTKHKEDLKLLKEVIKKYCGKKEYDKFFNSDADGSYASYVGSYNSKNKERRVGNKRTSEELYKEIKKLLKDAQKEDGNVQKILTSIENETFLPKQLTASNGVIPNQVHAREMKKILSNAENYLPFLTEKDETGLSVSERILKLFTFQIPYYVGPTSENSGKNGGNGWVVRREDGQVLPWNIDEKIDMKATSEAFISRMVRRCTYISGEQVLPKASLEYQSYCVLNEINNIKIDGERISVELKQDIYKAVFQKGKKVTKKQLCKYLHTRGIIETEEQVTGVDVSINNALTTYGKFKPIFGEDISKDSVQKMIEDIVFWCTVYGDSKKFLKDRIEEKYGNKLSEEQIKRILGFKFKDWGNLSKKFLELNGADTSTGESISIIRALWNNNLNLMELINSSLYNYKECLAEYQNTMLKTLSEIEAEDLNEYYFSAPVRRMIWQTILVIKELVKVLGCEPERIFVEMTRKPDEHKTRTSSRRNKFEELYKKVKDETTDWMQVIANAEEDGKIRSKKMYLYLTQKGRCMYTGKHIELDDLFDNNLYDIDHIYPRHFVKDDNIDNNLVLVCKEKNAHKSDHYPIEEEIFLSQKKMWLELRKSGFITEEKYNRLMDRNPFSDEQKAGFIARQLVETSQGTKGVANILRQLLPGSKIVYAKASNVSEFRHTRDDIPKSRLVNDFHHAHDAYLNIVVGNVYYVKFTQNPLNFIKKDYDNYKEDYNLSKMFDWDVKRNGEVAWIAQRKDGEAGTITTVKKMLSRNTPLMTRYSFEGKDGLANETLYSAKKAKGEGYIPFKSSDDKMQDVTKYGGFTKVTGAYFFLVEHTEKKKRIRTIESVPVYLAQKIEQNPDELKKYCEEILGLIDADIRLKKIKIGSLIKRNGYFCYITGKTGNRLIVRNAVNLCLKNEWIKYISKLEKVKEKDAVDKIITKEKNEVLYSELIQKFKHGIFSKRPNPVGDKLEKDSEKFNNLSIKDQCAVLCQVLRMAAILGSECDMTLLGDSPNCGKMLISKKIGDEEIYLINQSVTGLYEKKINLHTV

SEQ ID NO: 20350 - protein, 1353 aa, unidentified
  REGION 1..1353: note = Cas Enzyme sequence
MATFKYYLGLDMGTNSVGWAVTDANYNLLKAKGKDLWGIREFNEASTAVERRTHRISRRRRQREQVRIGLLKDYFHDAIYEVDPVFFHRLTNSKYHMEDKDAEVRYKNNIFNDDNYTDKDYFNQYPTIYHLRRELLENTDKHDVRLVFLALLNMFKHRGHFLNSGLGENSGENNISNAYLELTSLLSELTPYNLNETIDCKKIEDLLSSKDMSRTRKAEGLAQILGVDYGNKPYKELIRGLCGLKFNAFVIFPEIQSDEVQKLDVCLSEASFDEKSDEMANIIGEDYFEIIMSMKEIYDIGSLAGIMKGHNYLSQARVTLYENHKEDLKILKDVIKKYCDKDEYDSFFNSDADGSYASYVGSYNSKIKQRRVGNKRSSEELYKTIKKILKNAPAEDVDVQSILKAIENETFLPKQLTASNGIIPNQVHAKEMKKILSNAESYLSFLNEKDETGLSVSEKILKLFTFQIPYYVGPTTEKSNKDGGNGWVVRKEEGQVLPWNINEKIDMKATSEAFISRMVRRCTYISDEPVLPKASLEYQSFCVLNEINNIKIDGERISVELKQDIYKDVFQKGKRVTQKQLCKYLHTRGVIEAEEQVAGIDITINNALTTYGKFKAIFGDDMSKDSVQKMVEDIVFWCTIYGDSKKFLKDRIEEKYGEKLTKEQIKRIVGFKFKDWGNLSKNFLELSGADVSTGESVSIIRALWNNNLNLMELINSRLYDYKDRLAEYQNTMIKTLSDIEAEDLDEYYFSASVKRMVWQTILIIKELVKVLGCEPDRIFVEMTRRPDERKMRTASRRKKFEELYKKVKDEDVDWLKVIAHADETGNIRSKKMYLYLTQKGRCMYTGRHIELSDLFNNNLYDIDHIYPRHFVKDDNIDNNLVLVCKEKNAHKSDIYPLEDDILTSQKNMWSELRRSGFITEEKYNRLIGRNSFTDEQKAGFIARQLVETSQGTKGVANILQQLLPESKIVYAKASNVSEFRNTRDIPKSRLINEFHHAHDAYLNIVVGNVYYVKFTQNPLNFIKNDYDRDKVKNNYNLSRMFDWDIKRNGEVAWIAQKEGGEAGTIVTVKKMLGRNTPLMTRYSFEGKGGLSNETLYSAKKAKEEGYIPFKASDEKLQDVTKYGGFTSVTCTYFFLVEHSEKKKRIRTIETVPLYLAQKIEQDPSELEKYCEQILGLIDFDIRVRKIKIGSLINRNGYFFYLTGKTGKQLIVRNAVNMCLKKEWIKYISKLEKAVDKNIVDEIITKEKNELLYLELLKKFRTSIFSNRPNPVGDKVDKSKQKFLSLDIEKQCILLCQILQSSSVLGSECDMTLLGESAHCGKMLISKKIGDEDIYLINQSVTGLYEKKINLRTV

SEQ ID NO: 20351 - protein, 1353 aa, unidentified
  REGION 1..1353: note = Cas Enzyme sequence
MATFKYYLGLDMGTNSVGWAVTDANYNLLKAKGKDLWGIREFNEASTAVERRTHRISRRRRQREQVRIGLLKDYFHDAIYEVDPDFFHRLTNSKYHMEDKDAEVRYKNNIFNDDNYTDKDYFNQYPTIYHLRRELLENTDKHDVRLVFLALLNMFKHRGHFLNSGLGENSGENNISNAYLELTSLLSELTPYNLNETIDCKKIEDLLSSKDMSRTRKAEGLAQILGVDYGNKPYKELIRGLCGLKFNACVIFPEIQSDEVQKLDVCLSEASFDEKSDEIANIIGEDYFEIIMSMKEIYDIGSLAGIMKGHNYLSQARVTLYENHKEDLKILKDVIKKYCDKDEYDSFFNSDADGSYASYVGSYNSKIKQRRVGNKRSSEELYKTIKKILKNAPAEDVDVQSILKAIENETFLPKQLTASNGIIPNQVHAKEMKKILSNAESYLSFLNEKDETGLSVSEKILKLFTFQIPYYVGPTTEKSNKDGGNGWVVRKEEGQVLPWNINEKIDMKATSEAFISRMVRRCTYISDEPVLPKASLEYQSFCVLNEINNIKIDGERISVELKQDIYKDVFQKGKRVTKKQLCKYLHTRGVIEAEEQVAGIDITINNALTTYGKFKAIFGDDMSKDSVQKMVEDIVFWCTIYGDSKKFLKDRIEEKYGEKLTKEQIKRIVGFKFKDWGNLSKNFLELSGADVSTGESVSIIRALWNNNLNLMELINSRLYDYKDRLAEYQNTMIKTLSDIEAEDLDEYYFSAPVKRMVWQTILIIKELVKVLGCEPDRIFVEMTRRPDERKMRTASRRKKFEELYKKVKDEDVDWLKVIAHADETGNIRSKKMYLYLTQKGRCMYTGRHIELSDLFNNNLYDIDHIYPRHFVKDDNIDNNLVLVCKEKNAHKSDIYPLEDDILTSQKNMWSELRRSGFITEEKYNRLMGRNSFTDEQKAGFIARQLVETSQGTKGVANILQQLLPESKIVYAKASNVSEFRNTRDIPKSRLINEFHHAHDAYLNIVVGNVYYVKFTQNPLNFIKNDYDRDKVKNNYNLSRMFDWDIKRNGEVAWIAQKEGGEAGTIVTVKKMLGRNTPLMTRYSFEGKGGLTNETLYSAKKVKEEGYIPFKASDEKLQDVTKYGGFTSVTCAYFFLVEHSEKKKRIRTIESVPLYLAQKIEQDPNELEKYCEQILRLIDFDIRVRKIKIGSLIKYHDYFFYVTGKTGQRLLLRNAVNMCLKKEWVKYISKLEKVRDKAIIDEIVTKEKSELLYLELLKKFKTSIFSNRPNPVGDKLDKSKDKFLNLDIEKQCILLCQILQLSSVLGSECDMTLLGESAHCGKMLISKKIGDEDIYLINQSVTGLYEKKINLRTV

SEQ ID NO: 20352 - protein, 1264 aa, unidentified
  REGION 1..1264: note = Cas Enzyme sequence
LTNSKYHMEDKDAEVRYKNNIFNDDNYTDRDYFNQYPTIYHLRRELLENTDKHDVRLVFLALLNMFKHRGHFLNSGLGENSGENNISNAYLELNSLLSELTPYNLNETIDCKKIEDLLSSKDMSRTRKAEGLAQILGVDYGNKPYKELIRGLCGLKFNACVIFPEIQSDEVQKLDVCLSEASFDEKSDEIANIIGEDYFEIIMSMKEIYDIGSLAGIMKGHNYLSQARVTLYENHKEDLKILKDVIKKYCDKDEYDSFFNSDADGSYASYVGSYNSKIKQRRVGNKRSSEELYKTIKKILKNAPAEDVDVQSILKAIENETFLPKQLTASNGIIPNQVHAKEMKKILSNAESYLTFLNEKDETGLSVSEKILKLFTFQIPYYVGPTTEKSNKDGGNGWVVRKEEGQVLPWNINEKIDMKATSEAFISRMVRRCTYISDEPVLPKASLEYQSFCVLNEINNIKIDGERISVELKQDIYKDVFQKGKRVTKKQLCKYLHTRGVIEAEEQVAGIDITINNALTTYGKFKAIFGDDMSKDSVQKMVEDIVFWCTIYGDSKNFLKDRIEEKYGEKLTKEQIKRIVGFKFKDWGNLSKNFLELSGADVSTGESVSIIRALWNNNLNLMELINSRLYDYKDRLAEYQNTMIKTLSDIEAEDLDEYYFSAPVKRMVWQTILIIKELVKVLGCEPDRIFVEMTRRPDERKMRTASRRKKFEELYKKVKDEDVDWLKVIAHADETGNIRSKKMYLYLTQKGRCMYTGRHIELSDLFNNNLYDIDHIYPRHFVKDDNIDNNLVLVCKEKNAHKSDIYPLEDDILTSQKNMWSELRRSGFITEEKYNRLMGRNSFTDEQKAGFIARQLVETSQGTKGVANILQQLLPESKIVYAKASNVSEFRNTRDIPKSRLINEFHHAHDAYLNIVVGNVYYVKFTQNPLNFIKNDYDRDKVKNNYNLSRMFDWDIKRNGEVAWIAQKEGGEAGTIVTVKKMLGRNTPLMTRYSFEGKGGLTNETLYSAKKAKEEGYIPFKASDEKLQDVTKYGGFTSVTCAYFFLVEHSEKKKRSRTIESVPLYLAQKIEQDPNELEKYCEQILGLIDFDIRVRKIKIGSLINRNGYFFYLTGKTGKQLIVRNAVNMCLKKEWIKYISKLEKVRDKAIIDEIVTKEKSELLYLELLKKFKTSIFSNRPNPVGDKLDKSKDKFLNLDIEKQCIILCQILQLSSVLGSECDMTLLGESAHCGKMLISKKIGDEDIYLINQSVTGLYEKKINLRTV

SEQ ID NO: 20353 - protein, 1352 aa, unidentified
  REGION 1..1352: note = Cas Enzyme sequence
MTAFKYYLGLDMGTNSVGWAATDPEYRLLKAKGKDLWGIREFNEASGAVERRTHRISRRRRQREQVRIGILKDYFHDAICEVDPSFFQRLENSKYHEEDKDVEVRYKNNIFNDSNYTDKDYFNEYPTIYHLRNELISSTEKHDVRLVFLALLNMFKHRGHFLNAGLGENNGESNIDNVYFELTELLSELTEYHLSQDIDCKQIEAILSRRDMSRTHKAEELAGVLHVDLKNKPYKELIRGLCGLKFNACVVFPDVQSEEVTKLDICLSESTFDEKSDEIANIIGEDYFEIIMAMKEMFDIGSLASIMKGHNYLSQARVASYTKHKEDLKLLKEVIKKYCGKKEYDKFFNSDADGSYASYVGSYNSKNKERRVGNKRTSEELYKEIKKLLKDAQKEDENVQKILTSIENETFLPKQLTASNGVIPNQVHAREMKKILSNAENYLPFLTEKDETGLSVSERILKLFTFQIPYYVGPTSENSGKNGGNGWVVRREDGQVLPWNIDEKIDMKATSEAFISRMVRRCTYISGEQVLPKASLEYQSYCVLNEINNIKIDGERISVELKQDIYKAVFQKGKKVTKKQLCKYLHTRGIIETEEQVTGVDVSINNALTTYGKFKPIFGEDISKDSVQKMIEDIVFWCTVYGDSKKFLKDRIEEKYGNKLSEEQIQRILGFKFKDWGNLSKKFLELNGADTSTGESISIIRALWNNNLNLMELINSSLYNYKECLAEYQNTMLKTLSEIEAEDLNEYYFSAPVRRMIWQTILVIKELVKVLGCEPERIFVEMTRKPDEHKTRTSSRRNKFEELYKKVKDETTDWMQVIANAEEDGKIRSKKMYLYLTQKGRCMYTGKHIELDDLFDNNLYDIDHIYPRHFVKDDNIDNNLVLVCKEKNAHKSDHYPIEEEIFLSQKKMWLELRKSGFITEEKYNRLMGRNPFSDEQKAGFIARQLVETSQGTKGVANILRQLLPGSKIVYAKASNVSEFRRTRDDIPKSRLVNDFHHAHDAYLNIVVGNVYYVKFTQNPLNFIKKDYDNYKEDYNLSKMFDWDVKRNGEVAWIAQRKDGEAGTITTVKKMLSRNTPLMTRYSFEGKGGLANETLYSAKKAKGEGYIPFKSSDDKMQDVTKYGGFTSVTGAYFFLVEHAEKKKRIRTIESVPVYLAQKIEQNPDELKKYCEEILGLIDADIRLKKIKIGSLIKRNGYFCYITGKTGKQLIVRNAVNLCLKNEWIKYISKLEKVKEKDAVDKIITKEKNEVLYSELIQKFKHGIFSKRPNPVGDKLEKGSEKFSNLSIKEQCTVLCQILQLAAVLGSECDMTLLGESAHCGKMLISKKIGDEEIYLINQSVTGLYEKKINLHTV

SEQ ID NO: 20354 - protein, 1352 aa, unidentified
  REGION 1..1352: note = Cas Enzyme sequence
MTAFKYYLGLDMGTNSVGWAATDPEYRLLKAKGKDLWGIREFNEASGAVERRTHRISRRRRQREQVRIGILKDYFHDAICEVDPSFFRRLENSKYHEEDKDVEVRYKNNIFNDGNYTDKDYFNEYPTIYHLRNELISSTEKHDVRLVFLALLNMFKHRGHFLNAGLGENNGESNIDNAYFELTELLSELTEYHLSQDIDCKQIEAILSRRDMSRTHKAEELAGVLHVDLKNKPYKELIRGLCGLKFNACVVFPDVQSEEVTKLDICLSESSFDEKSDEIANIIGEDYFEIIMAMKEMFDIGSLASIMKGHNYLSQARVASYTKHKEDLKLLKEVIKKYCGKKEYDKFFNSDADGSYASYVGSYNSKNKERRVGNKRTSEELYKEIKKLLKDAPKEDENVQKILTSIENETFLPKQLTASNGVIPNQVHAREMKKILSNAENYLPFLTEKDETGLSVSERILKLFTFQIPYYVGPTSENSGKNGGNGWVVRREDGQVLPWNIDEKIDMKATSEAFISRMVRRCTYISGEQVLPKASLEYQSYCVLNEINNIKIDGERISVELKQDIYKAVFQKGKKVTKKQLCKYLHTRGIIETEEQVTGVDVSINNALTTYGKFKPIFGEDISKDSVQKMIEDIVFWCTVYGDSKKFLKDRIEEKYGNKLSEEQIKRILGFKFKDWGNLSKKFLELNGADTSTGESISIIRALWNNNLNLMELINSSLYNYKECLAEYQNTMLKTLSEIEAEDLNEYYFSAPVRRIIWQTILVIKELVKVLGCEPERIFVEMTRKPDEHKTRTSSRRNKFEELYKKVKDEATDWMQVIAKAEEDGKIRSKKMYLYLTQKGRCMYTGKHIELDDLFDKNLYDIDHIYPRHFVKDDNIDNNLVLVCKEKNAHKSDHYPIEEEIFLSQKKMWLELRKSGFITEEKYNRLMGRSPFSDEQKAGFIARQLVETSQGTKGVANILRQLLPGSKIVYAKASNVSEFRHTRDDIPKSRLVNDFHHAHDAYLNIVVGNVYYVKFTQNPLNFIKKDYDKYKEDYNLSKMFDWDVKRNGEVAWIAQRKDGEAGTITTVKRMLSRNTPLMTRYSFEGKGGLANETLCSAKKAKGEGYIPFKSSDDKMQDVTKYGGFTKVTGAYFFLVEHTEKKKRIRTIESVPVYLAQKIEQNPDELKKYCEEILGLVDADIRLKKIKIGSLIKRNGYFCYITGKTGNQLSVRNAVNLCLKNEWIKYISKLEKVKEKDAVDEIITKEKNEVLYSELIQKFKHGIFSKRPNPVEDKLEKGSEKFSNLSIKEQCAVLCQILQLAAVLGSECDMTLLGESAHCGKMLISKKIGDEEIYLLNQSVTGLYEKKINLHTV

SEQ ID NO: 20355 - protein, 1352 aa, unidentified
  REGION 1..1352: note = Cas Enzyme sequence
MTAFKYYLGLDMGTNSVGWAATDPEYRLLKAKGKDLWGIREFNEASGAVERRTHRISRRRRQREQVRIGILKDYFHDAICEVDPGFFQRLENSKYHEEDKDVEVRYKNNIFNDSNYTDKDYFNEYPTIYHLRNELISSTEKHDVRLVFLALLNMFKHRGHFLNAGLGENNGESNIDNAYFELTELLSELTEYHLSQDIDCKQIEAILSRRDMSRTHKAEELAGVLHVDLKNKPYKELIRGLCGLKFNACVVFPDVQSEEVTKLDICLSESTFDEKSDEIANIIGEDYFEIIMAMKEMFDIGSLASIMKGHNYLSQARVASYTKHKEDLKLLKEVIKKYCGKKEYDKFFNSDADGSYASYVGSYNSKNKERRVGNKRTSEELYKEIKKLLKDAQKEDENVQKILTSIENETFLPKQLTASNGVIPNQVHAREMKKILSNAENYLPFLTEKDETGLSVSERILKLFTFQIPYYVGPTSENSGKNGGNGWVVRREDGQVLPWNIDEKIDMKATSEAFISRMVRRCTYISGEQVLPKASLEYQSYCVLNEINNIKIDGERISVELKQDIYKAVFQKGKKVTKKQLCKYLHTRGIIETEEQVTGVDVSINNALTTYGKFKPIFGEDISKDSVQKMIEDIVFWCTVYGDSKKFLKDRIEEKYGNKLSEEQIKRILGFKFKDWGNLSKKFLELNGADTSTGESISIIRALWNNNLNLMELINSSLYNYKECLAEYQNTMLKTLSEIEAEDLNEYYFSAPVRRMIWQTILVIKELVKVLGCEPERIFVEMTRKPDEHKTRTSSRRNKFEELYKKVKDETTDWMQVIANAEEDGKIRSKKMYLYLTQKGRCMYTGKHIELDDLFDNNLYDIDHIYPRHFVKDDNIDNNLVLVCKEKNAHKSDHYPIEEEIFLSQKKMWLELRKSGFITEEKYNRLMDRNPFSDEQKAGFIARQLVETSQGTKGVANILRQLLPGSKIVYAKASNVSEFRCTRDDIQKSRLVNDFHHAHDAYLNIVVGNVYYVKFTQNPLNFIKKDYDKYKEDYNLSKMFDWDVKRNGEVAWIAQRKDGAAGTITTVKRMLSRNTPLMTRYSFDGKGGLTNETLYSAKKAKGEGYIPFKSSDDKMQDVTKYGGFTSVTGAYFFLVEHTEKKKRIRTIESVPVYLAQKIEQNPDELKKYCEEILGLIDADIRLKKIKIGSLIKRNGYFCYITGKTVNRLIVRNAVNLCLKNEWIKYISKLEKVKEKDAVDKIITKEKNEVLYSELIQKFKHGIFSKRPNPVGDKLEKDSEKFNNLSIKDQCAVLCQVLRMAAILGSECDMTLLGDSPNCGKMLISKKIGDEEIYLINQSVTGLYEKKINLHTV

SEQ ID NO: 20356 - protein, 1352 aa, unidentified
  REGION 1..1352: note = Cas Enzyme sequence
MTAFKYYLGLDMGTNSVGWAATDPEYRLLKAKGKDLWGIREFNEASGAVERRTHRISRRRRQREQVRIGILKDYFHDAICEVDPSFFRRLENSKYHEEDKDVEVRYKNNIFNDGNYTDKDYFNEYPTIYHLRNELISSTEKHDVRLVFLALLNMFKHRGHFLNAGLGENNGESNIDNAYFELTELLSELTEYHLSQDIDCKQIEAILSRRDMSRTHKAEELAGVLHVDLKNKPYKELIRGLCGLKFNACVVFPDVQSEEVTKLDICLSESSFDEKSDEIANIIGEDYFEIIMAMKEMFDIGSLASIMKGHNYLSQARVASYTKHKEDLKLLKEVIKKYCGKKEYDKFFNSDADGSYASYVGSYNSKNKERRVGNKRTSEELYKEIKKLLKDAPKEDENVQKILTSIENETFLPKQLTASNGVIPNQVHAREMKKILSNAENYLPFLTEKDETGLSVSERILKLFTFQIPYYVGPTSENSGKNGGNGWVVRREDGQVLPWNIDEKIDMKATSEAFISRMVRRCTYISGEQVLPKASLEYQSYCVLNEINNIKIDGERISVELKQDIYKAVFQKGKKVTKKQLCKYLHTRGIIETEEQVTGVDVSINNALTTYGKFKPIFGEDISKDSVQKMIEDIVFWCTVYGDSKKFLKDRIEEKYGNKLSEEQIKRILGFKFKDWGNLSKKFLELNGADTSTGESISIIRALWNNNLNLMELINSSLYNYKECLAEYQNTMLKTLSEIEAEDLNEYYFSAPVRRIIWQTILVIKELVKVLGCEPERIFVEMTRKPDEHKTRTSSRRNKFEELYKKVKDEATDWMQVIAKAEEDGKIRSKKMYLYLTQKGRCMYTGKHIELDDLFDKNLYDIDHIYPRHFVKDDNIDNNLVLVCKEKNAHKSDHYPIEEEIFLSQKKMWLELRKSGFITEEKYNRLMGRSPFSDEQKAGFIARQLVETSQGTKGVANILRQLLPGSKIVYAKASNVSEFRHTRDDIPKSRLVNDFHHAHDAYLNIVVGNVYYVKFTQNPLNFIKKDYDKYKEDYNLSKMFDWDVKRNGEVAWIAQRKDGEAGTITTVKRMLSRNTPLMTRYSFEGKGGLANETLCSAKKAKGEGYIPFKSSDDKMQDVTKYGGFTKVTGAYFFLVEHTEKKKRIRTIESVPVYLAQKIEQNPDELKKYCEEILGLVDADIRLKKIKIGSLIKRNGYFCYITGKTGNRLSVRNAVNLCLKNEWIKYISKLEKVKEKDAVDEIITKEKNEVLYSELIQKFKHGIFSKRPNPVEDKLEKGSEKFSNLSIKEQCAVLCQILQLAAVLGSECDMTLLGESAHCGKMLISKKIGDEEIYLLNQSVTGLYEKKINLHTV

SEQ ID NO: 20357 - protein, 1370 aa, unidentified
  REGION 1..1370: note = Cas Enzyme sequence
MEKQEYYLGLDMGTSSVGWAVTNTKYELLRKKGKDMWGIREFDEANSAAERRTHRVDRRRRQRQLVRLGLLKSYFSEEIAKIDPDFFIRLENSKYFLEDKDERVRTKNGVFNDDDYKDVDYYRQYPTIFHLRKALLDLDHHGEKFDVRLVYLALANMFKHRGHFLLNAEGDALNTEQVDIVYQEILDRLENDYEIIIEHKSIQQVIDVLGSTDIGRKKKHEELQKLFGVGKKDKRVNEFLRCLCGLSVNAKLIFDENAEEKVTLCFNDFSYTDKISELMEQLTEEEYALIEQLKSIYDYAVLAGTLKGYDYLSCARVELYEKHKKDLKLLKELYRKYKTEEEYNRMFRSNTDGTYSAYVNSLNSTDAILNSNEVVEDSKYRRNMKKRKSEDIYATIKKAFKDITEDKDVSFVLEKIEKEQFLPKQLTGANGVIPNQVHKKEMERILQNAETYLPFLKDKDESGLTVSERIIQLFTFQLPYYVGPLGENSKTGWIVRKEKGAILPWNIHDKVDMSATSEAFIGNLIRTCTYIQGEKVMPKASLAYERYCVLNEINNLCIDGERIDTKLKQQIYKDCFMKGKRVSKKQLCSYLAAQNAIHSEEQLTGIDKNINNSLSSYGKMYAIFGERLKEDAILAAAEDIIYWGTIFGDSKKMLKQRLKKYVEEGIIDEKQLKRILGYKFKDWGRFSKSLLSLSGCDKSTGEIITLGQAMWEYSLNFMELINSEEFTFKEEMEKHTKVAMKQLSEFTYEDLEDSYFSVSVKRMIWQTLLVVREIEQVMGCAPKRIFVEMTRTEEEKGDKGRKESRGNQLLELYKSIKNTESHNWKEEIAAADKDGKLRSKKLFLYYMQMGRDMYTGEEIDLGRLYDDNLYDIDHIYPRHYVKDDSIMNNLVLVNRRANQDIKKDLYPIPEQIKANPKVRELWNALHKQKLITDEKYARLNSNTAFSEKQLGDFIARQLVETGQGTKGVADLLEQLFKNTVIVYAKASNVSDFRKDNGFLKSRLVNDFHHAQDAYLNIVVGNVYYTKFTKNPWNFIRKDYEQDKEKNRYNLARMFDWNVVRGSETAWLANGKDGAGTITTVRKMMQKNTPLLTRMNFEQHGSIANATLYSAKKAKSENYLPLKTADEKMSDVKKYGGYTSMSIAYYFIVHHKEGKKENVTIEALPLYCKDKVEREENGLEKYCEEVLGYGEVNIIRRKLKIQTLLEFNGYQVHLSGKTGNQLILRNAISLCLSTKWITYIKKLKKAVNIQIVEEVVTSEENIKLYNLLADKHANTVYSKRPNAYGEKLLADREAFIKLDLRQQCEVLLQILSLTKIGTTEANLLLIGESEHSGKILISKNLKASDRPAVISQSPCGLYEKKEWIFDKVVEK

SEQ ID NO: 20358 - protein, 1369 aa, unidentified
  REGION 1..1369: note = Cas Enzyme sequence
MEKQEYYLGLDMGTSSVGWAVTNTKYELLRKKGKDMWGIREFEEANSAAERRTNRVNRRRRQRQVVRLGLLKSYFSEEIAKIDPNFFIRLENSKYFLEDKDERVRTKNGVFNDDTYKDVDYYREYPTIFHLRKALLDIDSTGEKYDVRLVYLALSNMFKHRGHFLLNAEGDALNTEQVDLVYQEILDRLKNDYEIIIEQKPVQQVIAIIGSTDIGRKKKHEELQKLFEVAKKDRRANELLKCLCGLSINAKLIFDEKTEEKVTICFNDFSYTDKISELMEQLTEEEYTLIEQLKSIYDYAVLAGTLKGYDYLSCARVELYEKHKKDLKLLKALYRKYKTEEEYNKMFRSNLEGTYSAYVNSLNSTDAIFKSDEAVEGSKYRRNMNKRKSENIYATIKKAFTDITEDKDVGFVLEQIEKEQFLPKQLTGANGVIPNQVHKKEMERILNNAENYLPFLKNKDESGLTVSERIIRLFTFQIPYYVGPLGENSKTGWIVRKEKGAILPWNINEKVDMSATSEAFIGNLIRTCTYIHDEKVMPKASLAYERYCVLNEINNLCIDGERIDTKLKQQIYEDCFMKGKRVTKKQLCSYLVAQNAIHSEEQLTGIDKNINNSLSSYGKMYAIFGERLKEDAILAAAEDIIYWGTIFGDSKKMLKQRLKKYVEEGIIDENQLKRILGYKFKDWGRFSKALLSLSGCDKSTGEIITLGQAMWEYSLNFMELINSEEFTFKEELEKHTQVAMKQLSEFTYEDLEDSYFSVPVKRMIWQTLLVVREIEKVMGYAPKRIFVEMTRTEEKGDKGRKESRGNQLLELYKSIKNTDSHNWKEEIAAADKDGKLRSKKLFLYYMQMGRDMYTGEEIDLGRLYDDNLYDIDHIYPRHYVKDDSIMNNLVLVNRRANQDIKKDLYPIPEQIKANPNVHMLWDALHKQKLITDEKYARLTSNTAFSEKQLGDFIARQLVETGQGTKGVADLLEQLFKDTVIVYAKASNVSDFRRDNGFLKSRLVNDFHHAQDAYLNIVVGNVYYTKFTKNPWNFICKDYEKDKEKNRYNLARMFDWNVVRGSETAWIVERKDEKGTISTVRKMMQKNTPLLTRMNFEQHGSIANATLYSAKKAKSENYLPLKTADEKMSDVKKYGGYTSMSIAYYFIVHHKEDKKENVTIEALPLYCKDKVEREENGLEKYCEEVLGYGEVNIIRRKLKIQSLLEFNGYQVHLSGKTGNQLILRNAISLCLSTKWITYIKKLEKAVNIQIVEEVVTPEENIKLYNLLADKHANTVYSKRPNAYGEKLLADREIFVTLEFGKQCEALLQILSLTKIGSTEANLLLIGESEHSGKILISKNLKASDRPAVINQSPCGLYEKKEWIFDKIVEK

SEQ ID NO: 20359 - protein, 1369 aa, unidentified
  REGION 1..1369: note = Cas Enzyme sequence
MEKQEYYLGLDMGTSSVGWAVTNTKYELLRKKGKDMWGIREFDEAKSAAERRTHRINRRRRQRQLVRLGLLKSYFCEEIAKIDPNFFIRLENSKYFLEDKDERVRTKNGVFNDDNYKDVDYYREYPTIFHLRQALLDIDNTGEKFDVRLVYLALANMFKHRGHFLLNAEGDALNTEQVDLVYQEILDRLENDYEIIIEHKPIQQVIDIIANTDNGRKKKHEELQELFGVVKKEKSSNELLKCLCGLSVNAKLIFDTNSEEKVTLCFNDFSYTDKIPELMEQLTEEEYALIEQLKSIYDYAVLAGTLKGYDYLSCARVKLYGKHKKDLKLLKALYRKYKTEEEYNKMFRSNIDGTYSAYVNSLNSEDAIFKSDEVVEGGKYRRNMKERKSEHIYSTIKKAFKDITDDKDVSFVLEQIEKEQFLPKQLTGANGVIPNQVHKKEMERILKNAENYLPFLKEKDESGLTVSERIIQLFTFQIPYYVGPLGENSKTGWIVRKEKGAILPWNINEKVDMSATSEAFIGNLIRSCTYIQGEKVMPKASLAYERYCVLNEINNLCIDGERIDTKLKQQIYKDCFMKGKRVTKKQLCSYLAAQNAIHSEEQLTGIDKNINNSLSSYGKMDAIFGERLKEDAILAAAEDIIYWGTIFGDSKKMLKQRLKKYVKEGIIDENQLKRILGYKFKDWGRFSKALLTLNGCDKSTGEIISLGQAMWEYSLNFMELINSEEFTFKEELKKHTTDAMKSLSEFTYEDLEDGYFSVPVKRMIWQTLLVVREIEKVMGYAPKRIFVEMTRTEEEKGDKGRKESRGNQLLELYKSIKNTESHNWREEIATADKDGKLRSKKLFLYYMQMGRDMYTGEEIDLGRLYDDNLYDIDHIYPRHYVKDDSIMNNLVLVNKRSNQDIKKDFYPIPEQIKTNPKVRELWDTLHKQKLITDEKYARLTSNTAFSEKQLGDFIARQLVETGQGTKGVADLLEQLFKDTDIVYAKATNVSDFRRDNGLLKSRLVNDFHHAQDAYLNIVVGNVYYTKFTRNPWNFIRKDYEKDKEKNRYNLARMFDWNVVRGSETAWIAERKDEKGTIATVRKMMQKNTPLMTRMNFEQHGGIANATLYSAKKAKVENYIPLKASDERMKDVTKYGGFTSATIAYYFIVHHKEGKKENVSIEGLPLHCKTKVEQDANGLEKYCEEVLGYSEVNILRRKLKIQSLLEFNGYQVHLSGKTGDRLILRNAMNLCLPAKWVTYIKKLEKAVNVQIFEEVITSGENIKLYDILTDKHANTVYAKRPNAYGQKLLADRKTFVALQLKQQCEALLQMLQLTKIGSTETNLLLIGESEHSGKILISKNLKTSDRPAIISQSATGLYEKKEWIFDDKVK

SEQ ID NO: 20360 - protein, 1369 aa, unidentified
  REGION 1..1369: note = Cas Enzyme sequence
MEKQEYYLGLDMGTSSVGWAVTNTKYELLRKKGKDMWGIREFDEANSAAERRTHRVDRRRRQRNVVRLGLLKSYFSEEIAKIDPNFFIRLDNSKYFLEDKDERVRTKNGIFDDDNYNDTNYYKDYPTIFHLRKALLDIDNTGAKFDARLVYLALTNMFKHRGHFLLNAEGDALNTEQVDIVYQEILDRLENDYEIIIEHKPIQQVIDIIANTDNGRKKKHEELQELFGVVKKEKSSNELLKCLCGLSVNAKLIFDTNSEEKVTLCFNDFSYTDKIPELMEQLTEEEYALIEQLKSVYDYAVLAGTLKGYDYLSCARVKLYGKHKKDLKLLKALYRKYKTEEEYNKMFRSNIDGTYSAYVNSLNSEDAIFKSDEVVEWGKYRRNMKERKSEHIYSTIKKAFKDITDDKDVSFVLEQIEKEQFLPKQLTGANGVIPNQVHKKEMERILKNAENYLPFLKEKDESELTVSERIIQLFSFQLPYYVGPIGENSKTGWVVRKEGGKVLPWNINDKIDMSATSEAFIGNLIRTCTYIHDEKVMPKASLAYERYCVLNEINNLCIDGERIDTKLKQQIYKDCFMKGKRVTKKQLCSYLAAQNAIHSEEQLTGIDKNINNSLSSYGKMYAIFGERLKEDAILAAAEDIIYWGTIFGDSKKMLKQRLKKYVEEGIIDENQLKRILGYKFKDWGRFSKAILTLSGCDKSTGEIITLGQAMWEYSLNFMELINSEEFTFKEELEKHTTDAMKSLSEFTYEDLEDSYFSVPVKRMIWQTLLVVREIEKVMGYAPKRIFVEMTRTEEEKGDNGRKESRGNQLLELYKSIKNTESHNWKEEIATADKDGKLRSKKLFLYYMQMGRDMYTGEEIDLGRLYDDNLYDIDHIYPRHYVKDDSIMNNLVLVNKRANQDIKKDFYPIPEQIKANPKVRELWDTLHKQKLITDEKYARLSANTAFTEKQLGDFIARQLVETGQGTKGVADLLEQLFKDTDIVYAKATNVSDFRRDNGLLKSRLINDFHHAQDAYLNIVVGNVYYTKFTRNPWNFIRKDYEKDKEKNRYNLARMFDWNVVRGSEIAWIAGRKDEKGTIATVRKMMQKNTPLMTRMNFEQHGAIANATLYSAKKAKVENYIPLKTSDERMKDVTKYGGFTSATIAYYFIVHHKEGKKENVSIEGLPLHCKTKVEQDANGLEKYCEEVLGYSEVNILRRKLKIQSLLEFNGYQVHLSGKTGDRLILRNAMNLCLPAKWVTYIKKLEKAVNVQIFEEVITSGENIKLYDILTDKHANTVYAKRPNAYGQKLLADRETFVALQLKQQCEALLQMLQLTKIGSTETNLLLIGESEHSGKILISKNLKTSDRPAIISQSATGLYEKKEWIFDDKVK

SEQ ID NO: 20361 - protein, 1161 aa, unidentified
  REGION 1..1161: note = Cas Enzyme sequence
GSTDIGRKKQHEELQGLFGVGKKDKSANELLEYLCGLNVNAKLIFDKNAEEMVKLCINDFSDEDKISALKEQLTEEEYTLIEQLKSIYDYAVLAGTLKGYDYLSCARVKLYGKHKKDLKLLKALYRKYKTEEEYNKMFRSNIDGTYSAYVNSLNSEDAIFKSDEVVEWGKYRRNMKERKSEHIYSTIKKAFKDITDDKDVSFVLEQIEKEQFLPKQLTGANGVIPNQVHKKEMERILKNAENYLPFLKEKDESELTVSERIIQLFSFQLPYYVGPIGENSKTGWVVRKEGGKVLPWNINDKIDMSATSEAFIGNLIRTCTYIHDEKVMPKASLAYERYCVLNEINNLCIDGERIDTKLKQQIYEDCFMKGKRVTKKQLCSYLVAQNAIHSEEQLTGIDKNINNSLSSYGKMYAIFGERLKEDAILAAAEDIIYWGTIFGDSKKMLKQRLKKYVEEGIIDENQLKRILGYKFKDWGRFSKALLSLSGCDKSTGEIITLGQAMWEYSLNFMELINSEEFTFKEELEKHTQVAMKQLSEFTYEDLEDSYFSVPVKRMIWQTLLVVREIEKVMGYAPKRIFVEMTRTEEEKGDKGRKESRGNQLLELYKSIKNTDSHNWKEEIAAADKDGKLRSKKLFLYYMQMGRDMYTGEEIDLGRLYDDNLYDIDHIYPRHYVKDDSIMNNLVLVNRRANQDIKKDLYPIPEQIKANPNVHMLWDALHKQKLITDEKYARLTSNTAFSEKQLGDFIARQLVETGQGTKGVADLLEQLFKDTVIVYAKASNVSDFRRDNGFLKSRLVNDFHHAQDAYLNIVVGNVYYTKFTKNPWNFICKDYEKDKEKNRYNLARMFDWNVVRGSETAWIVERKDEKGTISTVRKMMQKNTPLLTRMNFEQHGSIANATLYSAKKAKSENYLPLKTADEKMSDVKKYGGYTSMSIAYYFIVHHKEDKKENVTIEALPLYCKDKVEREENGLEKYCEEVLGYGEVNIIRRKLKIQSLLEFNGYQVHLSGKTGNQLILRNAISLCLSTKWITYIKKLEKAVNIQIVEEVVTPEENIKLYNLLADKHANTVYSKRPNAYGEKLLADREIFVTLEFGKQCEALLQILSLTKIGSTEANLLLIGESEHSGKILISKNLKASDRPAVINQSPCGLYEKKEWIFDKIVEK

SEQ ID NO: 20362 - protein, 1370 aa, unidentified
  REGION 1..1370: note = Cas Enzyme sequence
MEKQEYYLGLDMGTSSVGWAVTDTKYELLRKKGKDMWGIREFDEAKSATERRTHRINRRRRQRQVVRLGLLKSYFSEEIAKIDPNFFIRLENSKYFLEDKDERVRTKNGVFNDDNYKDVDYYREYPTIFHLRQALLDIDNTGEKYDVRLVYLALANMFKHRGHFLLNAEGDALNTEQVDIVYQEILDRLENDYEIIIEHKPIQQVIDIIANTDNGRKKKHEELQELFGVVKKEKSSNELLKCLCGLSVNAKLIFDTNSEEKVTLCFNDFSYTDKIPELMEQLTEEEYALIEQLKSIYDYAVLAGTLKGYDYLSCARVKLYGKHKKDLKLLKALYRKYKTEEEYNKMFRSNIDGTYSAYVNSLNSEDAIFKSDEVVEGGKYRRNMKERKSEHIYSTIKKAFKDITDDKDVSFVLEQIEKEQFLPKQLTGANGVIPNQVHKKEMERILKNAENYLPFLKEKDESGLTVSERIKQLFTFQLPYYVGPIGENSKTGWVVRKEGGKVLPWNINDKIDMSATSEAFIGNLIRTCTYIHDEKVMPKASLAYERYCVLNEINNLCIDGERMDTKLKQQIYEDCFMKGKRVTKKQLCSYLVAQNAIHSEEQVTGIDKTINNSLSSYGKMYAIFGERLKEDAILAAAEDIIYWGTIFGDSKKMLKQRLKKYVEEGIIDENQLKRILGYKFKDWGRFSKALLTLNGCDKSTGEIISLGQAMWEYSLNFMELINSEEFTFKEELKKNTTDAMKSLSEFTYEDLEDGYFSVPVKRMIWQTLLVVREIEKVMGYAPKRIFVEMTRTEEEKGDKGRKESRGNQLLELYKSIKNTESHNWREEIATADKDGKLRSKKLFLYYMQMGRDMYTGEEIDLGRLYDDNLYDIDHIYPRHYVKDDSIMNNLVLVNKRANQDIKKDFYPIPEQIKANPKVRELWDTLHKQKLITDEKYARLSTNTAFTEKQLGDFIARQLVETGQGTKGIADLLEQLFKDTDIVYAKATNVSDFRRDNGLLKSRLINDFHHAQDAYLNIVVGNVYYTKFTRNPWNFIRKDYEKDKEKNRYNLARMFDWNVVRGSETAWIAGRKDEKGTIATVRKMMQKNTPLMTRMNFEQHGAIANATLYSAKKAKVENYIPLKASDERMKDVTKYGGFTSATIAYYFIVHHNEGKKENVSIEALPLHCKTKVEQDANGLEKYCEEVLGYSEVNILRRKLKIQSLLEFNGYQVHLSGKTGDRLILRNAMNLCLPAKWVTYIKKLEKAVNVQIFEEVITSGENIKLYDMLTDKHANTVYAKRPNAYGQKLLADRETFVALQLKQQCEALLQMLQLTKIGSTETNLLLIGESEHSGKILISKNLKPSDRPAVINQSPCGLYEKKEWIFDKIVEK

SEQ ID NO: 20363 - protein, 1367 aa, unidentified
  REGION 1..1367: note = Cas Enzyme sequence
MEKQDYFLGLDMGTSSVGWAVTNTKYELLRKKGKDMWGIREFDEASSAAERRTHRVDRRRRQRQVVRLGLLKSYFSEEIAKIDPNFFIRLENSKYFLEDKDERVRTKNGVFNDDNYKDVDYYRDYPTIFHLRQALLDIDNKGEKFDVRLVYLALANMFKHRGHFLLNAEGDALNTEQVEVVYKEILDSLENDYEIIIDHKPIEQVTDILGSTDIGRKKKHEELQKLLGVTKKDKRANELLKCLCGLSVNAKLIFDENTEEKVPLCFNDFSYTDKIPELMEQLTEDEYALIEQLKSIYDYAVLAGTMKGHDYLSSVRVELYKKHADDLKLLKALYRKYKTEEEYNKMFRSNADGTYSAYVNSLNSTDAIFKSDEVVEGSKYRRNMKGRKSEDIYATIKKAFKDITEDKDVSFALEQIEKEQFLPKQLTGANGVIPNQVHKKEMERILQNAENYLPFLKDKDESGLTVSERIMKLFTFQIPYYVGPLGENSKTGWIVRKEKGAVLPWNINNKVDMSATSEAFISNLIRTCTYIQGEKVMPKASLAYERYCVLNEINNLCIDGERIDTKLKQQIYKDCFMKGKKVTKKQLCSYLAAQNAIHSEEQVTGIDKNINNSLSSYGKMYAIFGERLKEDAILATAEDIIYWGTIFGDSKKMLKQRLKKYVEEGIIDENQLKRILGYKFKDWGRYSKALLTLSGCDKSTGEIITLGQAMWEYSLNFMELINSDEFTFKEELEKHTAVAMKQLSEFTYEDLEDSYFSVPVKRIIWQTLLVVREIEQVMGCAPKRIFVEMTRTEEEKGDKGRKESRGNQLIELYKSIKNTEGHNWKEEIAEADKDGKLRSKKLFLYYMQMGRDMYTGEEIDLGRLYDDNLYDIDHIYPRHYVKDDSIMNNLVLVNKRANQDIKKDLYPIPRQIKANPKVRELWDTLHKQKLITDEKYTRLTSNTAFTEKQLGDFIARQLVETGQGTKGVADLLEQLFKDTVVVYAKASNVSDFRRDNGFLKSRLVNDFHHAQDAYLNIVVGNVYYTKFTNNPWNFIRKDYEKDKEKNRYNLAKMFEWNVVRGSETAWIAKRKDEEGTISTVRKMMQKNTPLLTRMNFEQHGSIANATLYSAKKAKPENYLPLKTADERMKDVKKYGGYTSMTIAYYFIVRHKEGKKENVTIEALPLYCKDKVEREERGLERYCEEVLGYGEVNIIRRKLKIQSLLEFNGYQVHLSGKTGDRLILRNAMSLCLPTKWVTYIKKLEKAVNVQIFEEVVTTEENTKLYDILADKHANTVYAKRPNAFGQKLLADREKFVTLQLEKQCEALLQMLQLTKIGSTETNLTLIGESEHSGKILISKNLKASDRPAVISQSATGLYEKKEWIFTEM

SEQ ID NO: 20364 - protein, 1367 aa, unidentified
  REGION 1..1367: note = Cas Enzyme sequence
MEKQDYFLGLDMGTSSVGWAVTNTKYELLRKKGKDMWGIREFDEASSAAERRTNRVNRRRRQRQVVRLGLLKSYFSEEIAKIDPDFFTRLENSKYFLEDKDERVRTKNGVFNDDNYKDVDYYRDYPTIFHLRQALLDIDNKGVKFDVRLVYLALANMFKHRGHFLLNAEGDALNTEQVEVVYKEILDSLENDYEIIIEQKPVQQVIDIIGNTDNGRKKKHEELQKLFEMTKKDKRANELLKCLCGLSVNVKLIFDENTEEEVQICFNDFSYTDKIPELMEQLTEEEYALIEQLKSIYDYAVLAGTMKGHDYLSCVRVELYKKHADDLKLLKALYRKYKTEEEYNKMFRSNADGTYSAYVNSLNSSDAIFKSDEVVEGSKYRRNMKGRKSEDIYATIKKAFKDITDDKDVTFVLEQIEKEQFLPKQLTGANGVIPNQVHKKEMERILKNAENYLTFLKDKDESGLTVSERIIRLFTFQIPYYVGPLGENSKTGWIVRKEKGSVLPWNINDKVDMSATSEVFISNLIRTCTYIQGEKVMPKASLAYERYCVLNEINNLCIDGERIDTKLKQQIYKDCFMKGKRVTKRQLCSYLTAQNAIHSEEQVTGIDKTINNSLSSYGKMYAIFGERLKEDAILAAAEDIIYWGTIFGDSKKMLKQRLKKYVEEGIIDENQLKRIIGYKFKDWGRFSKALLTLNGCDKSTGEIITLGQAMWEYSLNFMELINSEEFTFREELEKHTKVAMKQLSEFTYEDLEDSYFSVPVKRMIWQTLLVVREIEKVMGYAPKRIFVEMTRTEEEKGDKGRKESRGNQLSELYKSIKNTESHNWKEEIEAADKDGKLRSKKLFLYYMQMGRDMYTGEEIDLSRLYDDNLYDIDHIYPRHYVKDDSIMNNLVLVNRRANQDIKKDLYPIPEQIKANPKVRELWNALHKQKLITDEKYARLTSNTAFTEKQLGDFIARQLVETGQGTKGVADLLEQLFKDTVIVYAKATNVSDFRRDNGFLKSRLVNDFHHAQDAYLNIVVGNVYYTKFTKNPWNFIRKDYEKDKEKNRYNLAKMFDWNVVRGSETAWIAERKDEKGTIATVRKMMQKNTPLLTRMNFEQHGSIANATLYSAKKAKAENYIPLKASDERMKDVTKYGGFTSATIAYYFIVQHKESKKENITIEGLPLHCKTKVEQDANGLEKYCEEVLGYREVKILRRKLKIQTLLEFNGYQVHLSGKTGNQLILRNAMNLCLPEKWITYIKKLEKAVNIQIFEDVVNTEENIKLYDILTDKHINTVYAKRPNSYGKELLKGREKFVALGLEDQCVALLQILQLTRIGTTDTNLELIGESKFSGKMRINKNLKASDKPAIISQSATGLYEKKEWIFTER

SEQ ID NO: 20365 - protein, 1022 aa, unidentified
  REGION 1..1022: note = Cas Enzyme sequence
LKSSIKKYCTKEEYNNFFNSDADGSYASYIGSFNSGNKERRVGSKRTSEDLYKEIKKLLKGANKSDPAINEIFTSIETESFLPKQLTASNGIIPNQVHSKEMARILTNAENYLPFLKETDENNLSISNRILQLYKFQIPYYIGPVTEKSQRDGGNGWVIRKDNGRVFPWNIEEKIDVKATSEAFISRMVRRCTYMNGKQVLPKASLEYESFRVLNEINNLRIDGERIPVTLKQDIYTDLFQKGKKVTKKQLCNYLATRGLIESSEQVTGIDIAINNSLSTYGKFKAIFGEDIKLDHIQHMIDDIVFWCTVYGDSKQFLKEQIEDKYKGKLSPEQMKRILGFKFKDWGNLSKEFFELKGADKSTGEAVSIIRALWENNLNLMELINSPEFDFKEQLADYEANSLKTLSDFEPEDLNDYYFSAPVRRMIWQTTLIIKELVHVLGKEPARIFIEMTREKDASRGRTLSRKKKFEDLYKNVKDENTDWAKVIEHADESGTIRSKKMYLYLTQKGRCMYTGNHIELSDLFNDNLYDIDHIYPRHFVKDDNIDNNLVLVTKEKNAHKSDNYPLEAEIFNKQRNMWTQLRKEGFISEEKYNRLMGRNAFTDEQKAGFIARQLVETSQGTKGVAELFHQLLPNSKIVYAKAGNVSDFRRNREFPKSRLVNDFHHAHDAYLNIVVGNVYYVKFTQNPINYIKNSYNKDMNKNNYNLSRMFDWDVKRGDEVAWIAQKQDGAAGTISTVKKMLSKNTPLMTRLSYEGKGALANETLYSAEKAKGEGYIPFKSSDTKIQDVTKYGGFTSVTGAYFFLVEHDEKKKRIRTIESVPLYLADKIDKDSSELERYCDKLGLVNYDVRVRKIKIGSLIKYNGYFCYITGKTGYRLIVRNATNLCLASNWRKYIKKIEKYKETTIIDNVITAEENIKLYNELLNKFTVGIFGRRPNPIGEKMDSARDKFASLSIENQCLALYQILQLTAILGNESDLQLIGASTHAGKMLISKKIGTDEIYLINQSPTGLFETKIDLQTI

SEQ ID NO: 20366 - protein, 1352 aa, unidentified
  REGION 1..1352: note = Cas Enzyme sequence
MQEKPYYLGLDMGTNSVGWAVTDQHYNLLKAKGKDLWGIREFIEADTSVERRTHRISRRRRQREQARIGLLNDYFHDAIIAIDPSFFQRLENSKYHLEDKDQNVRYKYNIFNDPDYTDADYYTQYPTIYHLRKELLENPKPHDVRLVYLALLNMFKHRGHFLNSGISDGNNERSLKDAYINFAISVSELTEDYFNQDVDYSTIEGILSSRDLNRTKKAEELSTVLGIDFKNKKYKEYLRAICGLKINAYTLFSDQLPDDTTKIDLCVSDASFDEKSEELVSLIGEDLFQIILNIKEIYDIGSLAGILKGYTYLSQARVAAYDKHKHDLKLLKSSIKKYCTKEEYNNFFNSDADGSYASYIGSFNSGNKERRVGSKRTSEDLYKEIKKLLKGANKSDPAINEIFTSIETESFLPKQLTASNGIIPNQVHSKEMARILTNAENYLPFLKETDENNLSISNRILQLYKFQIPYYIGPVTEKSQRDGGNGWVIRKDNGRVFPWNIEEKIDVKATSEAFISRMVRRCTYMNGKQVLPKASLEYESFRVLNEINNLRIDGERIPVTLKQDIYTDLFQKGKKVTKKQLCNYLATRGLIESSEQVTGIDIAINNSLSTYGKFKAIFGEDIKLDHIQHMIEDIVFWCTVYGDSKQFLKEQIEDKYKGKLSPEQMKRILGFKFKDWGNLSKEFFELKGADKSTGEAVSIIRALWENNLNLMELINSPEFDFKEQLADYEANSLKTLSDFEPEDLNDYYFSAPVRRMIWQTTLIIKELVHVLGKEPARIFIEMTREKDASRGRTLSRKKKFEDLYKNVKDENTDWAKVIEHADESGTIRSKKMYLYLTQKGRCMYTGNHIELSDLFNDNLYDIDHIYPRHFVKDDNIDNNLVLVTKEKNAHKSDNYPLEAEIFNKQRNMWTQLRKEGFISEEKYNRLMGRNAFTDEQKAGFIARQLVETSQGTKGVAELFHQLLPNSKIVYAKAGNVSDFRRNREFPKSRLVNDFHHAHDAYLNIVVGNVYYVKFTQNPINYIKNSYNKDMNKNNYNLSRMFDWDVKRGDEVAWIAQKQDGAAGTISTVKKMLSKNTPLMTRLSYEGKGALANETLYSAEKAKGEGYIPFKSSDTKIQDVTKYGGFTSVTGAYFFLVEHDEKKKRIRTIESVPLYLADKIDKDSSELERYCDKLGLVNYDVRVRKIKIGSLIKYNGYFCYITGKTGYRLIVRNATNLCLASNWRKYIKKIEKYKETTIIDNVITAEENIKLYNELLNKFTVGIFGRRPNPIGEKMDSARDKFASLSIENQCLALYQILQLTAILGNESDLQLIGASTHAGKMLISKKIGTDEIYLINQSPTGLFETKIDLQTI

SEQ ID NO: 20367 - protein, 1352 aa, unidentified
  REGION 1..1352: note = Cas Enzyme sequence
MQEKPYYLGLDMGTNSVGWAVTDQHYNLLKAKGKDLWGIREFIEADTSVERRTHRISRRRRQREQARIGLLNDYFHDAIIAIDPSFFQRLENSKYHLEDKDQNVRYKYNIFNDPDYTDADYYTQYPTIYHLRKELLENPKPHDVRLVYLALLNMFKHRGHFLNSGISDGNNERSLKDAYINFAISVSELTEDYFNQDVDYSTIEGILSSRDLNRTKKAEELSTVLGIDFKNKKYKEYLRAICGLKINAYTLFSDQLPDDTTKIDLCVSDASFDEKSEELVSLIGEDLFQIILNIKEIYDIGSLAGILKGYTYLSQARVAAYDKHKHDLKLLKSSIKKYCTKEEYNNFFNSDADGSYASYIGSFNSGNKERRVGSKRTSEDLYKEIKKLLKGANKSDPAINEIFTSIETESFLPKQLTASNGIIPNQVHSKEMARILTNAENYLPFLKETDENNLSISNRILQLYKFQIPYYIGPVTEKSQRDGGNGWVIRKDNGRVFPWNIEEKIDVKATSEAFISRMVRRCTYMNGKQVLPKASLEYESFRVLNEINNLRIDGERIPVTLKQDIYTDLFQKGKKVTKKQLCNYLATRGLIESSEQVTGIDIAINNSLSTYGKFKAIFGEDIKLDHIQHMIEDIVFWCTVYGDSKQFLKEQIEDKYKGKLSPEQMKRILGFKFKDWGNLSKEFFELKGADKSTGEAVSIIRALWENNLNLMELINSSEFDFKEQLADYEANSLKTLSDFEPEDLNDYYFSAPVRRMIWQTTLIIKELVHVLGKEPARIFIEMTREKDASRGRTLSRKKKFEDLYKNVKDENTDWAKVIEHADESGTIRSKKMYLYLTQKGRCMYTGNHIELSDLFNDNLYDIDHIYPRHFVKDDNIDNNLVLVTKEKNAHKSDNYPLEAEIFNKQRNMWTQLRKEGFISEEKYNRLMGRNAFTDEQKAGFIARQLVETSQGTKGVAELFHQLLPNSKIVYAKAGNVSDFRRNRELPKSRLVNDFHHAHDAYLNIVVGNVYYVKFTQNPINYIKNSYNKDMNKNNYNLSRMFDWDVKRGDEVAWIAQKQDGAAGTISTVKKMLSKNTPLMTRLSYEGKGALANETLYSAEKAKGEGYIPFKSSDTKIQDVTKYGGFTSVTGAYFFLVEHDEKKKRIRTIESVPLYLADKIDKDSSELERYCDKLGLVNYDVRVRKIKIGSLIKYNGYFCYITGKTGYRLIVRNATNLCLASNWRKYIKKIEKYKETTIIDNVITAEENIKLYNELLNKFTVGIFGRRPNPIGEKMDSARDKFASLSIENQCLALYQILQLTAILGNESDLQLIGASTHAGKMLISKKIGTDEIYLINQSPTGLFETKIDLQTI

SEQ ID NO: 20368 - protein, 1352 aa, unidentified
  REGION 1..1352: note = Cas Enzyme sequence
MQEKPYYLGLDMGTNSVGWAVTDQHYNLLKAKGKDLWGIREFIEADTSVERRTHRISRRRRQREQARIGLLNDYFHDAIIAIDPSFFQRLENSKYHLEDKDQNVRYKYNIFNDPDYTDADYYTQYPTIYHLRKELLENPKPHDVRLVYLALLNMFKHRGHFLNSGISDGNNERSLKDAYINFAISVSELTEDYFNQDVDYSTIEGILSSRDLNRTKKAEELSTVLGIDFKNKKYKEYLRAICGLKINAYTLFSDQLPDDTTKIDLCVSDASFDEKSEELVSLIGEDLFQIILNIKEIYDIGSLAGILKGYTYLSQARVAAYDKHKHDLKLLKSSIKKYCTKEEYNNFFNSDADGSYASYIGSFNSGNKERRVGSKRTSEDLYKEIKKLLKGANKSDPAINEIFTSIETESFLPKQLTASNGIIPNQVHSKEMARILTNAENYLPFLKETDENNLSISNRILQLYKFQIPYYIGPVTEKSQRDGGNGWVIRKDNGRVFPWNIEEKIDVKATSEAFISRMVRRCTYMNGKQVLPKASLEYESFRVLNEINNLRIDGERIPVTLKQDIYTDLFQKGKKVTKKQLCNYLATRGLIESSEQVTGIDIAINNSLSTYGKFKAIFGEDIKLDHIQHMIEDIVFWCTVYGDSKQFLKEQIEDKYKGKLSPEQMKRILGFKFKDWGNLSKEFFELKGADKSTGEAVSIIRALWENNLNLMELINSSEFDFKEQLADYEANSLKTLSDFEPEDLNDYYFSAPVRRMIWQTTLIIKELVHVLGKEPARIFIEMTREKDASRGRTLSRKKKFEDLYKNVKDENTDWAKVIEHADESGTIRSKKMYLYLTQKGRCMYTGNHIELSDLFNDNLYDIDHIYPRHFVKDDNIDNNLVLVTKEKNAHKSDNYPLEAEIFNKQRNMWTQLRKEGFISEEKYNRLMGRNAFTDEQKAGFIARQLVETSQGTKGVAELFHQLLPNSKIVYAKAGNVSDFRRNRELPKSRLVNDFHHAHDAYLNIVVGNVYYVKFTQNPINYIKNSYNKDMNKNNYNLSRMFDWDVKRGDEVAWIAQKQDGAAGTISTVKKMLSKNTPLMTRLSYEGKGALANETLYSAEKAKGEGYIPFKSSDTKIQDVTKYGGFTSVTGAYFFLVEHDEKKKRIRTIESVPLYLADKIDKDSSELERYCDKLGLVNYDVRVRKIKIGSLIKYNGYFCYITGKTGYRLIVRNATNLCLTSNWRKYIKKIEKYKETTIIDNVITAEENIKLYNELLNKFTVGIFGRRPNPIGEKMDSARDKFASLSIENQCLALYQILQLTAILGNESDLQLIGASTHAGKMLISKKIGTDEIYLINQSPTGLFETKIDLQTI

SEQ ID NO: 20369 - protein, 1395 aa, unidentified
  REGION 1..1395: note = Cas Enzyme sequence
MEKNYFVGLDMGTSSVGWAVTDENYNLIRKKGKDLWGIREFEPANTAQERRANRISRRRRQRELIRLGLVKDYFADAIATVDSSFYQRLENSKYYLEDKDEDVRTSNGIFNDKEYKDKDYYKEYPTIYHLRKELIENKNKPYDVRLVYLAISNLFKRRGHFLNNSLNVDNGKFDVNIKEAYEELLNSISRAFSDDESESLTMPVINEDCVYKELEKILGNRDYSRKYKAEKIRDLLNIDKKAKKQNEVINGIVGLKIDCCKAFGITDSEEKIEAKFSEFGYSEKEPGILELLGDVLGEVLVNIKRIYDAGTLTELLKGYNYLSFARCSDYEKHKEDLRLLKMLVKKYQPEQFDSMFRDTHDGSYSAYVNSSNSEKYNYSENGIKKPNRRNMDKRSKADFYSTVKKMLSPFANEDERVQTILDEMENGTFMPKQLNGDNGVIPNQLHAIELKVILQNASEYLPFLNEIDGSGLSVAERIYKLFTFTLPYYIGPTTEKSKTGWVVRNKGYENTHVLPWNMNDVIDQEKTHKEFIERMVRRCTYMNNEQVLPKNSLLYEKFCVLNEINNIRIDNVRIDNNLKKTIYNELYKKGKKPTLKKLHDCLILNGISESAQITGIDREINNSLASYGKFAPIMGELLDTDDGRKVVEDIIYTFTIFGDDRKYLKEYLLNTYPENEYPYMTLSNIKRILGFKFSDWGRFSKELLMLEGYNRETGEIYTLLDALWEENYNFMELINSPVFSFKESMDKLEKNTLSSLAELDVEVLDRYYFSAPVKRMILQTNGVLKEIVKVMGGAPRKIFIEMTRSDEQKGDAGRTSSRKKQLLDLYKNVKQEVADRKYWSDLIEHESETGRIKSKKMYLYIKQMGCDMYTGEPIDLDELFTNRYDIDHIYPRHYVTDNNIENNLVLTNKASNEHIKKDYYPIPEKIRNNPATIELWDRLHANGMINDIKYARLRCKEEFSDEQKANFIARQLVETSQGTKGISDLLRQMLPTSELVFVKANNVSRFRQNKGRRHKNGDNSPVEGFSKSRLINDFHHANDAYLNIVVGNVYHTKFTSNPLNYIKKDYRQNKENFEYNLGRMFETKVVRNGYVAWIPEGNKENLEPTINTVNKVMSRNTPLYTRKAFVKPGIVNKVTIYGKRKATPERYMPLKSGDPKIADVTKYGGMTSISICYYFLVEHEVKGKRIRTIEGLPGYMHTRVENNPDELEKYCRDVLKLVNFSIRYRKIRIQSLLKVNGYRANLSGKTGDALILRNAEPLYLPDRYQDYIAYLEKHSEEEYHDKLDKEVNIQIYDILMEKFKDGIYRNRAKTVGNIMSNGRGQFIELSVEKQYFVINEILKLTTIGTLTAALGDIGGRSNNGKFTVGKKISDLDSCQLINTSYTGIFNSAPIDLKTV

SEQ ID NO: 20370 - protein, 1324 aa, unidentified
  REGION 1..1324: note = Cas Enzyme sequence
MTAFKYYLGLDMGTNSVGWAATDPGYRLLKAKGKDLWGIREFNEASGAVERRTHRISRRRRQREQVRIGILKDYFHDAICEVDPGFFQRLENSKYHEEDKDVEVRYKNNIFNDSNYTDKDYFNEYPTIYHLRNELISSTEKHDVRLVFLALLNMFKHRGHFLNAGLGENNGESNIDNAYFELTELLSELTEYHLSQDIDCKQIEAILSRRDMSRTHKAEELAGVLHVDLKNKPYKELIRGLCGLKFNACVVFPDVQSEEVTKLDICLSESTFDEKSDEIANIIGEDYFEIIMAMKEMFDIGSLASIMKGHNYLSQARVASYTKHKEDLKLLKEVIKKYCSKKEYDKFFNSDADGSYASYVGSYNSKNKERRVGNKRTSEELYKEIKKLLKDAQKEDENVQKILTSIENETFLPKQLTASNGVIPNQVHAREMKKILSNAENYLPFLTEKDETGLSVSERILKLFTFQIPYYVGPTSENSGKNGGNGWVVRREDGQVLPWNIDEKIDMKATSEAFISRMVRRCTYISGEQVLPKASLEYQSYCVLNEINNIKIDGERISVELKQDIYKAVFQKGKKVTKKQLCKYLHTRGIIETEEQVTGVDVSINNALTTYGKFKPIFGEDISKDSVQKMIEDIVFWCTVYGDSKKFLKDRIEEKYGNKLSEEQIKRILGFKFKDWGNLSKKFLELNGADTSTGESISIIRALWNNNLNLMELINSSLYNYKECLAEYQNTMLKTLSEIEAEDLNEYYFSAPVRRMIWQTILVIKELVKVLGCEPERIFVEMTRKPDEHKTRTSSRRNKFEELYKKVKDETTDWMQVIANAEEDGKIRSKKMYLYLTQKGRCMYTGKHIELDDLFDNNLYDIDHIYPRHFVKDDNIDNNLVLVCKEKNAHKSDHYPIEEEIFLSQKKMWLELRKSGFITEEKYNRLMDRNPFSDEQKAGFIARQLVETSQGTKGVANILRQLLPGSKIVYAKASNVSEFRCTRDDIQKSRLVNDFHHAHDAYLNIVVGNVYYVKFTQNPLNFIKKDYDKYKEDYNLSKMFDWDVKRNGEVAWIAQRKDGAAGTITTVKRMLSRNTPLMTRYSFDGKGGLTNETLYSAKKAKGEGYIPFKSSDDKMQDVTKYGGFTSVTGAYFFLVEHTEKKKRIRTIESVPVYLAQKIEQNPDELKKYCEEILGLIDADIRLKKIKIGSLIKRNGYFCYITGKTGNRLIVRNAVNLCLKNEWIKYISKLEKVKEKDAVDKIITKEKNEVLYSELIQKFKHGIFSKRPNPVGDKLEKDSEKFNNLSIKDQCAVLCQVLRMAAILGSECDMTLLGDSPNCGKNVDK

SEQ ID NO: 20371 - protein, 1366 aa, unidentified
  REGION 1..1366: note = Cas Enzyme sequence
LGLDMGVSSVGWAVTNTKYELLRKKGKDMWGIREFEEADSSAERRTHRVNRRRRQRQVARMGLLKEYFSDAIEKVDPNFFIRMENSKYFFEDKDERLSSKNGIFDDADYKDVDYYTEYPTIFHLRKTLLNIDDTGKEYDVRLVYLALVNMFKHRGHFLLNTEGDALSSEQVNTTYQELLEVLENNYEISLESRDIKDVIDIISSSDNGRKKKHELIMELFGVKKSDKRANELLKCLCGLSVNAKLIFDENYEEKVDLCFHDFSYTDKIPDLMEKLSEEEYSVVEQLKSIYDYSVLVGTLKGYDYLSCARVELYEKHREDLKLLKALYRRYKTKEEYNKMFNGFDSSSEKNGKKEVSYAAYVNSLNSSDSCVGSKKYRRNMNGRKTENLYATIKKAFKDNTDDKDVQLMMESIDKEQFLPKQLTGANGVIPNQVHKKEMERILKKSQNYLPFLKEKDENGLTVSERILRLFTFQIPYYVGPLGENSKTGWVVRREGGRVLPWNIDEKIDMSATSEAFIGNLIRKCTYLSDEKVMPKASLSYERYCVLNEINNICIDGERLDTELKQKIYTECFMKGKRVTRKQICNYLVAQGCIKSDEQVTGIDININSSLSSYGKMFAIFGERLKEDAIRKVAEEIIYWGTIFSDSKKMFRKHLTKYVEQGIIGESQVKRILGYKFKDWGRFSKALLTLQGIDKSTGELLSLENAMWEYSLNFMELINSDDFTFKDELANRRTAAIKSLSEFTYEDLEDTYFSVPVKRMIWQTILVVREIEQIMGYAPKKVFVEMARSEEEKGDKGRKDSRGDKLLELYKNVKNTENHDWKKEISEANESGKLRSKKLYLYYTQMGRDMYTGEEINIDMLYDDSMYDIDHIYPRHYVKDDSIVNNLVLVNRRANQDIKKDLYPIPDKIISNPKVQELWKMLHKQNLITDEKYKRLMSRSPFTEKQLGDFIARQLVETRQGTKGIAELLGQLFKGTEIVYAKATNVSDFRRDNGFVKSRLVNDFHHAQDAYLNIVVGNVYYTKFTKNPWNFIKKDFDKDRNKNGYNLAKMFDRDVVRGDDIAWIASKKDTQGTIETVRKMMRKNTPLMTRMSFEQHGGIAKGTMYSAKIVKEKNYIPVKSSDKKLSDVTKYGGFTAVTVAYYFIVRHKKGKKEITTIEALPLYCKDKVENETNGLSTYCEDVLGYRNVKILFRKLKIQSLLEINGYKAHLSGKTGDQLTLRNAVNLCVPEKWIRYIKKLEKVDTSQIKEEMITAKKNCELYDLLIDKHLNTVYARKPTPNAKKLLDYRDNFLGLGLKQQCEAMLNILKLTSIGLTGTSLKLIGGDNDYGKMRISKNLDCSAKPAIICQSITGLYERKIYIFDDRSNK

SEQ ID NO: 20372 - protein, 1384 aa, unidentified
  REGION 1..1384: note = Cas Enzyme sequence
MNLLIKLIYYFVIYIKRRTVMEKQEYYLGLDMGISSVGWAVTNTKYEILRKKGKDMWGIREFEEADSSAERRTHRVNRRRRQRQVARMGLLKEYFSDAIEKVDPNFFIRMENSKYFSEDKDERLSSKNGIFDDADYKDVDYYTEYPTIFHLRKTLLDIEDTGKEYDVRLVYLALVNMFKHRGHFLLNTEGDALSSEQVGTTYLELLEVLENNYEIGLESRDIKDVIDIISNRDNGRKKKHEQILELFEVKKSDKRAKELLKCLSGLSVNAKLIFDENPEEKVDLCFHDFSYTDKIPDLMEQLSEEEYLVVEQLKSIYDYAILAGTLKGYDYLSCARVELYEKHCEDLKFLKLLYRRYKNKEEYRDMFKSDKEGTYSAYVNSFNSSDSSVKIKKYRRNMKGRTIENLYSTIKKAFKDNIDDKDVQSMMESIDKEQFLPKQLTGANGVIPNQVHKKEMERILKNAQNYLPFLKEKDESGLTVSERILRLFTFQIPYYVGPLGENSKTGWIVRREEGRVLPWNIDEKIDMSATSEAFIGNLIRRCTYLSDEKVMPKASLSYERYCVLNEINNICIDGERLDTELKQKIYTDCFMKGKRVTRKQLCNYLVAQGCIKSDEQVTGIDININSSLSSYGKMFAIFGERLKEDAIRKVAEEIIYWGTIFSDSKKMFRKHLTKYVEQDILSESQVKRILGYKFKDWGRFSKALLTLQGIDKSTGELLSLENAMWEYSLNFMELINSEDFTFKDELANKRTTSIKSLSEFTYEDLEDTYFSAPVKRMIWQTILVVREIEQVMGCAPKRIFVEMARSEEEKGDKGRKDSRGTQLLELYKNIKNTDDHDWKKEISEANASGKLRSKKLYLYYVQMGRDLYTGEEMNIDMLYDDSMYDIDHIYPRHYVKDDSIINNLVLVNRRANQDIKKDLYPIPDQIVSNPKVQELWKMLHRQNLITDEKYKRLMSRSPFTEKQLGDFIARQLVETRQGTKGIAELLGQLFKDTEIVYAKATNVSDFRRDNGFFKSRLVNDFHHAQDAYLNIVVGNVYYTKFTKNPWNFIKKDLNKDRDKNRYNLAKMFEWDVVRGEDVAWIADKNDNQGTITTVRKMMRKNTPLMTRMSFEQHGGIANATLYSARKAKVENYIPLKTSDTRLGDVTKYGGFTSATISYYFIVSHKEGKKENTTIEGLPLYCKDKVESEENGLLRYCEEVLRYEYVKILFNKLKIQSLLEINGYQVHLSGKTGNQLILRNAMNLCLPEKWTTYIKKLEKLVIGKIKEQTITAESNIELYDLLTDKHLNAVYAKRPNAYGQKLEDDRSNFINLKLENQCEAILQILQLTKIGNNETNLKLIGESEHSGKMLISKNLKATDKPAIICQSVTGLYERKIYIFGDRLDK

SEQ ID NO: 20373 - protein, 1373 aa, unidentified
  REGION 1..1373: note = Cas Enzyme sequence
MEKREYYLGLDMGISSVGWAVTNTKYEILRKKGKDMWGIREFEEADSSAERRTHRVNRRRRQRQVARMGLLKEYFSDAIEKVDPNFFIRMENSKYFSEDKDERLSSKNGIFDDADYKDVDYYTEYPTIFHLRKTLLDIEDTGKEYDVRLVYLALVNMFKHRGHFLLNTEGDALSSEQVGTTYLELLEVLENNYEIGLESRDIKDVIDIISNRDNGRKKKHEQILELFEVKKSDKRAKELLKCLSGLSVNAKLIFDENPEEKVDLCFHDFSYTDKIPDLMEQLSEEEYLVVEQLKSIYDYAILAGTLKGYDYLSCARVELYEKHREDLKLLKALYRRYKTKEEYNKMFNGFDSSSEKNGKKEVSYAAYVNSLNSSDSCVESKKYRRNMNGRKTENLYATIKKAFKDNIDDKDVQSMMESIDKEQFLPKQLTGANGVIPNQVHKKEMERILKNAQNYLPFLKEKDENGLTVSERILRLFTFQIPYYVGPLGENSKTGWIVRREEGRVLPWNIDEKIDMSATSEAFIGNLIKKCTYLSDEKVMPKASLSYERYCVLNEINNICIDGERLDTELKQKIYTDCFMKGKRVTRKQLCNYLVAQGCIKSDEQVTGIDININSALSSYGKMFALFGERLKEDAIRKVAEEIIYWGTIFSDSKKMFRKHLTKYVEQDILSESQVKRILGYKFRDWGRFSKALLTLQGIDKSTGELLSLENAMWEYSLNFMELINSEDFTFKDELAYKRTTSIKSLSEFTYEDLEDTYFSAPVKRMIWQTILVVREIEQVMGCAPKRIFVEMARSEEEKGDKGRKDSRGTQLLELYKNIKNTDDHDWKKEISEANASGKLRSKKLYLYYTQMGRDLYTGEEINIDMLYDDSMYDIDHIYPRHYVKDDSIINNLALVNRRANQDIKKDLYPIPNQIVSNAKVQELWKMLHRQNLITDEKYKRLMSRSPFTEKQLGDFIARQLVETRQGTKGIAELLGQLFKDTEIVYAKATNVSDFRRDNGFFKSRLVNDFHHAQDAYLNIVVGNVYYTKFTKNPWNFIKKDLNKDRDKNRYNLAKMFEWDVVRGEDVAWIADKNDNQGTITTVRKMMRKNTPLMTRMSFEQHGGIAKGTIYSAKVVKEKNYIPVKSSDKKLSDVAKYGGFTAVTVAYYFIVRHKKGKKEYTTIEALPLYCKKKVENKKDGLVKYCEEVLGYRYVKILFNKLKIQSLLEINGYQAHLSGKSEGRLILRNAMNLCLPEKWISYIKKLEKFFVSQTKEEIITLEKNEELYELLIDKHLNTVYSKRESPHGQKLLDGKDVFLGLDLKQQCEALIQILQLTKIGITETNLNLIGEASRTGLIRISKNLKELDNPAIINQSVTGLYENKIWIFGDNTNN

SEQ ID NO: 20374 - protein, 1393 aa, unidentified
  REGION 1..1393: note = Cas Enzyme sequence
MNLLIKLIYYFVIYIKRRTVMEKQEYYLGLDMGISSVGWAVTNTRYEILRKKGKDMWGIREFEEADSSAERRTHRVNRRRRQRQVARMGLLKEYFSDAIEKVDPNFFIRMENSKYFSEDKDERLSSKNGIFDDADYKDVDYYTEYPTIFHLRKTLLDIEETGKEYDVRLVYLALVNMFKHRGHFLLNTEGDALSSEQVGTTYLELLEVLENNYEIGLESRDIKDVIDIISNRDNGRKKKHEQILELFEVKKSDKRAKELLKCLSGLSVNAKLIFDENPEEKVDLCFHDFSYTDKIPDLMEQLSEEEYLVVEQLKSIYDYAILAGTLKGYDYLSCARVELYEKHCEDLKLLKALYRRYKTKEEYNKMFNGFDSSSEKNGKKEVSYAAYVNSLNSSDSCVESKKYRRNMNGRKTENLYATIKKAFKNNIDDKDVRSMMESIDKEQFLPKQLTGANGVIPNQVHKKEMERILKNAQNYLPFLKEKDESGLTVSERILRLFTFQIPYYVGPLGENSKTGWIVRREEGRVLPWNIDEKIDMSATSEAFIGNLIKKCTYLSDEKVMPKASLSYERYCVLNEINNICIDGERLDTELKQKIYTDCFMKGKRVTRKQLCNYLVAQGCIKSDEQVTGIDININSALSSYGKMFALFGERLKEDAIRKVAEEIIYWGTIFSDSKKMFRKHLTKYVEQDILSESQVKRILGYKFKDWGRFSKAFLTLQGIDKSTGELISLENAMWEYSLNFMELINSEDFTFKDELAYKRTTSIKSLSEFTYEDLEDTYFSAPVKRMIWQTILVVREIEQVMGCAPKRIFVEMARSEEEKGDKGRKDSRGTQLLELYKNIKNTDDHDWKKEISEANASGKLRSKKLYLYYTQMGRDLYTGEEINIDMLYDDSMYDIDHIYPRHYVKDDSIINNLALVNRRANQDIKKDLYPIPNQIVSNAKVQELWKMLHRQNLITDEKYKRLMSRSPFTEKQLGDFIARQLVETRQGTKGIAELLGQLFKDTEIVYAKATNVSDFRRDNGFFKSRLVNDFHHAQDAYLNIVVGNVYYTKFTKNPWNFIKKDLNKDRDKNRYNLAKMFEWDVVRGEDVAWIADKNDNQGTITTVRKMMRKNTPLMTRMSFEQHGGIANATLYSAKKAKVENYIPLKTSDTRLGDVTKYGGFTSATISYYFIVSHKEGKKENTTIEGLPLYCKDKVESEENGLLRYCEEVLRYEDVKILFNKLKIQSLLEINGYQVHLSGKTGNQLILRNAMNLCLPEKWTTYIKKLEKLVIGKIKEQTITAESNIELYDLLTDKHLNAVYAKRPNAYGQKLEDDRSNFINLKLENQCEAILQILQLTKIGNNETNLKLIGESEHSGKMLISKNLKATDKPAIICQSVTGLYERKIYIFGDRLDK

SEQ ID NO: 20375 - protein, 1334 aa, unidentified
  REGION 1..1334: note = Cas Enzyme sequence
MKKFYIGADIGTNSVGVACTDESYRLIRAKSKDCWAVRLFDEGETAFDRRTKRTARRRLARRKQRINWLQELFEPFIDDKTFFIRLNNSQYLPEDKDSLLCGNKNNLFENEGEESKFYKKYPTIYHLRKALMDGGNFDIRLYYLALHHIIKYRGHFLYEGSIEDIRDFSNLMKGLDCAIADSYDGGLNLFDSVDSAKVRDILIDKKSGLRDKQVELEKLLCAKSKREKEILKGITGQKISPYVLFGDEFKEEKSFSLNDMSDEEFESKRSSYGESFTLLDLMHSVCNYVKFEKIFEGHSDISSAMISVYEKHKADLVLLKKVVRKQSKEDYNKIFRSVNEEKNYVNYIGYTSKDGRKIKVKKCKDEDFFKYLKKYLNGILNEDNFDIVSKIIKEIDDRIFLPKILHSDNGLFPKQVNEFELKKIIENMVRNYAETEEMASAVLSLFNYKIPYYVGPLTGCNSWVVRTDEKVTPWNFDRVVDLAKSNEAFMRRMTNKCAYIKGEDVLPKASIIYQKYDTLNQLNKLRINDRVISIELKQTIYNELFLKYPKVTDKKIKELLVREGLCSSSETKDITISGKDGDFKSSMSSYIRLKNILGDFVDDDLKSGGKVCENIILWHTLNTDKKIVEDLIEKNYGFIPEIKANIKQLKGLTFNDFGRLSAKLLIGIEGVDKTTGQILTIMDVLYQTNQNLNEVLNNESYNFSEIIDEENGIETEIISYETVEELYVSPAVRRGIWQTLLMIDEYVNAVGRQPDKIFIEVTRNDGKKGDNGRTQPRKRQLQEKFKNIGSAYSDIIEELSEEKYTDLKLRQERLYLYFRQLGRCMYTGERIILDELNGNRYDVDHILPRTYVKDDSLDNKVLVCRGANATKADTYPLPTEFSRKEVRAHWKMLLDKDLISKTTYDRLTRIEPLKDDDYNDFINRQKTITDQTAKAVIELLKRKYPNAKLIFSRAKNVNDFKNRFNLFKCRETNDLHHARDAYLNVVVGNVFDSVFSTPLGQSRKDGDVWRIYNLKKLFTRDVIGVWSKDSIKIVKDTYSKPSMSVTRYATCNKGKFYDETVCRKNDSAITAPRKGKGPLSDVTKYGGYTTQKTAYFAIVTSVDKKGKSIKTIEAIPVLVTYKLKTDTNAIQKYLESYLREPIIVIPKVKVKQLVSYNGSLCYLAGITNNQITVHNASQLYTDNTTDEYVNELIKIIGMGDNGIITGNESQYITKTNKDGVIRIVVNKENNEKLYETLKNKLDSKIYKGLSAFASFKKNMERGKDKFCELSVLEQAKVLLQILKVFRCNAEISDIQAIGGTAHSGKKLFAKNITDVDFKLVNLSPAGLTVRIRKV

SEQ ID NO: 20376 - protein, 1334 aa, unidentified
  REGION 1..1334: note = Cas Enzyme sequence
MKKFYIGADIGTNSVGVACTDESYRLIRAKSKDCWAVRLFDEGETAFDRRTKRTARRRLARRKQRINWLQELFEPFIDDKTFFIRLNNSQYLPEDKDSLLCGNKNNLFENEGEESKFYKKYPTIYHLRKALMDGGNFDIRLYYLALHHIIKYRGHFLYEGSIEDIRDFSNLMKGLDCAIADSYDGGLNLFDSVDSAKVRDILIDKKSGLRDKQVELEKLLCVKSKREKEILKGITGQKISPYVLFGDEFKEEKSFSLNDMSDEEFESKRSSYGESFTLLDLMHSVCNYVKFEKIFEGHSDISSAMISVYEKHKADLVLLKKVVRKQSKEDYNKIFRSVNEEKNYVNYIGYTSKDGRKIKVKKCKDEDFFKYLKKYLNGILNEDNFNIVSKIIKEIDDRIFLPKILHSDNGLFPKQVNEFELKKIIENMVRNYAETEEMASAVLSLFNYKIPYYVGPLTGCNSWVVRTDEKVTPWNFDRVVDLAKSNEAFMRRMTNKCAYIKGEDVLPKASIIYQKYDTLNQLNKLRINDRVISIELKQTIYNELFLKYPKVTDKKIKELLVREGLCSSSETKDITISGKDGDFKSSMSSYIRLKNILGDFVDDDLKSGGKVCENIILWHTLNTDKKIVEDLIEKNYGFIPEIKANIKQLKGLTFNDFGRLSAKLLIGIEGVDKTTGQILTILDVLYQTNQNLNEVLNNESYNFSDIIDEENGIETEIISYETVEELYVSPAVRRGIWQTLLMIDEYVNAVGRQPDKIFIEVTRNDGKKGDNGRTQPRKRQLQEKFKNIGSAYSDIIEELSEEKYTDLKLRQERLYLYFRQLGRCMYTGERIILDELNGNRYDVDHILPRTYVKDDSLDNKVLVCRGANATKADTYPLPTEFSRKEVRVHWKMLLDKDLISKTTYDRLTRIEPLKDDDYNDFINRQKTITDQTAKAVIELLKRKYPNAKLIFSRAKNVNDFKNRFNLFKCRETNDLHHARDAYLNVVVGNVFDSVFSTPLGQSRKDGDVWRIYNLKKLFTRDVIGVWSKDSIKIVKDTYSKPSMSVTRYATCNKGKFYDETVCRKDDSAITAPRKGKGPLSDVTKYGGYTTQKTAYFAIVTSVDKKGKSMKTIEAIPVLVTYKLKTDTNAIQKYLESYLREPIIVIPKVKVKQLVSYNGSLCYLAGITNNRITVHNASQLYTDNTTDEYVNELIKIIGMGDNGIITGNESQYITKTNKDGVIRIVVNKENNEKLYETLKNKLDSKIYKGLSAFASFKKNMERGKDKFCELSVLEQAKVLLQILKVFRCNAEISDIQAIGGTAHSGKKLFAKNITDVDFKLVNLSPAGLTVRIRKV

SEQ ID NO: 20377 - protein, 1347 aa, unidentified
  REGION 1..1347: note = Cas Enzyme sequence
LSTEKIKFREGQMKKFYLGMDIGTDSVGMACTDEEYNLLRAKGKDCWAVRLFNPSSTAEKRRSFRTARRRLERRKQRIGFLQALFEPFIEDENFFLRLNNSAYFPEDKASVLGGDKNSLFADGIYCDKNYHSDYPTIYHLRYDLQSKPVKDIRLYYLALHHIIKYRGHFLLDGGIENVHDIYRLFDELSAVCAEIFTDYERVPQFDSVFAEQAKNILIDGKTGLRDKQNALEALFGKDALTKEIIKGITGGKLSPKNLFGEEYETQKSFTFKDLTDETFDGMEADFGDNFILLEKIKAIYSFALFEKLFEGQPNISAAMINLYNTHKNDLRCLKQFLRGNAGEEVYRKFFKSTKEKANYVNYVGYTKKGGDKIKVKHCSDGDFFAELKKLITGIENVTDTEIRDDILSKINSGTFLPKILHSDNGLFPHQVNQQELEKIVENMVKVHPETHEIADKILKVFLFKIPYYVGPLTGKNSWAVRTDEKITPWNFDTVVDKAQSNENFMRRMTNKCTYLRGEDVLPQASVFYQKFNVLNQLNKLKINDTPISVELKQKLFDDVFKVKNKVTDKTIINFLVREGAISEYQTQEVKITGKDSEIKANMSSYIRLKQILGSFVDDDLMSGGGVCENIILWHTLNTDKNIVEKLIEKNYGKIRVIKDNIKSLKGLTFQKFGRLSMKFLTGLKVNDPPVGENLSILDLMYFTNQNLNEILFNEKYGFEEIIKKENGETDSEIRYKDLENLYVSPAVRRGIWQSLRMADEYILNIGRAPDKIFVEVTREEGTKGAAGRTVSRKNRLLELYKNVAGYDEIRSELTSEGLTDLRLRQERLYLYFRQLGRCMYSGERIDLSQLNTDMYDVDHILPRTYIKDDSLDNKALVLRKKNVEKRDAYPLPQGFTEQQNFWKMLLTKGLISDVTYGRLTRTEPLNEDDYSGFINRQKVITDQTAKAVAELLKRKYSSTKIVYSKAKNVNDFKSKFDLFKCRETNDLHHARDAYLNVVVGNVFDTCFSSPMAMFRNDGDRWRMYNLKTMFFRDVDGAWNGGSLSVVKSVFAKCSMCVTKYSYCVKGEFYNQTVYSNNDSRSKIPRKGSGVLGNIQKYGGYSGLNTAYFAVVQSEDKKGKIIKSIEAVPVLIQQQTKGDLNRLKEYFEEKGLKNAEILVPKIKINQLVSFKGMPVYITGISGIRILVQNAVELFTDNKTDEYVKALTEFYERYKSKIDEESSEVYIIKTNRMGEIKLKISKENNLSLYNFLVGKLDDKIYSGIGYCATYQKILKDGLDKFKCLTTAKQVKVLLQALNFFRCNAMLSDLSLIGGNTLNGKLSFSKYITEDDFKIIYKSNCGLTLKERKV

SEQ ID NO: 20378 - protein, 1362 aa, unidentified
  REGION 1..1362: note = Cas Enzyme sequence
VKSVKKHVRYYWGIDAGTNSMGHAATDTNYNLLKINGEPAWGVTVFDEASSCSERATFRTSRRRRRRAKFRVKLLQDLFAPEIAKLDENFFKRLQGSYLYRNEAGEPYTLFCDADFTDVEYHHQYPTIHHLIVDLMESPEPHDVRLVYLACAWLVKHRGHFLSNVSKENVSQIRDFDSVFCKLNTFFVSNGYQIPWSTENAKEISEVLKKKDIVKAKFKSLVDAMLQGKKPSKEPLEEFPYSLDAIIRLLAGGTCKLKDLFAKEDYEDAGSIRLGMSEDSYSEVMSTIGEDYELIELLKAIYDWSILSDILGNEYSISAAKKAVYHQHETDVAFLKHILHEYSQENYDKMFRTAGKEGNYVSYAYHTDENDTKKFEKCKSEEDFCKNVLKAVESIQPNEEDKAQFEDMLKRLELHTFMPKQKDANNRVIPYQLYWYELDRILINAEKYLPFLSVTDEDNLSISDKIRSIFLFRVPYFVGPLNSSSSYAWLERKAGKIYPWNFEQMVDLDWSEEKFIRRMTNTCTYLPGETVLPKDSLCYHKFMVLNEINNITINGLRIPVDLKQRIYEDLFMQKKKITRKKLVDYLISNGVIEAGQDDLISGIDKDIHSDLTPQIAFRRLLKEEILSEKDVEKIIERSSYAEDKQRLDNWLIKNYPILSEEDRKYICGIKLKEFGRLSKRFLCGIEGVDTETGEVHTILSALWHTQYNLMELLSSRFTFKQAIDDYVEEYYIENPRTLEQRLDEMHVSNAARRPIYRTLALLKDVTKALGAPEKIFIEMARGAATQKDKAGRTTSRKQQILKLYEECDDKDVNLLRQQLEAMGDTANNRLQRDQLFLYYMQFGKCMYSGEPIDLSQLGTKLYDIEHIYPQSVVKDDSILNNKVLVRTELNGDKNNTYPISSSIRQKMTPFWHALKEKGMITEEKFKRLTRSTPFTVDERWGFINRQLVETSQSTKALATILKEKYPQTEIVYAKAKLASEFRQEFGLPKSRTYNDLHHAVDAYLNIVVGNVYDMRFTKQWFNINSDYSVKCKTIFTHPVVCGDVVVWDGLPMLEKVKNTAVRSNAHFTKYAFLKTGGLFDQQPVSKDKNLVPRKTGLDTEKYGGYNKSSVMFFIPVHYKTEKDEDTIILSVELMHGKHFLSDETFAKEYAIRRIYYSIEKTVTEISFPMGLKPWKINTVLSLDGFRMCITAVSSKGKRLSLQSAMQFTAGSYWNGYVKKLENLVEKVSKNPSYIYTEKYDKVNRKENEQLYDLYIDKLKNSIYCKRWAVRVPLDILINGKSTFDQLSEIKQAEVLLNIHSILGRNTRGSDLSALGGKKNSGVTNSFSSLVSNWRKSYSDIRLINISPSGIWEQQSKNLLDLL

SEQ ID NO: 20379 - protein, 1372 aa, unidentified
  REGION 1..1372: note = Cas Enzyme sequence
MKYYIGLDMGTNSVGYAVADEEYKLLKAHQKPMIGVRLFDEAQTAAKRRLARVNRRRMERRRQRLALLEDLFSPVISKVDPGFFQRLKESFFMVAHKTEEQPNTLFNDPDFTDRNYHKKYPTIYHLRHELMTSQQPHDVRLVFLAIHHILKHRGHFLNPGELGELGGQLQSCYSQFLVSLSEDFAIELPPDIADQIQAVLTDKTTRRSEKQELLKQLFAVDDDMVAQLSKLFAGLSANISKLFGEQYKEQSPKDVSFSGAGFEDEKQIELQQILTDSEFSLLQSAFNLYAQIQLDSLLQGYPSFSASKIGLYEKHKSDLKRLKKLLKTNLESKAYTAYFSESKKDFCNYVAYSGHCLKNKKKQPVAYRCQKTAFYEELKKILAKLPESIRDGEEVKSIQLEIENETFLPKQVSKDNSLIPNQLQLSELRQILKNAATYLPFLNRQGEDGLTISEMIEKIADFRIPYYVGPVNPAHRVIPGKPNGSRHAWVTKISAEPVRPWNFERVIDLEQSATDFINNLTNKCTYLIGEDVLSKDSPTYARFMLLNILNLLSVNGQRLPVLVKQNIYNDLFLHPKTSGKVTKKKICAYLNAEGYPVTEAELGGMDLEIPISLKAERQLEALAPGKLSLEDKEEIVRLITVFPESNRMLRNRFSRQFGNKLTQSELTAISKLKFAKWGQLSRKFLTGLRANGPDGRETTILEAMWDYNLNLMELLSQDYGFADAVKQYKQDMLGDQQNFSYSLVDQYPTSPAVKKMIWQTMKIVDEIIRIRKQAPEKIFIEVAREEGEKKRTTSRLDQIKQIFKANKDIEDRLKKELDTKSEENLRRKKLYLYFTQLGRCIYTGKAIDLEKLDAKDSANNDFYDIDHIYPRSQTKDDSLMNNLVLVESSANRQKGDDFPIVPGIQAAQKGWWTALKDKKLISEEKYRRLVRTTPLSPEELESFISRQLVQTRQATKAVAELLKLVFPESRVVFVKAGHVSDFRYEQNAFRFPKVRGMNDLHHAKDAYLNIVVGNVFDTKFTQDVRNYIKNHPKRDFNLGRMYDFDVVGASGKLAWKTGEEGSIRMVRSMMALNAIQCTWQTRHQTSGQNGGLFDQNLLPKGKGQFPIKTSNPHLAGQEGINNYGGYNKPTGATFFVVEHELRKKAQRTILPLDLTWVLTHEQTAPELEAYCRETLGLIEPRVILADLPYNSILEVNGFPLRLLAKTGASLKLAPALQPYFPAAYEPILKALTRQAEEGKDAEADPRAVYPPEENLALYDHFTQKLGSEPYSRLSVFVNQYRNLSASRGNFILLTPFEQMKVLGQILILFLCDGRTSDLSLLQPKNPNGTPSSKNKQSGMVTISQNLQKGIKVDVLNFSCTGLFLSRTPLSQP

SEQ ID NO: 20380 - protein, 1372 aa, unidentified
  REGION 1..1372: note = Cas Enzyme sequence
MKYYIGLDMGTNSVGYAVADEEYKLLKAHQKPMIGVRLFDEAQTAAKRRLARVNRRRMERRRQRLALLEDLFSPVISKVDPGFFQRLKESFFMVAHKTEEQPNTLFNDPDFTDRNYHKKYPTIYHLRHELMTSQQPHDVRLVFLAIHHILKHRGHFLNPGELGELGGQLQSCYSQFLVSLSEDFAIELPPDIADQIQAVLTDKTTRRSEKQELLKQLFAVDDDMVAQLSRLFAGLSANISKLFGEQYKEQSPKDVSFSGAGFENEKQIELQQILTDSEFSLLQSAFNLYAQIQLDSLLQGYPSFSASKIGLYEKHKSDLKRLKKLLKTNLESKAYTAYFSESKKDFCNYVAYSGHCLKNKKKQPVAYRCQKTAFYEELKKILAKLPESIRDGEEVKSIQLEIENETFLPKQVSKDNSLIPNQLQLSELRQILKNAATYLPFLNRQGEDGLTISEMIEKIADFRIPYYVGPVNPAHRVIPGKPNGSRHAWVTKISAEPVRPWNFERVIDLEQSATDFINNLTNKCTYLIGEDVLSKDSPTYARFMLLNILNLLSVNGQRLPVLVKQNIYNDLFLHPKTSGKVTKKKICAYLNAEGYPVTEAELGGMDLEIPISLKAERQLEALAPGKLSLEDKEEIVRLITVFPESNRMLRNRFSRQFGNKLTQSELTAISKLKFAKWGQLSRKFLTGLRANGPDGRETTILEAMWDYNLNLMELLSQDYGFADAVKQYKQDMLGDQQNFSYSLVDQYPTSPAVKKMIWQTMKIVDEIIRIRKQAPEKIFIEVAREEGEKKRTTSRLDQIKQIFKANKDIEDRLKKELDTKSEENLRRKKLYLYFTQLGRCIYTGKAIDLEKLDAKDSANNDFYDIDHIYPRSQTKDDSLMNNLVLVESSANRQKGDDFPIVPGIQAAQKGWWTALKDKKLISEEKYRRLVRTTPLSPEELESFISRQLVQTRQATKAVAELLKLVFPESRVVFVKAGHVSDFRYEQNAFRFPKVRGMNDLHHAKDAYLNIVVGNVFDTKFTQDVRNYIKNHPKRDFNLGRMYDFDVVGASGKLAWKTGEEGSIRMVRSMMALNAIQCTWQTRHQTSGQNGGLFDQNLLPKGKGQFPIKTSNPHLAGQEGINNYGGYNKPTGATFFVVEHELRKKAQRTILPLDLTWVLTHEQTAPELEAYCRETLGLIEPRVILADLPYNSILEVNGFPLRLLAKTGASLKLAPALQPYFPTAYEPILKALTRQAEEGKDAEADPRAVYPPEENLALYDHFTQKLGSEPYSRLSVFVNQYRNLSASRGNFILLTPFEQMKVLGQILILFLCDGRTSDLSLLQPKNPNGTPSSKNKQSGMVTISQNLQKGIKVDVLNFSCTGLFLSRTPLSQP

SEQ ID NO: 20381 - protein, 1112 aa, unidentified
  REGION 1..1112: note = Cas Enzyme sequence
MQKDYYIGLDMGTNSVGYAVCDTNYEILKSHGKAQWGVRLFDTAQTAAARRFARTNRRRLERRRQRILLLQEIFAPEIVKIDPAFFQRLNDSFFLPEDKEEYQTNTLFNDPDYSDKDYHQQYPTIYHLRYDLMNNPARHDVRLVYLALAHILKTRGHFLYSDTGEFKLGEQYQSVFTELSVSLSEVLDIDLPETFAQEWRQILTDTTTKNAEKQSLLLKTLDSKDPTCKGLTRLLSGYGVKLSDFFGDQYKETYSTPVKLSQMDEETSSQLETVLTDEHFEFIQAASAYYNLVRLESLLQGADSLSQTKIRIYDKHGQDLRKLKKLFRKHVSKEEYNKFFSTSEKGLNNYVAYSGHYLLRKKKQPVLQKCDQKKFLEQLKKTLNKFPETAKREPLFTEIMAEVEKGTFLPKITDKDNSLIPHQLHHAELKKILQNASAYLPFLNQEGEEGYTKAEMISLISDFRIPYYVGPLNPAHSVQKDPNSSSHHAWVSKLSDEPVRPWNFNRVIDVEQLATDFIANLTNKCTYLIGEDVLPKESPLYAKYSILNLLNSMKIKGERLETGLKQKIFNHFFLEPERKKKATRKNILDFLKAETGLSLTDADIEGIDLEIPGDMKAEKAIERIAPDLLTSQEKENIVRLITVFPDSVQMISSRLTRDLQEKLSPHQINQLARLKFTGWGRLSERFLNGIEAPNEKAEFKTIIDLMWEESLNLQEILSSRYLFQSIVQRINEDLFGSSMSFGYHVVENYPISPPVKRMVWQALRIIKELIKVNHGKLPDKIFLEVAREEGKKERTRSRKQQLLELYKDLKKQEESLYSDLENRSDAELRSKKLFLYFTQMGRCMYSGEKISVENLNSIGADGFDLYDIDHIYPRSVTKDDSLLNNLVLVKSSENRAKSDNYPIVEEKRKARIAFWAQLKASGLITEEKFRRLSRQSPLSEEELVGFINRQLVETRQAAKAAANLIKQLLPETQLVYVKAGHVSDFRNRQSDFKFPKVRGMNDLHHAKDAYLNIVVGNVFDSKFTNNPLNFIRNSEKRSYHLAKMYDFTVKSPDGQIAWEPGEEGSIKMVKKMMARNNILVTRQTHHQHSGQNCGIFNQMILPKGQGQFPIKT

SEQ ID NO: 20382 - protein, 1375 aa, unidentified
  REGION 1..1375: note = Cas Enzyme sequence
MEKDYYIGLDMGTGSVGFAVTDTNYEILKSHGKAQWGVRLFDTAKTAADRRFSRVNRRRLERRRQRILLLQEIFSNEIVKIDPGFFSRLNDSFFFPEDKSENQRNTLFNDPGYSDKNYHEQYPTIYHLRYDLMKNSQPHDIRLVYLALAHILKTRGHFLYSDTGNFKLGDQFKVVFNDFVNIVGEVLDIYIPEAVAERWHQILTDRATRNSEKQSLLVESIQNNEKVTKTLTRVLTGYEIKFKDLFGDQYNDVTPAKVKLSNIEDETLDQIKLALSEDHFALFEIASTFYNLVRLETLLQGADSLSQTKINTYEKHGDDLKKLKRIFKNHLTKDDYNRFFSQSEKGLYNYPAYSGHLTINKIKQPVLQKCDQEKFLDHLKKVMRLLPEKAQNSPEVAEVLTEIENGTFMPKITDRDNSLIPHQLHHAELLKILENASTYLTFLNEDGSDGYTKKQMIELLSDFRIPYYVGPLNPAHSIDRDAKSSSHHAWVSRLSDEPVRPWNFNRVIDVEQSASDFIANLTNKCTYLIGEDVLPKESPTYAKYSILNILNTVNIKGERLPVPLKQELFQHFFIDPKRKGKPTKRNITEFIQSKTGLSIAESDIGGMDLEIPGDMKAEKAIERIAPGKLTLAEKENIVRLVTVFPDSVKMLSTRIDRELGEKLTSAEISQLARLKFTGWGRLSAMLLNGIEAPNKKAEFKSIIDMMWEENLNLMEIMSDRFLFHSIVQRINDDLLGSNRSFSYQVVDNFPVSPPVKRMVWQALRIIKELIKVNHGQPPAKIFLEVAREEGEKVRTRSRKSQLLELYKDLRKQESDLVSNIESRSEAELRSKKLFLYFTQMGRCMYTGESISVESLDNKGADGHDIYDIDHIYPRSLTKDDSLLTNLVLVKSKANRDKGDKYPIVEATRKARIGLWAQLRESGLITEEKFRRLIRQSPLSDEELAGFINRQLVETRQAAKAAADLIRQFLPETQLVYVKAGHVSDFRYNQGEFKFPKVRGMNDLHHAKDAYLNIVVGNVFHSKFTQNPMNFIRGNEGRRYNLARMYDFPITSPSGEIAWLPGSNGSLIMVSKMMKRNNILVTYQTHHQHSGRNGGIFNQTILPKGQGQFPIKTADPRLNSQAGIDKYGAYTDETGATFFIVEHKAKKKTCKSIFSLGLGWLLTHPLNEETLLKYCERDLGLIEPHILVKNVPYNTILSMDGYPLRILAKTGSSIKMANVVQPVFSAEQEQTIKQVFVYLAKEGNDEDGEILENVTLQAEFLSLYDGFTRKLSEPPFSKLPPYARQVTNLENGREKFQLLTLKEQAKVLNQVLIFFLCDHQLSDISLISSLKNGRPQNTQVGMITISQNLPWEEKEIAIIYQSVTGIFEKRVVVSRA

SEQ ID NO: 20383 - protein, 1374 aa, unidentified
  REGION 1..1374: note = Cas Enzyme sequence
MTYFVGLDMGTSSVGYAVSNEQYVILNFRQKAMWGVRLFDEAQTAADRRTARTSRRRLARRNLRLKLLQDLFAEAISAVDPGFYQRLKDSFFYPEDKDEEQIYSLFADADFTDKDYHKKYPTIYHLRHALISNTEPHDPRLVYLAIHHILKSRGHFLFTGSFDMQGNGQYIETFKDFQAALSEVFEITLPSELAEPIKNAINDKSLKKREKTEELKKITNWKDANAVAILELLSNRKVKISKLFGDEYKDQSPKDVTFEGTGFEEEKQAELQALVSDDEFSLLLSTYRLHNQLRLDTLLQGYETYSASKIGLYEKHGTDLRKLKRIFRKYFSSDDYKTFFSQSKNKLNNYVAYTGHLKKNKKKVAVNYRCDAINFLDDLRKKLEPVARDNPEDTLLAEILVEIDNQLFLPKQVSKDNSLIPNQIHVEELKAILNNASAYLPFLNEIGEDNHTIKEMIIKLAEFRIPYYVGPLNPAHKVRPEKKDGSHHAWITKRSDEPVRPWNFHRVVDEEQSANDFIANLTNKCTYLIGEDVLPKESPSYARFILLNQLNMLSYRGERLPVIYKHAIYEELFMAASAKPRFSKKDIAEFLNIKFGDDFNAADIGGMDLHINNVLKAERQIEAIAPNQLSLQDKEDIVRLITVLPDSNKMLVNRLKNQFHTKLNDEQIKRISQLSFKDWGNLSEKLLSGIRAIGPGGVETNILDAMWNNNLTLMELLSASYGFKEQIDAYNNEIVGEARTLDYQIVDEYPYLSPAVKRMIWQAIKIVNEIVKIQKGAPEKIFIEVAREEGKKERTTSRLEQLKQIYKEAKILDEHLLSELNEQSESSMRRKKIYLYFTQLGKCAYTGKPIDFEKLLEQGDSSDAYYDIDHIYPRSKTKDDSLRNNLVLVESSANRDKGDNYPIPLDVQNARRAFWFHLKEKGLISDEKFFRLNRTTELSDEELESFISRQLVQTRQATKAAAEILGKFYPDTRVVFVKAGHVSDFRYNQRDFEFIKVRAMNDLHHAKDAYLNIVVGNVFDTKFTQDVRNYIKTAGKRDYNLARMYDFDVKSRDGKLAWKAGKDGTIKTVSKMMARNNIVTSYQAVLRTRGQSGGLFDQNLLPKGQGQYPIKSTDPRFVGDDGIAKYGGYKNITGATYFVVEHTLRNKRVRSILPLYLPWILTNEQTEENLQNYCLNTLNLLEPRIILNDLPFKSVLRLNGFPFQLLGRSDNRLQIAPALQPFFPAEIEPIIKTFTKDIEDDVDDKVLLRTVTEEDLLLVYRVFQKKLSNAPYNKHSNFNNQANNLKNSEENFVLLSVREKFRVLNQILILFTCDGRLSDLSLLLPKDKNGKPSTKNTQVGMIRIPQNIQEGSQLEVVFQSVTGLYEKTNRISLP

SEQ ID NO: 20384 - protein, 1345 aa, unidentified
  REGION 1..1345: note = Cas Enzyme sequence
  REGION 1064..1068: note = misc_feature - Xaa can be any naturally occurring amino acid
MQKYYLGLDIGTNSVGWAVTDENYNLCKFGGKRMWGIRLFDGAQTAEERRMNRSNRRRLSRQKQRIDLLQELFAKEIAKVDPTFFIRLNESRLYMEDKSTGTKFPLFADPGYTDKEYYKEYPTIYHLRQELIKNPESHDIRLVYLACHHILKNRGHFLINGSFSDLKNLSFVCREMLDAFNELSKYQLMISDIDALEKILSDRKQQKSAKVKELVQIFECVPREDKSDAKICKEILSNLCKFLVGAKGNITRLFDTDFDEMETSSFSFGDSKYEDSLLPSLEENYPDYANVIQKIKAMYDWSVLVEIMAGENYLSFAKVNSYKKHKENLSILKSLMKKYCTPDVYQRFFYETDEKSSYGNYIGAIHNNGHSHTMKKCDEETFYKSLSKILDKLVVQKTDQDTLEILKKEAKNQTLLPLARTKANGVIPNQIHIQELRAILDNAKTYLSFLNEADEYGTIAEKIIRIAKFKIPYYAGPLSTRHKEQGANTWIVRKQEGRIYPWNFEEMVDLERSNNEFIRRMTNKCTYLIGEDVLPKNSLLYSKFMVLNELNNLKIRGHKISVELKQELYKELFCKKAKVTGKALLVYLKKKDAELTLEDISGFDADFKSSLSIYIDFKNHILREQIDDGKYQSIVENIIKWKTIFDVDSKMIEKLIAREYPNMFSSEQIKKICRLKCRGWGNFSSRFLNGIQGENTETKECFTIIEALWKTNYNLMQLLSKQFTFKDAIDCINADKVGKIDKVTYENTVKDLVVSPANKRAIWQTVQITEEIKKVMKCEPEKIFVEMARGREKEKKRTISRKERLLKLYMDYKDENRDWIKEIESRDEQDFTNRKLYLYYTQIGRCMYSGEEISLEELMQKNSKWDKDHIYPQSKIKDDSLDNLVLARKDINNNKSNKLLPTGIQDKMKKYWKMLLKYGFISKKKYDRLMRTEDFSDEELSGFIERQIVETRQSSKAVAELLEHLNEHTEIVYVKAELVSDFRHDNNMLKSRRINDYHHAKDAFLNIVVGNVYNAKFTANPRNWIKKNRNTNYSIRRVFDYTVKRGSTIVWQGVKDGGHSIDAXXXXXILYTERTYCEQGELFNATLIKKGNPNAIGLKKGLDPMKYGGYSSPKTSAFAFIEFDGKKGRQNHLVEIPVYIANIAARQPEYIKNHLEEKKGYQNVIVKKYPIQKNALIKLDGYPARLRGANEKSITLKNAVQLVLKPEYHETIRNVEKYLEYIDKDESVSKAARFSHTELDKLYDELCFKAENSIYKKRPASQAATLKNGQKTFLAITNLKEKAQVINNIITMFRCDATTTTNLKTIGGSANAGGMQVNKNTLTSQKVVLVHQSITGLFGTEEELL

SEQ ID NO: 20385 - protein, 1353 aa, unidentified
  REGION 1..1353: note = Cas Enzyme sequence
MKREPYYIGLEVGPTYAAYAVTNESYNLERFRGKDMWGIYKFDEAESSQDRKNARSARKNIKKEKERIGLIRSYFHDEIEKADVNFFARLDNSTFHAEDKDKILSGDRNVLFNDENYKDADYNEQFPTIYHLRSFLAKHNELVDIRLVYLAVSNIMKHRGNFYSKNLEDTDSAIKDIYAGICEKASQADIQLYPEADTDKIMDYMLNTALTNKVKATLVSQEVKALTKSETALIKLMCGLKVKITDIFPGLLETLPEEDKKTSMSFSDNDYLDRTEEIENLTGEDNYELISAVKELYDAVIIQNIMQGHRFISDAKIASYEKHMADLKLLKSTMKRYLSKQEYSRFFNIEEPGTYAAYVKSGMSNGVKTRRNSEKGRTLDDLYGSIKKLLLKADEDDEDAEYILDEIGKRAFLPKQRTSDNRLIPNQLYATELKAILDNAAEHYGFLNEKDDFGLTVSERIMKIFTFTMPYFIGPTSEYNTRGWVVRKEAGKVMPWNLEEKIDVKESAKSFIESMIGKCTYLSGERVLPKSSLLYERFMVLNEMNCIRVDGEKIPVEIKQEIVNGKLALGKKLTRKQILSFLVKKGLATSDSLITGMDEKLNNTMTSHKIFADIFGTLDSETQAAAEDIILWSAIYGDSKEYVKQQIENKYPGLLDEDRMKKALSIKSNDWGKLSKEFLTMTGTNKETGERISIIDAMWQMNLSLNELINDNRYDFMSLIKEKTIKAEKNIFTFEYDDLNELYATASQKRSIWAAVKIVREVEKIKGYAPESVFLNTIKNRPKDVKKDARKTRLIELYKNLKGVSKEWKDSMISHISECDSDGSLKSKKVYLYFLQLGKDMYTWKDIDFKEVIATGSDVYNIDHIYPKHYVKDDSMDNIVLTNAGFNKEEKKDIYPVPDSIYQTMHENWLYLRQNGFMSAEKLARLSDRNPMSDEKRAAFIGKLYTQVSSSTKMLADIFKNILSKDTKVIYTKSSEVSDFRRQYGFPKMTMLNEHYLAKDAYLNIVVGNVWYTKFTASPMWYIEKEYRTGKSEYNLNRMYDFNIIRDERIAWIAESKKKNIPGTIDVIKKVMSRNTPVTVTRITEGHGALTNATISKAAKSKPGVYLPLKSDERYKDVTKYGGKTSIKTAYNFLVEHTDKHGSRIRTLYSLPLYLANNVKNKEDIEKYCRETLGLKEPDVRINKIMLNSELEIDGYRYLLGGKTGLQYGLKNNTPMVFNVEWQGYISKIEKYIDFKSVDKDITSERNIELYDEILGKHKNSIFSRKRNPLYNLIESCRDNFVGLSLEEQMQALYQILFLTRMGTNVSNLSVIGAGANVGLMHLNATISKASSVKLIEISITGMYTIETDMLNC

SEQ ID NO: 20386 - protein, 1353 aa, unidentified
  REGION 1..1353: note = Cas Enzyme sequence
MKREPYYIGLEVGPTYAAYAVTNESYNLERFRGKDMWGIYKFDEAENSQDRRNARSARKNIKKEKERIGLIRSYFHDEIEKADVNFFARLDNSTFHAEDKDKILFGDRNVLFNDENYKDADYNEQFPTIYHLRSFLAKHNELVDIRLVYLAVANIMKHRGNFYSKNLEDTDSAIKDIYAGICEKASQADIQLYPEADTDKIMDYMLNTALTNKVKATLVSQEVKALTKSETALIKLMCGLKVKITDIFPGLLETLPEEDKKTSMSFSDNDYLDRTEEIEKLTGEDNYELISAVKELYDAVIIQNIMQGHRFISDAKIASYEKHMADLKLLKSTMKRYLSKQEYSRFFNIEEPGTYAAYVKSGMSNGVKTRRNSEKGRTLDDLYGSIKKLLLKADEDDEDAEYILDEIGKRTFLPKQRTSDNRLIPNQLYATELKAILDNAAEHYRFLNEKDDSGLTVSERIMRVFTFTVPYFIGPTSEYNTRGWVVRKEAGKVMPWNLEEKIDVKESAKSFIESMIGKCTYLSGERVLPKSSLLYERFMVLNEMNCIRVDGEKIPVEIKQEIVNGKLALGKKLTRKQILSFLVKKGLATSDSLITGMDEKLNNTMTSHKIFADIFGTLDSETQAAAEDIILWSAIYGDSKEYVKQQIENKYPGLLDEDRMKKALSIKSNDWGKLSKEFLTMTGTNKETGERISIIDAMWQMNLSLNELINDNRYDFMSLIKEKTIKAEKNIFTFEYDDLNELYATASQKRSIWAAVKIVREVEKIKGYAPESVFLNTIKNRPKDVKKDARKTRLIELYKNLKGVSKEWKDSMISHISECDSDGSLKSKKVYLYFLQLGKDMYTWKDIDFKEVIATGSDVYNIDHIYPKHYVKDDSMDNIVLTNAGFNKEEKKDIYPVPDSIYQTMHENWLYLRQNGFMSAEKLARLSDRNPMSDEKRAAFIGKLYTQVSSSTKMLADIFKNILSKDTKVIYTKSSEVSDFRRQYGFPKMTMLNEHYLAKDAYLNIVVGNVWYTKFTASPMWYIEKEYRTGKSEYNLNRMYDFNIIRDERIAWIAESKKKNIPGTIDVIKKVMSRNTPVTVTRITEGHGALTNATISKAAKSKPGVYLPLKSDERYKDVTKYGGKTSIKTAYNFLVEHTDKHGSRIRTLYSLPLYLANNVKNKEDIEKYCRETLGLKEPDVRINKIMLNSELEIDGYRYLLGGKTGLQYGLKNNTPMVFNVEWQGYISKIEKYIDFKSVDKDITSERNIELYDEILGKHKNSIFSRKRNPLYNLIESCRDNFVGLSLEEQMQALYQILFLTRMGTNVSNLSVIGAGANVGLMHLNATISKASSVKLIEISITGMYTIETDMLNC

SEQ ID NO: 20387 - protein, 1353 aa, unidentified
  REGION 1..1353: note = Cas Enzyme sequence
MKREPYYIGLEVGPTYAAYAVTNESYNLERFRGKDMWGIYKFDEAESSQDRKNARSARKNIKKEKERIGLIRSYFHDEIEKADVNFFARLDNSTFHAEDKDKILSGDRNVLFNDENYKDADYNEQFPTIYHLRSFLAKHNELVDIRLVYLAVSNIMKHRGNFYSKNLEDTDSAIKDIYAGICEKASQADMQLYPEADTDKIMDYMLNTALTNKVKATLVSQEVKALTKSETALIKLMCGLKVKITDIFPGLLETLPEEDKKTSMSFSDNDYLDRTEEIENLTGEDNYELISAVKELYDAVIIQNIMQGHRFISDAKIASYEKHMADLKLLKSTMKRYLSKQEYSRFFNIEEPGTYAAYVKSGMSNGVKTRRNSEKGRTLDDLYGSIKKLLLKADEDDEDAEYILDEIGKRTFLPKQRTSDNRLIPNQLYATELKAILDNAAEHYEFLNEKDDSGLTVSERIMKIFTFTMPYFIGPTSEYNTRGWVVRKEAGKVMPWNLEEKIDVKESAKSFIESMIGKCTYLSGERVLPKSSLLYERFMVLNEVNNIRVDGEKIPVEIKQEIVNVKLVLGKKLTRKQILSFLVKKGLATSDSLITGMDEKLNNTMTSHKIFADIFGTLDSETQAAAEDIILWSAIYGDSKEYVKQQIENKYPGLLDEDRMKKALSIKSNDWGKLSKEFLTMTGTNKETGERISIIDAMWQMNLSLNELINDNRYDFMSLIKEKTIKAEKNIFTFEYDDLNELYATASQKRSIWAAVKIVREVEKIKGYAPESVFLNTIKNRPKDVKKDARKTRLIELYKNLKGVSKEWKDSMISHISECDSDGSLKSKKVYLYFLQLGKDMYTWKDIDFKEVIATGSDVYNIDHIYPKHYVKDDSMDNIVLTNAGFNKEEKKDIYPVPDSIYQTMHENWLYLRQNGFMSAEKLARLSDRNPMSDEKRAAFIGKLYTQVPSSTKMLADIFKNILSKDTKVIYTKSSEVSDFRRQYGFPKMTMLNEHYLAKDAYLNIVVGNVWYTKFTASPMWYIEKEYRTGKSEYNLNRMYDFNIIRDERIAWIAESKKKNIPGTIDVIKKVMSRNTPVTVTRITEGHGALTNATISKAAKSKPGVYLPLKSDERYKDVTKYGGKTSIKTAYNFLVEHTDKHGSRIRTLYSLPLYLANNVKNKEDIEKYCRETLGLKEPDVRINKIMLNSELEIDGYRYLLGGKTGLQYGLKNNTPMVFNVEWQGYISKIEKYIDFKSVDKDITSERNIELYDEILGKHKNSIFSRKRNPLYNLIESCRDNFVGLSLEEQMQALYQILFLTRMGTNVSNLSVIGAGANVGLMHLNATISKASSVKLIEISITGMYTIETDMLNC

SEQ ID NO: 20388 - protein, 1353 aa, unidentified
  REGION 1..1353: note = Cas Enzyme sequence
MKREPYYIGLEVGPTYAAYAVTNESYNLERFRGKDMWGIYKFDEAESSQDRKNARSARKNIKKEKERIGLIRSYFHDEIEKADVNFFARLDNSTFHAEDKDKILSGDRNVLFNDENYKDADYNEQFPTIYHLRSFLAKHNELVDIRLVYLAVANIMKHRGNFYSKNLEDTDSAIKDIYAGICEKASQADIQLYPEADTDKIMDYMLNTALTNKVKATLVSQEVKALTKSETALIKLMCGLKVKITDIFPGLLETLPEEDKKTSMSFSDNDYLDRTEEIENLTGEDNYELISAVKELYDAVIIQNIMQGHRFISDAKIASYEKHMADLKLLKSTMKRYLSKQEYSRFFNIEEPGTYAAYVKSGMSNGVKTRRNSEKGRTLDDLYGSIKKLLLKADEDDEDAEYILDEIGKRTFLPKQRTSDNRLIPNQLYAAELKAILDNAAEHYGFLNEKDDSGLTVSERIMKIFTFTMPYFIGPTSEYNTRGWVVRKEAGKVMPWNLEEKIDVKESAKSFIESMIGKCTYLSGERVLPKSSLLYERFMVLNEMNCIRVDGEKIPVEIKQEIVNGKLALGKKLTRKQILSFLVKKGLATSDSLITGMDEKLNNTMTSHKIFTDIFGTLDSETQAAAEDIILWSAIYGDSKEYVKQQIENKYPGLLDEDRMKKALSIKSNDWGKLSKEFLTMTGTNKETGERISIIDAMWQMNLSLNELINDNRYDFMSLIKEKTIKAEKNIFTFEYDDLNELYATASQKRSIWAAVKIVREVEKIKGYAPESVFLNTIKNRPKDVKKDARKTRLIELYKNLKGVSKEWKDSMISHISECDSDGSLKSKKVYLYFLQLGKDMYTWKDIDFKEVIATGSDVYNIDHIYPKHYVKDDSMDNIVLTNAGFNKEEKKDIYPVPDSIYQTMHENWLYLRQNGFMSAEKLARLSDRNPMSDEKRAAFIGKLYTQVSSSTKMLADIFKNILSKDTKVIYTKSSEVSDFRRQYGFPKMTMLNEHYLAKDAYLNIVVGNVWYTKFTASPMWYIEKEYRTGKSEYNLNRMYDFNIIRDERIAWIAESKKKNIPGTIDVIKKVMSRNTPVTVTRITEGHGALTNATISKAAKSKPGVYLPLKSDERYKDVTKYGGKTSIKTAYNFLVEHTDKHGSRIRTLYSLPLYLANNVKNKEDIEKYCRETLGLKEPDVRINKIMLNSELEIDGYRYLLGGKTGLQYGLKNNTPMVFDVEWQGYISKIEKYIDFKTVDKDITSEKNIELYDEILGKHKNSIFSRKRNPLYNLLESCRDNFVGLSLEEQMQALYQVLFLTRMGTNVSNLSVIGAGANVGLMHLNATISKASSVKLIEISITGMYTIETDMLNC

SEQ ID NO: 20389 - protein, 1349 aa, unidentified
  REGION 1..1349: note = Cas Enzyme sequence
MQKYYLGLDIGTNSVGWAVTDENYNLCKFGGKRMWGIRLFDGAQTAEERRMNRSNRRRLSRQKQRIDLLQELFAKEIAKVDPTFFIRLNESRLYMEDKSTGTKFPLFADPGYTDKEYYKEYPTIYHLRQELIKNPESHDIRLVYLACHHILKNRGHFLINGSFSDLKNLSFVCREMLDAFNELSKYQLMISDIDALEKILSDRKQQKSAKVKELVQIFECGPCEDKSDAKICKGILSNLCKFLVGAKGNITRLFDTDFDEMETSSFSFGDSKYEDSLLPSLEENYPDYANVIQKIKTMYDWSVLVEIMAGENYLSFAKVNAYKKHKENLSILKSLMKKYCTPDVYQRFFYETDEKSSYGNYIGAIHNNGHSHTMKKCDEETFYKSLSKILDKLVVQKTDQNTLEILKKEAKNQTLLPLARTKANGVIPNQIHIQELRAILDNAKTYLPFLNESDEYGTIAEKIIRIAKFKIPYYAGPLSTRHKEQGANTWIVRKQEGRIYPWNFEEMVDLERSNNEFIRRMTNKCTYLIGEDVLPKNSLLYSKFMVLNELNNLKIRGHKISVELKQELYKELFCKKAKVTGKALLVYLKKKDAELTLEDISGFDTDFKSSLSIYIDFKNHILREQIDDGKYQSIVENIIKWKTIFDADSKMLEGMIAREYPNMFSSEQIKKICRLKCRGWGNFSSRFLNGIQGENTETKECFTIIEALWKTNYNLMQLLSKQFTFKDAIDCINADKVGKIDKVTYENTVKDLVVSPANKRAIWQTVQITEEIKKVMKCEPEKIFVEMARGREKEKKRTISRKERLLKLYMDYKDENRDWIKEIESRDEQDFTNRKLYLYYTQIGRCMYSGEEISLEELMQKNSKWDKDHIYPQSKIKDDSLDNLVLARKDINNNKSNKLLPTGIQDKMKKYWKMLLKYGFISKKKYDRLMRTEDFSDEELSGFIERQIVETRQSSKAVAELLEHLNEHTEIVYVKAELVSDFRHDNNMLKSRRINDYHHAKDAFLNIVVGNVYNAKFTANPRNWIKKNRNTNYSIRRVFDYTVKRGSTIVWQGVKDGGHSIDAIKKTMARNDILYTERTYCEQGELFNATLIKKGNPNAIGLKKGLDPMKYGGYSSPKTSAFAFIEFDGKKGRQNHLVEIPVYIANIAARQPEYIKNHLEEKKGYQNVIVKKYPIQKNALIKLDGYPARLRGANEKSITLKNAVQLVLKPEYHETIRNVEKYLEYIDKDESVSKAARFSHTELDKLYDELCFKAENSIYKKRPASQAATLKNGQKTFLAITNLKEKAQVINNIITMFRCDATTTTNLKTIGGSANAGGMQVNKNTLTSQKVVLVHQSITGLFGTEEELL

SEQ ID NO: 20390 - protein, 1349 aa, unidentified
  REGION 1..1349: note = Cas Enzyme sequence
MQKYYLGLDIGTNSVGWAVTDENYNLCKFGGKRMWGIRLFDGAQTAEERRMNRSNRRRLSRQKQRIDLLQELFVKEIAKVDPTFFIRLNESRLYMEDKSTGAKFPLFADPGYTDKEYYKEYPTIYHLRQELIKNPESHDIRLVYLACHHILKNRGHFLINGSFRDVKNLSFVCREMLDAFNELSKYQLMISDIDALEKILSDRKQQKSAKVKELVQIFECGPREDKSDAKICKGILSNLCKFLVGAKGNITRLFDTDFDDMETSSFSFGDSKYEDSLLPSLEENYPDYANVIQKIKTMYDWSVLVEIMAGENYLSFAKVNAYKKHKENLSILKSLMKKYCTPDVYQRFFYKTDEKSNYGNYIGAIHNNGHSYTMKKCDEETFYKSLSKILDKLVVQKTDQNTLEILKKEAENQTLLPLARTKANGVIPNQIHIQELRAILDNAKTYLPFLNEADEYGTIAEKIIRIAKFKIPYYAGPLSTRHKEQGANTWIVRKQEGRIYPWNFEEMVDLEQSNNEFIRRMTNKCTYLIGEDVLPKNSLLYSKFMVLNELNNLKIRGHKISVELKQELYKELFCKKAKVTGKALLVYLKKKDAELTLEDISGFDADFKSSLSIYIDFKNHILKEQIDDGKYQSIVENIIKWKTIFDADSKMIEKMIAREYPNMFSSEQIKKICRLKCRGWGNFSSRFLNGIQGENTETKECFTIIEALWKTNCNLMQLLSKQFTFKDAIDCINADKVGKIDKVTYENTVKDLVVSPANKRAIWQTVQITEEIKKVMKCEPEKIFVEMARGGEKEKKRTISRKERLLKLYMDYKDENRDWIKEIESRDEQDFTNRKLYLYYTQIGRCMYSGEEISLEELMQKNSKWDKDHIYPQSKIKDDSLDNLVLARKDINNNKSNKLLPTGIQDKMKKYWKMLLKYGFISKKKYDRLMRTEDFSDEELSGFIERQIVETRQSSKAVAELLEHLNEHTEIVYVKAELVSDFRHDNNMLKSRRINDYHHAKDAFLNIVVGNVYNAKFTANPRNWIKKNRNTNYSIRRVFDYTVKRGSTIVWQGVKDGGHSIDAIKKTMARNDILYTERTYCEQGELFNATLIKKGNPNAIGLKKGLDPMKYGGYSSPKTSAFAFIEFDGKKGRQNHLVEIPVYIANIAARQPEYIKNYLEEKKGYQNVIVKKYPIQKNALIKLDGYPARLRGANEKSITLKNAVQLVLKPEYYETIRNVEKYLEYIDKDESVSKAARFSHTELDKLYDELCFKAENSIYKKRPASQAATLKNGQKTFLAITNLKEKAQVINNIITMFRCDATTTTNLKTIGGSANAGGMQVNKNTLTSQKVVLVHQSITGLFGTEEELL

SEQ ID NO: 20391 - protein, 1472 aa, unidentified
  REGION 1..1472: note = Cas Enzyme sequence
MAKKYLLGLDLGTDSVGWCLMDESNHIIKKGGKSLWGVRLFEEAEDCSSRRMSRESRRRTQRRAERVDLLQSLFAPEMAKVDPTFFVRMNNSALLEEDKETAAKGKDGTLFAGVGGINDKAFYDKFPTIYHLRDSLLKGEEKADIRYLYLVCHHMVKYRGNFLHYGEEINLKSDQEIIEAFHEIDVALEKMAKKPLALSEERISSFLKLALNSFGINDSKRAYYEFLKQDDSFIKNGICPLLAGGKVAVSKLYDLDEDDEPDPKNISVRSSTFEDDFSKLNFTFSDRPETAIIKAAKTISDFILLRRILGSSNSLSDAMVARFNLHKTQLKELKSYVRSHCPELYDRVFRTYDPKVNNYVRYVGMTRIKGKRLRVEHCHREEFYDFVKTEVFKIAKNVEVTDPFVQGIVAQMDNGDYLPRQNSTDNGVFPYQLNLTELKCILDKQAKFYPFLKVKDEEGYSTDEKIISILTYHIPYYVGPLVQQKEGDEHGKFAWVVRTGKKIMPWNFQKGGIIDFDQSAENFIRRMLNKCTYLPNCYCLPKCSLLYSRFEVISFLNNIAINGRPIPAHSTVEGEVSKDLLMSQFCLKGTLTVKGLTAFLKNHFGHFDPELLTTRTGKEIDSIDASMKSYADFVGIFGQSYVEQHLDLIESIINDLSIFTDRDIVERRLRNKYGFTNEKVIRQIKALNYSKFGRLSKELLELTSDVPDLSTGEIRKQTLIDSMYESGENLMEILADSRYSFGAQVAARQKEASYVVKQGASKLEQVKAVVDELYVSPSLKRPLLQAYEVVDELQKIVGHPIDEYYVECTRGSNPKEKGKKKPSRLEDLLRIYGRAKTDSVKLLKELEKKENPSYFDQEMKKQILENGDSLDRCFSELKDQANRHNDMCFRSDKLFFYYTQLGRCMYSLKPIHLEDLFADAQQYDIDHIVPQSLVKDDSLENRVLVYQDYNRKKADVYPLPSGFLAPGAASFYRYLSKIGLIGEKKLGALLRSSAEPLKDEELVGFTNRQLVSTNQAVKGLITILTTFEKVKGKEPEVIFSKAGLVSDFRQKFDILKSRDANDFHHAHDAYLNVVVGRANHEYFRYMNGRGWFEAMHRSKLSTNPSNIFDQNSKEAQAKGHVKAPIKDSQGNICWAFEPSLEQIKRDIYHRFDIMVTVRQFIQPGLFGKATLLKKTAWRDGNLFPIKNNRDPAKYGGYYGLNNGFFTIVELFDKKGKPIPTLIPVLNISARPDEEDKILHYCSGITGQKVGKLLVPCLRINSVIKKGKVVFLLSGKDHLNSASCKTLTEMIFSQEEIRVIRSVSKLCEIIKLKRTKDFSPDREDFDEKLASLLGSPLSADELVISPAANDQRNKAICLTSKEELELYDTLLKKLSSPFFEETGGPSDTAALMADPQKRALFESLSIGKKALVLSEILKETSANSAERANLKLLNGPAEQSKRLLSWQKIGSCQVLAQSVTGFYEKTIFPTKQK

SEQ ID NO: 20392 - protein, 1229 aa, unidentified
  REGION 1..1229: note = Cas Enzyme sequence
MDENYTDQDYHMEYPTIYHLRKALIDNEESAFEIRKLYLAISHILSHRGHFLFEGELSDNLDFDDIFNEFVKYLNEELNIDFKIKSDVSLQAIKEILTDKMLNRTKKKEKLSELLEEEKNKIYQEIWKLLVGNEAKMSTIFDDKEYEEAKIAFSKGNYDEKEEEYESILGEKILFVQKAKAIYDWMLLQNILKEDKYLSYSKVKLYDEHKNDLKILKEVLKRLDKKAYKEIFSENGLYENYVKKNGKEELYKKIKSYFNDENTDEIVKNILNKIELDSFLPKQKIKDNGVIPRQVHQKELEIILKNAEKYFTWLTEKDETGLSVSEKIMKIFKFKIPYYIGPLNSKSPFAWIERKEYGKILPWNFENMVDMSKTAEKFIKKMTNKCTYLPEKDVIPKNSLLYTKYMVLNELNNLKIRGEKIKVELKQKIYTELFQKNKKIGMKTLIEFLKSQNIVVTKAEITGIDGTFNTSLGSYIDMKKIFGEEKIVKDSYKKMIEDIILWITLYGEEKKLIKSKIEEKYLEKVTPEEMKLILKLKYRDWSRLSKEFLTEIETMDEETGELISIIEMLWRKNENIMELLSYKYDFSNRIKEYNGVNEEEKNITYGDLVKDLQVSPSVKKMLWRALVIVKEIKKVTNKSPKKVFIEMARDTQTEKKRTEKRKDKLLELYKNIKNDDSVKELEKNLKDRTNDDLKSKKLYLYYLQLGRCMYSGEVIRLEDLMNDNLYDIDHIYPQSKIKDDSFDNTVLVKKQINADKTDVYPIDKSIQAKCKALWTSLKERGLMSNTKYERLTRTEGFSDDELAGFISRQIVETRQATKVLADLLKVIFGSDTRVIYVKAGLTSDFRQKFGIYKFRELNDYHHAHDGYLNIVTGNIYNTLFTDNPYNFIKDRKKDNRTYNLNKVFERENDVWNPDVMLSKIERYIYKIRPLFTRASYEQKGGFSDQNISSEKDKLRPLKSSGVLSNIKYGGYDKIKNSYFFIVEYTEKKKRVRSIETLPIYIKKSISTKEDLEKYCKEELKLQEPKVLVSKLNYKSLVHSNGYEYYLNSRTADSINIQNGIQIILIKENYETYRKIYKNLEYLKLIYKDEKIREEKFLEKLPKILKKNKNDRDLSEDEISEKFWKLYKEIIEKIETGIFSKFKSTLPIYIEDCKKLKDFTTLNNYAKSRFIQEILKCLNSQQGEFDTKYTHNYSKKYNTKLSKSKILENDFYIINQSPTGLFEKKVFLDK

SEQ ID NO: 20393 - protein, 1339 aa, unidentified
  REGION 1..1339: note = Cas Enzyme sequence
MKKFEDYYLGFDLGTSSIGWAVTNEKYDILRFNKKFMWGTHLFDMGNTASERRIFRTSRRRLKRKKNRIELLQTLFSAEMSKKDFGFFQRLKESQYFIEDKTIKNKNTLFMDKNYTDQDYHMEYPTIYHLRKALIDNEESAFEIRKLYLAISHILSHRGHFLFEGELSDNLDFDDIFNEFVKYLNEELNIDFKIKSSASLQAIKEILTDKTLNRTKKKEKLSELLEEEKNKIYQEIWKLLVGNEAKMSTIFDDKEYEEAKIAFSKGNYDEKEEEYESILGEKILFVQKAKAIYDWILLQNILKEDKYLSYSKVKLYDEHKKDLRILKEVLKKLDKKAYKEVFSENGLYENYVKKNGKEELYKKIKSYFNNENTDEIVKNILNKIELDSFLPKQKIKDNGVIPRQVHQKELETILKNAEKYFKWLIEKDETGLSVSEKIMKIFKFKIPYYVGPLNSKSPFAWIERKEYGKILPWNFESMVNTSKTAEKFIKRMTNKCTYLPEKDVIPKNSLLYTKYMVLNELNNLKIRGEKITVDLKQKIYTELFQKNKKIGMRTLVEFLKSQNIAVTKPEITGIDGTFNTSLGSYIDMKKIFGEKKIVKDSYKKMIEDIILWITLYGEEKKLIKSKIEEKYPEKVTPEEMKLILKLKYRDWSRLSKEFLTEIETMDEETGELISIIEMLWRKNENIMELLSYKYDFSNRIKEYNGINEKEKNITYEDLVKDLQISPSVKKMIWRALVIVKEIKKVTNKSPKKVFIEMARDTQTEKKRTEKRKDKLLELYKNIKNDDSIKELEKNLKDKTNDDLKSKKLYLYYLQLGRCMYSGEVIRLEDLMNDNLYDIDHIYPQSKIKDDSFDNTVLVKKQINADKTNEYPIDKSIQNKCKAFWTSLKERGLMSNTKYERLTRTEGFSDDELAGFISRQIVETRQATKVLADLLKVIFGSDTRVIYVKAGLTSDFRQKFGIYKFRELNDYHHAHDGYLNIVTGNIYNTLFTDNPYNFIKDRKKDNRTYNLNKVFERENDVWNPDVMLSKIERYIYKIRPLFTRASYEQKGGFSDQNISSEKDKLRPLKSSGVLSNIKYGGYDKIKNSYFFIVEYTEKKKRVRSIETLPIYIKKSISTKEDLEKYCKEELKLQEPKVLVSKLNYKSLVHSNGYEYYLNSRTADSINIQNGIQIILIKENYETYRKIYKNLEYLKLIYKDEKIREEKFLEKLPKILKKNKNDRDLSEDEISEKFWKLYKEIIEKIETGIFSKFKSTLPIYIEDCKKLKDFTTLNNYAKSRFIQEILKCLNSQQGEFDTKYTHNYSKKYNTKLSKSKILENDFYIINQSPTGLFEKKVSLDK

SEQ ID NO: 20394 - protein, 1353 aa, unidentified
  REGION 1..1353: note = Cas Enzyme sequence
MQTKKVDEYYVGFDIGTNSVGYAVTDKNYNLIKHGGEPMWGSHVFEAALTAQERRAFRTARRRNDRKKQRIVLVSEIFAPEIAKVDPRFFIRRRESALFRDDVNINDRYVVFNDSDFTDKDYYDMYPTIHHLIYDLMSNKEKHDIRLVYMACAYLVAHRGHFLSEVSKDNIDSVLDFDAVYNNFLSIMENLAEIPWECDISKFKEILKKKQTVTNKERDFLQLLNEGKKFKTSEEDDVSREGLVKLLSGGTYELGKLFPKLTFEEKVSVSFNMAEEDFAMVLQQLGDEGDIISSLRNVYDWATLSDVLNGKNSVSEGKITVYEQHKKDLSFLKYFVKKYIPNRYYEVFRDGNIVGNYVSYSYNLKNVQNVSKFKGAKKDAFCDYIKKVVKDIKVDDEDKVEYEDMMFRLDTYSFMPKQVENDNRVIPYQLHYYELKKILDNASSYLEFLDEKDMDGYTSREKLLSIMEFRIPYYVGPLRTDNGQHGWMKRKAEGRIYPWNFEDKVDLDASEQEFINRMTNSCTYLPGETVVPKYSLLYCKFNVLNEINNIKINDCSIPIEHKQEIYKLFERYRKVTPKKIKDYLVSNNLLHPEDVISGIDVTIKSSLKSYHDFKKMLESGVLKEKQVEAIIERLTYSEDKGRIIRWLHIEFPDLSDDDVKYISKLKYSDFGRLSRKLLVGIRGCNKDTGEVDSIMGMLWSTNDNMMKLLSNSYTFVEEIEAIKNEYYVEHPANLDSMLDEMYVSNAVRRPIHRTLDILSDIRKVCGKNPSKIFVEMARGGGEKGVRTKSRRDQISELYKNMDKAEVRELSEQLEGKTDNELQSEVLFLYFMQLGKCAYTQKTIDIDKLKTNIYNVDHIYPQSYVKDDSITNKVLVISEENGQKGDKYPISKDIREKMQPFWYRLLSNKLISEEKYRRLTRCTSFTEEELTGFINRQLVETHQSTKAVTTVFRTLFPDVEIVYSKAGLVSDFRKEFDMLKTRSVNDLHHAKDAYLNIVVGNVYHCKFTKNFYVTQKYSLKTKTLFTHNVKSGDVMIWDGQESIGNVRKVLAKNNIHYTKYPFMRKGGLFDQMPIKAAAGLIPRKTGLDTEKYGGYNKSTATAFLLVKYKEKGKQEAMIMPVDYMYSEKVFSDEEYALKYSKKNIKKIWGRAEEQITDVSLPLGLRPIKINTMLSFDGFRACITGKANAGQKIGFTSMMPLVIGNEWENYIKKIDNYIEKKGKNKNITLNEKNDGICGEKNEKLYCILTDKIINNIYSIPFNSQQKILENGYDKFKKLDIERQVYFLQNLVLVLKSGRAGSCDMSAIGGSKNAATFAFGSKLSLWAKKFQKVYLIDNSSSGIYQNMSDNLLDIIK

SEQ ID NO: 20395 - protein, 1353 aa, unidentified
  REGION 1..1353: note = Cas Enzyme sequence
MQTKKVDEYYVGFDIGTNSVGYAVTDKNYNLIKHGGEPMWGSHVFEAASTAQERRTFRTARRRNDRKKQRIALVSEIFAPEVAKVDPRFFIRRRESALFRDDVDIKDRYVVFNDDDFTDKDYYDIYPTIHHLIYDLMSNKEKHDIRLVYMACAYLVAHRGHFLSEVSKDNIEDVLDFDVVYCNFLNVMDNYAEIPWKCDISKFKEILKKKQTVTNKEREFLQLLNEGKKFKTSEEDDVSREGLVKLLSGGTYELGKLFPKLTFEEKVSVSFNMAEEDFAMVLQQLGDEGDIISSLRNVYDWAILSDVLNGKNSVSEGKITVYEQHKKDLSFLKYFVKKYIPNRYYEVFRDGNIVGNYVSYSYNLKNVQNVSKFKGAKKDVFCDYIKKVVKDIIVDDEDKVEYEDMMFRLDTYSFIPKQVENDNRVIPYQLYYYELKRILDNASSYLEFLDEKDIDGYTSREKLLSIMEFRIPYYVGPLRTDNGQHGWMKRKAEGRIYPWNFEDKVDLDASEQEFINRMTNSCTYLPGETVVPKYSLLYCKFNVLNEINNIKINDCSIPIEHKQGIYKLFERYRKVTPKKIKDFLISNNLLHPEDVISGIDVTIKSSLKSYHDFKKLLESCVLKENQVEAIIERLTYSEDKGRILRWLHMKFPDLSDDDVKYISKLKYSDFGRLSRKLLVGIRGCNKDTGEVDSIMGMLWSTNDNMMKLLSNSYTFIEEIEAIKNEYYVEHPANLDSMLDEMYVSNAVRRPIHRTLDILSDIRKVCGKNPSKIFVEMARGGGEKGVRTKSRRDQISELYRNMDKAEVRELSEQLEGKTDNELQSEVLFLYFMQLGKCAYTQKTIDIDKLKTNIYNVDHIYPQSYVKDDSITNKVLVISEENGNKGDKYPISKDIREKMQPFWYRLLSNKLISEEKYRRLTRCTSFTEEELTGFINRQLVETHQSTKAVTTVFRTLFPDVEIVYSKAGLVSDFRKEFDMLKTRSVNDLHHAKDAYLNIVVGNVYHCKFTKNFYVTQKYSLKTKTLFTHNVKSGDVMIWNGQESIGNVRKVLAKNNIHYTKYPFMRKGGLFDQMPVKAAAGLIPRKTGLDTEKYGGYNKSTATAFLLVKYKEKGKQEAMIMPVDYMYSEKVFSDEEYALKYSKGNIKKIWGRTEDQVIDVSLPLGLRPIKINTMLSFDGFRACITGKANAGQKIGFTSMMPLVIGNEWENYIKKIDNYIEKKGKNKNITLNEKNDGICGEKNEKLYCILTDKIINNIYSIPFNSQQKILENGYDKFKKLDIERQVYFLQNLVLVLKSGRAGSCDMSAIGGSKNAATFAFGSKLSLWAKKFQKVYLIDNSSSGIYQNMSDNLLDIIK

SEQ ID NO: 20396 - protein, 1353 aa, unidentified
  REGION 1..1353: note = Cas Enzyme sequence
MQTKKVDEYYVGFDIGTNSVGYAVTDKNYNLIKHGGEPMWGSHVFEAASTAQERRTFRTARRRNDRKKQRIALVSEIFAPEIAKVDPRFFIRRRESALFRDDVDIKDRYVVFNDDDFTDKDYYDIYPTIHHLIYDLMSNKEKHDIRLVYMACAYLVAHRGHFLSEVSKDNIEDVLDFDVVYCNFLNVMDNYAEIPWKCDISKFKEILKKKQTVTNKEREFLQLLNEGKKFKTSEEDDVSREGLVKLLSGGTYELGKLFPKLTFEEKVSVSFNMAEEDFAMVLQQLGDEGDIISSLRNVYDWAILSDVLNGKNSVSEGKITVYEQHKKDLSFLKYFVKKYIPNRYYEVFRDGNIVGNYVSYSYNLKNVQNVSKFKGAKKDVFCDYIKKVVKDIKVDDEDKVEYEDMMFRLDTYSFIPKQVENDNRVIPYQLYYYELKRILDNASSYLEFLDEKDIDGYTSREKLLSIMEFRIPYYVGPLRTDNGQHGWMKRKAEGRIYPWNFEDKVDLDASEQEFINRMTNSCTYLPGETVVPKYSLLYCKFNVLNEINNIKINDCSIPIEHKQGIYKLFERYRKVTPKKIKDFLISNNLLHPEDVISGIDVTIKSSLKSYHDFKKLLESCVLKENQVEAIIERLTYSEDKGRILRWLHMKFPDLSDDDVKYISKLKYSDFGRLSRKLLVGIRGCNKDTGEVDSIMGMLWSTNDNMMKLLSNSYTFIEEIEAIKNEYYVEHPANLDSMLDEMYVSNAVRRPIHRTLDILSDIRKVCGKNPSKIFVEMARGGGEKGVRTKSRRDQISELYRNMDKAEVRELSEQLEGKTDNELQSEVLFLYFMQLGKCAYTQKTIDIDKLKTNIYNVDHIYPQSYVKDDSITNKVLVISEENGNKGDKYPISKDIREKMQPFWYRLLSNKLISEEKYRRLTRCTSFTEEELTGFINRQLVETHQSTKAVTTVFRTLFPDVEIVYSKAGLVSDFRKEFDMLKTRSVNDLHHAKDAYLNIVVGNVYHCKFTKNFYVTQKYSLKTKTLFTHNVKSGDVMIWNGQESIGNVRKVLAKNNIHYTKYPFMRKGGLFDQMPVKAAAGLIPRKTGLDTEKYGGYNKSTATAFLLVKYKEKGKQEAMIMPVDYMYSEKVFSDEEYALKYSKENIKKIWGRTEDQVIDVSLPLGLRPIKINTMLSFDGFRACITGKANAGQKIGFTSMMPLVIGNEWENYIKKIDNYIEKKGKNKNITLNEKNDGICGEKNEKLYCILTDKIINNIYSIPFNSQQKILENGYDKFKKLDIERQVYFLQNLVLVLKSGRAGSCDMSAIGGSKNAATFAFGSKLSLWAKKFQKVYLIDNSSSGIYQNMSDNLLDIIK

SEQ ID NO: 20397 - protein, 1353 aa, unidentified
  REGION 1..1353: note = Cas Enzyme sequence
MQTKKVDEYYVGFDIGTNSVGYAVTDKNYNLIKHGGEPMWGSHVFEAASTAQERRTFRTARRRNDRKKQRIALVSEIFAPEIAKVDPRFFIRRRESALFRDDVDIKDRYVVFNDDDFTDKDYYDIYPTIHHLIYDLMSNKEKHDIRLVYMACAYLVAHRGHFLSEVSKDNIEDVLDFDVVYCNFLNVMDNYAEIPWKCDISKFKEILKKKQTVTNKEREFLQLLNEGKKFKTSEEDDVSREGLVKLLSGGTYELGKLFPKLTFEEKVSVSFNMAEEDFAMVLQQLGDEGDIISSLRNVYDWAILSDVLNGKNSVSEGKITVYEQHKKDLSFLKYFVKKYIPNRYYEVFRDGNIVGNYVSYSYNLKNVQNVSKFKGAKKDVFCDYIKKVVKDIKVDDEDKVEYEDMMFRLDTYSFIPKQVENDNRVIPYQLYYYELKIILDNASSYLEFLDEKDMDGYTSREKLLSIMEFRIPYYVGPLRTDNGQHGWMKRKAEGRIYPWNFEDKVDLDASEQEFINRMTNSCTYLPGETVVPKYSLLYCKFNVLNEINNIKINDCSIPIEHKQGIYKLFERYRKVTPKKIKDFLISNNLLHPEDVISGIDVTIKSSLKSYHDFKKLLESCVLKENQVEAIIERLTYSEDKGRILRWLHMEFPDLSDDDVKYISKLKYSDFGRLSRKLLVGIRGCNKDTGEVDSIMGMLWSTNDNMMKLLSNSYTFIEEIEAIKNEYYVEHPANLDSMLDEMYVSNAVRRPIHRTLDILSDIRKVCGKNPSKIFVEMARGGGEKGVRTKSRRDQISELYKNMDKAEVRELSEQLEGKTDNELQSEVLFLYFMQLGKCAYTQKTIDIDKLKTNIYNVDHIYPQSYVKDDSITNKVLVISEENGQKGDKYPISKDIREKMQPFWYRLLSNKLISEEKYRRLTRCTSFTEEELTGFINRQLVETHQSTKAVTTVFRTLFPDVEIVYSKAGLVSEFRKEFDMLKTRSVNDLHHAKDAYLNIVVGNVYHCRFTKNFYITQKYSLKTKTLFTHSVKLGDDVIWNGQESIGNVRKVLAKNNIHYTKYPFMRKGGLFDQMPVKAAAGLIPRKTGLDTEKYGGYNKSTATAFLLVKYKEKGKQEAMIMPVDYMYSEKVFSDNEYALKYSKENIKKIWGRTEDQVIDVSLPLGLRPIKINTMLSFDGFRACITGKANAGQKIGFTSMMPLVIGNEWENYIKKIDNYIEKKGKNKNITLNEKNDGICGEKNEKLYCILTDKIINNIYSIPFNSQQKILENGYDKFKKLDIERQVYFLQNLVLVLKSGRAGSCDMSAIGGSKNAATFAFGSKLSLWAKKFQKVYLIDNSSSGIYQNMSDNLLDIIK

SEQ ID NO: 20398 - protein, 1353 aa, unidentified
  REGION 1..1353: note = Cas Enzyme sequence
MQTKKVDEYYVGFDIGTNSVGYAVTDKNYNLIKHGGEPMWGSHVFEAASTAQERRTFRTARRRNDRKKQRIALVSEIFAPEIAKVDPRFFIRRRESALFRDDVDIKDRYVVFNDDDFTDKDYYDIYPTIHHLIYDLMSNKEKHDIRLVYMACAYLVAHRGHFLSEVSKDNIEDVLDFDVVYCNFLNVMDNYAEIPWKCDISKFKEILKKKQTVTNKEREFLQLLNEGKKFKTSEEDDVSREGLVKLLSGGTYELGKLFPKLTFEEKVSVSFNMAEEDFAMVLQQLGDEGDIISSLRNVYDWAILSDVLNGKNSVSEGKITVYEQHKKDLSFLKYFVKKYIPNRYYEVFRDGNIVGNYVSYSYNLKNVQNVSKFKGAKKDVFCDYIKKVVKDIKVDDEDKVEYEDMMFRLDTYSFIPKQVENDNRVIPYQLYYYELKRILDNASSYLEFLDEKDIDGYTSREKLLSIMEFRIPYYVGPLRTDNGQHGWMKRKAEGRIYPWNFEDKVDLDASEQEFINRMTNSCTYLPGETVVPKYSLLYCKFNVLNEINNIKINDCSIPIEHKQGIYKLFERYRKVTPKKIKDFLISNNLLHPEDVISGIDVTIKSSLKSYHDFKKLLESCVLKENQVEAIIERLTYSEDKGRILRWLHMKFPDLSDDDVKYISKLKYSDFGRLSRKLLVGIRGCNKDTGEVDSIMGMLWSTNDNMMKLLSNSYTFIEEIEAIKNEYYVEHPANLDSMLDEMYVSNAVRRPIHRTLDILSDIRKVCGKNPSKIFVEMARGGGEKGVRTKSRRDQISELYRNMDKAEVRELSEQLEGKTDNELQSEVLFLYFMQLGKCAYTQKTIDIDKLKTNIYNVDHIYPQSYVKDDSITNKVLVISEENGNKGDKYPISKDIREKMQPFWYRLLSNKLISEEKYRRLTRCTSFTEEELTGFINRQLVETHQTTKAVTTVFRTLFPDVEIVYSKAGLVSDFRKEFDMLKTRSVNDLHHAKDAYLNIVVGNVYHCKFTKNFYVTQKYSLKTKTLFTHNVKSGDVMIWNGQESIGNVRKMLAKNNIHYTKYPFMRKGGLFDQMPVKAAAGLIPRKTGLDTEKYGGYNKSTATAFLLVKYKEKGKQEAMIMPVDYMYSEKVFSDEEYALKYSKENIKKIWGRTEDQVIDVSLPLGLRPIKINTMLSFDGFRACITGKANAGQKIGFTSMMPLVIGNEWENYIKKIDNYIEKKGKNKNITLNEKNDGICGEKNEKLYCILTDKIINNIYSIPFNSQQKILENGYDKFKKLDIERQVYFLQNLVLVLKSGRAGSCDMSAIGGSKNAATFAFGSKLSLWAKKFQKVYLIDNSSSGIYQNMSDNLLDIIK

SEQ ID NO: 20399 - protein, 1354 aa, unidentified
  REGION 1..1354: note = Cas Enzyme sequence
MKQEKNYYLGLDIGTDSVGYAVTDEQYNILKFHGEPAWGVTIFDAANLCDERRSFRSARRRLDRKKQRINFLQELFSEEINKVDPMFWIRLQESRLFRDEAGDAYTLFNDPAYTDADYHKEYPTIHHLIVELMKSSKPHDIRLVYLACSWLISHRGHFFSNIQKGNIEAIKDFTAIYERLMGFFRDNGYDAPWEAPDLETLAETIRRNTGVNEKSKALQNLLYGEDKPSKEISDSFPFDRVAIIKLLAGGSCKLLDIFGKEEYADMGSISLRMDDDKMNEILSTIGDDSELLLTLRSISDWALLVDVIGNHNTISEAKVAVYEQHKQDLCTLKYMIKRYIPKRYHEIFRNPEVKDNYVAYSYHVDGKDTSKIKKASSENFLKKLEGIVKEINPDKCDSDLYEKMFDRIKKREFLPKQKNVDNRVIPHQLYWFELNRLLKTCANYLIFLNESDDDGLTVLDKIMSIFMFRVPYFVGPLNTHSEHAWLVRKAGKICPWNFEKMVDLDASEQAFINRMTNHCSYLPGEPVLPKDSLLYHRYMVLNEINNFKIDGVRISVELKQEIFNNVFLKYKKVTKKKLVDYLLCNGYLQKGNEEALGGIDININSNLKPQIAFMNLLSNNTLTVEDVEKIIERSSYAEDKSRFKKWLTQSYPNLAESDQKYICNLKFKDFGRLSKRFLTQIEGADKETGEIYSIIEALWNTQNNLMELLSGRFTFREKIDVFVQEYYLDHPVTLKDRLNDMYVSNAVKRPIYRTLDIVKDVVKAFGEPKKIFIETTRGANPDQKGKRTKTRKQQILDLYDVCEEDVRELTRQLTDMGDSADNRLQSDKLFLYYMQLGKCMYSGETIDLEQLFSKAYDIDHIYPQAYVKDDSILNNKVLCLSEMNGKKQDIYPIDSSIRTNMGGYWYALKENGLINQEKYKRLTRNTPFTQEEKIGFINRQLTETSQSVKAVATLLKDRYQNVEIVYSKARLVSDFRQQFDIFKSRSFNDLHHAVDAYLNIVTGNVYSMKFTKPWFDVNSRYSIKTETLFTRPLICNGVNVWDGEPMLQKVKKTSVKNNAHFTKYAFFKRGGLFDQMPVPAADGLIPLKKGLETKKYGGYNKASAMFYIPVRYTAGKKTDICIMSVEMLSGEHFLSDSDFARDYAKLRLSQIWEKSVEVQGFPMGMGPWKVNTMLSLDGFRVCISGISSGGKCLIAQPVMQFSLSKYWQFYMKKLEKFNEKINNNPNYMYSEEYDHISVENNIVLYDMYIQKYESSIYSKRINRPLQTLIDGRNKFLSLSINQQVQVLINIHATFGRISGGCDLKLIGGAPKAAATKSFSSNISNWKKLYKDVHIIDQSASGLWTKQSCNILELL

SEQ ID NO: 20400 - protein, 1386 aa, unidentified; identical to SEQ ID NO: 18078
  REGION 1..1386: note = Cas Enzyme sequence

SEQ ID NO: 20401 - protein, 1367 aa, unidentified
  REGION 1..1367: note = Cas Enzyme sequence
MKKQKFSDYYLGFDIGTNSVGWCVTDLDYNVLRFNKKDMWGSRLFDEAKTAAERRVQRNSRRRLKRRKWRLNLLEEIFSDEIMKIDSNFFRRLKESSLWLEDKNSKEKFTLFNDDNYKDYDFYKQYPTIFHLRNELIKNPEKKDIRLIYLALHSIFKSRGHFLFEGQNLKEIKNFETLYNNLIAFLEDNGINKSIDKDNIEKLEKIICDSGKGLKDKEKEFKGIFNSDKQLVAIFKLSVGSSVSLNDLFDTDEYKKEEVEKEKISFREQIYEDDKPIYYSILGEKIELLDIAKSFYDFMVLNNILSDSNYISEAKVKLYEEHKKDLKNLKYIIRKYNKENYDKLFKDKNENNYPAYIGLNKEKGKKEVVEKSRLKIDDLIKVIKGYLPKPERIEEKDKTIFNEILNKIELKTILPKQRISDNGTLPYQIHEVELEKILENQSKYYDFLNYEENGVSTKDKLLKTFKFRIPYYVGPLNSYHKDKGGNSWIVRKEEGKILPWNFEQKVDIEKSAEEFIKRMTNKCTYLNGEDVIPKDSFLYSEYIILNELNKVQVNDEFLNEENKRKIIDELFKENKKVSEKKFKEYLLVNQIANRTVELKGIKDSFNSNYVSYIKFKDIFGEKLNLDIYKEISEKSILWKCLYGDDKKIFEKKIKNEYGDILNKDEIKKINSFKFNTWGRLSEKLLTGIEFINLETGECYSSVMEALRRTNYNLMELLSSKFTLQESIDNENKEMNEVSYRDLIEESYVSPSLKRAILQTLKIYEEIKKITGRIPKKVFIEMARGGDETMKNKKIPARQEQLKKLYDSCGNDIANFSIDIKKMKSSLSSYDNNSLRQKKLYLYYLQFGKCMYTGREIDLDRLLQNNDTYDIDHIYPRSKVIKDDSFDNLVLVLKNENAEKSNEYPVKKEIQEKMKSFWRFLKEKNFISDEKYKRLTGKDDFELRGFMARQLVNVRQTTKEVGKILQQIEPEIKIVYSKAEIASSFREMFDFIKVRELNDIHHAKDAYLNIVAGNVYNTKFTEKPYRYLQEIKENYDVKKIYNYDIKNAWDKEKSLEIVKKNMEKNTVNITRFIKEEKGQLFDLNPIKKGETSNEIISIKPKLYNGKEEKLNEKYGYYKSLNPAYFLYVEHKEKNKRIKSFERVNLVDVNNIKDEKSLVKYLIENKKLVEPRVIKKVYKRQVILINDYPYSIVALDSNKLMDFENLKPLFLENKYEKILKNVIKFLEDNQGKSEENYKFIYLKKKDRYEKNETLESVKDRYNLEFNEMYDKFLEKLDSKDYKNYINNKKYKNLLDVKEKFIKLNLFDKAFTLKSFLDLFNRKTMADFSKVGLTKYLGKIQKISSNVLSKNELYLLEESVTGLFVKKIKL

SEQ ID NO: 20402 - protein, 1374 aa, unidentified
  REGION 1..1374: note = Cas Enzyme sequence
MKKQKFSDYYLGFDIGTNSVGWCVTDLDYNVLRFNKKDMWGSRLFDEAKTAAERRVQRNSRRRLKRRKWRLNLLEEIFSDEIMKIDSNFFRRLKESSLWLEDKNSKEKFTLFNDDNYKDYDFYKQYPTIFHLRNELIKNPEKKDIRLIYLALHSIFKSRGHFLFEGQNLKEIKNFETLYNNLIAFLEDNGINKSIDKDNIEKLEKIICDSGKGLKDKEKEFKGIFNSDKQLVAIFKLSVGSSVSLNDLFDTDEYKKEEVEKEKISFREQIYEDDKPIYYSILGEKIELLDIAKSFYDFMVLNNILSDSNYISEAKVKLYEEHKKDLKNLKYIIRKYNKENYDKLFKDKNENNYPAYIGLNKEKGKKEVVEKSRLKIDDLIKVIKGYLPKPERIEEKDKTIFNEILNKIELKTILPKQRISDNGTLPYQIHEVELEKILENQSKYYDFLNYEENGVTTKDKLLKTFKFRIPYYVGPLNSYHKDKGGNSWIVRKEEGKILPWNFEQKVDIEKSAEEFIKRMTNKCTYLNGEDVIPKDSFLYSEYIILNELNKVQVNDEFLNEENKRKIIEELFKENKKVSEKKFKEYLLVNQIANRTVELKGIKDSFNSNYVSYIKFKDIFGEKLNLDIYKEISEKSILWKCLYGDDKKIFEKKIKNEYGDILNKDEIKKINSFKFNTWGRLSEKLLTGIEFINLETGECYSSVMEALRRTNYNLMELLSSKFTLQENIDNENKGMNEVSYRDLIEESYVSPSLKRAILQTLKIYEEIRKITGRVPKKVFIEMARGGDESMKNKKIPARQEQLKKLYDSCGNDIANFSIDIKEMKNSLSSYDNNSLRQKKLYLYYLQFGKCMYTGREIDLDRLLQNNDTYDIDHIYPRSKVIKDDSFDNLVLVLKNENAEKSNEYPVKKEIQEKMKSFWRFLKEKNFISDEKYKRLTGKDDFELRGFMARQLVNVRQTTKEVGKILQQIEPEIKIVYSKAEIASSFREMFDFIKVRELNDTHHAKDAYLNIVAGNVYNTKFTEKPYRYLQEIKENYDVKKIYNYDIKNAWDKENSLEIVKKNMEKNTVNITRFIKEEKGELFNLNPIKKGETSNEIISIKPKLYDGKDNKLNEKYGYYTSLKAAYFIYVEHEKKNKKVKTFERITRIDSTLIKNEKNLIKYLVSQKKLLNPKIIKKIYKEQTLIIDSYPYTFTGVDSNKKVELKNKKQLYLEKKYEQILKNALKFVEDNQGETEENYKFIYLKKRNNNEKNETIDAVKERYNIEFNEMYDKFLEKLSSKDYKNYINNKLYTNFLNSKEKFKKLKLWEKSLILREFLKIFNKNTYGKYEIKDSQTKEKLFSFPEDTGRIRLGQSSLGNNKELLEESVTGLFVKKIKL

SEQ ID NO: 20403 - protein, 1367 aa, unidentified
  REGION 1..1367: note = Cas Enzyme sequence
MKKQKFSDYYLGFDIGTNSVGWCVTDLDYNVLRFNKKDMWGSRLFDEAKTAAERRVQRNSRRRLKRRKWRLNLLEEIFSDEIMKIDSNFFRRLKESSLWLEDKNSKEKFTLFNDDNYKDYDFYKQYPTIFHLRNELIKNPEKKDIRLIYLALHSIFKSRGHFLFEGQNLKEIKNFETLYNNLITFLEDNGINKSIDKDNIKKLEKIICDSGKGLKDKEKEFKGIFNSDKQLVAIFKLSVGSSVSLNDLFDTDEYKKEEVEKEKISFREQIYEDDKPIYYSILGEKIELLDIAKSFYDFMVLNNILSDSNYISEAKVKLYEEHKKDLKNLKYIIRKYNKENYDKLFKDKNENNYPAYIGLNKEKGKKEVVEKSRLKIDDLIKVIKGYLPKPERIEEKDKTIFNEILNKIELKTILPKQRISDNGTLPYQIHEVELEKILENQSKYYDFLNYEENGVSTKDKLLKTFKFRIPYYVGPLNSYHKDKGGNSWIVRKEEGKILPWNFEQKVDIEKSAEEFIKRMTNKCTYLNGEDVIPKDSFLYSEYIILNELNKVQVNDEFLNEENKRKIIDELFKENKKVSEKKFKEYLLVNQIANRTVELKGIKDSFNSNYVSYIRFKDIFGEKLDLDIYKEISEKSILWKCLYGDDKKIFEKKIKNEYGDILTKDEIKKINTFKFNNWGRLSEKLLTGIEFINLETGECYSSVMEALRRTNYNLMELLSSKFTLQENIDNENKDISQFSYRDLVEESYVSSSLKRAILQTLKIYEEIKKITGRVPKKVFIEMARGGDESMKNKKIPARQEQLKKLYDSCGNDIANFSIDIKEMKSSLSSYDNNSLRQKKLYLYYLQFGKCMYTGREIDLDRLLQNNDTYDIDHIYPRSKVIKDDSFDNLVLVLKNENAEKSNEYPVKKEIQEKMKSFWRFLKEKNFISDEKYKRLTGKDDFELRGFMARQLVNVRQTTKEVGKILQQIEPEIKIVYSKAEIASSFREMFDFIKVRELNDTHHAKDAYLNIVAGNVYNTKFTEKPYRYLQEIKENYDVKKIYNYDIKNAWDKENSLEIVKKNMKKNTVNITRFIKEEKGQLFDLNPIKKGETSNEIISIKPKLYNGKEEKLNEKYGYYKSLNPAYFLYVEHKEKNKRIKSFERVNLVDVNNIKDEKSLIKYLIENKKLVEPRVIKKVYKRQVILINDYPYSIVALDSNKLMDFENLKPLFLENKYEKILKNVIKFLEDNQGKSEENYKFIYLKKKDRYEKNETLESVKDRYNLEFNEMYGKFLEKLDSKDYKNYINNKKYQDLLDVKEKFIKLNLFDKAFTLRSFLDLFNRKTMADFSKVGLTKYLGKIQKISSNVLSKNELHLLEESVTGLFVKKIKL

SEQ ID NO: 20404 - protein, 1375 aa, unidentified
  REGION 1..1375: note = Cas Enzyme sequence
MKKQQFSDYYLGFDIGTNSVGWCVTDLNYNVLRFNKKDMWGSRLFSEAKTAAERRVQRNSRRRLKRRKWRLNLLEEIFSDEILKIDSNFFRRLKESTLWFEDKSSKEKFTLFNDDNYKDYDFYRQYPTIFHLRNELIKNPEKKDIRLVYLALHSIFKSRGHFLFEGQNLEEVENFEILYNNLIAFLEDNDIYKNIDSSYIGNLENIICDSKKGLKDKEKEFKEIFNSDKQLVAFFKLSVGSSVSLNDLFDTDKYKKGEVEKEKISFREQIYEDDKPIYYSILGEKIEFLDIAKNFYDFMILKNILADSQYISEAKVKLYEEHKRDLKNLKYIIRKYNKENYKKLFNDNKKNLKNYTAYIGLNKVKGKKEILIEKKAKIDDFSKIIKGYLPKVEKIDEKDRSIFNEILDKIELKTILPKQRISDNGTLPYQIHEAELKEILDNQAKYYDFLNHEENGISTKDKLIMTFKFRIPYYVGPLNSYHKNKGGNSWIVRKEEGKILPWNFEQKVDIEKSAEEFIKRMTNKCTYLNGEDVIPKDSFLYSEYIILNELNKVQVNNEFLNKEIKNKIIEDLFKKSKKISEKNLKEYLLVNQITNKIVELDGIKDAFNCSYVSYIKFKDIFGDKLNLDIYKEISEKSILWKCLYGDDKKIFEKKIKSVYGDILTKDEIKKINSFKFNTWGRLSEKLLTEIEFIDLETGECYSSVMDALRRTNYNLMELLSLKFTLQENIDNENKEVSEFSYRDLVEESYVSPSLKRAILQTLKIYEEIRKITGRVPKKVFIEMARGGDETMKNKKIPARQEQLKKLYDSCGKDISNFSIDIKEMKNSLNSYDNNSLRQKKLYLYYLQFGKSMYSGKEIDLNRLLQNNDTYDIDHIYPRSKIVKDDSFDNLALVLKDENAKKGNEYPIDKDIQANMKGFWKFLKEKNFISDEKYKRLTGKDELELRGFMKRQLVNVRQTTKEVGKILQQIEPEIKIVYSKAEIASSFREMFDFIKVRELNDTHHAKDAYLNIVAGNVYNTKFTEKFFNKKEKNKENYDVKKIYNYDIKNAWDKEKSLEIVKKNMEKNTVNITKFIKEEKGELFDVTILKKGNSKEIVAIKPKLYNGELDNLSQKYGYYTSLKAAYFIYVEHEKKNKKVKTFERLTKIDTALIKNETDLIKYLVSQKKLVNPKIIKKIYKEQTLIIDNYPYTFTGVDSNKKVELKNKKQLYLEKKYEQILKNALKFVEDNQGETEENYKFIYLKKRNSTEKNETIDAVKERYNIEFDEMYDKFLEKLNSKDYKNYINSKLYTNFLDSKEKFKKLKLWEKSLILREFLKIFNKNTYGKYEIKDSQTEEKLFSFPEDTGRIRLGQSSLGNNKELLEESITGLFVKKIKL

SEQ ID NO: 20405 - protein, 1367 aa, unidentified
  REGION 1..1367: note = Cas Enzyme sequence
MKKQQFSDYYLGFDIGTNSVGWCVTDLNYNVLRFNKKDMWGSRLFDEAKTAAERRVQRNSRRRLKRRKWRLNLLEEIFSNEILRVDSNFFRRLKESSLWLEDKSSKEKFTLFNDDNYKDYDFYKQYPTIFHLRNELIKNPEKKDIRLVYLALHSIFKSRGHFLFEGQNLKDIKNFETLYNNLMAFLEDNDIYKNIDSSYIGNLENIICDSKKGLKDKEKEFKEIFNSDKQLVAFFKLSVGSSVSLNDLFDTDEYKKGEVEKEKISFREQIYEDDKPIYYSILGEKIEFLDIAKSFYDFMVLNNILADSQYISEAKVKLYEEHKRDLKNLKYIIRKYNKENYDKLFKDKNESNYSAYIGLNKEKGKKEVIEKSRLKIDDFAKIIKGYLPKAEKIDEKDRSIFNEILDKIELKTILLKQRISDNGTLPYQIHEAELEKILENQAKYYNFLNHEENGVSTKDKLLMTFKFRIPYYVGPLNSYHKNKGGNSWIVRKEEGKILPWNFEQKVDIEKSAEEFIKRMTNKCTYLNGEDVIPKDSFLYSEYIILNELNKVQVNDEFLNKEIKNKIIENLFKKSKKISEKNFREYLLVNQIANKTVELKGVKDAFNSNYVSYIKFKDIFGDKLNLDIYKEISEKSILWKCLYGDDKKIFEKKIKSEYRDILTKDEIKKINSFKFNTWGRLSEKLLTGIEFIDLETGECYSSVMDALRRTNYNLMELLSSKFTLQENIDNENKEVSEFSYRDLVEESYVSPSLKRAILQTLKIYEEIRKITGRIPKKVFIEMARGGDETMKNKKIPARQEQLKKLYDSCGKDISNFSIDIKEMKNSLNSYDNNSLRQKKLYLYYLQFGKCMYTGKEIDLNRLLQNNDTYDIDHIYPRSKVIKDDSFDNLVLVLKNENAEKSNEYPLKKEIQEKMKSFWKFLKEKNFISDEKYKRLTGKDEFELRGFMARQLVNVRQTTKEVGKILQQIEPEIKIVYSKAEIASSFREMFDFIKVRELNDTHHAKDAYLNIVAGNVYNTKFTEKPYRYLQEIKENYDVKKIYNYDIKNAWDKEKSLEIVKKNMEKNTVNITRFIKEEKGQLFDLNPIKKGETSNEIIAIKPKFYEGSTEKLNEKYGYYKSLNPAYFLYVEHKEKNKITRSFERVNLVDVNNIKDEKSLIKYLIENKGLIEPKLIKKVYKRQVILINNYPYSIIALDSNKLMDFENLKPLFLEKKYEKILKNAIKFLEDNQGKTEEYYKFIYLKKNDRNEKNETIDSVKERYNIEFNEMYDKFLEKLDSKDYKNYINNKKYSELVNVKTKFIKLNLFDKAFTLKSFLDLFNRKTMADFSKVGLTKYLGKIQKISSNVLSKNELHLLEESVTGLFVKKIKL

SEQ ID NO: 20406 - protein, 1375 aa, unidentified
  REGION 1..1375: note = Cas Enzyme sequence
MKKQQFSDYYLGFDIGTNSVGWCVTDLNYNVLRFNKKDMWGSRLFDEAKTAAERRVQRNSRRRLKRRKWRLNLLEEIFSNEILRVDSNFFRRLKESSLWLEDKSSKEKFTLFNDDNYKDYDFYKQYPTIFHLRNELIKNPEKKDIRLVYLALHSIFKSRGHFLFEGQNLKDIKNFETLYNNLMAFLEDNDIYKNIDSSCIANLENIICDSKKGLKDKEKEFKEIFNSDKQLVAFFKLSVGSSVSLNDLFDTDEYKKEEVEKEKISFREQIYEDDKPIYYSILGEKIEFLDIAKSFYDFMVLKNILADNQYISEAKVKLYEEHKRDLKNLKYIIRKYNKENYKKLFNDNKKDLKNYTAYIGLNKVDRKKEILIEKKVKIDDFVKVIKGYLPDIKKIEEKDKVILNEILNKIELKTILPKQRISDNGTLPYQIHEAELKKILDNQAKYYDFLNHKENSISTKEKLLMTFKFRIPYYVGPLNSYHKNKGGNSWIVRKEEGKILPWNFEQKVDIDKSAEEFIKRMTNKCTYLNGEDVIPKDSFLYSEYIILNELNKVQVNNEFLNKEIKNKIIEDLFKKSKKIFEKNFKEYLLVNQITNKIVELDGIKDAFNSNYLSYIKFKDIFGDKLNLDIYKEISEKSILWKCLYGDDKKIFEKKIKSIYGDILTKDEIKTINSFKFNTWGRLSEKLLTGIEFLNLETGECYSSVMDALRRTNYNLMELLSSKFTLQENIDSENKEVSEFSHRDLVEESYVSPSLKRAILQTLKIYEEIRKITGRIPKKVFIEMARGGDETMKNKKIPARKEQLKKLYDSCGKDISNFSIDIKEMKNSLNSYDNNSLRQKKLYLYYLQFGKSMYSGKEIDLNRLLQNNDTYDIDHIYPRSKIVKDDSFDNLALVLKDENAKKGNEYPIDKDIQANMKSFWKFLKEKNFISDEKYKRLTGTDEFELRGFMERQLVNVRQTTKEVGKILQQIEPEIKIVYSKAEIASSFREMFDFIKVRELNDTHHAKDAYLNIVAGNVYNTKFTEKFFNKKEKNKENYDVKKIYNYDIKNAWDKEKSLEIVKKNMEKNTVNITKFIKEEKGELFDVTILKKGNSKEIVAIKPKLYNGELDNLSQKYGYYTSLKAAYFIYVEHEKKNKKVKTFERITRIDTALIKNETDLIKCLVSQKKLVNPKIIKKIYKEQTLIIDNYPYTFTGVYSNKKVELKNKKQLYLEKKYEQILKNALKFVEDNQGKTEENYKFIYLKKRNSTEKNETIDAVKERYSIEFDEMYDKFLEKLNSKDYKNYINSKLYTNFLDSKEKFKKLKLWEKSLILREFLKIFNKNTYGKYEIKDSQTEEKLFSFPEDTGRIRLGQSSLGNNKELLEESVTGLFVKKIKL

SEQ ID NO: 20407 - protein, 1373 aa, unidentified
  REGION 1..1373: note = Cas Enzyme sequence
MKKQQFSDYYLGFDIGTNSVGWCVTDLNYNVLRFNKKDMWGSRLFDEAKTAAERRVQRNSRRRLKRRKWRLNLLEEIFSDEILRVDSNFFRRLKESSLWLEDKSSKEKFTLFNDDNYKDYDFYKQYPTIFHLRNELIKNPEKKDIRLVYLALHSIFKSRGHFLFEGQNLKDIKNFETLYNNLIAFLEDNDIYKNIDSNYIGNLENIICDSKKGLKDKEKEFKEIFNSDKQLVAFFKLSVGSSVSLNDLFDTDEYKKGEVEKEKISFREQIYEDDKPIYYSILGEKIEFLDIAKSFYDFMVLNNILADSQYISEAKVKLYDEHKRDLKNLKYIIKKYNKENYDKLFKDKNESNYSAYIGLNKEKGKKEVIEKSRLKIDDFAKIIKGYLPKAEKIDEKDRSIFNEILDKIELKTILPKQRISDNGTLPYQIHEAELEKILENQAKYYDFLNHEENGVSTKDKLLMTFKFRIPYYVGPLNSYHKNKGGNSWIVRKEEGIILPWNFEQKVDIEKSAEEFIKRMTNKCTYLNGEDVIPKDSFLYSEYIILNELNKVQVNDEFLNKEIKKKIIEDLFKKSKKISEKNFKEYLLVNQIANKTVELKGVKDAFNSNYVSYIKFKDIFGDKLNLDIYKEISEKSILWKCLYGDDKKIFEKKIKSEYGDILTKDEIKKINSFKFNTWGRLSEKLLTGIEFIDLETGECYSSVMDALRRTNYNLMELLSSKFTLQENIDNENKEVSEFSYRDLVEESYVSPSLKRAILQTLKIYEEIRKITGRIPKKVFIEMARGGDETMKNKKIPARQEQLKKLYDSCGKDISNFSIDIKEIKNSLNSYDNNSLRQKKLYLYYLQFGKCMYTGKEIDLNRLLQNNDTYDIDHIYPRSKVIKDDSFDNLVLVLKNENAEKSNEYPLKKEIQEKMKSFWKFLKEKNFISDEKYKRLTGTDEFELRGFMERQLVNVRQTTKEVGKILQQIEPEIKIVYSKAEIASSFREMFDFIKVRELNDTHHAKDAYLNIVAGNVYNTKFTEKFFNKKEKNKENYDVKKIYNYDIKNAWDKEKSLEIVKKNMEKNTVNITRFIKEEKGKLFDVNILKKGTSKEIVTIKPKLYNGELDNLSQKYGYYDSLKAAYFIYVEHEVKNKRVKTFERITRIDSNLVRDEKNLVEYLVDKKNLVNPKIIKKILKEQTLIINDYPYTFTGIDARKQVELKNKKQLYLETKYEKILKNALKFVEDNQGKSEENYKFIYLKKKDRNEKNETIESVKERYNIEFNGMYDKFLEKLDSKDYKNYINNKLYTNFLKSKEEFKKLNLWEKSLILREFLKIFNKDTYGRYEIKDSQTKEKLFSIPNETGRIRIGQSSLGNNKELVEESVTGLFVKKIKL

SEQ ID NO: 20408 - protein, 1355 aa, unidentified
  REGION 1..1355: note = Cas Enzyme sequence
MKSIRKESQEPYYIGLNVGPTYAAYAVTNTSYNLSRFKGKDMWGVYKYDEAETAEDRRRFRQGRNSNLKEKERIRLLRSYFFDEIQKVDENFFVRLDNSFYYSEDKDIRLNGDRNVLFADKDYSDRQYMSEYPTIYHLRSELAHGSKKPDIRCLYLAVSHMMKNRGNFYTKNLEDTDKSLGEVYENICTKAAEYDIVLKMEVPAEKIMDIMINPGISGKVKATLVTQLVDATSKPALSIIKLMCGLKAKIADIFPELAESLEEDEKKLSFSFKDEDYFERADSIEKLIGENEYSLIESVKEMYDAAIIKNIIQDYRYVSDAKIASYEKHANDLEILKSELKTILSKNEYKRFFSKEEPGTYSAYVHFSNHNNQITRRKSDKGRTQEDLYHTIKKYLAEADDEQAEYILDEIDKGTFLPKQRIKDNSLIPNQLYSVELKAILENASKYYDFLNSRDESGLTVSERILSLFTFTMPYFIGPVSPYNSRGWAVRKEPGKVYPWNLKDKVDMGQSAKQFIEKIIGKCNYLSGENVLPNASLLYEKYRVLNEINSISVDGEKISVEMKQAIVNELLAGGKTVSKKKILSFLVKKGSATSDSIITGIDDKLNNSMASHRFFADIFGSLNKDNEAVAEDIILWSTIYGSSKDFVTEQILNKYPDMFDEEQLRKIHNLNCKDWGRLSRGFLNMKGLDKDNNELISVIDAMWSNNLNLMELMYDTRFDFSARVKDKTENAVKNLFSFDYDDLNDLYATTAQRRTIWASVKIVREIVKIKGYAPESIFLDTVKSRPNDMPKESRKGKLTALYKGMKGVSADWKKKMISLIDQCDADGSLKAKNVYLYFLQMGKDMYTGEDISLEELKSPDKRKKHNIDHIYPKHFVKDESIDNLVLTNTDLNRDLSDRYPVPQDIYDNMHEFWQQLRRSGLISAEKLARLSDRNPLSDEKRASFIGKLYNQAGSSTRMMADIFKNILPKDTKVIYAKTSETNEFRHKFDFPRTTIINDDYLAKDAYLNIVVGNVWYTKFTASPIWYIKEEYRKKKSEYNLNRMYDFNVIRDDRIAWITDKTNPEAATIHTVNKVMNRNTVITITRTIQGHGGLTNATITRADKAKEGVYLPLKTSNERMSVTKYGGKTSITSAYMFLAEHTLKKSRVRTIYSLPLHLVSQIKGKKDLEKYCTDVLHLIEPVIKIAKIMLYSELIIDGYSYLLGGKAGVQYYLRNNVPMKVNAEWQKYVSKIEKYINFKSLDKDMSADKNIELYDELVDKHTNSIYSKRRNTAGDMLKKGRDTFIKLSVKEQLEVLNQIFTLTRMGTNIANLSGIGAGQHVGSITMGCNISTFDSVKLVNRSVTGLFSKEVDLLHI

SEQ ID NO: 20409 - protein, 1355 aa, unidentified
  REGION 1..1355: note = Cas Enzyme sequence
MKSIRKESQEPYYIGLNVGPTYAAYAVTNTSYNLSRFKGKDMWGVYKYDEAETAEDRRRFRQGRNSNLKEKERIRLLRSYFFDEIQKVDENFFVRLDNSFYYSEDKDIRLNGDRNVLFADKDYSDRQYMSEYPTIYHLRSELAHGSKKPDIRCLYLAVSHMMKNRGNFYTKNLEDTDKSLGEVYENICTKAAEYDIVLKMEVPAEKIMDIMINPGISGKVKATLVTQLVDATSKPALSIIKLMCGLKAKIADIFPELAESLEEDEKKLSFSFKDEDYFERADSIEKLIGENEYSLIESVKEMYDAAIIKNIIQDYRYVSDAKIASYEKHANDLEILKAELKTILSKNEYKRFFSKEEPGTYSAYVHFSNHNNQITRRKSDKGRTQEDLYHTIKKYLADADDEQAEYILDEIDKGTFLPKQRIKDNSLIPNQLYSVELKAILENASKYYDFLNSRDESGLTVSERILSLFTFTMPYFIGPVSPYNSRGWAVRKEPGKVYPWNLKDKVDMGQSAKQFIEKIIGKCNYLSGEKVLPNASLLYEKYRVLNEINSISVDGEKISVEMKQAIVNELLAGGKTVSKKKILSFLVKKGSATSDSIITGIDDKLNNSMASHRFFADIFGSLNKDNEAVAEDIILWSTIYGSSKDFVTEQILNKYPDMFDEEQLRKIHNLNCKDWGRLSRGFLNMKGLDKDNNELISVIDAMWSNNLNLMELMYDTRFDFSVRVKDKTENAVKNLFSFDYDDLNDLYATTAQRRTIWASVKIVREIVKIKGYAPESIFLDTVKSRPNDIPKESRKGKLTALYKGMKGVSADWKKKMISLIDQCDADGSLKAKNVYLYFLQMGKDMYTGEDISLEELKSPDKRKKHNIDHIYPKHFVKDESIDNLVLTNTDLNRDLSDRYPVPQDIYDNMHEFLQQLRRSGLISAEKLARLSDRNPLSDEKRASFIGKLYNQAGSSTRMMADIFKNILPKDTKVIYAKTSETNEFRHKFDFPRTTIINDDYLAKDAYLNIVVGNVWYTKFTASPIWYIKEEYRKKKSEYNLNRMYDFNVIRDDRIAWITDKTNPEAATIHTVNKVMNRNTVITITRTIQGHGGLTNATITRADKAKEGVYLPLKTSNERMSVTKYGGKTSITSAYMFLAEHTLKKSRVRTIYSLPLHLVSQIKGKKDLEKYCTDVLHLIEPVIKIAKIMLYSELIIDGYSYLLGGKAGVQYYLRNNVPMRVNAERQKYVSKIEKYINFKSLDKDMSADKNIELYDELVDKHTNSIYSKRRNTAGDMLKKGRDTFIKLSVKEQLEVLNQIFTLTRMGTNIANLSGIGAGQHVGSITMGCNISTFDSVKLVNRSVTGLFSNEVDLLHI

SEQ ID NO: 20410 - protein, 1355 aa, unidentified
  REGION 1..1355: note = Cas Enzyme sequence
MKSIRKESQEPYYIGLNVGPTYAAYAVTNTSYNLSRFKGKDMWGVYKYDEAETAEDRRRFRQGRNSNLKEKERIRLLRSYFFDEIQKVDENFFVRLDNSFYYSEDKDIRLNGDRNVLFADKDYSDRQYMSEYPTIYHLRSELAHGSKKPDIRCLYLAVSHMMKNRGNFYTKNLEDTDKSLGEVYENICTKAAEYDIVLKMEVPAEKIMDIMINPGISGKVKATLVTQLVDATSKPALSIIKLMCGLKAKIADIFPELAESLEEDEKKLSFSFKDEDYFERADSIEKLIGENEYSLIESVKEMYDAAIIKNIIQDYRYVSDAKIASYEKHANDLEILKSELKTILSKNEYKRFFSKEEPGTYSAYVHFSNHNNQITRRKSDKGRTQEDLYHTIKKYLAEADDEQAEYILDEIDKGTFLPKQRIKDNSLIPNQLYSVELKAILENASKYYDFLNSRDESGLTVSERILSLFTFTMPYFIGPVSPYNSRGWAVRKEPGKVYPWNLKDKVDMGQSAKQFIEKIIGKCNYLSGEKVLPNASLLYEKYRVLNEINSISVDGEKISVEMKQAIVNELLAGGKTVSKKKILSFLVKKGSATSDSIITGIDDKLNNSMASHRFFTDIFGSLNKDNEAVAEDIILWSTIYGSSKDFVTEQILNKYPDMFDEEQLRKIHNLNCKDWGRLSRGFLNMKGFDKDNDEFISVIDAMWSNNLNLMELMYDTRFDFSARVKDKTENAVKNLFSFDYDDLNDLYATTAQRRTIWASVKIVREIVKIKGYAPESIFLDTVKSRPNDMPKESRKGKLTALYKGMKGVSADWKKKMISLIDQCDADGSLKAKNVYLYFLQMGKDMYTGEDISLEELKSPDKRKKHNIDHIYPKHFVKDESIDNLVLTNTDLNRDLSDRYPVPQDIYDNMHEFWQQLRRSGLISAEKLARLSDRNPLSDEKRASFIGKLYNQAGSSTRMMADIFKNILPKDTKVIYAKTSETNEFRHKFDFPRTTIINDDYLAKDAYLNIVVGNVWYTKFTASPIWYIKEEYRKKKSEYNLNRMYDFNVIRDDRIAWITDKTNPEAATIHTVNKVMNRNTVITITRTTQGHGGLTNATITRADKAKEGVYLPLKTSNERMSVTKYGGKTSITSAYMFLAEHTLKKSRVRTIYSLPLHLVSQIKGKKDLEKYCTDVLHLIEPVIKIAKIMLYSELIIDGYSYLLGGKAGVQYYLRNNVPMRVNAEWQKYVSKIEKYINYKSLDKDMSADKNIELYDELVDKHTNSIYSKRRNTAGDMLKKGRDTFIKLSVKEQLEVLNQIFTLTRMGTNIANLSGIGAGQHVGSITMGCNISTFDSVKLVNRSVTGLFSNEVDLLHI

SEQ ID NO: 20411 - protein, 1355 aa, unidentified
  REGION 1..1355: note = Cas Enzyme sequence
MKSIRKESQEPYYIGLNVGPTYAAYAVTNTSYNLSRFKGKDMWGVYKYDEAETAEDRRRFRQGRNSNLKEKERIRLLRSYFFDEIQKVDENFFVRLDNSFYYSEDKDIRLNGDRNVLFADKDYSDRQYMSEYPTIYHLRSELAHGSKKPDIRCLYLAVSHMMKNRGNFYTKNLEDTDKSLGEVYENICTKAAEYDIVLKMEVPAEKIMDIMINPGISGKVKATLVTQLVDATSKPALSIIKLMCGLKAKIADIFPELAESLEEDEKKLSFSFKDEDYFERADSIEKLIGENEYSLIESVKEMYDAAIIKNIIQDYRYVSDAKIASYEKHANDLEILKAELKTILSKNEYKRFFSKEEPGTYSAYVHFSNHNNQITRRKSDKGRTQEDLYHTIKKYLADADDEQAEYILDEIDKGTFLPKQRIKDNSLIPNQLYSVELKAILENASKYYDFLNSRDESGLTVSERILSLFTFTMPYFIGPVSPYNSRGWAVRKEPGKVYPWNLKDKVDMGQSAKQFIEKIIGKCNYLSGEKVLPNASLLYEKYRVLNEINSISVDGEKISVEMKQAIVNELLAGGKTVSKKKILSFLVKKGSATSDSIITGIDDKLNNSMASHRFFADIFGSLNKDNEAVAEDIILWSTIYGSSKDFVTEQILNKYPDMFDEEQLRKIHNLNCKDWGRLSRGFLNMKGLDKDNNELISVIDAMWSNNLNLMELMYDTRFDFSARVKDKTENAVKNLFSFDYDDLNDLYATTAQRRTIWASVKIVREIVKIKGYAPESIFLDTVKSRPNDMPKESRKGKLTALYKGMKGVSADWKKKMISLIDQCDADGSLKAKNVYLYFLQMGKDMYTGEDISLEELKSPDKRKKHNIDHIYPKHFVKDESIDNLVLTNTDLNRDLSDRYPVPQDIYDNMHEFWQQLRRSGLISAEKLARLTDRNPMSDEKRASFIGKLYNQAGSSTRMMADIFINILPKDTKVIYAKTSEANEFRHKFDFPRTTIINDDYLAKDAYLNIVVGNVWYTKFTASPIWYIKEEYRKKKSEYNLNRMYDFNVIRDDRIAWITDKTNPEAATIHTVNKVMNRNTVITITRTIQGHGGLTNATITRADKAKEGVYLPLKTSNERMSVTKYGGKTSITSAYMFLAEHTLKKSRVRTIYSLPLHLVSQIKGKKDLEKYCTDVLHLIKPVIKIAKIMLYSELIIDGYSYLLGGKAGVQYYLRNNVPMRVNAEWQKYVSKIEKYINFKSLDKDISADKNIELYDELVDKHTNSIYAKRRNTAGDMLKKGKDTFIKLAVKEQLEVLNQIFTLTRMGTNITNLSGIGAGQHVGSITMGCNISTFDSVKLVNRSVTGLFSNEVDLLHI

SEQ ID NO: 20412 - protein, 1355 aa, unidentified
  REGION 1..1355: note = Cas Enzyme sequence
MKSIRKESQEPYYIGLNVGPTYAAYAVTNTSYNLSRFKGKDMWGVYKYDEAETAEDRRRFRQGRNSNLKEKERIRLLRSYFFDEIQKVDENFFVRLDNSFYYSEDKDIRLNGDRNVLFADKDYSDRQYMSEYPTIYHLRSELAHGSKKPDIRCLYLAVSNMMKNRGNFYTKNLEDTDKSLGEVYENICTKAAEYDIVLKMEVPAEKIMDIMINPGISGKVKATLVTQLVDATSKPALSIIKLMCGLKAKIADIFPELAESLEEDEKKLSFSFKDEDYFERADSIEKLIGENEYSLIESVKEMYDAAIIKNIIQDYRYVSDAKIASYEKHANDLEILKAELKTILSKNEYKRFFSKEEPGTYSAYVHFSNHNNQITRRKSDKGRTQEDLYHTIKKYLADADDEQAEYILDEIDKGTFLPKQRIKDNSLIPNQLYSVELKAILENASKYYDFLNSRDESGLTVSERILSLFTFTMPYFIGPVSPYNSRGWAVRKEPGKVYPWNLKDKVDMGQSAKQFIEKIIGKCNYLSGEKVLPNASLLYEKYRVLNEINSISVDGEKISVEMKQAIVNELLAGGKTVSKKKILSFLVKKGSATSDSIITGIDDKLNNSMASHRFFADIFGSLNKDNEAVAEDIILWSTIYGSSKDFVTEQILNKYPDMFDEEQLRKIHNLNCKDWGRLSRGFLNMKGLDKDNNELISVIDAMWSNNLNLMELMYDTRFDFSARVKDKTENAVKNLFSFDYDDLNDLYATTAQRRTIWASVKIVREIVKIKGYAPESIFLDTVKSRPNDIPKESRKGKLTALYKGMKGVSADWKKKMISLIDQCDADGSLKAKNVYLYFLQMGKDMYTGEDISLEELKSPDKRKKHNIDHIYPKHFVKDESIDNLVLTNTDLNRDLSDRYPVPQDIYDNMHEFWQQLRRSGLISAEKLARLSDRNPLSDEKRAYFIGKLYNQAGSSTRMMADIFKNILPKDTKVIYAKTSETNEFRHKFDFPRTTIINDDYLAKDAYLNIVVGNVWYTKFTASPIWYIKEEYRKKKSEYNLNRMYDFNVIRDDRIAWITDKTNPEAATIHTVNKVMNRNTVITITRTIQGHGGLTNATITRADKAKEGVYLPLKTSNERMSVTKYGGKTSITSAYMFLAEHTLKKSRVRTIYSLPLHLVSQIKGKKDLEKYCTDVLHLIEPVIKIAKIMLYSELIIDGYSYLLGGKAGVQYYLRNNVPMRVNAEWQKYVSKIEKYINFKSLDKDMSADKNIELYDELVDKHTNSIYSKRRNTAGDMLKKGRDTFIKLSVKEQLEVLNQIFTLTRMGTNIANLSGIGAGQHVGSITMGCNISTFDSVKLVNRSVTGLFSNEVDLLHI

SEQ ID NO: 20413 - protein, 1355 aa, unidentified
  REGION 1..1355: note = Cas Enzyme sequence
MKSIRKESQEPYYIGLNVGPTYAAYAVTNTSYNLSRFKGKDMWGVYKYDEAETAEDRRRFRQGRNSNLKEKERIRLLRSYFFDEIQKVDENFFVRLDNSFYYSEDKDIRLNGDRNVLFADKDYSDRQYMSEYPTIYHLRSELAHGSKKPDIRCLYLAVSHMMKNRGNFYTKNLEDTDKSLGEVYENICTKAAEYDIVLKMEVPAEKIMDIMINPGISGKVKATLVTQLVDATSKPALSIIKLMCGLKAKIADIFPELAESLEEDEKKLSFSFKDEDYFERADSIEKLIGENEYSLIESVKEMYDAAIIKNIIQDYRYVSDAKIASYEKHANDLEILKAELKTILSKNKYKRFFSKEEPGTYSAYVHFSNHNNQITRRKSDKGRTQEDLYHTIKKYLADADDEQAEYILDEIDKGTFLPKQRIKDNSLIPNQLYSVELKAILENASKYYDFLNSRDESGLTVSERILSLFTFTMPYFIGPVSPYNSRGWAVRKEPGKVYPWNLKDKVDMGQSAKQFIEKIIGKCNYLSGEKVLPNASLLYEKYRVLNEINSISVDGEKISVEMKQAIVNELLAGGKTVSKKKILSFLVKKGSATSDSIITGIDDKLNNSMASHRFFADIFGSLNKDNEAVAEDIILWSTIYGSSKDFVTEQILNKYPDMFDEEQLRKIHNLNCKDWGRLSRGFLNMKGLDKDNNELISVIDAMWSNNLNLMELMYDTRFDFSARVKDKTENAVKNLFSFDYDDLNDLYATTAQRRTIWASVKIVREIVKIKGYAPESIFLDTVKSRPNDMPKESRKGKLTALYKGMKGVSADWKKKMISLIDQCDADGSLKAKNVYLYFLQMGKDMYTGEDISLEELKSPDKRKKHNIDHIYPKHFVKDESIDNLVLTNTDLNRDLSDRYPVPQDIYDNMHEFWQQLRRSGLISAEKLARLSDRNPLSDEKRASFIGKLYNQAGSSTRMMADIFKNILPKDTKVIYAKTSETNEFRHKFDFPRTTIINDDYLAKDAYLNIVVGNVWYTKFTASPIWYIKEEYRKKKSEYNLNRMYDFNVIRDDRIAWITDKTNPEAATIHTVNKVMNRNTVITITRTIQGHGGLTNATITRADKAKEGVYLPLKTSNERMSVTKYGGKTSITSAYMFLAEHTLKKSRVRTIYSLPLHLVSQIKGKKDLEKYCTDVLHLIEPVIKIAKIMLYSELIIDGYSYLLGGKAGVQYYLRNNVPMKVNAEWQKYVSKIEKYINFKSLDKDISADKNIELYDELVDKHTNSIYAKRRNTAGDMLKKGKDTFIKLAVKEQLEVLNQIFTLTRMGTNITNLSGIGAGQHVGSITMGCNISTFDSVKLVNRSVTGLFSNEVDLLHI

SEQ ID NO: 20414 - protein, 1355 aa, unidentified
  REGION 1..1355: note = Cas Enzyme sequence
MKSIRKESQEPYYIGLNVGPTYAAYAVTNTSYNLSRFKGKDMWGVYKYDEAETAEDRRRFRQGRNSNLKEKERIRLLRSYFFDEIQKVDENFFVRLDNSFYYSEDKDIRLNGDRNVLFADKDYSDRQYMSEYPTIYHLRSELAHGSKKPDIRCLYLAVSNMMKNRGNFYTKNLEDTDKSLGEVYENICTKGAEYDIVLKMEVPAEKIMDIMINPGISGKVKATLVTQLVDATSKPALSIIKLMCGLKAKIADIFPELAESLEEDEKKLSFSFKDEDYFERADSIEKLIGENEYSLIESVKEMYDAAIIKNIIQDYRYVSDAKIASYEKHANDLEILKAELKTILSKNEYKRFFSKEEPGTYSAYVHFSNHNNQITRRKSDKGRTQEDLYHTIKKYLADADDEQTEYILDEIDKGTFLPKQRIKDNSLIPNQLYSVELKAILENASKYYDFLNSRDESGLTVSERILSLFTFTMPYFIGPVSPYNSRGWAVRKEPGKVYPWNLKDKVDMGQSAKQFIEKIIGKCNYLSGEKVLPNASLLYEKYRVLNEINSISVDGEKISVEMKQAIVNELLAGGKTVSKKKILSFLVKKGSATSDSIITGIDDKLNNSMASHRFFADIFGSLNKDNEAVAEDIILWSTIYGSSKDFVTEQILNKYPNMFDEEQLRKIHNLNCKDWGRLSRGFLNMKGLDKDNNELISVIDAMWSNNLNLMELMYDTRFDFSVRVKDKTENAVKNLFSFDYDDLNDLYATTAQRRTIWASVKIVREIVKIKGYAPESIFLDTVKSRPNDIPKESRKGKLTALYKGMKGVSADWKKKMISLIDQCDADGSLKAKNVYLYFLQMGKDMYTGEDISLEELKSPDKRKKHNIDHIYPKHFVKDESIDNLVLTNTDLNRDLSDRYPVPQDIYDNMHEFWQQLRRSGLISAEKLARLSDRNPLSDEKRAYFIGKLYNQAGSSTRMMADIFKNILPKDTKVIYAKTSETNEFRHKFDFPRTTIINDDYLAKDAYLNIVVGNVWYTKFTASPIWYIKEEYRKKKSEYNLNRMYDFNVIRDDRIAWITDKTNPEAATIHTVNKVMNRNTVITITRTTQGHGGLTNATITRADKAKEGVYLPLKTSNERMSVTKYGGKTSITSAYMFLAEHTLKKSRVRTIYSLPLHLVSQIKGKKDLEKYCTDVLHLIEPVIKIAKIMLYSELIIDGYSYLLGGKAGVQYYLRNNVPMRVNAEWQKYVSKIEKYINYKSLDKDMSADKNIELYDELVDKHTNSIYSKRRNTAGDMLKKGRDTFIKLSVKEQLEVLNQIFTLTRMGTNIANLSGIGAGQHVGSITMGCNISTFDSVKLVNRSVTGLFSNEVDLLHI

SEQ ID NO: 20415 - protein, 1355 aa, unidentified
  REGION 1..1355: note = Cas Enzyme sequence
MKSIRKESQEPYYIGLNVGPTYAAYAVTNTSYNLSRFKGKDMWGVYKYDEAETAEDRRRFRQGRNSNLKEKERIRLLRSYFFDEIQKVDENFFVRLDNSFYYSEDKDIRLNGDRNVLFADKDYSDRQYMSEYPTIYHLRSELAHGSKKPDIRCLYLAVSHMMKNRGNFYTKNLEDTDKSLGEVYENICTKAAEYDIVLKMEVPAEKIMDIMINPGISGKVKATLVTQLVDATSKPALSIIKLMCGLKAKIADIFPELAESLEEDEKKLSFSFKDEDYFERADSIEKLIGENEYSLIESVKEMYDAAIIKNIIQDYRYVSDAKIASYEKHANDLEILKAELKTILSKNKYKRFFSKEEPGTYSAYVHFSNHNNQITRRKSDKGRTQEELYHTIKKYLADVDDEQAEYILDEIDKGTFLPKQRILDNALIPNQLYTVELKAILDNASKYYDFLNSRDESGLTVSERILSLFTFTIPYFVGPTSTYNSRGWVVRKEPGKVYPWNLNDKVDMGESAKQFIEKVIGKCNYLTGEKVLPNASLLYEKYRVLNEINNICVDGEKISVEMKQAIVNELLYSGKTISKKKILSFLVKNENATSDSIITGIDDKLNNSMASHRFFTDIFGCLNKDNEAVAEDIILWSTIYGSSKELITEQIINKYPDMFDEEQLRKILNLNCKDWGKLSREFLNMKGLDKDNDEYVSVIDAMWNNNLNLMELMYDTRFDFSSRVKDKTKNAAKNLFSFDYDDLYDLYATTAQRRTIWACVKIVREIVRLKGYAPESIFLETVKSRPNDIPKESRKGKLTAIYKGLKGVSADWKKKMLSLIEECDADGSLKAKNVYLYFLQMGKDMYTGKDISLEELKSPDKRKKHNIDHIYPKHFVKDDSIDNLVLTSTDLNRDLSDRYPVPQDIYENMHEFWQQLRRSGLISAEKLARLSDRNPLSDEKRASFIGKLYDQAGSSTRMMADIFKNILPKDTKVIYAKTSETNEFRHKFDFPRTTIINDDYLAKDAYLNIVVGNVWYTKFTASPMWYIKEEYRKKKSEYNLNRMYDFNVIRDDRIAWITDKTNPEAATIHTVNKVMNRNTVITITRTTQGHGGLTNATITRADKAKEGVYLPLKTSNERMSVTKYGGKTSITSAYMFLAEHTLKKSRVRTIYSLPLHLVSQIKGKKDLEKYCTDVLHLIEPVIKIAKIMLYSELIIDGYSYLLGGKAGVQYYLRNNIPMRVNAEWQKYVSKIEKYINFKSLDKDMSADKNIELYDELVDKHTNSIYSKRRNTAGDMLKKGRDTFIKLSVKEQLEVLNQIFTLTRMGTNIANLSGIGAGQHVGSITMGCNISTFDSVKLVNRSVTGLFSNEVDLLHI

SEQ ID NO: 20416 - protein, 1343 aa, unidentified
  REGION 1..1343: note = Cas Enzyme sequence
MKSIRKESQEPYYIGLNVGPTYAAYAVTNTSYNLSRFKGKDMWGVYKYDEAETAEDRRRFRQGRNSNLKEKERIRLLRSYFFDEIQKVDENFFVRLDNSFYYSEDKDIRLNGDRNVLFADKDYSDRQYMSEYPTIYHLRSELAHGSKKPDIRCLYLAVSHMMKNRGNFYTKNLEDTDKSLGEVYENICTKAAEYDIVLKMEVPAEKIMDIMINPGISGKVKATLVTQLVDATSKPALSIIKLMCGLKAKIADIFPELAESLEEDEKKLSFSFKDEDYFERADSIEKLIGENEYSLIESVKEMYDAAIIKNIIQDYRYVSDAKIASYEKHANDLEILKAELKTILSKNEYKRFFSKEEPGTYSAYVHFSNHNNQITRRKSDKGRTQEDLYHTIKKYLADADDEQAEYILDEIDKGTFLPKQRIKDNSLIPNQLYSVELKAILENASKYYDFLNSRDESGLTVSERILSLFTFTMPYFIGPVSPYNSRGWAVRKEPGKVYPWNLKDKVDMGQSAKQFIEKIIGKCNYLSGEKVLPNASLLYEKYRVLNEINSISVDGEKISVEMKQAIVNELLAGGKTVSKKKILSFLVKNGSATSDSIITGIDDKLNNSMASHRFFADIFGSLNKDNEAVAEDIILWSTIYGSSKDFVTEQILNKYPDMFDEEQLRKIHNLNCKDWGRLSRGFLNMKGLDKDNNELISVIDAMWSNNLNLMELMYDTRFDFSARVKDKTENAVKNLFSFDYDDLNDLYATTAQRRTIWASVKIVREIVKIKGFAPESIFLDTVKSRPNDIPKESRKGKLTALYKGMKGVSADWKKKMISLIDQCDADGSLKAKNVYLYFLQMGKDMYTGEDISLEELKSPDKRKKHNIDHIYPKHFVKDESIDNLVLTNTDLNRDLLDRYPVPKDIYDNMHEFWQQLRRSGLISAEKLARLSDRNPLSDEKRASFIGKLYNQAGSSTRTMADIFKNILPKDTKVIYAKTSETNEFRHKFDFPRTTIINDDYLAKDAYLNIVVGNVWYTKFTASPIWYIKEEYRKKKSEYNLNRMYDFNVIRDDRIAWITDKTNPEAATIHTVNKVMNRNTVITITRTTQGHGGLTNATITRADKAKEGVYLPLKTSNERMSVTKYGGKTSITSAYMFLAEHTLKKSRVRTIYSLPLHLVSQIKGKKDLEKYCTDVLHLIEPVIKIAKIMLYSELIIDGYSYLLGGKAGVQYYLRNNVPMRVNAEWQKYVSKIEKYINYKSLDKDMSADKNIELYDELVDKHTNSIYSKRRNTAGDMLKKGRDTFIKLSVKEQLEVLNQIFTLTRMGTNIANLSGIGAGQHVGSITMGCNISTFDSVKLVNRSVT

SEQ ID NO: 20417 - protein, 1355 aa, unidentified
  REGION 1..1355: note = Cas Enzyme sequence
MKSIRKESQEPYYIGLNVGPTYAAYAVTNTSYNLSRFKGKDMWGVYKYDEAETAEDRRRFRQGRNSNLKEKERIRLLRSYFFDEIQKVDENFFVRLDNSFYYSEDKDIRLNGDRNVLFADKDYSDRQYMSEYPTIYHLRSELAHGSKKPDIRCLYLAVSNMMKNRGNFYTKNLEDTDKSLGEVYENICTKAAEYDIVLKMEVPAEKIMDIMINPGISGKVKATLVTQLVDATSKPALSIIKLMCGLKAKIADIFPELAESLEEDEKKLSFSFKDEDYFERADSIEKLIGENEYSLIESVKEMYDAAIIKNIIQDYRYVSDAKIASYEKHANDLEILKAELKTILSKNEYKRFFSKEEPGTYSAYVHFSNHNNQITRRKSDKGRTQEDLYHTIKKYLADADDEQAEYILDEIDKGTFLPKQRIKDNSLIPNQLYSVELKAILENASKYYDFLNSRDESGLTVSERILSLFTFTMPYFIGPVSPYNSRGWAVRKEPGKVYPWNLKDKVDMGQSAKQFIEKIIGKCNYLSGEKVLPNASLLYEKYRVLNEINSISVDGEKISVEMKQAIVNELLAGGKTVSKKKILSFLVKNGSATSDSIITGIDDKLNNSMASHRFFADIFGSLNKDNEAVAEDIILWSTIYGSSKDFVTEQILNKYPDMFDEEQLRKIHNLNCKDWGRLSRGFLNMKGLDKDNNELISVIDAMWSNNLNLMELMYDTRFDFSARVKDKTENAVKNLFSFDYDDLNDLYATTAQRRTIWASVKIVREIVKIKGYAPESIFLDTVKSRPNDIPKESRKGKLTALYKGMKGVSADWKKKMISLIDQCDADGSLKAKNVYLYFLQMGKDMYTGEDISLEELKSLDKRKKHNIDHIYPKHFVKDESIDNLVLTNTDLNRDLSDRYPVPQDIYDNMHEFWQQLRRSGLISAEKLARLSDRNPLSDEKRASFIGKLYNQAGSSTRMMADIFKNILPKDTKVIYAKTSETNEFRHKFDFPRTTIINDDYLAKDAYLNIVVGNVWYTKFTASPIWYIKEEYRKKKSEYNLNRMYDFNVIRDDRIAWITDKTNPEAATIHTVNKVMNRNTVITITRTTQGHGGLTNATITRADKAKEGVYLPLKTSNERMSVTKYGGKTSITSAYMFLAEHTLKKSRVRTIYSLPLHLVSQIKGKKDLEKYCTDVLHLIEPVIKIAKIMLYSELIIDGYSYLLGGKAGVQYYLRNNVPMRVNAEWQKYVSKIEKYINYKSLDKDMSADKNIELYDELVDKHTNSIYSKRRNTAGDMLKKGRDTFIKLSVKEQLEVLNQIFTLTRMGTNIANLSGIGAGQHVGSITMGCNISTFDSVKLVNRSVTGLFSNEVDLLHI

SEQ ID NO: 20418 - protein, 1355 aa, unidentified
  REGION 1..1355: note = Cas Enzyme sequence
MKSIRKESQEPYYIGLNVGPTYAAYAVTNTSYNLSRFKGKDMWGVYKYDEAETAEDRRRFRQGRNSNLKEKERIRLLRSYFFDEIQKVDENFFVRLDNSFYYSEDKDIRLNGDRNVLFADKDYSDRQYMSEYPTIYHLRSELAHGSKKPDIRCLYLAVSNMMKNRGNFYTKNLEDTDKSLGEVYENICTKAAEYDIVLKMEVPAEKIMDIMINPGISGKVKATLVTQLVDATSKPALSIIKLMCGLKAKIADIFPELAKSLEEDEKKLSFSFKDEDYFERADSIEKLIGENEYSLIESVKEMYDAAIIKNIIQDYRYVSDAKIASYEKHANDLEILKAELKTILSKNKYKRFFSKEEPGTYSAYVHFSNHNNQITRRKSDKGRTQEDLYHTIKKYLADADDEQAEYILDEIDKGTFLPKQRIKDNSLIPNQLYSVELKAILENASKYYDFLNSRDESGLTVSERILSLFTFTMPYFIGPVSPYNSRGWAVRKEPGKVYPWNLKDKVDMGQSAKQFIEKIIGKCNYLSGEKVLPNASLLYEKYRVLNEINSISVDGEKISVEMKQAIVNELLAGGKTVSKKKILSFLVKNGSATSDSIITGIDDKLNNSMASHRFFADIFGSLNKDNEAVAEDIILWSTIYGSSKDFVTEQILNKYPDMFDEEQLRKIHNLNCKDWGRLSRGFLNMKGLDKDNNELISVIDAMWSNNLNLMELMYDTRFDFSARVKDKTENAVKNLFSFDYDDLNDLYATTAQRRTIWASVKIVREIVKIKGFAPESIFLDTVKSRPNDIPKESRKGKLTALYKGMKGVSADWKKKMISLIDQCDADGSLKAKNVYLYFLQMGKDMYTGEDISLEELKSPDKRKKHNIDHIYPKHFVKDESIDNLVLTNTDLNRDLLDRYPVPKDIYDNMHEFWQQLRRSGLISAEKLARLSDRNPLSDEKRASFIGKLYNQAGSSTRMMADIFKNILPKDTKVIYAKTSETNEFRHKFDFPRTTIINDDYLAKDAYLNIVVGNVWYTKFTASPIWYIKEEYRKKKSEYNLNRMYDFNVIRDDRIAWITDKTNPEAATIHTVNKVMNRNTVITITRTTQGHGGLTNATITRADKAKEGVYLPLKTSNERMSVTKYGGKTSITSAYMFLAEHTLKKSRVRTIYSLPLHLVSQIKGKKDLEKYCTDVLHLIEPVIKIAKIMLYSELIIDGYSYLLGGKAGVQYYLRNNVPMRVNAEWQKYVSKIEKYINYKSLDKDMSADKNIELYDELVDKHTNSIYSKRRNTAGDMLKKGRDTFIKLSVKEQLEVLNQIFTLTRMGTNIANLSGIGAGQHVGSITMGCNISTFDSVKLVNRSVTGLFSNEVDLLHI

SEQ ID NO: 20419 - protein, 1324 aa, unidentified
  REGION 1..1324: note = Cas Enzyme sequence
MEEEKTIRPHSPYYIGLDVGTNSVGWAVTDPEYNVLRFKGNSMWGARLFEEAKPAADRRAARIARRRLERRKQRLLYLEEFFSAEIGKSDPLFFRRLHESALFPDDKTTGTGKYTLFNDPDFTDRDYLRRYPTVYHLRSELVHSSEPHDPRLVFLALHHIIKHRGHFLYETSENGDECPTVDAAMQELTEYLSAEMNVELGLEPEYFTILTDRNMRISQKKAALRAALGRSVQTEESGADIQALSDLLAGAKVKLAALYDDESLKNAEPASVALSDDLDAVFDALSSALGERVELLLAAKKVFDAARLSEMRGGEAYLCDAKVRQYEKNHADLRALKDYVREAAPDKYRSIFYKNAKFPNNYAAYSRYRSESGDKTCKQEDFCAFLKSVLPKPAAEHPFAPQYAQIEEKTFLPRLTGSENGIIPYQLHRQELRKILDNASAYLPFLLEEDEDGISVREKIEAVFSFRVPYYVGPLKGRWAERTEEAKRTGEKAYPWNFEKVVDLDASAAAFLKDLIGKCTYTGAPVLPKDSLLYSEFMLLNELNPLRLNGNELPVSVKQQLIEDLFKKENRRVTKKRILDYLVMHGYAAKTDEISGIDDPVKTRLRSYHDFAPLIPVLGEEAVEKIIEGTLVYSDDKRMLRRWLKKNFPALNEDDVRKICRLKYADWGRLSKEFLTELYSGADEQGEAQNILYFLRNTNLNLMQLLNDPEHANLPAAAEERRRARFGSNSLRSQLDEMYISPAVRRSIWQTLKIAEEIAHIRGGAPAKIFVEVARGEDKEKKGTRTKSRKEQLLELYKACERDSGELYEKLAATEESALRRDKLFLYYTQFGKCMYSGEPIDLETALRDDTTYDIDHIFPRSRIKDDSIENRVLVKSVLNREKTNTYPISQEIRSRMLPFWSMLHDKKMIGDKKYDRLKRNTELTDDELAAFVQRQLTETQQSTKALAQLLQEIYPEAEIVYSKAGNVSEFRQEFGLLKCREVNDLHHAKDAYLNIVVGNVYKTKFTDRFFLNIRKENYSLKKVFDWDTPGAWKADGTSIATVKKYMAKNNPIITRMPREEKGQLFNLNIMPAGLGQLPIKAGKPIEKYGGYNKLTGSYYCVVEHTEKKKRVRSIETVLLYARGLYESDPVKYCREILGLVDPVVVAPKIRIDALLELDGFRLYPSGRTGDMIVYKHGYPLAIDAGREKYIRNLTKYIERCAKNEYPATAFDGISAEENVALYNWFVERLESSVYGKLMPALLTNLKSSAEAFEKMGILSQAKTLMEILKAFKCDAQNPNLKELCGKGLVGRIQKKAALQGFQSAYLINQSPTGLYEYRTDLLH

SEQ ID NO: 20420 - protein, 1324 aa, unidentified
  REGION 1..1324: note = Cas Enzyme sequence
MEEEKTIRPHSPYYIGLDVGTNSVGWAVNDPEYNVLRFKGNSMWGARLFEEAKPAADRRAARIARRRLERRKQRLLYLEEFFSAEIGKSDPLFFRRLHESALFPDDKTTGTGKYTLFNDPDFTDRDYLRRYPTVYHLRSELVHSSEPHDPRLVFLALHHIIKHRGHFLYETSENGDECPTVDAAMQELTEYLSAEMNVELGLEPEYFTILTDRNMRISQKKAALRAALGRSVQTEESGADIQALSDLLAGAKVKLAALYDDESLKNAEPASVALSDDLDAVFDALSSALGERVELLLAAKKVFDAARLSEMRGGEAYLCDAKVRQYEKNHADLRALKDYVREAAPDKYRSIFYKNAKFPNNYAAYSRYRSESGDKTCKQEDFCAFLKSVLPKPAAEHPFAPQYAQIEEKTFLPRLTGSENGIIPYQLHRQELRKILDNASAYLPFLLEEDEDGISVREKIEAVFSFRVPYYVGPLKGRWAERTEEAKRTGEKAYPWNFEKVVDLDASAAAFLKDLIGKCTYTGAPVLPKDSLLYSEFMLLNELNPLRLNGNELPVSVKQQLIEDLFKKENRRVTKKRILDYLVMHGYAAKTDEISGIDDPVKTRLRSYHDFAPLIPVLGEEAVEKIIEGTLVYSDDKRMLRRWLKKNFPALNEDDVRKICRLKYADWGRLSKEFLTELYSGADEQGEAQNILYFLRNTNLNLMQLLNDPEHANLPAAAEERRRARFGSNSLRSQLDEMYISPAVRRSIWQTLKIAEEIAHIRGGAPAKIFVEVARGEDKEKKGTRTKSRKEQLLELYKACERDSGELYEKLAATEESALRRDKLFLYYTQFGKCMYSGEPIDLETALRDDTTYDIDHIFPRSRIKDDSIENRVLVKSVLNREKTNTYPISQEIRSRMLPFWSMLHDKKMIGDKKYDRLKRNTELTDDELAAFVQRQLTETQQSTKALAQLLQEIYPEAEIVYSKAGNVSEFRQEFGLLKCREVNDLHHAKDAYLNIVVGNVYKTKFTDRFFLNIRKENYSLKKVFDWDTPGAWKADGTSIATVKKYMAKNNPIITRMPREEKGQLFNLNIMPAGLGQLPIKAGKPIEKYGGYNKLTGSYYCVVEHTEKKKRVRSIETVLLYARGLYESDPVKYCREILGLVDPVVVAPKIRIDALLELDGFRLYPSGRTGDMIVYKHGYPLAIDAGREKYIRNLTKYIERCAKNEYPATAFDGISAEENVALYNWFVERLESSVYGKLMPALLTNLKSSAEAFEKMGILSQAKTLMEILKAFKCDAQNPNLKELCGKGLVGRIQKKAALQGFQSAYLINQSPTGLYEYRTDLLH

SEQ ID NO: 20421 - protein, 1365 aa, unidentified
  REGION 1..1365: note = Cas Enzyme sequence
MKNQKNVEYFIGLDIGTNSVGYAASDPSYKMLKYQQHPMWGVHLFESANLAAERRTHRAARRRLDRRQQRIQLLRELFAKEIGCIDTKFFQRIDASSLKKEADDIPYAVFVDKDYTDKEFYKRYPTIHHLISDLMESDEPHDVRLVYLACAWLLAHRGHFFSDVAKENIDEITDFASVYDDLANFVEDHGNSFSWKFSEIDSRHIGEIIKSSKSRSDKFKELAEYLQVKKLKNTEENSEKWFDEYEFLRLLCGLESKSAKLFIDADYEEVKLSLDMEDEKIADMLSELSDDDASLILLAKKVFDWSVLADIIGSGKNLSDSKVKIYEKHKSDLKQLKYLIKKYLSRQDYADMFRASDKNNYVAYCGLDKRKKISREDFYKFLLGKLKNVQFEDIDDLEVISDKSVLKQIEQDIALEKFLPKQVTSDNRTIPYQLYWNELSNLLKKASTYLPFLLECDADGLSVKDKILSIMEFRIPYFVGPLNSHSEFAWIKRKADGRILPWNFDQKVDLDASEKAFIDRMTNKCTYLPGEAVLPKNSLLYQKFEVLNMINAIHVNGSSISVECKQKIYELFFKYSKVSKKTIVSCLISNNFYNNISIDGITGIDDTITASLSSWKIFKPLLEAKKLTEREAEEIISQRAFTEENKRFCAYLKKFSLLDAEDIKWISSKKLQGFGRLSEKFLTETAHWDLEIGEKVSIINMMWNHNLNLQQLLSDKYSFAKMVANARKEYYSQKSQSLTERLDEMYISNAVKRPIIRTLTVLKEVTDTVGNAPKKIFVEMARDVDNSSKGKRTVSRLAQLQNFYREIADEDTRLLSKELEKYDESALQRDVLYLYFMQLGRDMYTGDKITDLALCNKEHIYPQSKVKDDSLLNNLVLVRSEINGAKSDSYPLNAEIRRKMTPFWKYLRDHGLISDEKFFRLTRSTPFSDDEKWGFINRQLVETRQATKVITELIKERYPDSEVVYVKAGLVSDFRHEFDLVKSRTLNDLHHAKDAYLNIVVGNVYHSKFTRQWFLDNSNSHYSVKTENLFFDMVKVKKYKNQKEIIWHKEYEHIAKNLQRNYIHLTNYAYCQHGGLFDQNPLSAAKDLIPLKKGMSTEIYGGYRKPSATFFVFALIEEKNKKNAKRELTLVAVDLMVADKFLKDESFAVEYVKNFVDPFGKKDLDVKFPQGIKPIKIKTVFEVDNGLRFILNGKSSGGSKLLVAISSPLLLDNKNTDWAKYIKYLESFCEKKKKNPKLIYSEAFDRFSAANNIELYDILLSKLGAGLFVKRPANPLECLKDGRDKFVSLSPGSQAEILLGLVTLFGRGSGSGVDLSALGGVSKAAVTTISSNFSNWKKNYKTVRIIYSDASGLHETKSINLLDLI

SEQ ID NO: 20422 - protein, 1341 aa, unidentified
  REGION 1..1341: note = Cas Enzyme sequence
MRFQNKKTGDYFVGLDIGTNSVGWAVTNEKYEILRAKNHRMWGSRLFEEGKTAEERRVHRAGRRRLNRRNDRLMILEDLFAEEISKVDKAFYQRLHESQYRQEHKTVSGPYFLFNDKEFTDEDYHIDYPTIYHLRVALMKAPAKDVRLLFLAIHHIIKYRGNFLHEGETFKTTGGLTDILQRVLACNEFSGLKQHIDDTALVKLLTNKGITRSDIAKQISELATDKLYRKQAKAFASLVLGLKANLDDLFNEPEYKELDSEIRTVEFSGKEYWEERDKYEPYLGESLFALDGCKTLYDTLLLSNIKPDGKYLSEAKVETFEKHHEHLESLKDLLKSNKALYNRVLRDDEKNLNNYITYIGKSEFNKRCSRDEFYKFLKQTIKDISDNENKAEIVQLMELDSFLPLLRVRENGVIPYQIHEEELEQILNVSSEKYPFLNKADGSGFTIAQKILKLLTFRIPYFVGPLNPAHKDRDNGFAWVVRKAPGKVYPWNFEDKVDISASATAFIENLTNKCTYLIGEDVLPKYSLAYSKFSLLNELNNLRYDGKPLSYETKQSFIKDCFEKEHRKMTEKRIREFLKHLGGTDGKGALTGLDVDIKSDLKSYRDMVRILGDGFDETMAERIIRYVTLFGEAKKVLLSTLEIEFGDDLSDTQKKQILKLQYRDWGRLSATLLKGIKGVAGDNPECSILECMEQQPLNLMEVLSSHNTYLAAIEEFNKERTEPTDIVDYKLVDDLYISPAVKRSVWQTLRILDEITKLRGSVPKKVFVEVARTNRAEKKKTDSRKERLLQLYKTIKDEGRNWTEEIKQRDAGDFNSKKLFLYYTQQGRCMYSGEKITSIGDLFTSKYDIDHIYPRSVTKDNSWDNLVLVKAELNREKKDIYPIEKDTQDRCISLWKQLLEQGLISERKYERLVRTTPLTADELADFVNRQLVETNQSVKAVTNLLKRLYPDTTICYVKAENVSDFRQEREFVKLRSLNAHHHAKDAYLNIVVGNVYHEKFTNNPRNFIKNARSDKKRPYSLNHMFDYLLQVGNKEIWNPKTDNNLVKKMMRNNDVQVTRMLVEQTGALYDATIYKASVTKSESYVPLKSSDAILSDVKKYGGFTSIKIAYYSIFRFYKKNSEEFETHIISIPVLKAGTLNSKEDYVAYGEEIMNKQKFDRVELVYKKLCMNSLVRINGVMYYLGGKTNNSLYIDSAISLVLPDNIAKKIKAVEKYIARVAENGNYKPQPDQVSPEFNMIIYKALTEKMKQPAFVGLKTNRENELEKETTITAFIAMTLIEQCKMLMEILNLLTQQKTTYALKPIGVSASRSTLGMNITGLSEFTIITQSVTGLQEKEIRII

SEQ ID NO: 20423 - protein, 1343 aa, unidentified
  REGION 1..1343: note = Cas Enzyme sequence
MNKKDYYLGLDIGTGSVGYAVTDEQYQLMKCNHKYAWGSVLFDSSEGAEERRMHRTARRNRNREVERLNLLRDLFDEEISKIDPGFFHRLKESRYVPEDKRDQNGQKPDLPYALFVDEGYTDVDYHKEFPTIYHLRKALIEGKKEYDIRLVYLAIAHILKNRGHFLSDIDSDNGENNLNAALNELFEVWNRVVLGREEQFCAAIQITEIAEILKEKISKSRKKEKIAAVISDGDKRTKELAALITGNTVKFEKLFQVEQFKKLEEDKISFAQGNYEEKEKSYEENLGEYFEIIPMAKTVYDQVILSKILDENSKGYISYAKVAEYEKHKQDLKELKQLIINHGGGKATELYHRVFRTPKGKENNYSVYIGNTSLNGKKQVLSEKKCSQKDFYDFLTKKIFPEIEDCKEKIEIMEKIELDNFMPKLRDKDNSVIPYQLQEKELKIILSNAKKYLTFLKRKDESGKSTEEKILLLLNFRIPYYVGPLNINSENAWIVRKPGKITPWNFSEMVDVESSAENFIKKLTSKCSYLRNEDVLPKSSLLYEKYMVLNEINHLKIKSKTISVELKQEIYRELFEKKQKVTIKKLQDYLKREKGWILSREDITGIGEEFHTSLTSYHAFKANFTNTDITEREKEDIIKDITVFGAEPVMLKKRLYRKYPEYQSQIAGLMKMLKCKEWGRLSEKVLSGIAVDVPGLGKVGTVIYQMWATNKDFMQIVGALDSPYAKMIEEENGIQKKNKIEYSMVDELYVSPASKRAIWKSLQIIDEIIGIMGKPPKRIFVEMIRENQKTSRSVTRKDRLMELYKNIEEEAQLYDVLGKTENDKLRNDKLYLYYAQLGKCAYTGEEIELDKFENYDIDHIYPQSQTADDSLDNRVLVLRKKNEEKEDIYPIREEIRQKMKDVWKIWKDKGLISAEKYYRLTRESELTNEELTKFINRQLVETGQSTRALTTLLKEILPETTEIVYSKARNVNRFRQKYEILKLRELNDFHHAKDAYLNIVVGNVYHIRFTKDIRKYFLEKGTYRTYNIPKLFENRVCLGDEVAWDTDKSIAVVKKVMENNKVLVTKQLIERKGKLFDENPLKKGKGQIVLKSGDDRLRSIEKYGAYNSATITYFMLIEGEGKKGKIEKHFVPVPLYLKQKYEDEAFVYDILKNEVKLDNIRILKRKIPIYTLFVTSGFKMRLTGKMGDRLIFNNANQLDMSDTNQKYLKEIIKYNNDIMIKKDAKINTQSVLDKQKMQELYEEFQNKIKTTIYGKDSMFQNVFNVMENGKEKFCALTIEEEAEVLFQILKLFQCTSEMPKLEKIGGKKSMGRINRGMNITNIDNLAIIHQSVTGLYEKVERII

SEQ ID NO: 20424 - protein, 1220 aa, unidentified
  REGION 1..1220: note = Cas Enzyme sequence
MEDTTPHDVRLVYLAVAWLMAHRGHFLSEVNKDNITELLDFDSIYGNLMELFTTPPWICSDKEEFKNILLLHQTIKNKERKFWGLLYEGKKPKTDEEDYINKEGMIRLLSGGTVEAGKLFNQKEFQEKISISLKKSEEDFQLLLDEMDEEDSEYLIRLRALYDWALLVDSLHGCSSISEAKVQDYAQHEADLKMLKNFVRKYCPNEYAAIFKNAEKENYASYVYNIPKGKRTKEYKKKITQEEFCDYLKKKLKDIQIEEEDQEIYQDMMFRLETYTFMPKQVTGDNRVIPYQLYYDELKKILENAENYLPFLKKVDEQGISNKTKLLSIFEFRIPYYVGPLCSASKYAWLKRKAEGKIYPWNFEEKVDLDQSEKAFINRMTNNCSYLPGETVLPQNSLLYCKFTVLNEINNIKINGIPISVECKQEIYRLFEENKKVTVDKIKKYLISNNYMEKEDVLGGIDITIKSSLKPQHDFKRLLHSKILNEKEVEQIIECITYSEEKSRVLRRLEREFPKLSDEDRRYLSKLKYSGFGRLSREFFTGIHGANKETGESFSIIQALWDTNDNLMQLLSDRYTFKDSIEEEQRQYYEEHPMTVESLLEEMYVSNAVKRPIYRTLDVIKDIQSVCKAAPKKIYIEMARGQEEGSNRKRSRKDQILELYKNMDKGEVRELSKQLEDCSDRELRSEVLFLYFMQLGRSMYSGKPIDIEKLKTNAYDVDHIYPQCRVKDDSLSNKVLVLSEENRAKGDKYPISAVIRQNMGEMWRVYHEKGLISDEKYRRLTRVSAFSNAEKMEFINRQLVETRQSTKALTRIFRYIFPETEIVFVKAGLVSDFRNEVLKCAKSRIVNDLHHAKDAYLNIVAGEVYHARFTSKFFKIDQDEYLVKTKAIFGNKVWNGKELVWDGEKDIARVKKILTKNSVHYTRYAFERKGGLFDQQPLRAASGLIERKAGLDTEKYGGYNKSTASYFLLVKYAEAGKKPKQDVMFVPIDLMESEQIIKSESYAKYYVRNAIAHIIGKSREIVQEVSFPLGMRKMKVNTLLTLDGFEAILASKSNGGKTLVFGSMMPLFVNNKKEIYIKRLESFSKKKKQNNFLFVDEVYDKITKEENRELFLFLTNKVEEEPYCLIFGSQLQVLHDKENEFENLNLEQQVETLLNLLSIFKTGRTTGCDLKLLGGAGQAGIFTESSKLSNWKKSYKDVRIVDISAAGLHRKTSQNLLELL

SEQ ID NO: 20425 - protein, 1362 aa, unidentified
  REGION 1..1362: note = Cas Enzyme sequence
MRIAEDFYVGLDIGTDSVGYAVTDQSYKLLKFKGEPLWGVTIFDAAKQSAERRSFRTARRRIKRTQQRVALVGEIFAKEIGDVDPRFFIRRMESALYRDDVSPQDPYPVFSDEKYTDVNFYGEHPTIHHLLTELMTDCKPHDIRLVYIACAWLVAHRGHFLSEVDRDNVENVCDFNAVYDELMDHFTQNGMNKPWQCGALDFAGVMQQKEGVTQKEKDFYNLLFNGKKPKDDGQEACMCSRSRLIKLLCGGKVTADNLFCTDAYSDVPSFSLGMGDDELSVVLRELGDDAELVVRAKAVFDWAALVDVLAGKSTISEAKVFVYEQHKRDLKALKAFIRKYRADRYSEVFRVAGKDKKNYAAYSHNFKSVNLKDLKDSKLPSASKEDFSKYLISVVKGIKCDECDQPFYEDMMSRLELRSFLPKQVETDNRVIPYQLYWHELCQVLRNAEVYLPFLSERDEDGLTASDKIKSIFTFRVPYYVGPLNRQSEHAWLERKAEKIYPWNFDEVVDADMSEQAFIRRMTNTCTYLPDQPVLAKNSILNCRFNVLNEINNLKIDDVPISVNAKQGIYHDLFEKRARVTPKMIRQYCLSNGYMQEGQTLGGIDIAIKSTLRPQLDFAYLLNAGTLSEQDAERIIERITYSEDWMRLSRWLSREYPVLSEDDVRRISRQKYNDFGRLSRALLDGLEGMCERTGECGTIIHFLWDTNCNLMQLLSSDYTFTALIEQAKAEYYRSKPKNLSERLDDLYISNAVKRPIIRAMEIIKELTKALGAKPAKIFVEMARDAGDDKKGKRTQTRLNQLKELYKRIDSDDTRLLDAQLNEMGGDADNRLQSEALFLYYLQLGRCMYTGKPIQVDRLKENLYNIEHIYPQSYVKDDSILNNKVLVFSDINGQKSNQYPIDSNIRQNMRSYWDMLHKNGLINDEKHMRLTRGTSFTSDEKLGFINRQLVETRQSTKVVAMLLKEMYPEPDTKVVYVKAGLVSDFRHEFDMVKSRGVNDLHHAKDAYLNIVVGNVYYERFSKRWFSIDSEYSIKTKTIFGRPVRCGENIVWNGASSLNMIRSSLQKNNIHLTQYAFMRKGGLFDQMPQRRQEGLVPRKAGLDTEKYGGYAKPTATFYIVVRYICKQKRDVMLMPVELMFADRFLQDEGYARRYVQDTVSKILNKPISNIDFPLGMRPLKINTVLSFDGFLTCLSGKSSGGRYILLSHIMPLTVGTQWERYIKRIESFEEKRKKNSNIVANSKYDMITSKQNVELYDLFSDKIQNRPYNIMFGGLTQCLIDGREKFIGLPVEQQTSCLLQILLLFKTCRAGSCDLRAVGGSANTGIQYVSATLSNWQRYQKVCIVDASPAGLFMKTSVNLLELL

SEQ ID NO: 20426 - protein, 1362 aa, unidentified; identical to SEQ ID NO: 20425
  REGION 1..1362: note = Cas Enzyme sequence

SEQ ID NO: 20427 - protein, 1347 aa, unidentified
  REGION 1..1347: note = Cas Enzyme sequence
MKSYMQTAPYYIALDVGTNSVGWAATDKEYNLLRFKGNSMWGVRLFDEGQTAEERRISRTTRRRLNRRKQRLNTLYLLFKEELDKIDPDFDKRMKESYLINADKTTGTRFSLFADPDYTDKDFAREYKTMYHLRQELVKSEKPHDVRCVYLGVHHILKSRGHFLFEVGENAEENRSFAEVFDEYLIAIRDNLGVDCSVSDVSEVHNIVSDKTMKQAEKIKGIVSLISVALDELTEEKELKKQIEAFAKLIVGANVDLKNMFGDDTLKGSFKVTADVEGDDKFKDLSDKQLSVIAAAKSVYDQIKLEEIMGSSNYISDYMVSKYEEHRKDIKALKEFLKSKGRIDLYKRIFSERTKGLNNYAAYVGYEGQESNCTAENLKDFLKKELQEYKSEIPAIYDKITEGKFAPKLRTTDNGAIPSSLHKKELVKILENASAYLPFLNSKDADGLSVKDKIISLFDFKIPYYVGPLNNSSDKYWIVRSNEKITPWNFDRVVNCEETAKEFILRMTGKCTYTGDDALPLDSLLYREYTVLNEINVIKINGKPISKRIKDIIYNDLFVKSSKKVTKKAIHTHLVNLGEITKDDEITGVADTLTTSLQSYHKLRRTIEKGYSSELIEELIKSIVLFAQDKKLLKKWIKEKMPDASDEDIKYLSSLKFSGWGSLSKTLLCDIMGNLNTETGEVMSVIDVMRENSENLNQVLYNYGFEKAAKEYRENKYGSQDKISDILDSMYISPKVRRSIRQAMKIVDEIIGIKKAAPEKIFIEMARDVDGTNKKEQTKSRKEQLIELYKACEEDSAKLLEVCGEEGIERFKELYNNLENIEDSKLRQDKLYLYYTQFGRCMYSDEFIPLDELQDKNKWDIDHIFPRSRIKDDSLSNRVLVKAQLNRSKTNEYPINQDIRDKMRDKWLVLKNKKMINDTKYSRLVRSEPLTTDELSAFINRQIVETQQSTKALATILGKRCPDSKIVYSKAGNVSDFRKYYAYRSEEPYTEFIKCRDLNDLHHAKDAYLNIVVGNLYDTKFTAEFFKNIHNEEYSLNTEAMLSWPVKGAWIPESKDKTQGTILTVRKTMGKNNILYTRMPREEHGKLFNLTILKKEKDSNSGMPVKKDRSIENYGKYDKIKGAYFALVEHTEKKKRVRSLEPIFICDKTEYEKDNTAFFESKGFKDPRVIVPKIHMDSVLELNGVRYNIKGRSDDNIIYGHMCQLVLDSRAVTVIRNTTKYLQRMSKQKDKKEPTRYDGITAEDNIYLMGCLIDKIDKVKDYNKSIKCSRIILEAEKKNFENGSYTLYEQCVSISKALIGFRCNQRVSGYNGSTIRINKKVSSLSSAYLVNQSPTGLYEYKIDLLKD

SEQ ID NO: 20428 - protein, 1355 aa, unidentified
  REGION 1..1355: note = Cas Enzyme sequence
MESRYYIGLDIGTDSVGWAATNPKYEILKFKGKLMIGSRLFDSANTAADQRLYRSNTRRLDRKKWRIKLLQELFAPEISKVDFGFFQRLKDSFLKDEDKAVFQKNMLFNDKNYNDKDYHRDFPTIYHLRKALIENKKEYDVRLVYIALHHLIKHRGHFLFQGSMSQAISFKEVFRTFKEAVFSEFELEINCKNEDELQGVLKNKHLSKKEKTNKIMSLLDSDRTDKRLKGIIGLICGSKVSLNDIFGDSVQSEEPLKISFAEKPYDEVRPEIENALYEQCNTVDVFKAVYDWAILADILSEGDFNGKNYLSVAKVKIYEKHKKDLEILKNIFKSYSKSLYNQFFRSEKENDNYSAYIGSTKFGKEKFSVKRCTQEVFYKRVLKILEEIEVKSGCTENIKYIQKEIEAQTFLPLQVTKDNGVIPYQVNEAEAQIILNNVSKYLEFLNDEDSYGLTVKDKILKILTFRIPYYVGPLNQHSPRSWMERKNNGVITPWNFEEMVDVKKSAENFILRMTNKCTYLVGEDVLPKNSLLYSEFMVWNELNNVKVKGQKLNIELKKKFFEYYFKNQKSVTKNKLFEFLKTEGVTDINKDDISGIDQGIFKSSLASYLSFKNIFGNEIEKYSVQQIAENCIRWITLYPDDRKMLKEIIRSNYDENQVSNEELEKIIRLKFTGWGRLSKVFLTEIYNDSMQYNILTALKDTNDNLMQLLSIKYTFSENIEKFNSFNKECNNKFNYENLVSGLMLSPSVKRPVWQTLLILKEITKIRKTQPAKIFIEVARGKESIPERKDSRKDKLLKVYDEFFKDKHNAEIIDEYSKDVAESLKAQDNTALRAQKLFLYYTQLGKCMYSGEDIDLASLNDVQKYDKDHIYPQSKTKDDSLDNLVLVKRKLNAVKSNDIISADIRKKMLPFWRLLYKNNLISAEKFNRLTRSTPLTNEELAGFINRQLVETRQATKIVANLLKELFPNTEIITVNAKAVSDFRKNQLQAVKVRSINDLHHAQDAYLNIVVGNVYYEKFTNNPLKWLNNENRNNYSLNKMFDYDIRKKDEIVWLSGEEGSIKTVKAMYNKNNILYTRYATCNKGAFFDQQIKGPKDNPSIPLKKGLDLKYGGFKSVTPAYFALVESEDKKGAKQRSIEAVPLYLAKQFEKNKQIYVDYCAEKYGLKNPVIILPKIKKDSLFVVDSYPMHLRGSNGRQLIMQNAVQLRIGTEEQKYFKRIEKYIANNLVRKDKRTLLTIRNSEGITRENNIRSYDILLEKQMNTIYNKRPASQLKTLVNGRDKFVNCTLEEQCILLNEILHLLQCKPLTADLSLVSGSKHAGNFQVNKVITNAKNAMLINQSVTGLFEKNIDLLTVQK

SEQ ID NO: 20429 - protein, 1355 aa, unidentified
  REGION 1..1355: note = Cas Enzyme sequence
MESRYYIGLDIGTDSVGWAATNPKYEILKFKGKLMIGSRLFDSANTAEDQRLYRSNTRRLDRKKWRIQLLQELFAPEISKVDFGFFQRLKDSFLKDEDKAVFQKNMLFNDKNYNDKDYHRDFPTIYHLRKALIENKKEYDVRLVYIALHHLIKHRGHFLFQGSMSQAISFKEVFRTFKEAVFSEFELEINCKNEDELQGVLKNKRLSKKEKTNKIMSLLDSDRTDKRLKGIIGLICGSKVSLNDIFGDSVQSEEPLKISFAEKPYDEVRPEIENALYEQCNTVDVFKAVYDWAILADILSEGDFNGKNYLSVAKVKIYDKHKKDLEILKNIFKSYSKSLYNQFFRSEKENDNYSAYIGSTKFGKEKFSVKRCTQEVFYKRVLKILKEIEVKSGCTENIKYIQKEIEAQTFLPLQVTKDNGVIPYQVNEAEAQIILNNVSKYLEFLNDEDSYGLTVKDKILKILTFRIPYYVGPLNQHSPRSWMERKNNGVITPWNFEEMVDVKKSAENFILRMTNKCTYLVGEDVLPKNSLLYSEFMVWNELNNVKVKGQKLNIELKKKFFEYYFKNQKSVTKNKLFEFLKTEGVKDIYKDDISGIDQGVFKSSLASYLSFKNIFGNEIEKYSVQQIAENCIRWITLYPDDRKMLKEIIRSNYDENQVSNEELEKIIRLKFTGWGRLSKAFLTEIYDDITQYNILTALKDTNDNLMQLLSIKYTFSENIEKFNSFNKECNNKFNYENLVSGLMLSPSVKRPVWQTLLILKEITRIRKTPPVKIFIEVARGKESIPERKDSRKEKLLKVYDEFFKDKHNAEIIDEYSKDVAESLKAQDNTALRAQKLFLYYTQLGKCMYSGEAIDLASLNDVQKYDKDHIYPQSKTKDDSLDNLVLVKRKLNAVKSNDIISADIRKKMLPFWRLLYKNNLISTEKFNRLTRSTPLTNEELAGFINRQLVETRQATKIVANLLKELFPNTEIITVNAKAVSDFRKNQLQAVKVRSINDLHHAQDAYLNIVVGNVYYEKFTNNPLKWLNNENRNNYSLNKMFDYDIRKRDEIVWLSGEEGSIKTVKAMYNKNNILYTRYATCNKGAFFDQQIKGPKDNPSIPLKKGLDLKYGGFKSVTPAYFALVESEDKKGAKQRSIEAVPLYLAKQFEKNQQIYVDYCAEKYGLKNPVIILPKIKKDSLFVVDSYPMHLRGSNGRQLIMQNAVQLRIGTEEQKYFKRIEKYIANNLVRKDKRTLLTIRNSEGITRENNIRSYDILLEKQMNTIYNKRPASQLKTLVNGRDKFVNCTLEEQCILLNEILHLLQCKPLTADLSLVSGSKHAGNFQINKVITNAKNAMLINQSVTGLFEKNIDLLTVQK

SEQ ID NO: 20430 - protein, 1314 aa, unidentified
  REGION 1..1314: note = Cas Enzyme sequence
MSDYYIGLDVGTNSVGWAVTDTDYQVLRFKGNSMWGARLFEEAVPAADRRAKRTSRRLLWRKQQRLQLLEMLFNNEICKVDPLFFIRMHNSNLKGTDRQSAWGDYTLFSDKTKEKEFHKKYPTFYHLRYELIKSKEPHDPRLIFLALHHILKNRGHFLFGMDDSSNYKKTGDLLDDLNQYLLDQHGKELQFLDKPKFQQIICNSKLSITEKKKLLKSTVQAVLPQEDDDIDISLISDALTGAKVKFSDLFNDESLKKAEPASFSLKDDLDEKYDEYYAVIGERIDLLLLLKSIFDAALLEQILGKHEYICEAKIEQYNLNKQDLKLLKRYVRELAPKKYKSIFDEKKDKLNNYAAYAGRTIGSGEYRCKKEDFCKYLKKELADMKNEPAYEELYKKIENDSLLPKLRGSENSVIPNQLQRRELTKILDNAESYLHFLQDKDENGLTIKEKIISIFDFRIPYYVGPLNKKSAHHWVERSDEKIYPWNFEKVVDLETSAERFIVNLTNRCTYTGDDVLPKDSLLYSKYMVLNELNPLKINGNPATVEQKKYVYDYLFVKNNNKVTKKGIKKCLLTAGLIAENDEITGVDDTIKSKLKSLHDFRTILDRHKDESMVEEIIQRVLVFGEDKKMLRNWLKRNYPCLSEEEIRSVCRMKYKDWGRLSKTFLTEIYSSDKNGEAKSIMDLLYNSNCNLNQLLSSEYSFKDNAEAYRQDKYGVKNSIRDMMDDMYLSPAVKRSIIQTLRIVDEIVDIKKSAPKKIFIEVAREHKDDEKGKRTKSRKDKLMELYHNCGQECNELFEQLRDHTDDSALRKDKLYLYYTQFGKCMYSGESISLDELDRGYDIDHIFPQSRVKDDSIDNRVLVKRQLNENKGNRYPIQEDIRTKMYTFWSMLKERAMISDKKYERLIRNYPLTDGELAAFVERQLVETRQSTRALAQILKNLYGEAGTKLVYSKAGNVSDFRQEFKFVKCRDINDLHHAKDAYLNIVVGNVYDTKFTENFFRNIHKENYSLNKVFSYVVPGAWEPERSAAVVRKMMDKNNILITRKAHMAKGQLSDQQLMPAGKGQLPIKQGMDVNLYGGYNKISGAYFCVVAHKDKKGNELRTIEPVYIYQQKLYERDPIRYCKEILGLNNPQIISPCILMDALLEIDGKKVNITGRFNDYILFKHAYQLIIGKSEEQYVKNIIKYVQRCEKSKKELPATTYDGINSEQNQVLWTHLLQKMSQKVYYQFFDDIHQECSIKSDVFSKLGLLDQCKQIQEILKLFKCDSRLANLSYIGGKNSKGKIYENKKLSMVKSAFLIHQSVTGLFEVKEDLLR

SEQ ID NO: 20431 - protein, 1187 aa, unidentified
  REGION 1..1187: note = Cas Enzyme sequence
RYELIKSKEPHDPRLIFLALHHILKNRGHFLFGMDDSSNYKKTGDLLDDLNQYLLDQHGKELQFLDKPKFQQIICNSKLSITEKKKLLKSTVQAVLPQEDDDIDISLISDALTGAKVKFSDLFNDESLKKAEPASFSLKDDLDEKYDEYYAVIGERIDLLLLLKSIFDAALLEQILGKHEYICEAKIEQYNLNKQDLKLLKRYVRELAPKKYKSIFDEKKDKLNNYAAYAGRTIGSGEYRCKKEDFCKYLKKELADMKNEPAYEELYKKIENDSLLPKLRGSENSVIPNQLQRRELTKILDNAESYLHFLQDKDENGLTIKEKIISIFDFRIPYYVGPLNKKSAHHWVERSDEKIYPWNFEKVVDLETSAERFIVNLTNRCTYTGDDVLPKDSLLYSKYMVLNELNPLKINGNPATVEQKKYVYDYLFVKNNNKVTKKGIKKCLLTAGLIAENDEITGVDDTIKSKLKSLHDFRTILDRHKDESMVEEIIQRVLVFGEDKKMLRNWLKRNYPCLSEEEIRSVCRMKYKDWGRLSKTFLTEIYSSDKNGEAKSIMDLLYNSNCNLNQLLSSEYSFKDNAEAYRQDKYGVKNSIRDMMDDMYLSPAVKRSIIQTLRIVDEIVDIKKSAPKKIFIEVAREHKDDEKGKRTKSRKDKLMELYHNCGQECNELFEQLRDHTDDSALRKDKLYLYYTQFGKCMYSGESISLDELDRGYDIDHIFPQSRVKDDSIDNRVLVKRQLNENKGNRYPIQEDIRTKMYTFWSMLKERAMISDKKYERLIRNYPLTDGELAAFVERQLVETRQSTRALAQILKNLYGEAGTKLVYSKAGNVSDFRQEFKFVKCRDINDLHHAKDAYLNIVVGNVYDTKFTENFFRNIHKENYSLNKVFSYVVPGAWEPERSAAVVRKMMDKNNILITRKAHMAKGQLSDQQLMPAGKGQLPIKQGMDVNLYGGYNKISGAYFCVVAHKDKKGNELRTIEPVYIYQQKLYERDPIRYCKEILGLNNPQIISPCILMDALLEIDGKKVNITGRFNDYILFKHAYQLIIGKSEEQYVKNIIKYVQRCEKSKKELPATTYDGINSEQNQVLWTHLLQKMSQKVYYQFFDDIHQECSIKSDVFSKLGLLDQCKQIQEILKLFKCDSRLANLSYIGGKNSKGKIYENKKLSMVKSAFLIHQSVTGLFEVKEDLLR

SEQ ID NO: 20432 - protein, 1320 aa, unidentified
  REGION 1..1320: note = Cas Enzyme sequence
MKISGNREKVSDYYIGLDVGTNSVGWAVTDTEYNILKFRGNAMWGARLFEKANPAAERRQYRIARRLNKRRKQRLEWLELLFDEEISKTDPSFFIRLKESSLLNEDKTHRADFPIFNDSDYTDKDYYKDCPTAYHLRNELIESDKPHDIRLVFLALHHIIKSRGHFLFDMELSDEYKTVDIMLDEFTDRVFEAYGVKLGFADKEKFVSVLSSGNLGINAKKKLLRDGVTIEGESDDIDFALAIDSLSGAAINLSKLFFDEELKDSGKFSLNEDLDEALGETAALLGEESTELLRMLKEIFDSGKLAQMLGGHQYICEAKVERYETNKRDLKRLKEYVRKNAPDKYREIFCDKKDKLNNFAAYSGKTLESGDYSCKQEDFCKYIKKTLPELKNDSEFADIYAKLDNNTLLSKLKGADNGVIPYQLHLKELKKILDNAENYLELLKQTDENGVSVKEKIISVFSFRIPYYVGPLNKNAAHSWVVRTDEKIYPWNFNRVVDTEKSSEGFIINLISKCGYTGEEVLPKESLLFSEYCVWNEINPLKVNGEKISPEIKKEIFDELFLKSNSKVTAKLIKGFLLKKCYIKPEDEISGVADILKSRLKSYHSLSKIMSVEENYETAENIIRAVTIFGDDKKLLKGWLKRNCPSLDERQTAAVCRLSFSGWGSLSKTLLTEIYSPDENGEARSIMDMLRSTDNNLMQLLSNSFKFAENAEAHLKEKCGERESLREMIEDMYISPAVKRSLLQTVKIVDEITDIKKSAPKKIMIEVARDREGDNAKKATVSRRERLLGLYKACRDEYPELYKAIEAADEGDLRRDALYLYYTQFGKCMYSGEKISLERLDSDYDIDHIFPQSRIKDDSIDNRVLVKKICNREKSNEYPIKSDWQKNMQPFWRMLKDKGYISQKKYDRLTRRTPLTEEELSAFVARQLVETRQSTKALAEIFKTMYGAAGTKVVYSKAGNVSEFRQEFKLIKCRDANDLHHAKDAYLNIVVGNVYDTKFTDAFFKNIRNENYSLTKVFEYSVPGAWDKDKSIAAVKSVMRKNNILATRMPHETRGALYDLQLMPAGKGQLPSKSGKPIEKYGGYNKVKVAYFFVAEHTEKKARVRSIQPVYIYKKALYEKDPIAYCTEILGLCDPKIIYPRLLIHATVEIDGKRLGICGKSENYLLCRHEYQLAVSPADERYIKEISKYIARSAAERAENGIRLAPDSEICSEKNTELYRLFLRKLETQVYNRLHDGQLKKLKAKEEAFAELPLVAQCKMLLEILKLFKCDRQTSDFSAIGEGANCGNLREHNSLKKVHSAFAICSSVTGLYSRRVDLLK

SEQ ID NO: 20433 - protein, 1326 aa, unidentified
  REGION 1..1326: note = Cas Enzyme sequence
MKSNGNQKRISDYYIGLDVGTDSVGWAVTDPEYNVPRFRGNAMWGVRLFESANTAAERRQQRTARRLNARKRQRLGLLELLFAEEISKTDPAFFIRMKESSLFGEDKTEISEYPLFNDENYDDRNYFKAYPTAYHLRNELISSDKPHDVRLVYLAIHHILKSRGHFLFDMELSDEYRTVGDLLDDFTERFRDEYGAEVKFKDKAAFVSVITDRNTGITEKKKLIKGLASVKSETEQLDQLDPMKALDMLTGAAVRLSDLFCDEDLKSAKSLTLDSDINEAADDLTETLGEGRFDLIMQLKQIFDAAKLAQMLGSHQYICEAKVEQFNTSKSDLRRLKVFVKENAPDEYNEIFCQKKDKLNNYAAYSGRTRRSGEYSCKREDFCKYLLKKLPGLEIADGYGDIFRKIKNNDFLPKLKGSENSVIPNQLHLKELRKILDNAEHYLEFLSAKDSEGISVKEKIISVFGFRIPYYVGPLNTKSPNSWVVRTDEKIYPWNFENNVDTEKSAEEFIKKLINKCPYTGDDVLPRESLLYSEFCVLNEINPLTVNGKPIPLEQKNEIFDELFLKSHSKVTKKSIGKFLLRKGYIKEGDEISGIDDTVKSKLKSYHDFSRIMDVRENREMAEKIIKAVTVFGDDRKMLKRWLKKNCGDLEKSQVDSICRLSYSDWGNLSETLLNGIYTPDENGEARSVIQMLHETNDNLMQLLSNKYYFGENAEKYRNEKYAPSGSLIDMMDGMYLSPTVKRSLLQSIKIVDEIVDAEKSAPRKIFIEVARDRENDNAKERTVSRKAKLTELYKSCGKEYTELYNELLSRDESELRKDALYLYYTQLGICLYSGEKIELEKLSTDYDIDHIFPQSRIKDDSLDNRVLVKRKYNEEKGNNYPLNEEWQNKNKPLWRMLRDKHLISDKKYERLVRIEKLTEEELSSFVARQLVETRQSTKALCAILKTFYGDAGTKIVYSKAGNVSDFRHDNNIVKCRDVNDLHHAKDAYLNIVVGNVYDTKYTENFFRNIKKYADSDIYSLNAVFRFDVNGAWDKKRSMAKVKSVLQKNNILVSRRSYEAKGALFDLQIVPAGKGQLRIKEDKPIEKYGGYNKITGAYYCVVEHTVKGKRSRSIEPVFLYKKALYERDPAAYCREILSLEESEIIYPKLLTGALLEIDGKRLYICGRTGDSLVCKHDYQLALSASDEKYIKALSKHVSRCNTEKSDDVPLSLNSDISKENNMKLYELFLAKLQAPVYFRLFSNQLEKLMSGADKFREFPLTLQCRFLLEILKLFKCDRQVTNLSAIDGPSKSGTITINKSLDKVKSAFLINSSVTGLYRYKTDLLK

SEQ ID NO: 20434 - protein, 1326 aa, unidentified
  REGION 1..1326: note = Cas Enzyme sequence
MKSNGNQKRISDYYIGLDVGTDSVGWAVTDPEYNVPRFRGNAMWGVRLFESANTAAERRQYRTARRLNARKRQRLGLLELLFAEEISKTDPAFFIRMKESSLFGEDKTEISEYPLFNDENYDDRNYFKAYPTAYHLRNELISSDKPHDVRRVYLAIHHILKSRGHFLFDMELSDEYRTVGDLLDDFTERFRDEYGAEVKFKDKAAFVSVITDRNTGITEKKKLIKGLASVKSETEQLDQLDPMKALDMLTGAAVRLSDLFCDEDLKSAKSLTLDSDINEAADDLTETLGEGRFDLIMQLKQIFDAAKLAQMLGSHQYICEAKVEQFNTSKSDLRRLKVFVKENAPDEYNEIFCQKKDKLNNYAAYSGRTRRSGEYSCKREDFCKYLLKKLPGLEIADGYGDIFRKIKNNDFLPKLKGSENSVIPNQLHLKELRKILDNAEHYLEFLSAKDSEGISVKEKIISVFGFRIPYYVGPLNTKSPNSWVVRTDEKIYPWNFENNVDTEKSAEEFIKKLINKCPYTGDDVLPRESLLYSEFCVLNEINPLTVNGKPIPLEQKNEIFDELFLKSHSKVTKKSIGKFLLRKGYIKEGDEISGIDDTVKSKLKSYHDFSRIMDVRENREMVEKIIKAVTIFGDDRKMLKRWLKKNCGDLEKSQVDSICRLSYSDWGNLSETLLAGIYTPDENGEARSVIQMLHETNDNLMQLLSDRYYFRKNADEYRNENYAPSGSLIDMMDGMYLSPTVKRSLLQSIKIVDEIVDAEKSAPRKIFIEVARDRENDNAKERTVSRKAKLTELYKSCGKEYTELYNELLSRDESELRKDALYLYYTQLGICLYSGEKIELEKLSTDYDIDHIFPQSRIKDDSLDNRVLVKRPYNEEKGNKYPLKKEWQNKNKPLWRMLRDKHLISDKKYERLVRDTHLTEEELSSFVARQLVETRQSTKALCAILKTFYGDAGTKVVYSKAGNVSDFRHDNNIVKCRDVNDLHHAKDAYLNIVVGNVYDTKYTENFFRNIKKYADSDIYSLNAVFRFDVNGAWDKKRSMAKVKSVLQKNNILVSRRSYEAKGALFDLQIVPAGKGQLRIKEDKPIEKYGGYNKITGAYYCVVEHTVKGKRSRSIEPVFLYKKALYERDPAAYCREILSLEEPEIIYPKLLTGALLEIDGKRLYICGRSNDSLLCKHDYQLALSASDEKYIKALSKHVSRCNAEKNDDVPLSLNSDISKENNMKLYELFLAKLQAPVYFRLFSNQLEKLMSGADKFREFPLTLQCRFLLEILKLFKCDRQLTDLSAIEGPSKSGTVKFTKSLDKVKSAFLINSSVTGLYRYKTDLLK

SEQ ID NO: 20435 - protein, 1324 aa, unidentified
  REGION 1..1324: note = Cas Enzyme sequence
KMQRDYYVGLDIGTDSIGWAVTDTNYRLLKFKENAQWGIRLLEESNTAEERRAFRSARRRTMRNRFRTECLQLLFSKEISKSDPSFFARINDSDLWAEDKSVEGKYSLFNDKNFNDKDYFIKYPTIYHLRKAFLDGEKISDVRLLYLAISHIIKNRGHFLFDSASLGDNAIPNFSDVWIELTNYLSDTYSVELVCKNIDDVKDVLKDRKLNVTSRKTRLSELFNIGKADEPAASIIGLLSGASVKSSAIFQNKEYDGTEVEKIDFKSNYDEKSVLYESAFGESFYLIELLKSVYDWALLADVLNDEKYLSYAKVDIYDKHRADLTILKEYVKKYAPDKKDAIFKKNQSGTCNYVAYSGHLSKGSVEKKCSQSDFLDFLKKQLPAEPAEEKYQKMYSEIALKTFMPKSVTKDNSVIPMQINKAELTRILDNAGEAFPFLNKIDESGKTVKQEIIDIFLFKIPYYVGPLNTHSDKSWLVRNKDKIYPWNFDRVVDVDKSAEKFIENLTNKCTYLVTKDVLPKNSLLYSKFTVLNELNNLKINGHEIPVGLKQSIYNDLFLNHNKVTNKGLLKYLKSKGYEDAEISGIDGDFKSNLKSFREMSQYNISTDDKEKIIKYITIFGDDKKMLRRKLTELFKDKLKKEEIDSVVKLKFAGWGRLSRELLSELSAVSKVTGEVSTIIDFMWTTNNNLMQLLSNDFGFTKAIADANGPAEFTSLKNEVEALYVSPKVKRPIYQSMQILEELVKINGCEPKRIFVEVARGEEKEKTRKVSRKSRLLELYNNCKKEYPGLYTKLKNTDDNDLRRDALYLYYTQFGKCMYTGKTIDISELDNKNLYDIDHIYPRSKLKDDSLNNRVLVTKQSNEEKGNVYPLSRDVQSKMHGFWRMLLDKGLIGDEKYERLTRTFPLTDDELSAFINRQIVETRQSTKAIAQLLEKRYSSEIVYVKANLVSEFRKKYDFVKSRVVNDLHHAKDAYLNIVVGNVYNTRYNHNRLFFIRGIQEGKLSANRIFDYAVEDAWSVEDGNRSIDTVKSMMAKNNIRFTRYSFMQKGGLFKQTIQKKGSGQVPLKKNLPKSDIQKYGGYDKATSTFFALTSYKDEKGKPVRAFVPVNLYSVTDYNKEPENYLKSVLLTMGAKATELSVIIPCVKYNQLFSLDGFRMHISSKSGGGRQLICKSAMQLVLDPDSEKYIKKVTEYMKKCEELKIEKPVTEYDGLSAAENVKLYSKLIEKTSGTVLKVKFSNIANLLCDGKQKFEALSVYKQCYVLLEILKILHCNATLGNTEDIGGSGKSGAVTISNKLPSADKAKSFKLINQSITGLFEKETELI

SEQ ID NO: 20436 - protein, 1316 aa, unidentified
  REGION 1..1316: note = Cas Enzyme sequence
MKEYYVGLDIGTDSIGWAVTDTQYNVLKFRGNSMWGVRLFDESKTAQERRMFRAARRRNLRRRKRLDLLEMLFDKEISAKDVSFFKRLKESSLYYEDKSVGTTYAVFADKDYTDKDYYKQYPTIYHLRADLIKNPAEHDVRLVFLALHHLLKNRGHFLFDNLSVTDIESFDKIFGELTEYLSDNYDISLTCNDSNELSEILKDRSVGKVKKTAKILECCGVTKKSNPQLAAILSTLSGSSVKLADIFCDDTLKEGECKTVSFSGKYEDSEAALESTLGERFELIEKLKAIYDWAILEEIRKGEKYISFAKVKSYNEHHNDLVMLKDYVKTYYPDKYSRIFRKSEPKLANYTAYCGKIKKNGHNGVLEEKCTQEEFCAFLKKELPKNDDERFTNMFEKIETSSFMPKQVTKDNGVIPMQINRAEVVAILDNAKEYLSFLNECDENGISVCQKILDIFDFRIPYYVGPLNKHSDKSWLVRKAGAITPWNFKDIVDVDKSAEEFINRLTSKCTYLPDKDVIPKNSLLYSKFMVLNELNNLRINGSKIDVEVKQAIYNDLFMTKKRVTQKALKNYFKSKGNDDVEITGIDGDFKSNLKPFIDLASYNISDEEKEDIINSITIFGDDKRLLRKRLTERYSDKLSENDILRISKLKYSSWSSLSKEFLTDIYGTNLETGEHFNIINALWETNDNLMVLLGSAYNFAEAVENASESDSDISMKTMVENLYVSPKVKRPIYQSLKIVKEIVKIMGCAPKKFFVEVARGPEEKKRTVSRKTKLVELYKNCKKESEELYNQLVETPENEFKRDKLYLYYTQFGKCMYTGEPISLDSLYDNNIYDIDHIFPRSKVKDDSLDNRVLVKKVVNADKDNVYPLSAETHKKMYSHWKFLLDKELISKKKFERLTRNYPLSDEELADFISRQLVETRQSTKAVASILKSLYKEFGSEVVYSKAGLVSDFRQDYDMLKCREVNDLHHAKDAYLNIVVGNVYNERFTHNKANFIKGLQNKTYSLNAMFNYNVKNAWIADNNISISTVKKYMNKNNILYTRYSYIQKGGLFDQMPVKKGKGQVPLKLNSPKEDISKYGAYNRPSSAFFAFVEYPGKKGKSIRALIPVDSYRLTEYNSNPNKFMNELLETNEAKVLIKCVKYNSCLSFNGCRMHISSKSGGGKTIVYKPAVQLVVGYKWEKYIKNVAKLMKKGENEEITEFDGVSAEENIELFDILVNKMINTVMKFNLGSIGAKIAKKKEVFSSLSVWQQCFVLLQVLNIIHANVLTGDLKLIKESGQAGTSTTNSKLSEIKNVDSIKLINQSVTGLFETEVNLI

SEQ ID NO: 20437 - protein, 1317 aa, unidentified
  REGION 1..1317: note = Cas Enzyme sequence
MKSQKDYYIGLDVGTDSVGWAVTDTDYNILKFKGNAQWGIRLLDESNTAEERRAFRSSRRRTQRNKFRVQCLELLFNKEISKKDVAFYQRLHDSNLWEEDKNVAGKYSLFNDEGFTDKDYYKLYPTIYHLRKKLVESQAPVDIRLLFLAVSHIVKNRGHFLFDSDSLGNNSVPSFNEVWRELAVYIADEFNVELECKDICVIGDILKNKNLSITTKKTMLLNEFSVAKKEEPANSIITLLAGGTANSADLFSNEELKNSEASKITFSSGYDEKVTVYESVFGDGFELLEKMKAVYDWAILADILNNQKYISFAKCEIYDKHKKDLKMLKEYVNAYIPEKYNLIFNENKSGTFNYLAYSGYSKKNPVEKKCQQQDFLDFLKKQLPKDAKNKKYEQMYSEIALGTFMPKIISKDNAVIPMQVNKAELMVILENASNYFPFLNEKDLDGKSVKDKILDVFSFRIPYYVGPLNKHSDKAWLERTNEKIFPWNFGNVVNVDKSAEKFIENLTSKCTYILKADVLPKNSLLYSKFAVLNELNNLKIDGEKIPVDLKQKIFIELFEKNNRVTSARLKKYLKSYGVEGEITGIDGDFKNSLKSYRDLKGFELTESEKEEVIKAITIFGDDKGLLKRRLNTLFGEKLSKEDIAKISKLKYSGWGRLSKEFLNEIQGACAETGEVNSVIGFMWETNNNLMQLLSNEYGFIKAIDEANGEMQFTSLKKEIEALYVSPKVKRPIYQAMKIVEELVKINGCTPKKIFVEVARGAEEKKHTVSRKNRLLELYKSCKKDNEELYNAIADTDEDEFRRDALYLYYTQFGKCMYTGKSIPLSEIYNKHLYDIDHIFPQSKLKDDSLDNRVLVTKKSNEDKGNIYPIAQSIREERAAFWKMLLDKGLISLKKYERLVRNSPLTDDELTSFINRQLVETRQSTKAISQLLSKRYESEIVYVKAGLVSDFRKKYDFIKCREINDFHHAKDAYLNIVVGNVYNTRFNHNRLAFISKLQSGEVSLNGMFNYDTTGAWVAFGTNKSIDTVKNTMSKNNIRFTRYAFKQKGGLFKQNILKKGNGQVPVKANSALSDINKYGGYDKAISTCFSLVSYVNDKGEKVKQFVPIDLHEENKYLQNTKKFIDEKLSVDSTIIIPCIKYNTLISIDGFRMHLSAKSGDSQIICKPGMQLVLDNTSENYIKKIVNYLNKCAELKCEKTITVFDGISFDLNMQVYDALSVKLNNTVLNVKFANTANVIKKRKDVFKELSLREQCVVLMQLLSILHSNASLGDLTLICESKQSGRVSINSKIIPNKTAKSIKIINQSITGLFEQEIELLD

SEQ ID NO: 20438 - protein, 1316 aa, unidentified
  REGION 1..1316: note = Cas Enzyme sequence
MKEYYVGLDIGTDSIGWAVTDTQYNVLKFRGNSMWGVRLFDESKTAQERRMFRAARRRNLRRRKRLDLLEMLFDKEISAKDVSFFKRLKESSLYYEDKSVGTTYAVFAEKDYTDKDYYKQYPTIYHLRADLIENPAEHDVRLVFLALHHLIKNRGHFLFDNLSVTDIESFDKIFSELTAYLSDNYDISLTCNDSNKLSEILKDHSVGKVKKTAQILECCGVTKKGNPQIAAILSTLSGSSVKLADIFCDDTLKEGECKTVSFSGKYEDSEAALESTLGERFELIEKLKAIYDWAILEEIRQGEKYISFAKVKSYNEHHKDLVMLKDYVKTYCPDKYSRIFRKSEPKLANYTAYCGKIKKNGHNGVLEQKCSQEEFCVFLKKELPKNDDERFTNMFEKIETSSFMPKQVTKDNGVIPMQMNRAEVVAILDNAKEYLPFLNECDENGISVRQKILDIFDFRIPYYVGPLNKHSDKSWLVRKAGAITPWNFKEIVDVDKSAEEFINRLTSKCTYLPDKDVIPKSSLLYSKFMVLNELNNLRINGSKIDVDVKQAIYNDLFMTKKRVTQKALKNYFKSKGNDDVEITGIDGDFKSNLKAFIDLAQYNISDEEKEDIINSITIFGDDKRLLKKRLNERYSDKLSENDILRISKLKYSGWSSLSKEFLTDIYGTNLETGEHFNIIDALWETNDNLMVLLGSAYNFAEAVENARESDSNISMKTMVENLYVSPKVKRPIYQSLKIVKEIVKIMGCAPKKFFVEVARGPEEKKRTVSRKAKLVELYKNCKKESEELYNQLVETPENEFKRDKLYLYYTQFGKCMYTGEPISLDSLYDNKIYDIDHIFPRSKVKDDSLDNRVLVKKVVNAGKDNVYPLSAETHKKMYSHWKFLLDKELISKKKFERLTRNYPLSDEELADFISRQLVETRQSTKAVASILKSLYKEFGTEVVYSKAGLVSDFRQDYDMLKCREVNDLHHAKDAYLNIVVGNVYNERFTHNKANFIKGLQNKTYSLNAMFNYNVKNAWIADNNISISTVKKYMNKNNILYTRYSYIQKGGLFDQMPVKKGGGQVPLKLNSPKEDISKYGAYNRPSSAFFAFVEYPRKKGKSIRALIPVDAYRLTEYNSNPNKFMNELLETNEAKVLIKCVKYNSCLSFNGCRMHISSKSSGGKTIVYKPAIQLVVGYKWEKYIKNAAKLMKKGENEEITEFDGVSAEENIELFDILVNKMINTVMKFNLGSIGAKIANKKEAFSSLSVWQQCFVLLQILNIIHANVLTGDLSLIKEAGQAGKIYTNNKLSDIKTAYSIKLINQSVTGLFETEVNLI

SEQ ID NO: 20439 - protein, 1151 aa, unidentified
  REGION 1..1151: note = Cas Enzyme sequence
MKSRREQDYYLGLDIGTESVGYAVTDENYNILKFNGKNMWGSRLFDEAQTAAERRTFRSGRRRLQRRAWRIQLLQELFSEEISKVDQSFFVKMKESPLILTDKTNGQKYTLFNDDDYSDIDYYSEFPTIYHLRKALLMEDRKFDVRLLYLAVHHIVKHRGHFLFQGSVNNATSFHSVFDNLKICLRDEFEIELVCHSEEKIAEILKDKKKSKRDKCNEIFNELNVDKSNKQIKSIVTLITGMKAKVADIFDDESLLEIDKPSISFSESSYETLRVELEDVLGERCGVIDIIKCVYDWAILADILDDGEINGKSYLSVAKVNLYDKHKEDLRILKQLFKENHKVYKEFFVDEGKSNYCAYVGFVNSNGNKKNIKRCNREDFIKNLKGQLGKIEKTVSNQSEYEFIEQEIQADTILPIQVSKDNGVIPYQVQEIELKDILAKAEKYMPFLGVKDADGLSVSDKIIKIFEFRVPYYVGPLNSYNNTNSWMVRKSDGKITPWNFDNKVDKDASAEKFIRKMTNKCTYLIGEDVLPKHALLYEEFNVLNELNNVKIGANKMNVELKKDIIENLFKKKKKVTGRNLREYLKSEGLINDDEEITGFDINFKSSMSSYLDFKKILGDKIDNYSVKIMVEQIILWITVYGDEISILKRVIRKQYDDNQISDEEIKKVSRLKYQGWGRLSRKFLGEIEGADKETGEIRTVIGALRDTQDNLMQLLGQKYTFSETIENINNKNMKEIATISYKDIVEDIAASPSIKRAVWQVILISEEIRKIMGKEPAKIFVEVARGAGEKKRTVSRKDRLISLYESCKDESKDWKKELEQRPEDDFHSIKLYLYYTQMGRCMYSGEPIDLSRLSDANVYDRDHIYPQSKTKDDSLDNLVLVKRELNAKKSNGMISSEIQKDRHGFWKELLNKGFISQEKYYRLMRKDSLTDEELASFINRQLVEARQSSKIVIGLFNRMYPDSKVAYVKANLVSDFKNMDNVKITKVRSLNDYHHAKDAYLNIVVGNVYFEKFTNNPLQWLKKNRNAEYSLNQMFNYDLIKNDKVIWKRGNNGTLRDVLKNINKRDIQYTQQVTTIKRGQNGGLFNQQLVGKDENASMPVKKGRDVNIYGGYKSITPAFFTLIESEDKKGNKQRSIESVPLFMKNQFLNDS

SEQ ID NO: 20440 - protein, 1355 aa, unidentified
  REGION 1..1355: note = Cas Enzyme sequence
MKSRREQDYYLGLDIGTESVGYAVTDENYNILKFNGKNMWGSRLFDEAQTAAERRTFRSGRRRLQRRAWRIQLLQELFSEEISKVDQSFFVKMKESPLILTDKTNGQKYTLFNDDDYSDIDYYSEFPTIYHLRKALLMEDRKFDVRLLYLAVHHIVKHRGHFLFQGSVNNATSFHSVFDNLKICLRDEFEIELVCHSEEKIAEILKDKKKSKRDKCNEIFNELNVDKSNKQIKSIVTLITGMKAKVADIFDDESLLEIDKPSISFSESSYETLRVELEDVLGERCGVIDIIKCVYDWAILADILDDGEINGKSYLSVAKVNLYDKHKEDLRILKQLFKENHKVYKEFFVDEGKSNYCAYVGFVNSNGNKKNIKRCNREDFIKNLKGQLGKIEKTVSNQSEYEFIEQEIQADTILPIQVSKDNGVIPYQVQEIELKDILAKAEKYMPFLSVKDADGLSVSDKIIKIFEFRVPYYVGPLNSYNNTNSWMVRKSDGKITPWNFDNKVDKDASAEKFIRKMTNKCTYLIGEDVLPKHALLYEEFNVLNELNNVKIGANKMNVELKKDIIENLFKKKKKVTGRNLREYLKSEGLINDDEEITGFDINFKSSMSSYLDLKKILGDKIDNYSVKIMVEQIILWITVYGDEISILKRVIRKQYDDNQISDEEIKKVSRLKYQGWGRLSRKFLGEIEGADKETGEIRTVIGALRDTQDNLMQLLGQKYTFSETIENINNKNMKEIATISYKDIVEDIAASPSIKRAVWQVILISEEIRKIMGKEPAKIFVEVARGAGEKKRTVSRKDRLISLYESCKDESKDWKKELEQRPEDDFHSIKLYLYYTQMGRCMYSGEPIDLSRLSDANVYDRDHIYPQSKTKDDSLDNLVLVKRELNAKKSNGMISSEIQKDRHGFWKELLNKGFISQEKYYRLMRKDSLTDEELASFINRQLVEARQSSKIVIGLFNRMYPDSKVAYVKANLVSDFKNMDNVKITKVRSLNDYHHAKDAYLNIVVGNVYFEKFTNNPLQWLKKNRNAEYSLNQMFNYDLIKNDKVIWKRGNNGTLRDVLKNINKRDIQYTQQVTTIKRGQNGGLFNQQLVGKDENASMPVKKGRDVNIYGGYKSITPAFFTLIESEDKKGNKQRSIESVPLFMKNQFLNDSNSCMEYFENVYGLKNPKVVISQIRKNTYLIIDDFPVLLRGSTGKQLILQCAVQLMVSQEQERYLKKLEKYIQKNSQRKDKKQNLPVTEYDGLTQESNIRIYDTFIDKLTNTIYSKRPANPVDKLKNKREIFEQLSVECQCIVLNEILHLFQCKPIMGADLSMLGEAKATGIITKNKIISTCNNVIIVNQSVTGLFKQETDLLNI

SEQ ID NO: 20441 - protein, 1355 aa, unidentified
  REGION 1..1355: note = Cas Enzyme sequence
MKSRREQDYYLGLDIGTESVGYAVTDENYNILKFNGKNMWGSRLFDEAQTAAERRTFRSGRRRLQRRAWRIQLLQELFSEEISKVDQSFFVKMKESPLILTDKTNGQKYTLFNDDDYSDIDYYSEFPTIYHLRKALLMEDRKFDVRLLYLAVHHIVKHRGHFLFQGSVNNATSFHSVFDNLKICLRDEFEIELVCHSEEKIAEILKDKKKSKRDKCNEIFNELNVDKSNKQIKSIVTLITGMKAKVADIFDDESLLEIDKPSISFSESSYETLRVELEDVLGERCGVIDIIKCVYDWAILADILDDGEINGKSYLSVAKVNLYDKHKEDLRILKQLFKENHKVYKEFFVDEGKSNYCAYVGFVNSNGNKKNIKRCNREDFIKNLKGQLGKIEKTVSNQSEYEFIEQEIQADTILPIQVSKDNGVIPYQVQEIELKDILAKAEKYMPFLGVKDADGLSVSDKIIKIFEFRVPYYVGPLNSYNNTNSWMVRKSDGKITPWNFDNKVDKDASAEKFIRKMTNKCTYLIGEDVLPKHALLYEEFNVLNELNNVKIGANKMNVELKKDIIENLFKKKKKVTGRNLREYLKSEGLINDDEEITGFDINFKSSMSSYLDFKKILGDKIDNYSVKIMVEQIILWITVYGDEISILKRVIRKQYDDNQISDEEIKKVSRLKYQGWGRLSRKFLGEIEGADKETGEIRTVIGALRDTQDNLMQLLGQKYTFSETIENINNKNMKEIATISYKDIVEDIAASPSIKRAVWQVILISEEIRKIMGKEPAKIFVEVARGAGEKKRTVSRKDRLISLYESCKDESKDWKKELEQRPEDDFHSIKLYLYYTQMGRCMYSGEPIDLSRLSDANVYDRDHIYPQSKTKDDSLDNLVLVKRELNAKKSNGMISSEIQKDRHGFWKELLNKGFISQEKYYRLMRKDSLTDEELASFINRQLVEARQSSKIVIGLFNRMYPDSKVAYVKANLVSDFKNMDNVKITKVRSLNDYHHAKDAYLNIVVGNVYFEKFTNNPLQWLKKNRNAEYSLNQMFNYDLIKNDKVIWKRGNNGTLRDVLKNINKRDIQYTQQVTTIKRGQNGGLFNQQLVGKDENASMPVKKGRDVNIYGGYKSITPAFFTLIESEDKKGNKQRSIESVPLFMKNQFLNDSNSCMEYFENVYGLKNPKVVISQIRKNTYLIIDDFPVLLRGSTGKQLILQCAVQLMVSQEQERYLKKLEKYIQKNSQRKDKKQNLPVTEYDGLTQESNIRIYDTFIDKLTNTIYSKRPANPVDKLKNKREIFEQLSVECQCIVLNEILHLFQCKPIMGADLSMLGEAKATGIITKNKIISTCNNVIIVNQSVTGLFKQETDLLNI

SEQ ID NO: 20442 - protein, 1355 aa, unidentified; identical to SEQ ID NO: 20441
  REGION 1..1355: note = Cas Enzyme sequence

SEQ ID NO: 20443 - protein, 1355 aa, unidentified
  REGION 1..1355: note = Cas Enzyme sequence
MKSRREQDYYLGLDIGTESVGYAVTDENYNILKFNGKNMWGSRLFDEAQTAAERRTFRSGRRRLQRRAWRIQLLQELFSEEISKVDQSFFVKMKESPLILTDKTNGQKYTLFNDDDYSDIDYYSEFPTIYHLRKALLMEDRKFDVRLLYLAVHHIVKHRGHFLFQGSVNNATSFHSVFDNLKICLRDEFEIELVCHSEEKIAEILKDKKKSKRDKCNEIFNELNVDKSNKQIKSIVTLITGMKAKVADIFDDESLLEIDKPSISFSESSYETLRVELEDVLGERCGVIDIIKCVYDWAILADILDDGEINGKSYLSVAKVNLYDKHKEDLRILKQLFKENHKVYKEFFVDEGKSNYCAYVGFVNSNGNKKNIKRCNREDFIKNLKGQLGKIEKTVSNQSEYEFIEQEIQADTILPIQVSKDNGVIPYQVQEIELKDILAKAEKYMPFLSVKDADGLSVSDKIIKIFEFRVPYYVGPLNSYNNTNSWMVRKSDGKITPWNFDNKVDKDASAEKFIRKMTNKCTYLIGEDVLPKHALLYEEFNVLNELNNVKIGANKMNVELKKDIIENLFKKKKKVTGRNLREYLKSEGLINDDEEITGFDINFKSSMSSYLDFKKILGDKIDNYSVKIMVEQIILWITVYGDEISILKRVIRKQYDDNQISDEEIKKVSRLKYQGWGRLSRKFLGEIEGADKETGEIRTVIGALRDTQDNLMQLLGQKYTFSETIENINNKNMKEIATISYKDIVEDIAASPSIKRAVWQVILISEEIRKIMGKEPTKIFVEVARGAGEKKRTVSRKDRLISLYESCKDESKDWKKELEQRPEDDFHSIKLYLYYTQMGRCMYSGEPIDLSRLSDANVYDRDHIYPQSKTKDDSLDNLVLVKRELNAKKSNGMISSEIQKDRHGFWKELLNKGFISQEKYYRLMRKDSLTDEELASFINRQLVEARQSSKIVIGLFNRMYPDSKVAYVKANLVSDFKNMDNVKITKVRSLNDYHHAKDAYLNIVVGNVYFEKFTNNPLQWLKKNRNAEYSLNQMFNYDLIKNDKVIWKRGNNGTLRDVLKNINKRDIQYTQQVTTIKRGQNGGLFNQQLVGKDENASMPVKKGRDVNIYGGYKSITPAFFTLIESEDKKGNKQRSIESVPLFMKNQFLNDSNSCMEYFENVYGLKNPKVVISQIRKNTYLIIDDFPVLLRGSTGKQLILQCAVQLMVSQEQERYLKKLEKYIQKNSQRKDKKQNLPVTEYDGLTQESNIRIYDTFIDKLTNTIYSKRPANPVDKLKNKREIFEQLSVECQCIVLNEILHLFQCKPIMGADLSMLGEAKATGIITKNKIISICNNVIIVNQSVTGLFKQETDLLNI

SEQ ID NO: 20444 - protein, 1350 aa, unidentified
  REGION 1..1350: note = Cas Enzyme sequence
MKSRREQDYYLGLDIGTESVGYAVTDENYNILKFNGKNMWGSRLFDEAQTAAERRTFRSGRRRLQRRAWRIQLLQELFSEEISKVDQSFFVKMKESPLILTDKTNGQKYTLFNDDDYSDIDYYSEFPTIYHLRKALLMEDRKFDVRLLYLAVHHIVKHRGHFLFQGSVNNATSFHSVFDNLKICLRDEFEIELECHSEEKIAEILKDKKKSKRDKYNEIFNELDADKSNKQIKSIVTLISGMKAKVADIFADESLLEIDKPSISFSESSYETLRVELEDVLGERCGVIDIIKCVYDWAILADILADGEINGKSYLSVAKVNLYDKHKEDLRILKQLFKENNKVYKEFFVDEGKSNYCAYVGFVNSNGSKKNIKRCNREDFIKNLKNQLGKIEKTVSNQSEYEFIEQEIQADTILPVQISKDNGVIPYQVQEMELKDILAKAEKYMPFLSEKDANGLSVSDKIVEIFKFRVPYYVGPLNGYNNTNSWMVRKSDGKITPWNFDNKVDKDASAEKFIREMTNKCTYLVGEDVLPKHALLYEEFNVLNELNNIKIGANKMNVELKKDIIENLFKKKKKVTGKNLREYLKCEGLINDDEEITGFDINFKSSMSSYLDFKKILGDKIDNYSVKMMVEQIILWITVYGDEISILKRVIRKQYDDNQISDEEIKKVSRLKYQGWGRLSRKFLDAIEGADKETGEIRTIIGALRDTQDNLMQLLGQKYTFLETIENINNKNMKEISTISYKDIVEDIAASPSIKRAVWQVILISEEIRKIMGKEPAKIFVEVARGTGEKKRTVSRKDRLISLYESCKDESKDWKQELEQRPEDDFQSIKLYLYYTQMGRCMYSGESIDLSRLSDANVYDRDHIYPQSKTKDDSLDNLVLVKRELNAKKSNGMISSDIQNKMHVFWKELLNKGFISQEKYYRLMRKDSLTDEELASFINRQLVEARQSSKIVIGLFNRMYPNSKVAYVKANLVSDFKNMDNVKITKVRSLNDYHHAKDAYLNIVVGNVYYEKFTNNPLQWLKKNRNAEYSLNQMFNYDLIKNDKVIWKRGNDGTLKVVLKNINKRDIQYTQQVITNKGGLFNQQLVSKDENASMPVKKGRDVNIYGGYKSITPAFFTLIESEDKKGNKQRSIESVPLFMKNQFLNDSNSCMEYFENVYGLKNPKVVISQIRKNAYLIIDDFPVLLRGSTGKQLKLQCAVQLIVSQEQERYLKKLEKYIQKNSQRKDKKQNLPITEYDALTKESNIRIYDMFIDKLTNTIYSKRPANPVDKLKTKKELFEQLSVEIQCVVLNEILHLFQCKPIVADLSIIKEASSTGSIQKNKIISSSNNVIMVNQSVTGLFRQEIDLLKI

SEQ ID NO: 20445 - protein, 1350 aa, unidentified
  REGION 1..1350: note = Cas Enzyme sequence
MKSRREQDYYLGLDIGTESVGYAVTDENYNILKFNGKNMWGSRLFDEAQTAAERRTFRSGRRRLQRRAWRIQLLQELFSEEISKVDQSFFVKMKESPLILTDKTNGQKYTLFNDDDYSDIDYYSEFPTIYHLRKALLMEDRKFDVRLLYLAVHHIVKHRGHFLFQGSVNNATSFHSVFDNLKICLRDEFEIELVCHSEEKIAEILKDKKKSKRDKCNEIFNELNVDKSNKQIKSIVTLISGMKAKVADIFADESLLEIDKPSISFSESSYETLRVELEDVLGERCGVIDIIKCVYDWAILADILADGEINGKSYLSVAKVNLYDKHKEDLRILKQLFKGNNKVYKEFFVDEGKSNYCAYVGFVNSNGSKKNIKRCNREDFIKNLKNQLEKIEKTVSNQSEYEFIEQEIQADTILPVQISKDNGVIPYQVQEMELKDILAKAEKYMPFLSVKDSDGVSVSDKIIKIFEFRVPYYVGPLNGYNNTNSWMVRKSDGKITPWNFDNKVDKDASAEKFIRKMTNKCTYLVGEDVLPKHALLYEEFNVLNELNNIKIGANKMNVELKKDIIENLFKKKKKVTGKNLREYLKCEGLINDDEEITGFDINFKSSMSSYLDFKKILGDKIDNYSVKMMVEQIILWITVYGDEISILKRVIRKQYDDNQISDEEIKKVSRLKYQGWGRLSRKFLGAIEGADKETGEIRTIIGALRDTQDNLMQLLGQKYTFLETIENINNKNMKEITTISYKDIVEDIAASPSIKRAVWQVILISEEIRKIMGKEPAKIFVEVARGAGEKKRTVSRKDRLISLYESCKDESKDWKKELEQRPEDDFQSIKLYLYYTQMGRCMYSGEPIDLSRLSDANVYDRDHIYPQSKTKDDSLDNLVLVKRELNAKKSNGMISTDIQNKMHGFWKELLNKGFISQEKYYRLMRKDTLTDEELAGFINRQLVEARQSSKIVIGLFNRMYPDSKVAYVKANLVSDFKNMDNVKITKVRSLNDYHHAKDAYLNIVVGNVYFEKFTNNPLQWLKKNRNAEYSLNQMFNYDLVKNDKVIWKRGNDGTLRSVLKNINKRDIQYTQQVITNKGGLFNQQLVGKDENASMPVKKGRDVNIYGGYKSITPAFFTLIESEDKKGNKQRSIESVPLFMKNQFLNDTNSCMEYFENAYGLKNPKVVISQIRKNTYLIIDDFPVLLRGSTGKQLILQCAVQLMVSQEQERYLKKLEKYIQKNSQRKDKKQNLPITDYDGLTKEDNIGLYDMFIDKLTNTIYSKRPANPVDKLKNKRELFEQLSVACQCVVLNEILHLFQCKPIGADLSMLGEAKATGIITKNKIISTCNNVIIVYQSVTGLFRQEIDLLKI

SEQ ID NO: 20446 - protein, 1350 aa, unidentified
  REGION 1..1350: note = Cas Enzyme sequence
MKSRREQDYYLGLDIGTESVGYAVTDENYNILKFNGKNMWGSRLFDEAQTAAERRTFRSGRRRLQRRAWRIQLLQELFSEEISKVDQSFFVKMKESPLILTDKTNGQKYTLFNDDDYSDIDYYSEFPTIYHLRKALLVEDRKFDVRLLYLAVHHIVKHRGHFLFQGSVNNATSFHSVFDNLKICLRDEFEIELECHSEEKIAEILKDKKKSKRDKCNEIFNELNTDKSNKQIKSIVTLISGMKAKVADIFADESLLEIDKPSISFSESSYETLRVELEDVLGERCGVIDIIKCVYDWAILADILADGEINGKSYLSVAKVNLYDKHKEDLRILKQLFKGNHKVYKEFFVDEGKSNYCAYVGFVNSNGSKKNIKRCNREDFIKNLKNQLGKIEKTVSNQSEYEFIEQEIQADTILPVQISKDNGVIPYQVQEMELIDILAKAEKYMPFLSVKDSDGVSVSDKIVKIFEFRVPYYVGPLNGYNNTNSWMVRKSDGKITPWNFDNKVDKDASAEKFIRKMTNKCTYLIGEDVLPKHALLYEEFNVLNELNNVKIGANKLDADLKKDIINNLFKKKKKVTGKNLREYLKCEGLINDDEEITGFDINFKSSMSSYLDFKKILGDKIDNYSVKMMVEQIILWITVYGDEISILKRVIRKQYDNNQISDEEIKKVSRLKYQGWGRLSRKFLSEIEGADKETGEIRTIIGALRDTQDNLMQLLGQKYTFSETIENINNKNMKEISTISYKDIVEDIVASPSIKRAVWQVILISEEIRKIMGKEPAKIFVEVARGAGEKKRTLSRKDRLISLYESCKDESKDWKKELEQRPEDDFQSIKLYLYYTQMGRCMYSGEPIDLSRLSDANVYDRDHIYPQSKTKDDSLDNLVLVKRELNAKKSNGMISTDIQNKMHGFWKELLNKGFISQEKYYRLMRKDTLTDEELAGFINRQLVEARQSSKIVIGLFNRMYPDSKVAYVKANLVSDFKNMDNVKITKVRSLNDYHHAKDAYLNIVVGNVYFEKFTNNPLQWLKKNRNAEYSLNQMFNYDLIKNDKVIWKRGNDGTLRVVLKNIHKRDIQYTQQVITNKGGLFNQQLVGKDENASMPVKKGRDVNIYGGYKSITPAFFTLIESDDKKGNKQRSIESVPLFMKNQFLNDTNSCMEYFENAYGLKNPKVVISQIRKNTYLIIDDFPVLLRGSTGKQLILQCAVQLMVSQEQERYLKKLEKYIQKNSQRKDKKQNLLITEYDGLTKESNIRIYDMFIDKLTNTIYSKRPANPVDKLKNKRGIFEQLSVECQCVVLNEILHLFQCKPIVADLSIIKEASSTGSIKKNKIISSSNNVIMVNQSVTGLFKQEMDLLKI

SEQ ID NO: 20447 - protein, 1351 aa, unidentified
  REGION 1..1351: note = Cas Enzyme sequence
MSKKYYLGLDIGTNSVGWAVTDENYNLCKYAGKRMWGIRLFEGGETAEQRRISRSNRRRLSRKKQRIDLLQELFAEEIAKIDPTFFIRLNESRLHLEDKSTGEKFPLFTDKDYTDIQYYKEYPTMYHLRKELIENPKAHDIRLVYLACHHILKNRGHFLINGSFSDVKKLSSVCESMLNSFNGISKYQIEINDIERLEEILSDRKKQKSVKAKELIQIFECGPCEDKTDEKTCKAIVSNLCKWLTGLKGNINSIFDMQFEEIDTSSFSFTEPKYEDTISAALEEKYPDYADVIQKIKAVYDWSVLVEIMAGEDYLSFAKVNAYNKHKENLCILKEVIRKYCDSEMYHKFFNGFDEKNGYGNYIGSIYKNGHSYAMKKCSTEDFYKTLGKILDKIQPEKEDENVLEELKVEVKNQTLLPLARTTANGTIPNQVHIQELKAILDNAKKYLPFLNEEDEYGTVAEKIISIAKFRIPYYVGPLGTRHKEQGANSWIVRKQEGRIYPWNFEEMVDLEQSNKEFIQRMTNKCTYLIGEDVLPKNSLLYSRYMVLNELNNLRIRGNKISVKLKQELYKELFCTKAKVTGKGLFNYLKKEDEELALEDISGFDIDFKSSLTSYLDFKKQILGEEIEKDKYKDIVENIIKWKTIYDDDSKMMKKMIEREYPNVFSKDKIKKICRFKYSGWGNFSLSFLNGIRGADRETGESFTIIEALWKTNYNITQLLSKQFTFKEEIDSINADKVGKIDKVSYDNTVKDLIVSPANKRAIWQTVQITEEIKKVMKCEPERIFIEMARGGEKEKKRTVSRKARLLELYAACKDDVRDWTKEIEDREEREFNSKKLYLYYTQMGRCMYSGEEIDIDELMQKNSKWDIDHIYPQSKIKDDSLDNMVLAKKVINNSKQNKLLSSDIRIKMKKYWNVLYKGNFISKKKYDRLTRTEDFTNEELSGFIERQIVETRQSSKVVAELLNRLYEHSEIVYVKAGLVSDFRHDNKLLKSRRINDYHHAKDAFLNIVVGNVYNVKFTSNPRKWIKENRGTNYSIRRVFDYNVKRGNTVVWQGVKDGGHSIDAIRKTMARNDILYTEYTYCDKGELFNATLVKKGNDKAINLKKALDSVKYGGYNSPKTSAFAFIEFDGKKKERKNHIVEIPVYIVNIAKRQPDTIKEYLEQKKGYKNVVIKKYPIKKNALIKIDGYLARVRGANETDILLKNAVQLILNDKYYEIIRRVEKYLEYNVQYEAESMFEGFDHADLNSLYDELTSKLGTSIYKKRPANQLNALEKGKEKFKNIQTLREKAQIIKEMLIMYRCDAATVANLKAIGGSANAGSMKIKKNTLTSRSLVLVNQSITGLFETEEELV

SEQ ID NO: 20448 - protein, 1351 aa, unidentified
  REGION 1..1351: note = Cas Enzyme sequence
MSKKYYLGLDIGTNSVGWAVTDENYNLCKYAGKRMWGIRLFEGGETAEQRRISRSNRRRLSRKKQRIDLLQELFAEEIAKIDPTFFIRLNESRLHLEDKSTGEKFPLFTDKDYTDIQYYKEYPTMYHLRKELIENPKAHDIRLVYLACHHILKNRGHFLINGSFSDVKKLSSVCESMLNSFNGISKYQIEINDIERLEEILSDRKKQKSVKAKELIQIFECGPCEDKTDEKTCKAIVSNLCKWLTGLKGNINSIFDMQFEEIDTSSFSFTEPKYEDTISAALEEKYPDYADVIQKIKAVYDWSVLVEIMAGEDYLSFAKVNAYNKHKENLCILKEVIRKYCDSEMYHKFFNGFDEKNGYGNYIGSIYKNGHSYAMKKCSTEDFYKTLGKILDKIQPEKEDENVLEELKVEVKNQTLLPLARTTANGTIPNQVHIQELKAILDNAKKYLPFLNEEDEYGTVAEKIISIAKFRIPYYVGPLGTRHKEQGANSWIVRKQEGRIYPWNFEEMVDLEQSNKEFIQRMTNKCTYLIGEDVLPKNSLLYSRYMVLNELNNLRIRGNKISVKLKQELYKELFCTKAKVTGKGLFNYLKKEDEELALEDISGFDIDFKSSLTSYLDFKKQILGEEIEKDKYKDIVENIIKWKTIYDDDSKMMKKMIEREYPNVFSKDKIKKICRFKYSGWGNFSLSFLNGIRGADRETGESFTIIEALWKTNYNITQLLSKQFTFKEEIDSINADKVGKIDKVSYDNTVKDLIVSPANKRAIWQTVQITEEIKKVMKCEPERIFIEMARGGEKEKKRTVSRKARLLELYAACKDDVRDWTKEIEDREEREFNSKKLYLYYTQMGRCMYSGEEIDIDELMQKNSKWDIDHIYPQSKIKDDSLDNMVLAKKVINNSKQNKLLSSDIRIKMKKYWNVLYKGNFISKKKYDRLTRTEDFTNEELSGFIERQIVETRQSSKVVAELLNRLYEHSEIVYVKAGLVSDFRHDNKLLKSRRINDYHHAKDAFLNIVVGNVYNVKFTSNPRKWIKENRGTNYSIRRVFDYNVKRGNTVVWQGVKDGGHSIDAIRKTMARNDILYTEYTYCDKGELFNATLVKKGNDKAINLKKDLDSVKYGGYNSPKTSAFAFIEFDGKKKERKNHIVEIPVYIVNIAKRQPDTIKEYLEQKKGYKNVVIKKYPIKKNSLIKIDGYLARVRGANETDILLKNAVQLILNDKYYEIIRRVEKYLEYNVQYEAESMFEGFDHADLNSLYDELTSKLGTSIYKKRPANQLNALEKGKEKFKNIQTLREKAQIIKEMLIMYRCDAATVANLKAIGGSANAGSMKIKKNTLTSRSLVLVNQSITGLFETEEELV

SEQ ID NO: 20449 - protein, 1351 aa, unidentified
  REGION 1..1351: note = Cas Enzyme sequence
MSKKYYLGLDIGTNSVGWAVTDENYNLCKYAGKRMWGIRLFEGGETAEQRRISRSNRRRLSRKKQRIDLLQELFAEEIAKMDPTFFIRLNESRLHLEDKSTGEKFPLFTDKDYTDIQYYKEYPTIYHLRKELIENSKVHDVRLVYLACHHILKNRGHFLINGSFSDVKKLSSVCESMLNSFNGISKYQLEINDIERLEEILSDRKKQKSVKAKELIQIFECGPCEDKTDEKTCKAIVSNLCKWLTGLKGNINSIFDMQFEEIDTSSFSFTEPKYEDTISAALEEKYPDYADVIQKIKAVYDWSVLVEIMAGEDYLSFAKVNAYNKHKENLCILKEVIRKYCDSEMYHKFFNGFDEKNGYGNYIGSIYKNGHSYAMKKCSTEDFYKTLGKILDKIQPEKEDENILEELKVEVKNQTLLPLARTTANGTIPNQVHIQELKAILDNAKKYLPFLNEEDEYGTVAEKIISIAKFRIPYYVGPLSTRHKEQGANSWIVRKQEGRIYPWNFEEMVDLEQSNKEFIQRMTNKCTYLIGEDVLPKNSLLYSRYMVLNELNNLRIRGNKISVNLKQELYKELFCTKAKVTGKGLFNYLKKEDEELTLEDISGFDIDFKSSLTSYLDFKKQILGEEIEKDKYKDIVENIIKWKTIYDDDSKMMKKMIEREYPNVFSKDKIKKICRFKYSGWGNFSLSFLNGIRGADRETGERFTIIEALWKTNYNITQLLSKQFTFKEEIDSINADKVGKIDKVSYDNTVKDLIVSPANKRAIWQTVQITEEIKKVMKCEPERIFIEMARGGEKEKKRTVSRKARLLELYAACQDDVRDWTKEIEDREEREFNSKKLYLYYTQMGRCMYSGEEIDIDELMQKNSKWDIDHIYPQSKIKDDSLDNMVLAKKVINNSKQNKLLSSDIRIKMKKYWNALYKGNFISKKKYDRLTRTEDFTNEELSGFIERQIVETRQSSKAVAELLNRLYEHSEIVYVKAGLVSDFRHDNKMLKSRRINDYHHAKDAFLNIVVGNVYNAKFTSNPRKWIKENRGTNYSIRRVFDYNVKRGNTVVWQGVKDGGHSIDEIRKTMARNDILYTEYTYYDKGELFNATLVKKGNDKAINLKKALDSVKYGGYNSPKTSAFAFIEFDGKKKERKNHIVEIPVYIVNIAKRQPDTIKEYLEQKKGYKNVVIKKYPIKKNALIKIDGYLARVRGANETDILLKNAVQLILNDKYYEIIRRVEKYLEYNVQYEAESMFEGFDHADLNSLYDELTSKLGTSIYKKRPANQLNALEKGKEKFKNIQTLREKAQIIKEMLIMYRCDAATVANLKAIGGSANAGSMKIKKNTLTSRSLVLVNQSITGLFETEEELV

SEQ ID NO: 20450 - protein, 1351 aa, unidentified
  REGION 1..1351: note = Cas Enzyme sequence
MSKKYYLGLDIGTNSVGWAVTDENYNLCKYAGKRMWGIRLFEGGETAEQRRISRSNRRRLSRKKQRIDLLQELFAEEIAKIDPTFFIRLNESRLHLEDKSTGEKFPLFTDKDYTDIQYYKEYPTMYHLRKELIENLEPHDVRLVYLACHHILKNRGHFLISGSFSDVKKLSSVCESMLNSFNGISKYQIEINDIERLEEILSDRKKQKSVKAKELIQIFECGPCEDKTDEKTCKAIVSNLCKWLTGLKGNINSIFDMQFEEIDTSSFSFTEPKYEDTISAALEEKYPDYADVIQKIKAVYDWSVLVEIMAGEDYLSFAKVNAYNKHKENLCILKEVIRKYCDSEMYHKFFNGFDEKNGYGNYIGSIYKNGHSYAMKKCSTEDFYKTLGKILDKIQPEKEDENVLEELKVEVKNQTLLPLARTTANGTIPNQVHIQELRAILDNAKKYLPFLNEEDEYGTVAEKIISIAKFRIPYYVGPLSTRHKEQGANSWIVRKQEGRIYPWNFEEMVDLEQSNKEFIQRMTNKCTYLIGEDVLPKNSLLYSRYMVLNELNNLRIRGNKISVKLKQELYKELFCTKAKVTGKGLFNYLKKEDEELALEDISGFDIDFKSSLTSYLDFKKQILGEEIEKDKYKGIVENIIKWKTIYDDDSKMMKKMIEREYPNVFSKDKIKKICRFKYSGWGNFSLSFLNGIRGADRETGESFTIIEALWKTNYNITQLLSKQFTFKEEIDSINADKVGKIDKVSYDNTVKDLIVSPANKRAIWQTVQITEEIKKVMKCEPERIFIEMARGGEKEKKRTVSRKARLLELYAACKDDVRDWTKEIEDREEREFNSKKLYLYYTQMGRCMYSGEEIDIDELMQKNSKWDIDHIYPQSKIKDDSLDNMVLAKKVINNSKQNKLLSSDIRIKMKKYWNALYKGNFISKKKYDRLTRTEDFTNEELSGFIERQIVETRQSSKAVAELLNRLYEHSEIVYVKAGLVSDFRHDNKLLKSRRINDYHHAKDAFLNIVVGNVYNAKFTSNPRKWIKENRGTNYSIRRVFDYNVKRGNTVVWQGVEDGGHSIDEIRKTMARNDILYTEYTYCDKGELFNATLIKKGNDKAINLKKALDSVKYGGYNSPKTSAFAFIEFDGKKKERKNHIVEIPVYIVNIAKRQPDTIKEYLEQKKGYKNVVVKKYPIKKNALIKIDGYLARLRGANETDILLKNAVQLILNDKYYEIIRRVEKYLEYNVQYEAESMFEGFDHADLNSLYDELTSKLETSIYKKRPANQLNALEKGKEKFKNIQTLREKAQIIKEMLIMYRCDATTVANLKAIGGSANAGNMAYNKNTLPTKKLILIHQSVTGLFETEEELV

SEQ ID NO: 20451 - protein, 1351 aa, unidentified
  REGION 1..1351: note = Cas Enzyme sequence
MSKKYYLGLDIGTNSVGWAVTDENYNLCKYAGKRMWGIRLFEGGETAEQRRISRSNRRRLSRKKQRIDLLQELFAEEIAKIDPTFFIRLNESRLHLEDKSTGEKFPLFTDKDYTDIQYYKEYPTMYHLRKELIENPKAHDIRLVYLACHHILKNRGHFLINGSFSDVKKLSSVCESMLNSFNGISKYQIEINDIERLEEILSDRKKQKSVKAKELIQIFECGPCEDKTDEKTCKAIVSNLCKWLTGLKGNINSIFDMQFEEIDTSSFSFTEPKYEDTISAALEEKYPDYADVIQKIKAVYDWSVLVEIMAGEDYLSFAKVNAYNKHKENLCILKEVIRKYCDSEIYRKFFNGFNEKNGYGNYIGSIYKNRHSYAMKKCGTEDFYKTLGKILDKIQPEKEDENVLEELKVEVKNQTLLPLARTTANGTIPNQVHIQELKAILDNAKKYLPFLNEKDEYGTVAEKIISIAKFRIPYYVGPLSTRHKEQGANSWIVRKQEGRIYPWNFEEMVDLEQSNKEFIQRMTNKCTYLIGEDVLPKNSLLYSRYMVLNELNNLRIRGNKISVKLKQELYKELFCTKAKVTGKGLFNYLKKEDEELALEDISGFDIDFKSSLTSYLDFKKQILGEEIEKDKYKGIVENIIKWKTIYDDDSKMMKKMIEREYPNVFSKDKIKKICRFKYSGWGNFSLSFLNGIRGADRETGESFTIIEALWKTNYNITQLLSKQFTFKEEIDSINADKVGKIDKVSYDNTVKDLIVSPANKRAIWQTVQITEEIKKVMKCEPERIFIEMARGGEKEKKRTVSRKARLLELYAACKDDVRDWTKEIEDREEREFNSKKLYLYYTQMGRCMYSGEEIDIDELMQKNSKWDIDHIYPQSKIKDDSLDNMVLAKKVINNSKQNKLLSSDIRIKMKKYWNALYKGNFISKKKYDRLTRTEDFTNEELSGFIERQIVETRQSSKAVAELLNRLYEHSEIVYVKAGLVSDFRHDNKLLKSRRINDYHHAKDAFLNIVVGNVYNAKFTSNPRKWIKENRGTNYSIRRVFDYNVKRGNTVVWQGVEDGGHSIDEIRKTMARNDILYTEYTYCDKGELFNATLIKKENDKAINLKKALDSVKYGGYNSPKTSAFAFIEFDGKKKERKNHIVEIPVYIVNIAKRQPDTIKEYLEQKKGYKNVVVKKYPIKKNALIKIDGYLARLRGANETDILLKNAVQLILNDKYYEIIRRVEKYLEYNVQYEAESMFEGFDHADLNSLYDELTSKLETSIYKKRPANQLNALEKGKEKFKNIQTLREKAQIIKEMLIMYRCDATTVANLKAIGGSANAGNMAYNKNTLPTKKLILIHQSVTGLFETEEELV

SEQ ID NO: 20452 - protein, 1351 aa, unidentified
  REGION 1..1351: note = Cas Enzyme sequence
MSKKYYLGLDIGTNSVGWAVTDENYNLCKYAGKRMWGIRLFEGGETAEQRRISRSNRRRLSRKKQRIDLLQELFAEEIAKIDPTFFIRLNESRLHLEDKSTGEKFPLFTDKDYTDIQYYKEYPTMYHLRKELIENPKAHDIRLVYLACHHILKNRGHFLINGSFSDVKKLSSVCESMLNSFNGISKYQIEINDIERLEEILSDRKKQKSVKAKELIQIFECGPCEDKTDEKTCKAIVSNLCKWLTGLKGNINSIFDMQFEEIDTSSFSFTEPKYEDTISAALEEKYPDYADVIQKIKTVYDWSVLVEIMAGEDYLSFAKVNAYNKHKENLCILKEVIRKYCDSEMYHKFFNGFDEKNGYGNYIGSIYKNGHSYAMKKCSTEDFYKTLGKILDKIQPEKEDENVLEELKVEVKNQTLLPLARTTANGTIPNQVHIQELKAILDNAKKYLPFLNEKDEYGTVAEKIISIAKFRIPYYVGPLSTRHKEQGANSWIVRKQEGRIYPWNFEEMVDLEQSNKEFIQRMTNKCTHLIGEDVLPKNSLLYSRYMVLNELNNLRIRGNKISVNLKQELYKELFCTKAKVTGKGLFNYLKKEDEELALEDISGFDIDFKSSLTSYLDFKKQILGEEIEKDKYKDIVENIIKWKTIYDDDSKMMKKMIEREYPNVFSKDQIKKICRFKYSGWGNFSLSFLNGIRGADRETGENFTIIEALWKTNYNLMQLLSKQFTFREEIDLINADKVGKIDKVSYDNTVKDLIVSPANKRAIWQTVQITEEIKKVMKCKPERIFIEMARGGEKEKRRTVSRKARLLELYAACKDDVRDWTKEIENREEREFNSKKLYLYYTQMGRCMYSGEEIDIDELMQKNSKWDIDHIYPQSKIKDDSIDNMVLAKKVINNSKQNKLLSPDIRIKMKKYWNTLYKGNFISKKKYDRLTRTEDFTNEELSGFIERQIVETRQSSKAVAELLNRLYEHSEIVYVKAGLVSDFRHDNKLLKSRRINDYHHAKDAFLNIVVGNVYNAKFTSNPRKWIKENRGTNYSIRRVFDYNVKRGNTVVWQGVKDAGHSIEAIRKTMARNDILYTEYTYCDKGELFNATLVRKGNDKAINLKKDLDSVKYGGYNTPKTSAFAFIEFDGKKKERKNHIVEIPVYIVNIAKRQPDTIKEYLEQKKGYKNVVVKKYPIKKNALIKVDGYLARLRGATEKDVLLKNAVQLVLRDEYSENIRKVEKYLENNIQYQADSKFEGFTQEDLNDLYDELYIKLKESIYNKRPANQLGTLEKGREKYRAIGDLREKAKIINNILALFQCDATTSTNLKEIGGTANAGNMAYNKNTLPTKKLILIHQSVTGLFETEEELV

SEQ ID NO: 20453 - protein, 1387 aa, unidentified
  REGION 1..1387: note = Cas Enzyme sequence
MESKNYYIGLDIGTDSIGYAATDESYRLLKYRGEPVWGSHIIEEANLKTERRQHRTERRRLDRRQQRVTLIREIFAKEIAKIDPDFYKREEESALLAEDASTSKGLFTDIGYTDKKYHKSYPTIHHLINELMTDAAPHDVRLVYLACAWLVAHRGHFLSEVSLDNVESVVDFKTVYDNLTDYFAFEIGCEPAWDNADPDEIEKILVKKIKSTSKINELNNLLFGKKKPETEITDAFPFSRPGIIKLLCGGTCSAKDLFGNEEYAEIKSLKLDDDELDSNLSELGDDAELVLRLKAVYDCVTLHDVLGENKFISAAKVETYEQHKRDLAGLKKFIKKYAPEKYNEIFRKVDKSTANYSAYSGNIKSDKDADWKKATPEAFCAYILKIVRNITPDAEDKAFFDDMVARLQKDVNTFMPKQVNGDNRVIPYQLYYVELKKILENAEKYLPFLSETDEEGYLTKDKILSVFTFRIPYYVGPLNASSPYAWIKRKAGRITPWNFSEMVDGNESEQGFINKLIGVCSYLPGEKVLPKQSLLYQRFTVLNEINNITINGLRISPEIKQLIYNDVFKKNKKVSVKKIKDSLRQNTQLKDDVETIAGIDISIKSSLSSYISFRRLLESGTLNETDVEKIIKVSTYMESRPRFKAWLEGEYPNLSDNDVKYITSLKFKDFGRLSEKFLCGIIGGCKDTGEASSIIDALWNTNKNLMELLSDDYTYSDAIKRYSDNYYMANGAKSLDERMDDMYLSNAVRRPIYRVLDIVSDIVKAEGKAPNKIFVEMARGAKPDEKKGQRKTSRYDTLKDLYKNIDTDDVRRLEQELEKMGDEANSRLQSEKLFLYFLQLGKCMYSGEEIDLNNLMGKRYDIDHIYPQSKVKDDSLFNNKVLVKSELNHQKGDRYPVPEGIRENMSGIWKKLLDGGLITEEKYRRLTRKTGFTDDEAWGFINRQMVETRQSTKAVATLLKEYYPNTKIVYVKAGLVSEFRHEKKLWKAILPEEERYLDDSQIEPWKTELWKSRTVNDLHHAKDAYLNIVAGNVYHEKCTKQWYLLNKDNYSINLTSLYSLTPYTAGGRKIWDGVNSLETVWKTVHKNAVHYTIYPFSRKGGLFDQNPLKKNADLTPLKNNGEIYLDPEKYGGYNKPTATFFVLVKYYFGKKSDVMLMPVDLAIAEKYKSDSQFRFDYAKIQLGRILNKTIDKVEFPLGDRIIKVKTMIELDGYRMCITGKAGGGTVIMLSSMTPLCLAPEWEFYVKKLETLNEKKKNNPNMVYMEKYDFVSTEKNAELYDILTDKLTNTVFNNRPGNPYDKLATGKEKFAAQDVFTQTACLLQIVGIFGRINNGFDLTAIDEAPKAARSKLSSNLSNWKKSYSDVRIIDTTASGLFEHRSCNLLDLL

SEQ ID NO: 20454 - protein, 1398 aa, unidentified
  REGION 1..1398: note = Cas Enzyme sequence
MESKNYYIGLDIGTDSIGYAAADESYRLLKYKGEPVWGSHIIEEANLKTERRQHRTERRRLDRRQQRVTLIREIFAKEIAKIDPDFYKREEESALLAEDASTSKGLFTDIGYTDKKYHKSYPTIHHLINELMTDAAPHDVRLVYLACAWLVAHRGHFLSEVSLDNVESVVDFKTVYDNLTDYFAFEIGCEPAWDNADPDEIEKILVKKIKSTSKINELNNLLFGKKKPETEITDAFPFSRPGIIKLLCGKDCSAKDLFGKEEYAEIKSLKLDDDELDSNLSELGDDAELVLRLKAVYDCVTLHDVLGENKFISAAKVETYEQHKRDLAELKKFIKKYAPEKYNEIFRKVDKSTANYSAYSGNIKSDKNTKADWKKATPENFCTYILKIVNNITPAAEDKAFFDDMVARLQKDVNTFMPKQVNGDNRVIPYQLYYVELKKILENAEKYLPFLSETDEEGYLTKDKILSVFTFRIPYYVGPLNASSPYAWIKRKAGRITPWNFSEMVDENESEQGFINKLIGVCSYLPGEKVLPKQSLLYQRFTVLNEINNITINGLRISPEIKQLIYNDVFKKNKKVSVKKIKDSLRQNNHSKDDVETIAGIDISIKSSLSSYISFRRLLESGTLNETDVEKIIKVSTYMESRPRFKAWLEGEYPNLSDNDVKYITSLKFKDFGRLSEKFLCAILGSRKNNEKEDNGEASSIIDALWSTDKNLMELLSDDYTYSDAIKKFSDNYYMANGAKSLDERMDDMYLSNAVRRPIYRVLDIVSDIVKAEGKAPNKIFVEMARGAKPDEKKGQRKTSRYDTLKDLYKNIDTDDVRRLEQELEKMGDEANSKLQSERLFLYYLQRGRCMYSGEEIDLNNLMGKRYDIDHIYPRSKVKDDSLFNNKVLVKSKINGSKDNNYPLPENIRENMSGMWKKLLDCKLITEEKYRRLTRKTGFTDDEAWGFINRQMVETRQSTKAVATLLKEYYPDTEIVYVKAGLVSEFRHEKKLWKAILPEEERYLDDSQIEPWKTELWKSRTVNDLHHAKDAYLNIVAGNVYHEKCTKQWYLSNKDNYSINLISLYSLTPYMVGERKIWDGVNSLETVWKTVHKNAVHYTIYPFSRKGGLFDQNPLKKNADLIPRKKDLPAEKYGGYNSPSVNFFVLVKYYFDKNSDVMFMPVELSVAEKYMSDLNFRLSYSQKQLGKILNKDKKADKKLKISRVEFPLGNRIIKINTMIELDGYRMCITANSSGGAEIKVSSMTPLCLAPEWEFYIKKLETFDEKKNNNPNMIYMEKYDVVSPEKNVELYDILIDKLSNTVFKKRPVNPCDDLADGKAKFAAQDVFKQTKCLLQIVGIFGRINNGFDLRAVGGGQYAAKSRRSTNLSNWKKYYSDVRIIDTTASGLFEHRSCNLLDLL

SEQ ID NO: 20455 - protein, 1384 aa, unidentified
  REGION 1..1384: note = Cas Enzyme sequence
MSFKENSKIYYGLDIGTDSVGWSTTNEKYELLRYKNNLMWGVSLFEAASLAEERRGHRTQRRRYDRRQQRVALLGELFAKEILKTDPDFFLRLKESALYPEDRTSKNVNTYFDDADFKDSDYFKMYPTVHHLIKELSESNKQHDVRLVYLACAFIVAHRGHFLNGADENNVQAVLDFDSSYCEFTDWFKSNDIEDNPFSESVKNEFSVILRKKIGITAKEKEIKNLLFGTTKTPDCYKDEEYPIDIDVLIKFISGGKTNLAKLFRNPSYDELDIQTVEVGKSDFADTIDLLASSMEDTDVPLLSAVKAMYDWSLLIDVLKGQKTISDAKVYEYEQHKSDLKALKYIVRKYLDRAQYDEIFRTAGEKPNYVSYSYNVTDVKLKQLPSNFKKKNSEEFCKYIKSKLEKIKPESDDEAVYNELIEKCNSKTLCPKQVTDENRVIPYQLYYHELSMILDKASAYLDFLNKTEDGISVKQKILTLMKFRIPYFVGPLVKRNETDNVWIVRKAEGRIYPWNFENMVDFDKSEDGFIRRMTCKCTYLAGEDVLPKYSLLYSKYTVLNEINNIKVNGEKISPELKQDIFNELFMKTSRVTVKKITELLKRKGAFSEEKGDSLSGVDINIKSSLKSYLDFRRLLENGSLSENDVERIIERITVTTDKPRLVSWLKVEYSDLPAEDIRYISRLSYKDYGRLSAKLLTGCYELDTNTGEIGGRSIIDFMWAENINLMQILSDSYGYKSFIEEENKKYYMINPTGSIAQTLREMYVSPSVSRAIIRTMEIVKELRKITKKDPDKIFVEMARGGKPEEKGKRTSSRREQIEKLYDSAKAFVSDEDISHLRSQLGSLSDEQLRREKYYLYFIQFGKCMYSGEAIDFSRLGDNHCYDIDHIFPQSKINDDSLHNKVLVKSQLNGEKSDDYPIKAEIRNKMHPLWKNLFYRDPKNPADKVKYERLTRSTPFTEDELAGFIERQLVETRQSTKAVATLLKEMFPDSKIVYVKAGQVSEFRHDFDMLKCREINDLHHAKDAYLNIVIGNVHDVKFTSNPMNFVKNADKHYTIKVKETLKHKVSRNGETAWNPETDFDTVKRMMSKNSVRYVRYCYKRKGGFFNQNPDRAGNPDLARLKKDLDPVKYGGYNSKSISCFSLIKCTGVGAVIIPVELLCEKRYFSDDSFASEYAYSVLKNALPAKNIAKISIDDISFPLKRRPIKINTLFEFDGYRVNIRSKDSYHYFTISSAMAAIYSKDTSDYIKAVSSYIDKSDKGSKFKPGEAFDVLSNLKVYDEIAKKCISEPFSKISKLAEAGKKMEEGRDKFAELSIIEQMKTLLLLVDVLKTGRINTCNLKPVGGVESYHTERMSAILKNTKYSDIRIIDQSPTGLYEKKSDNLLEL

SEQ ID NO: 20456 - protein, 1089 aa, unidentified
  REGION 1..1089: note = Cas Enzyme sequence
MEDTDVPLLSAVKAMYDWSLLIDVLKGQKTISDAKVCEYEQHKSDLKALKHIVRKYLDKAQYDEIFRTAGEKPNYVSYSYNVTDVKLKQLPDKFKKTKSEDFCKYIKSKLEKIKPEPDDEAVYNELIEKCNSKTLCPKQVTDENRVIPYQLYYHELSMILDKASAYLDFLNETEDGISVKQKILTLMKFRIPYFVGPSVKRNETDNVWIVRKAEGRIYPWNFENMVDYDKSEEAFIRRMTCKCTYLAGEDVLPKYSLLYSRYTVLNEINNIKVKDVKISPELKQDIFNELFMKTSRVTVKKITELLKRKGAFSEENGDSLSGVDINIKSSLKSYLDFRRLLENGSLSESDVERIIERITVTTDKPRLISWLKTEYPALPAEDIRYISRLSYKDYGRLSAKMLTGCYELDMDTGEIGGRSIIDLMWAENLNLMQIMSDSYGYKSFIEEENKKYYAINPTGSIAQTLREMYVSPSASRAIIRTMDIVKELRKIIKRDPDKIFVEMARGGKPEDKGKRTSSRREQIEKLFASAKEFVSDEEISHLRSQLGSLSDEQLRSEKYYLYFTQFGKCVYSGEAIDFSRLGDNHCYDIDHIYPQSKIKDDSLHNKVLVKSELNGEKSDDLIKPSIRREMHSLWKNLFYRDPKNPTDKIKYERLNRSTPFTEDELAGFIERQLVETRQSTKAVATLLKEMFPDSKIVYVKAGQVSEFRHDFDMLKCREINDLHHAKDAYLNVVVGNVHDVKFTSNPLNFVKNADKHYTIKIKETLKHKVARNGETAWNPETDFDTVKRMMSKNSVRYVRYCYKRKGKLFDQNPDRAGNPDLARLKKNLDPVKYGGYNSKSISCFSLIKCTGVGAVIIPVELLCEKRYFSDDNFASEYAYSVLKNALPAKNIAKISIDDISFPLKRRPIKINTLFEFDGYRVNIRSKDSYSVFKISSAMAAIYSKDTSDYIKAISSYIDKSDKGSKFRPGEAFDVLSNLKAYDEIAKKCISEPFCKISKLAEAGKKMEEGRNKFAELSVIEQMKTLLLLVDVLKTGRVNTCNLKSVGGVESYHTERMSAILKNTKYSDIRIIDQSPTGLYENKSDNLLEL

SEQ ID NO: 20457 - protein, 1384 aa, unidentified
  REGION 1..1384: note = Cas Enzyme sequence
MSFKENSKIYYGLDIGTDSVGWSTTNEKYELLRYKNNLMWGVSLFEAASLAEDRRDHRTQRRRYDRRQQRVALLGELFAKEILKTDPDFFLRLKESSLYPEDRTSKNVNTYFDDADFKDSDYFKMYPTVHHLIKELSESNKPHDVRLVYLACAFIVAHRGHFLNGADENNVQAVLDFDSSYCEFTDWFKSNDIEDNPFSESVKNEFSVIIRKKIGITAKEREIKNLLFGTTKTPDCYKDEEYPIDIDVLIKFISGGKTNLAKLFRNPSYDELDIQTVEVGKADFADTIDLLASSMEDTDVPLLSAVKAMYDWSLLIDVLKGQKTISDAKVCEYEQHKSDLKALKYIVRKYLDRALYDEIFRTAGEKPNYVSYSYNVTDVKLKQLPSNFKKKNSEEFCKYIKSKLEKIKPESDDEAVYNELIEKCNSKTLCPKQVTDENRVIPYQLYYHELSMILDKASAYLDFLNKTEDGISVKQKILTLMKFRIPYFVGPLVKRNETDNVWIVRKAEGRIYPWNFENMVDFDKSEDGFIRRMTCKCTYLAGEDVLPKYSLLYSKYTVLNEINNIKVNGEKISPELKQDIFNELFMKTSRVTVKKITELLKRKGAFSEEKGDSLSGVDINIKSSLKSYLDFRRLLENGFLSENDVERIIERITVTTDKPRLVSWLKAEYSDLPAEDIRYISRLSYKDYGRLSAKLLTGCYELDTNTSEIGGRSIIDFMWAENINLMQILSDSYGYKSFIEEENKKYYTINPTGSIAQTLREMYVSPSVSRAIIRTMEIVKELRKITKKDPDKIFVEMARGGKPEEKGKRTSSRREQIEKLYDSAKAFVSDEDISHLRSQLGSLSDEQLRSEKYYLYFIQFGKCMYSGEAIDFSRLGDNHCYDIDHIFPQSKINDDSLHNKVLVKSQLNGEKSDDYPIKAEIRNKMHLLWKNLFYRDPKNPTDKVKYERLTRSTPFTEDELAGFIERQLVETRQSTKAVATLLKEMFPDSKIVYVKAGQVSEFRHDFDMLKCREINDLHHAKDAYLNIVIGNVHDVKFTSNPMNFVKNADKHYTIKVKETLKHKVSRNGETAWNPETDFDTVKRMMSKNSVRYVRYCYKRKGELFDQQPKKAGNPDLAYRKKNLDPVKYGGYNSKSISCFSLIKCTGVGAVIIPVELLCEKRYFSDDSFASEYAYSVLKNALPAKNIAKISIDDISFPLKRRPIKISTLFEFDGYRVNIRSKDSYHYFTISSAMAAIYSKDTSDYIKAVSSYIDKSDKGSKFKPGEAFDVLSNLKVYDEIAKKCISEPFSKISKLAEAGKKMEEGRDKFAELSIIEQMKTLLLLVDILKTGRINTCNLKPVGGVESYHTERMSAILKNTKYSDIRIIDQSPTGLYEKKSDNLLEL

SEQ ID NO: 20458 - protein, 1384 aa, unidentified
  REGION 1..1384: note = Cas Enzyme sequence
MSFKENSKFYFGLDIGTDSVGWAVTDNLYKLYKYKNNLMWGVSLFEAASPAEDRRNHRTARRRLDRRQQRVALLRELFAKEILKTDPDFFLRLKESSLYPEDRTNKNVNTYFDDADFKDSDYFKMYPTVHHLIKELSESDKPHDVRLVYLACAFIVAHRGHFLNGADENNVQEVLDFNSSYCEFTDWFKSNDIEDNPFSESTENEFSVILRKKIGITAKEKEIKNLLFGTTKTPDCYKDEEYPIDIDVLIKFISGGKTNLAKLFRNPAYDELDIQTVEVGKADFADIIDLLASSMEDTDVPLLSAVKAMYDWSLLIDVLKGQKTISDAKVCEYEQHKSDLKALKHIVRKYLDKAQYDEIFRTVGEKPNYVSYSYNVTDVKLKQLPSNFKKKNSEEFCKYIKSKLEKIKPEPDDEAVYNELIEKCNSKTLCPKQVTDENRVIPYQLYYHELSMILDKASAYLDFLNETEDGISVKQKILTLMKFRIPYFVGPSVKRNETDNVWIVRKAEGRIYPWNFENMVDYDKSEDGFIRRMTCKCTYLAGEDVLPKYSLLYSRYTVLNEINNIKVKDVKISPELKQDIFNELFMKTSRVTVKKITELLKRKGAFSEENGDSLSGVDINIKSSLKSYLDFRRLLENGSLSESDVERIIERITVTTDKPRLISWLKAEYPALPAEDIRYISRLSYKDYGRLSAKMLTGCYELNMDTGEIGGRSIIDLMWAENINLMQIMSDSYGYKSFIEEENKKYYAINPTGSIAQTLREMYVSPSASRAIIRTMDIVKELRKIIKRDPDKIFVEMARGGKPEDKGKRTSSRREQIEKLFASAKEFVSDEEISHLRSQLGSLSDEQLRSEKYYLYFTQFGKCVYSGEAIDFSRLGDNHCYDIDHIYPQSKFDDDSLHNKVLVKSQLNGEKSDDYPIKEEIRNKMHPIWKNLFYRDPKNPTDKIKYERLTRSTPFTEDELAGFVERQLVETRQSTKAVATLLKEMFPDSKIVYVKAGQVSEFRHDFDMLKCREINDLHHAKDAYLNVVVGNVHDVKFTSNPLNFVKNADKHYTIKIKETLKHKVARNGETAWNPETDFDTVKRMMSKNSVRYVRYCYKRKGKLFDQNPDRAGNPDLARLKKNLDPVKYGGYNSKSISCFSLIKCTGVGAVIIPVELLCEKRYFSDDNFASEYAYSVLKNALPAKNIAKISIDDISFPLKRRPIKINTLFEFDGYRVNIRSKDSYHYFTISSAMAAIYSKDTSDYIKAVSSYIDKSDKGSKFKPGEAFDVLSNLKVYDEIAKKCISEPFCKISKLAEAGKKMEEGRDKFAELSIIEQMKALLLLVDILKTGRINTCNLKPVGGVESYHTERMSAILKNTKYSDIRIIDQSPTGLYEKKSDNLLEL

SEQ ID NO: 20459 - protein, 1384 aa, unidentified
  REGION 1..1384: note = Cas Enzyme sequence
MSFKENSKIYYGLDIGTDSVGWSTTNEKYELLRYKNNLMWGVSLFEAASLAEERRGHRTQRRRYDRRQQRVALLGELFAKEILKTDPDFFLRLKESSLYPEDRTSKNFNTYFDDADFKDSDYFKMYPTVHHLIKELSESNKPHDVRLVYLACAFIVAHRGHFLNGADENNVQAVLDFDSSYCEFTDWFKSNDIEDNPFSESVKNEFSVIIRKKIGITAKEREIKNLLFGTTKTPDCYKDEEYPIDIDVLIKFISGGKTNLAKLFRNPSYDELDIQTVEVGKADFADTIDLLASSMEDTDVPLLSAVKAMYDWSLLIDVLKGQKTISDAKVCEYEQHKSDLKALKYIVRKYLDRAQYDEIFRTAGEKPNYVSYSYNVTDVKLKQLPSNFKKKNSEEFCKYIKSKLEKIKPESDDEAVYNELIEKCNSKTLCPKQVTDENRVIPYQLYYHELSMILDKASAYLDFLNKTEDGISVKQKILTLMKFRIPYFVGPLVKRNETDNVWIVRKAEGRIYPWNFENMVDFDKSEDGFIRRMTCKCTYLAGEDVLPKYSLLYSKYTVLNEINNIKVNGEKISPELKQDIFNELFMKTSRVTVKKITELLKRKGAFSEEKGDSLSGVDINIKSSLKSYLDFRRLLENGFLSENDVERIIERITVTTDKPRLVSWLKAEYSDLPAEDIRYISRLSYKDYGRLSAKLLTGCYELDTNTGEIGGRSIIDFMWAENINLMQILSDSYGYKSFIEEENKKYYMINPTGSIAQTLREMYVSPSVSRAIIRTMEIVKELRKITKKDPDKIFVEMARGGKPEEKGKRTSSRREQIEKLYDSAKAFVSDEDISHLRSQLGSLSDEQLRSEKYYLYFIQFGKCMYSGEAIDFSRLGDNHCYDIDHIFPQSKINDDSLHNKVLVKSQLNGEKSDDYPIKAEIRNKMHPLWKNLFYRDPKNPTDKVKYERLTRSTPFTEDELAGFIERQLVETRQSTKAVATLLKEMFPDSKIVYVKAGQVSEFRHDFDMLKCREINDLHHAKDAYLNIVIGNVHDVKFTSNPMNFVKNADKHYTIKVKETLKHKVSRNGETAWNPETDFDTVKRMMSKNSVRYVRYCYKRKGGFFNQNPDRAGNPDLARLKKDLDPVKYGGYNSKSISCFSLIKCTGVGAVIIPVELLCEKRYFSDDSFASEYAYSVLKNALPAKNIAKISIDDISFPLKRRPIKINTLFEFDGYRVNIRSKDSYHYFTISSAMAAIYSKDTSDYIKAVSSYIDKSDKGSKFKPGEAFDVLSNLKVYDEIAKKCISEPFSKINKLAEAGKKMEEGRDKFAELSIIEQMKTLLLLVDVLKTGRINTCNLKPVGGVESYHTERMSAILKNTKYSDIRIIDQSPTGLYEKKSDNLLEL

SEQ ID NO: 20460 - protein, 1384 aa, unidentified
  REGION 1..1384: note = Cas Enzyme sequence
MSFKENSKFYFGLDIGTDSVGWAVTDNLYKLYKYKNNLMWGVSLFEAASPAEERRGHRTARRRLDRRQQRVALLRELFAKEILKTDPDFFLRLKESSLYPEDRTNKNVNTYFDDADFKDSDYFKMYPTVHHLIKELSESNKPHDVRLVYLACAFIVAHRGHFLNGADENNVQEVLDFNSSYCEFTDWFKSNDIEDNPFSESTEDEFSVILRKKIGITAKEKEIKNLLFGTTKTPDCYKDEEYPIDIDVLIKFISGGKTNLAKLFRNPAYDELDIQTVEVGKADFADAIDLLASSMEDTDVPLLSAVKAMYDWSLLIDVLKGQKTISDAKVCEYEQHKSDLKALKHIVRKYLDKAQYDEIFRTAGEKPNYVSYSYNVTDVKLKQLPDKFKKTKSEDFCKYIKSKLEKIKPEPDDEAVYNELIEKCNSKTLCPKQVTDENRVIPYQLYYHELSMILDKASAYLDFLNETEDGISVKQKILTLMKFRIPYFVGPSVKRNETDNVWIVRKAEGRIYPWNFENMVDYDKSEDGFIRRMTCKCTYLAGEDVLPKYSLLYSRYTVLNEINNIKVKDVKISPELKQDIFNELFMKTSRVTVKKITELLKRKGAFSEENGDSLSGVDINIKSSLKSYLDFRRLLENGSLSESDVERIIERITVTTDKPRLISWLKTEYPALPAEDIRYISRLSYKDYGRLSAKMLTGCYELDMDTGEIGGRNIIDLMWAENINLMQIMSDSYGYKSFIEEENKKYYAINPTGSIAQTLREMYVSPSASRAIIRTMDIVKELRKIIKRDPDKIFVEMARGGKPEDKGKRTSSRREQIEKLFASAKEFVSDEEISHLRSQLGSLSDEQLRSEKYYLYFTQFGKCVYSGEAIDFSRLGDNHCYDIDHIYPQSKVKDDSLHNKVLVKSQFNGEKSDDYPIKEQIRNKMHPIWKNLFYRDPKNPTDKIKYERLNRSTPFTEDELAGFIERQLVETRQSTKAVATLLKEMFPDSKIVYVKAGQVSEFRHDFDMLKCREINDLHHAKDAYLNVVVGNVHDVKFTSNPLNFVKNADKHYTIKIKETLKHKVARNGETAWNPETDFDTVKRMMSKNSVRYVRYCYKRKGELFKQQPKKAGNPDLAWLKKNLDPVKYGGYNSKSISCFSLIKCTGVGVVIIPVELLCEKRYFSDDSFASEYAYSVLKNALPAKTIAKISNDDISFPLKRRPIKINTLFEFDGYRVNIRSKHSYSAFKISSAMAAIYSKDTSDYIKAISSYIDKSDKGSKFKPGEAFDVLSNLKVYDEIAKKCISEPFCKISKLAEAGKKMEEGRNKFAELSIIEQMKTLLVLVDVLKTGRVNTCNLKPVGGVENYHTEIMSAILKNTKYIDIRIIDQSPTGLYEKKSDNLLEL

SEQ ID NO: 20461 - protein, 1384 aa, unidentified
  REGION 1..1384: note = Cas Enzyme sequence
MSFKENSKIYYGLDIGTDSVGWSTTNEKYELLRYKNNLMWGVSLFEAASLAEERRGHRTQRRRYDRRQQRVALLGELFAKEILKTDPDFFLRLKESSLYPEDRTSKNVNTYFDDADFKDSDYFKMYPTVHHLIKELSESNKQHDVRLVYLACAFIVAHRGHFLNGADENNVQAVLDFDSSYCEFTDWFKSNDIEDNPFSESVKNEFSVILRKKIGITAKEKEIKNLLFGTTKTPDCYKDEEYPIDIDVLIKFISGGKTNLAKLFRNPSYDELDIQTVEVGKSDFADTIDLLASSMEDTDVPLLSAVKAMYDWSLLIDVLKGQKTISDAKVYEYEQHKSDLKALKYIVRKYLDRAQYDEIFRTAGEKPNYVSYSYNVTDVKLKQLPDKFKKTKSEDFCKYIKSKLEKIKPESDDEAIYNELIEKCNSKTLCPKQVTDENRVIPYQLYYHELSMILDKASAYLDFLNKTEDGISVKQKILTLMKFRIPYFVGPLVKRNETDNVWIVRKAEGRIYPWNFENMVDFDKSEDGFIRRMTCKCTYLAGEDVLPKYSLLYSKYTVLNEINNIKVNGEKISPELKQDIFNELFMKTSRVTVKKITELLKRKGAFSEEKGDSLSGVDINIKSSLKSYLDFRRLLENGSLSENDVERIIERITVTTDKPRLVSWLKAEYSDLPAENIRYISRLSYKDYGRLSAKLLTGCYELDTNTGEIGGRSIIDFMWAENINLMQILSDSYGYKSFIEEENKKYYMINPTGSIAQTLREMYVSPSVSRAIIRTMEIVKELRKITKKDPDKIFVEMVRGGKPEEKGKRTSSRREQIEKLYDSAKAFVSDEDISHLRSQLGSLSDEQLRSEKYYLYFIQFGKCMYSGEAIDFSRLGDNHCYDIDHIFPQSKINDDSLHNKVLVKSQLNGEKSDDYPIKAEIRNKMHLLWKNLFYRDPKNPTDKIKYERLTRSTPFTEDELAGFIERQLVETRQSTKAVATLLKEMFPDSKIVYVKAGQVSEFRHDFDMLKCREINDLHHAKDAYLNIVIGNVHDVKFTSNPMNFVKNADKHYTIKVKETLKHKVSRNGETAWNPETDFDTVKRMMSKNSVRYVRYCYKRKGGFFNQNPDRAGNPDLARLKKDLDPVKYGGYNSKSISCFSLIKCTGVGAVIIPVELLCEKRYFSDDNFASEYAYSVLKNALPAKNIAKISIDDISFPLKRRPIKINTLFEFDGYRVNIRSKDSYSVFKISSAMAAIYSKDTSDYIKAVSSYVDKSDKGSKFKPGEAFDVLSNLKVYDEIAKKCISEPFCKISKLAEAGKKMEEGRDKFAELSIIEQMKTLLLLVDILKTGRINTCNLKSVGGVESYHTERMSAILKNTKYSDIRIIDQSPTGLYEKKSDNLLEL

SEQ ID NO: 20462 - protein, 1384 aa, unidentified; identical to SEQ ID NO: 20457
  REGION 1..1384: note = Cas Enzyme sequence

SEQ ID NO: 20463 - protein, 1383 aa, unidentified
  REGION 1..1383: note = Cas Enzyme sequence
MSFKENSKFYFGLDIGTDSVGWAVTDNLYKLYKYKNNLMWGVSLFEAASPAEDRRGHRTARRRLDRRQQRVALLRELFAKEILKTDPDFFLRLKESSLYPEDRTNKNVNTYFDDADFKDSDYFKMYPTVHHLIKELSESDKPHDVRLVYLACAFIVAHRGHFLNGADENNVQEVLDFNSSYCEFTDWFKSNDIEDNPFSESTENEFSVILRKKIGITAKEKEIKNLLFGTAKTPDCYKDEEYPIDIDVLIKFISGGKTNLAKLFRNPAYDELDIQTVEVGKADFADTIDLLASSMEDTDVPLLSAVKAMYDWSLLIDVLKGQKTISDAKVCEYEQHKSDLKALKHIVRKYLDKAQYDEIFRTAGEKPNYVSYSYNVTDVKLKRLPDKFKKTKSEEFCKYIKSKLEKIKPEPDDEAVYNELIEKCNSKTLCPKQVTDENRVIPYQLYYHELSMILDKASAYLDFLNETEDGISVKQKILTLMKFRIPYFVGPSVKRNETDNVWIVRKAEGRIYPWNFENMVDYDKSEDGFIRRMTCKCTYLAGEDVLPKYSLLYSRYTVLNEINNIKVKDVKISPELKQDIFNELFMKTSRVTVKKITELLKRKGAFSEENGDSLSGVDINIKSSLKSYLDFRRLLENGSLSESDVERIIERITVTTDKPRLISWLKAEYPALPAEDIRYISRLSYKDYGRLSAKMLTGCYELNMDTGEIGGRSIIDLMWAENINLMQIMSDSYGYKSFIEEENKKYYAINPTGSIAQTLREMYVSPSASRAIIRTMDIVKELRKIIKRDPDKIFVEMARGSKPEDKGKRTSSRREQIEKLFASAKEFVSDEEISHLRSQLGSLSDEQLRSEKYYLYFTQFGKCVYSGEAIDFSRLGDNHCYDIDHIYPQSKVKDDSLHNKVLVKSELNGEKSDDLIKPSIRREMHSLWKNLFYRDPKNPTDKIKYERLNRSTPFTEDELAGFIERQLVETRQSTKAVATLLKEMFPDSKIVYVKAGQVSKFRHDFDMLKCREINDLHHAKDAYLNVVVGNVHDVKFTSNPLNFVKNADKHYTIKIKETLKHKVARNGETAWNPETDFDTVKRMMSKNSVRYVRYCYKRKGELFKQQPKKAGNPDLAWLKKNLDPVKYGGYNSKSISCFSLIKCTGVGAVIIPVELLCEKRYFSDDNFASEYAYSVLKNALPTKTIAKISIDDISFPLKRRPIKINTLFEFDGYRVNIRSKDSYHYFTISSAMAAIYSKDTSDYIKAVSSYIDKSDKGSKFKPGEAFDVLSNLKVYDEIAKKCISEPFCKISKLAEAGKKMEEGRDKFAELSIIEQMKALLLLVDILKTGRINTCNLKPVGGVESYHTERMSAILKNTKYSDIRIIDQSPTGLYEKKSDNLLEL

SEQ ID NO: 20464 - protein, 1384 aa, unidentified
  REGION 1..1384: note = Cas Enzyme sequence
MSFKENSKIYYGLDIGTDSVGWSTTNEKYELLRYKNNLMWGVSLFEAASLAEERRGHRTQRRRYDRRQQRVALLGELFAKEILKTDPDFFLRLKESSLYPEDRTSKNVNTYFDDADFKDSDYFKMYPTVHHLIKDLSESNKPHDVRLVYLACAFIVAHRGHFLNGADENNVQAVLDFDSSYCEFTDWFKSNDIEDNPFSESVKNEFSVILRKKIGITAKEREIKNLLFGNTKTPDCYKDEEYPIDIDVLIKFISGGKTNLAKLFRNPSYDELDIQTVEVGKADFADTIDLLASSMEDTDVPLLSAVKAMYDWSLLIDVLKGQKTISDAKVCEYEQHKSDLKALKYIVRKYLDRAQYDEIFRTAGEKPNYVSYSYNVTDVKLKQLPSNFKKKNSEEFCKYIKSKLEKIKPESDDEAVYNELIEKCNSKTLCPKQVTDENRVIPYQLYYHELSMILDKASAYLDFLNKTEDGISVKQKILTLMKFRIPYFVGPLVKRNETDNVWIVRKAEGRIYPWNFENMVDFDKSEDGFIRRMTCKCTYLAGEDVLPKYSLLYSKYTVLNEINNIKVNGEKISPELKQDIFNELFMKTSRVTVKKITELLKRKGAFSEEKGDSLSGVDINIKSSLKSYLDFRRLLDNGFLSENDVERIIERITVTTDKPRLVSWLKAEYSDLPAEDIRYISRLSYKDYGRLSAKLLTGCYELDTNTGEIGGRSIIDFMWAENINLMQILSDSYGYKSFIEEENKKYYMINPTGSIAQTLREMYVSPSVSRAIIRTMEIVKELRKITKKDPDKIFVEMARGGKPEEKGKRTSSRREQIEKLYDSAKAFVSDEDISHLRSQLGSLSDEQLRSEKYYLYFIQFGKCMYSGEAIDFSRLGDNHCYDIDHIFPQSKINDDSLHNKVLVKSQLNGEKSDDYPIKAEIRNKMHPLWKNLFYRDPKNPTDKVKYERLTRSTPFTEDELAGFIERQLVETRQSTKAVATLLKEMFPDSKIVYVKAGQVSEFRHDFDMLKCREINDLHHAKDAYLNIVIGNVHDVKFTSNPMNFVKNADKHYTIKVKETLKHKVSRNGETAWNPETDFDTVKRMMSKNSVRYVRYCYKRKGGFFNQNPDRAGNPDLARLKKDLDPVKYGGYNSKSISCFSLIKCTGVGAVIIPVELLCEKSYFSDDSFASEYAYSVLKNALPAKNIAKISIDDISFPLKRRPIKINTLFEFDGYRVNIRSKDSYHYFTISSAMAAIYSKDTSDYIKAVSSYIDKSDKGSKFKPGEAFDVLSNLKVYDEIAKKCISEPFSKISKLAEAGKKMEEGRDKFAELSIIEQMKTLLLLVDVLKTGRINTCNLKPVGGVESYHTERMSAILKNTKYSDIRIIDQSPTGLYEKKSDNLLEL

SEQ ID NO: 20465 - protein, 1384 aa, unidentified
  REGION 1..1384: note = Cas Enzyme sequence
MSFKENSKIYYGLDIGTDSVGWSTTNEKYELLRYKNNLMWGVSLFEAASLAEDRRDHRTQRRRYDRRQQRVALLGELFAKEILKTDPDFFLRLKESSLYPEDRTSKNVNTYFDDADFKDSDYFKMYPTVHHLIKELSESNKPHDVRLVYLACAFIVAHRGHFLNGADENNVQAVLDFDSSYCEFTDWFKSNDIEDNPFSESVKNEFSVIIRKKIGITAKEREIKNLLFGTTKTPDCYKDEEYPIDIDVLIKFISGGKTNLAKLFRNPSYDELDIQTVEVGKADFADTIDLLASSMEDTDVPLLSAVKAMYDWSLLIDVLKGQKTISDAKVCEYEQHKSDLKALKYIVRKYLDRALYDEIFRTAGEKPNYVSYSYNVTDVKLKQLPSNFKKKNSEEFCKYIKSKLEKIKPESDDEAVYNELIEKCNSKTLCPKQVTDENRVIPYQLYYHELSMILDKASAYLDFLNKTEDGISVKQKILTLMKFRIPYFVGPLVKRNETDNVWIVRKAEGRIYPWNFENMVDFDKSEDGFIRRMTCKCTYLAGEDVLPKYSLLYSKYTVLNEINNIKVNGEKISPELKQDIFNELFMKTSRVTVKKITELLKRKGAFSEEKGDSLSGVDINIKSSLKSYLDFRRLLENGSLSENDVERIIERITVTTDKPRLVSWLKAEYSDLPAEDIRYISRLSYKDYGRLSAKLLTGCYELDTNTGEIGNRSIIDFMWAENINLMQILSDSYGYKSFIEEENKKYYMINPTGSIAQTLREMYVSPSVSRAIIRTMEIVKELRKITKKDPDKIFVEMARGGKPEEKGKRTSSRREQIEKLYDSAKAFVSDEDISHLRSQLGSLSDEQLRSEKYYLYFIQFGKCMYSGEAIDFSRLGDNHCYDIDHIFPQSKINDDSLHNKVLVKSQLNGEKSDDYPIKAEIRNKMHPLWKNLFYRDPKNPTDKVKYERLTRSTPFTEDELAGFIERQLVETRQSTKAVATLLKEMFPDSKIVYVKAGQVSEFRHDFDMLKCREINDLHHAKDAYLNIVIGNVHDVKFTSNPMNFVKNADKHYTIKVKETLKHKVSRNGETAWNPETDFDTVKRMMSKNSVRYVRYCYKRKGGFFNQNPDRAGNPDLARLKKDLDPVKYGGYNSKSISCFSLIKCTGVGAVIIPVELLCEKRYFSDDSFASEYAYSVLKNALPAKNIAKISIDDISFPLKRRPIKINTLFEFDGYRVNIRSKDSYHYFTISSAMAAIYSKDTSDYIKAVSSYIDKSDKGSKFKPGEAFDVLSNLKVYDEIAKKCISEPFSKISKLAEAGKKMEEGRDKFAELSIIEQMKTLLLLVDILKTGRINTCNLKPVGGVESYHTERMSAILKNTKYSDIRIIDQSPTGLYEKKSDNLLEL

SEQ ID NO: 20466 - protein, 1324 aa, unidentified
  REGION 1..1324: note = Cas Enzyme sequence
MEEKKTIRPHSPYYIGLDVGTNSVGWAVTDPEYNVLRFKGNSMWGARLFEEAKPAADRRAARIARRRLERRKQRLLYLEEFFSAEIGKSDPLFFRRLHESALFPDDKTTGTGKYTLFNDPDFTDRDYLRRYPTVYHLRSELVHSSEPHDPRLVFLALHHIIKHRGHFLYETSENGDECPTVDAAMQELTEYLSAEMNVELGLEPEYFTILTDRNMRISQKKAALRAALGRLVQTEESGADIQALSDLLAGAKVKLAALYDDESLKNAEPASVALSDDLDAVFDALSSALGERVELLLAAKKVFDAARLSEMRGGEAYLCDAKVRQYEKNHADLRALKDYVREAAPDKYRSIFYKNAKFPNNYAAYSRYRSESGDKTCKQEDFCAFLKSVLPKPAAEHPFAPQYAQIEEKTFLPRLTGSENGIIPYQLHRQELRKILDNASAYLPFLLEEDEDGISVREKIEAVFSFRVPYYVGPLKGRWAKRTEEAKRTGEKAYPWNFEKVVDLDASAAAFLKDLIGKCTYTSAPVLPKDSLLYSEFMLLNELNPLRLNGNELPVSVKQQLIEDLFKKENRRVTKKRILDYLVMHGYAAKTDEISGIDDPVKTRLRSYHDFAPLIPVLGEEAVEKIIEGTLVYSDDKRMLRRWLKKNFPALNEDDVRKICRLKYADWGRLSKEFLTELYSGADEQGEAQNILYFLRNTNLNLMQLLNDPEHANLPAAAEERRLARFGSNSLRSQLDEMYISPAVRRSIWQTLKIAEEIAHIRGGAPAKIFVEVARGEDAAKKGKRTKSRKEQLLELYKACEEDSGKLYDQLAATDESNLRKDKLFLYYTQFGKCMYSGEPIDLEAALRNDETYDIDHIFPRSRIKDDSIENRVLVKSVLNREKTNTYPISQDIRSRMLPFWSMLHDKKMIGDKKYDRLKRNTELTDDELAAFVQRQLTETQQSTKALTQLLQEIYPEAEIVYSKAGNVSEFRQEFGLLKCREVNDLHHAKDAYLNIVVGNVYKTKFTDRFFLNIRKENYSLKKVFDWDTPGAWKADGTSIATVKKYMAKNNPIITRMPREEKGQLFNLNIMPAGLGQLPIKAGKPIEKYGGYNKLAGSYYCVVEHTEKKKRVRSIETVLLYARGLYESDPVKYCREILGLVDPVVVAPKIRINSLLQLDGFRLYPSGRTGNRIIYKHAYQLAIDAERERYIRNLTKYIERCAKIEYPATAFDGISAEENVALYNWFVERLESSAYGKLMQALLANLKASDETFKNMDILSQAKTLMEVLKAFKCDAQSSNLKDLCGKGSVGTILKNASLQGVQSAYLIHQSPTGLYEYRTDLLH

SEQ ID NO: 20467 - protein, 1324 aa, unidentified
  REGION 1..1324: note = Cas Enzyme sequence
MEEKKTIRPHSPYYIGLDVGTNSVGWAVTDPEYNVLRFKGNSMWGARLFEEAKPAADRRAARIARRRLERRKQRLLYLEEFFSAEIGKSDPLFFRRLHESALFPDDKTTGTGKYTLFNDPDFTDRDYLRRYPTVYHLRSELVHSSEPHDPRLVFLALHHIIKHRGHFLYETSENGDECPTVDAAMQELTEYLSAEMNVELGLEPEYFTILTDRNMRISQKKAALRAALGRSVQTEESGADIQALSDLLAGAKVKLAALYDDESLKNAEPASVALSDDLDAVFDALSSALGERVELLLAAKKVFDAARLSEMRGGEAYLCDAKVRQYEKNHADLRALKDYVREAAPDKYRSIFYKNAKFPNNYAAYSRYRSESGDKTCKQEDFCAFLKSVLPKPAAEHPFAPQYAQIEEKTFLPRLTGSENGIIPYQLHRQELRKILDNASAYLPFLLEEDEDGISVREKIEAVFSFRVPYYVGPLKGRWAERTEEAKRTGEKAYPWNFEKVVDLDASAAAFLKDLIGKCTYTGAPVLPKDSLLYSEFMLLNELNPLRLNGNELPVSVKQQLIEDLFKKENRRVTKKRILDYLVMHGYAAKTDEISGIDDPVKTRLRSYHDFAPLIPVLGEEAVEKIIEGTLVYSDDKRMLRRWLKKNFPALNEDDVRKICRLKYADWGRLSKEFLTELYSGADEQGEAQNIMYFLRNTNLNLMQLLNDPEHANLPAAAEERRRARFGSNSLRSQLDEMYISPAVRRSIWQTLKIAEEIAHIRGGAPAKIFVEVARGEDKEKKGTRTKSRKEQLLELYKACERDSGELYEKLAATEESALRRDKLFLYYTQFGKCMYSGEPIDLETALRDDTTYDIDHIFPRSRIKDDSIENRVLVKSVLNREKTNTYPISQDIRSRMLPFWSMLHDKKMIGDKKFDRLKRNTELTDDELAAFVQRQLTETQQSTKALAQLLQEIYPEAEIVYSKAGNVSGFRQEFGLLKCREVNDLHHAKDAYLNIVVGNVYKTKFTDRFFLNIRKENYSLKKVFDWDTPGAWKADGTSIATVKKYMAKNNPIITRMPREEKGQLFNLNIMPAGLGQLPIKAGKLIEKYGGYNKLTGSYYCVVEHTEKKKRVRSIETVLLYARGLYESDPVKYCREILGLVDPVVVAPKIRIDALLELDGFRLYPSGRTNDKIIYKHNYPLAIDAGREKYIRNLTKYIERCAKIEYPATAFDGISAEENVALYNWFVERLESSVYGKLMPALLANLKSSAETFEKMGILSQGKTLMEILKAFKCDAQNPNLKELCGKGVVGRIEKSSNLRSFQSAYLINQSPTGLYEYRTDLLH

SEQ ID NO: 20468 - protein, 1324 aa, unidentified
  REGION 1..1324: note = Cas Enzyme sequence
MEKKKTIRPHSPYYIGLDVGTNSVGWAVTDPEYNVLRFKGNSMWGARLFEEAKPAADRRAARIARRRLERRKQRLLYLEEFFSAEIGKSDPLFFRRLHESALFPDDKTAGTGKYTLFNDPDFTDRDYLRRYPTVYHLRSELVHSSEPHDPRLVFLALHHIIKHRGHFLYETSGNGDECPTVDAAMQELTEYLSAEMNVELGLEPEYFTILTDRNMRISQKKAALRAALGRSVQTEESGADIQALSDLLAGAKVKLAALYDDESLKNAEPASVALSDDLDAVFDALSSALGERVELLLAAKKVFDAARLSEMRGGEAYLCDAKVRQYEKNHADLRALKDYVREAAPDKYRSIFYKNAKFPNNYAAYSRYRSESGDKTCKQEDFCAFLKSVLPKPAAEHPFAPQYAQIEEKTFLPRLTGSENGIIPYQLHRQELRKILDNASAYLPFLLEEDEDGISVREKIEAVFSFRVPYYVGPLKGRWAERTEEAKRTGEKAYPWNFEKVVDLDASAAAFLKDLIGKCTYTGAPVLPKDSLLYSEFMLLNELNPLRLNGNELPVSVKQQLIEDLFKKENRRVTKKRILDYLVMHGYAAKTDEISGIDDPVKTRLRSYHDFAPLIPVLGEEAVEKIIEGTLVYSDDKRMLRRWLKKNFPALNEDDVRKICRLKYADWGRLSKEFLTELYSGADEQGEAQNIMYFLRNTNLNLMQLLNDPEHANLPAAAEERRRARFGRDSFRSQLDEMYISPAVRRSIWQTLKIAEEIAHIRGGAPAKIFVEVARGEDKEKKGTRTKSRKEQLLELYKACERDSGELYEKLAATEESALRRDKLFLYYTQFGKCMYSGEPIDLETALRDDTTYDIDHIFPRSRIKDDSIENRVLVKSVLNREKTNTYPISQDIRSRMLPFWSMLHDKKMIGDKKYDRLKRNTELTDDELAAFVQRQLTETQQSTKALAQLLQEIYPEAEIVYSKAGNVSEFRQEFGLLKCREVNDLHHAKDAYLNIVVGNVYKTKFTDRFFLNIRKENYSLKKVFDWDTPGAWKADGTSIATVKKYMAKNNPIITRMPREEKGQLFNLNIMPAGLGQLPIKAGKPIEKYGGYNKLAGSYYCVVEHTEKKKRVRSIETVLLYARGLYESDPVKYCREILGLVDPVVVAPKIRIDALLELDGFRLYPSGRTGDMIVYKHGYPLAIDARREKYIRNLTKYIERCAKIEYPATAFDGISAEENVALYNWFVERLESSVYGKLMPALLANMKSSAEAFEKMGILSQAKTLMEILKAFKCDAQNPNLKELCGKGLVGRIQKKAALQGFQSAYLINQSPTGLYEYRTDLLH

SEQ ID NO: 20469 - protein, 1324 aa, unidentified
  REGION 1..1324: note = Cas Enzyme sequence
MEEKKTIRSHSPYYIGLDIGTNSVGWAVTDPEYNVLRFKGNSMWGARLFEEAKPAADRRAARIARRRLERRKQRLLYLEEFFSAEIGKSDPLFFRRLHESALFPDDKTTGTGKYTLFNDPDFTDRDYLRRYPTVYHLRSELVHSSEPHDPRLVFLALHHIIKHRGHFLYETSENGDECPTVDAAMRELTEYLSAEMNVELGLEPEYFTILVDRNMRISQKKAALRAALGRSVQTEESGADIQALSDLLAGAKVKLAALYDDESLKNAEPASVALSDDLDAVFDALSSALGERVELLLAAKKVFDAARLSEMRGGEAYLCDAKVRQYEKNHADLRELKDYVREAAPDKYRSIFYKNAKFPNNYAAYSRYRSESGDKTCKQEDFCAFLKSVLPKPAAEHPFAPQYAQIEEKTFLPRLTGSENGIIPYQLHRLELRKILDNASAYLPFLLEEDEDGISVREKIEAVFSFRVPYYVGPLKGHWAARTGEKVHPWNFEKTVDLDASAAAFLKDLIGKCTYTGAPVLPKDSLLYSEFMLLNELNPLRLNGNELPVSVKQQLIEDLFKKENRRVTKKRILDYLVMHGYAAKTDEISGIDDPVKTRLRSYHDFAPLIPVLGEEAVEKIIEGTLVYSDDKRMLRCWLKKNFPALNEDDVRKICRLKYADWGRLSKEFLTELYSGADEQGEAQNILYFLRNTNLNLMQLLNDPEHANLPAAAEERRHARFGRDSLRSQLDEMYISPAVRRSIWQTLKIAEEIAHIRGGAPAKIFVEVARGEDKEKKGTRTKSRKEQLLELYKACERDSGELYEKLAATEESALRRDKLFLYYTQFGKCMYSGEPIDLETALRDDTTYDIDHIFPRSRIKDDSIENRVLVKSVLNREKTNTYPISQEIRSRMLPFWSMLHDKKMIGDKKYDRLKRNTELTEDELASFVQRQLTETQQSTKALAQLLKERYPESEIVYSKAGNISEFRQKFEMLKCREVNDLHHAKDAYLNIVVGNVYKTKFTDRFFLNIRKENYSLKEVFDWDTPGAWKADGTSIATVKKYMAKNNPIITRMPREEKGLLFKQTIMPAGKGQIRIKADKPIEKYGGYTSRFASHFMVVEHQRGRKRVRTIEPVYIYGKTLFKNNPVKYCTQILQLTNPSVVYSPIYIDSTLELDGERLTLTGGTASSGDGRDLYNHTVQLAVDDQKTKWIKSILKYLERCSEQRKEIPVTPFDGVDSEKNKALYDFFLKKLSSNCYGKLFTKEGQVLAKRRDDFSMLPVAAQCRIIAEVLKLFTCTAELPNLKELCGSAIGERIRKSANISGLNSAYLIHQSPTGLYEYRTDLLH

SEQ ID NO: 20470 - protein, 941 aa, unidentified
  REGION 1..941: note = Cas Enzyme sequence
MEEKKTIRPHSPYYIGLDVGTNSVGWAVTDPEYNVLRFKGNSMWGARLFEEAKPAADRRAARIARRRLERRKQRLLYLEEFFSAEIGKSDPLFFRRLHESALFPDDKTAGAGKYTLFNDPDFTDRDYLRRFPTVYHLRSELVHSSEPHDPRLVFLALHHIIKHRGHFLYETSENGDECPTVDAAMRELTEYLSAEMNVELGLEPEYFTILVDRNMRISQKKAALRAALGRSVQTEESGADIQALSDLLAGAKVKLAALYDDESLKNAEPASVALSDDLDAVFDALSSALGERVELLLAAKKVFDAARLSEMRGGEAYLCDAKVRQYEKNHADLRELKDYVREAAPDKYRSIFYKNAKFPNNYAAYSRYRSESGDKTCKQEDFCAFLKSVLPKPAAEHPFAPQYAQIEEKTFLPRLTGSENGIIPYQLHRLELRKILDNASAYLPFLLEEDEDGISVREKIEAVFSFRVPYYVGPLKGRWAERTEEAKRTGEKAYPWNFEKVVDLDASAAAFLKDLIGKCTYTGAPVLPKDSLLYSEFMLLNELNPLRLNGNELPVSVKQQLIEDLFKKENRRVTKKRILDYLVMHGYAAKTDEISGIDDPVKTRLRSYHDFAPLIPMLGEEAVEKIIEGTLVYSDDKRMLRRWLKKNFPALNEDDVRKICRLKYADWGRLSKEFLTELYSGADEQGEAQNILYFLRNTNLNLMQLLNDPEHTNLPAAAEERRLARFGSNSLRSQLDEMYISPAVRRSIWQTLKIAEEIAHIRGGAPAKIFVEVARGEDKEKKGTRTKSRKEQLLELYKACERDSGELYEKLAATEESALRRDKLFLYYTQFGKCMYSGEPIDLETALRDDTTYDVDHIFPRSRIKDDSIENRVLVKSVLNREKTNTYPISQDIRSRMLPFWSMLHDKKMIGDKKFDRLKRNTELTDDELASFVQRQLTETQ

SEQ ID NO: 20471 - protein, 1324 aa, unidentified
  REGION 1..1324: note = Cas Enzyme sequence
MEEKKTIRPHSPYYIGLDVGTNSVGWAVTDPEYNVLRFKGNSMWGARLFEEAKPAADRRAARIARRRLERRKQRLLYLEEFFSAEIGKSDPLFFRRLHESALFPDDKTAGAGKYTLFNDPDFMDRDYLRRYPTVYHLRSELVHSSEPHDPRLVFLALHHIIKHRGHFLYETSENGDECPTVDAAMRELTEYLSAEMNVELGLEPEYFTILTDRNMRISQKKAALRAALGRSVQTEESGADIQALSDLLAGAKVKLAALYDDKSLKNAEPASVALSDDLDAVFDALSSALGERVELLLAAKKVFDAARLSEMRGGEAYLCDAKVRQYEKNHADLRALKDYVREAAPDKYRSIFYKNAKFPNNYAAYSRYRSESGDKTCKQEDFCAFLKSVLPKPAAEHPFAPQYAQIEEKTFLPRLTGSENGIIPYQLHRLELRKILDNASAYLPFLLEEDEDGISVREKIEAVFSFRVPYYVGPLKGRWAERTEEAKRTGEKAYPWNFEKVVDLDASAAAFLKDLIGKCTYTGAPVLPKDSLLYSEFMLLNELNPLRLNGNELPVSVKQQLIEDLFKKENRRVTKKRILDYLVMHGYAAKTDEISGIDDPVKTRLRSYHDFAPLIPMLGEEAVEKIIEGTLVYSDDKRMLRRWLKKNFPALNEDDVRKICRLKYADWGRLSKEFLTELYSGADEQGEAQNILYFLRNTNLNLMQLLNDPEHTNLPAAAEERRLARFGSNSLRSQLDEMYISPAVRRSIWQTLKIAEEIAHIRGGAPAKIFVEVARGEDKEKKGTRTKSRKEQLLELYKACERDSGELYEKLAATEESALRRDKLFLYYTQFGKCMYSGEPIDLETALRDDTTYDVDHIFPRSRIKDDSIENRVLVKSVLNREKTNTYPISQDIRSRMLPFWSMLHDKKMIGDKKFDRLKRNTELTDDELASFVQRQLTETQQSTKALAQLLQEIYPEAEIVYSKAGNVSEFRQEFGLLKCREVNDLHHAKDAYLNIVVGNVYKTKFTDRFFLNIRKENYSLKKVFDWDTPGAWKADGTSIATVKKYMAKNNPIITRMPREEKGQLFNLNIMPAGLGQLPIKAGKPIEKYGGYNKLAGSYYCVVEHTEKKKRVRSIETVLLYARGLYESDPVKYCCEILGLVDPVVVAPKICIDALLELDGFRLYPSGRTGDMIVYKHGYPLAIDAERERYVRNLTKYIERCAKIEYPATAFDGISAEENVALYNWFVERLESSVYGKLMPALLSNLKSSAEAFEKMGILSQAKTLMEILKAFKCDAQNPNLKELCGKGLVGRIQKKAALQGFQSAYLINQSPTGLYEYRTDLLH

SEQ ID NO: 20472 - protein, 1318 aa, unidentified
  REGION 1..1318: note = Cas Enzyme sequence
MEEKKTIRSHSPYYIGLDIGTNSVGWAVTDPEYNVLRFKGNSMWGATLFEEAKPAADRRAARIARRRLERRKQRLLYLEEFFSAEIGKSDPLFFRRLHESALFPDDKTTGTGKYTLFNDPDFTDRDYLRRYPTVYHLRSELVHSSEPHDPRLVFLALHHIIKHRGHFLYETSENGDECPTVDAAMRELTEYLSAEMNVELGLEPEYFTILVDRNMRISQKKAALRAALGRSVQTEESGADIQALSDLLAGAKVKLAALYDDESLKNAEPASVALSDDLDAVFDALSSALGERVELLLAAKKVFDAARLSEMRGGEAYLCDAKVRQYEKNHADLRELKDYVREAAPDKYRSIFYKNAKFPNNYAAYSRYRSESGDKTCKQEDFCAFLKSVLPKPAAEHPFAPQYAQIEEKTFLPRLTGSENGIIPYQLHRLELRKILDNASAYLPFLLEEDEDGISVREKIEAVFSFRVPYYVGPLKGHWAARTGEKVHPWNFEKTVDLDASAAAFLKDLIGKCTYTGAPVLPKDSLLYSEFMLLNELNPLRLNGNELPVSVKQQLIEDLFKKENRRVTKKRILDYLVMHGYAAKTDEISGIDDPVKTRLRSYHDFAPLIPVLGEEAVEKIIEGTLVYSDDKRMLRRWLKKNFPALNEDDVRKICRLKYADWGRLSKEFLTELYSGADEQGEAQNILYFLRNTNLNLMQLLNDPEHANLPAAAEERRHARFGRDSLRSQLDEMYISPAVRRSIWQTLKIAEEIAHIRGGAPAKIFVEVARGEDKEKKGTRTKSRKEQLLELYKACERDSGELYEKLAATEESALRRDKLFLYYTQFGKCMYSGEPIDLETALRDDTTYDIDHIFPRSRIKDDSIENRVLVKSVLNREKTNTYPISQEIRSRMLPFWSMLHDKKMIGDKKYDRLKRNTELTEDELASFVQRQLTETQQSTKALAQLLKERYPESEIVYSKAGNISEFRQKFEMLKCREVNDLHHAKDAYLNIVVGNVYKTEFTDRFFLNIRKENYSLKKVFDGDTPGAWKADGTSIATVKKYMAKNNPIITRMPREEKGQLFNLNIMPAGLGQLPIKAGKPIEKYGGYNKLAGSYYCVVEHTEKKKRVRSIETVLLYARGLYESDPVKYCREILGLVDPVVVAPKIRIDAFLELDGFRLYPSGRTGDRIIYKHAYQLAIDAERERYIRNLTKYIERCAKIEYPATAFDGISAEENVALYNWFVERLESSAYGKLMQALLANLKASDETFKNMDILSQAKTLMEILKAFKCDAQISNLKDLCGKGNVGKILKNASLQGFQSAYLIHQSPTGLYEYRTDLLH

SEQ ID NO: 20473 - protein, 1330 aa, unidentified
  REGION 1..1330: note = Cas Enzyme sequence
MEEKKTIRPHSPYYIGLDVGTNSVGWAVTDPEYNVLRFKGNSMWGARLFEEAKPAADRRAARIARRRLERRKQRLLYLEEFFSAEIGKSDPLFFRRLHESALFPDDKTAGAGKYTLFNDPGFTDRDYLRRYPTVYHLRSELVHSSEPHDPRLVFLALHHIIKHRGHFLYETSENGDECPTVDAAMQELTEYLSAEMNVELGLEPEYFTILTDRNMRISQKKAALRAALGRSVQTEESGADIQALSDLLAGAKVKLAALYDDESLKNAEPASVALSDDLDAVFDALSSALGERVELLLAAKKVFDAARLSEMRGGEAYLCDAKVRQYEKNHADLRALKDYVREAAPDKYRSIFYKNAKFPNNYAAYSRYRSESGDKTCKQEDFCAFLKSMLPKPAAEHPFAPQYAQIEEKTFLPRLTGSENGIIPYQLHRQELRKILDNASAYLPFLLEEDEDGISVREKIEAVFSFRVPYYVGPLKGRWAERTEEAKRTGEKVYPWNFEKVVDLDASAAAFLKDLIGKCTYTGAPVLPKDSLLYSEFMLLNELNPLRLNGNELPVSVKQQLIEDLFKKENRRVTKKRILDYLVMHGYAAKTDEISGIDDPVKTRLRSYHDFAPLIPVLGEEAVEKIIEGTLVYSDDKRMLRRWLKKNFPALNEDDVRKICRLKYADWGRLSKEFLTELYSGADEQGEAQNIMYFLRNTNLNLMQLLNDPEHANLPAAAEERRRARFGSNSLRSQLDEMYISPAVRRSIWQTLKIAEEIAHIRGGAPEKIFVEVARGEDAAKKGKRTKSRKEQLLELYKACEEDSGKLYDQLAATDESNLRKDKLFLYYTQFGKCMYSGEPIDLEAALRNDETYDIDHIFPRSRIKDDSIENRVLVKSVLNREKTNTYPISQDIRSRMLPFWSMLHDKKMIGDKKFDRLKRNTELTDDELAAFVQRQLTETQQSTKALAQLLQEIYPEAEIVYSKAGNVSEFRQEFEMLKCREVNDLHHAKDAYLNIVVGNVYKTEFTDRFFLNIRKENYSLKKVFDGDTPGAWKADGTSIATVKKYMAKNNPIITRMPREEKGLLFKQTIMPAGKGQIRIKADKPIEKYGGYTSRFASHFIVVEHQRGRKRVRTIEPVYIYGKTLFKNNPVKYCTQILQLTNPSVVYSPIYIDSTLELDGERLTLTGGTASSGDGRDLYNHTVQLAVDDQKTKWIKSILKYLERCSEQRKEIPVTPFDGVDSEKNKALYDFFLKKLSSNCYGKLFTKEGQVLAKRRDDFSMLPVAAQCRIIAEVLKLFTCTAELPNLKELCGSAIGERIRKSANISGLNSAYLIHQSPTGLYEYRTDLLH

SEQ ID NO: 20474 - protein, 1324 aa, unidentified
  REGION 1..1324: note = Cas Enzyme sequence
MEEKKTIRPHSPYYIGLDVGTNSVGWAVTDPEYNVLRFKGNSMWGARLFEEAKPAADRRAARIARRRLERRKQRLLYLEEFFSAEIGKSDPLFFRRLHESALFPDDKTAGTGKYTLFNDPDFTDRDYLRRYPTVYHLRSELVHSSEPHDPRLVFLALHHIIKHRGHFLYETSENGDECPTVDAAMQELTEYLSAEMNVELGLEPEYFTILTDRNMRISQKKAALRAALGRSVQTEESGADIQALSDLLAGAKVKLAALYDDESLKNAEPASVALSDDLDAVFDALSSALGERVELLLAAKKVFDAARLSEMRGGEAFLCDAKVRQYEKNHADLRALKDYVREAAPDKYRSIFYKNAKFPNNYAAYSRYRSESGDKTCKQEDFCAFLKSVLPKPAAEHPFAPQYAQIEEKTFLPRLTGSENGIIPHQLHRQELRKILDNASAYLPFLLEEDEDGISVREKIEAVFSFRVPYYVGPLKGRWAERTEEAKRTGEKAYPWNFEKVVDLDASAAAFLKDLIGKCTYTGASVLPKDSLLYSEFMLLNELNPLRLNGNELPVSVKQQLIEDLFKKENRRVTKKRILDYLVMHGYAAKTDEISGIDDPVKTRLRSYHDFAPLIPVLGEEAVEKIIEGTLVYSDDKRMLRRWLKKNFPALNEDDVRKICRLKYADWGRLSKEFLTELYSGADEQGEAQNIMYFLRNTNLNLMQLLNDPEHANLPAAAEERRRARFGRDSLRSQLDEMYISPAVRRSIWQTLKIAEEIAHIRGGAPAKIFVEVARGEDKEKKGTRTKSRKEQLLELYKACERDSGELYEKLAATEESALRRDKLFLYYTQFGKCMYSGEAIDLETALRDDTTYDIDHIFPRSRIKDDSIENRVLVKSVLNREKTNTYPISQDIRSRMLPFWSMLHDKKMIGDKKYDRLKRNTELTDDELAAFVQRQLTETQQSTKALAQLLQEIYPEAEIVYSKAGNVSEFRQEFGLLKCREVNDLHHAKDAYLNIVVGNVYKTKFTDRFFLNIRKENYSLKKVFDWDTPGAWKADGTSIATVKKYMAKNNPIITRMPREEKGQLFNLNIMPAGLGQLPIKAGKPIEKYGGYNKLAGSYYCVVEHTEKKKRVRSIETVLLYARGLYESDPVKYCREILGLVDPVVVAPKIRIDALLELDGFRLYPSGRTGDMIVYKHGYPLAIDAGREKYIRNLTKYIERCAKIEYPATAFDGISAEENVALYNWFVERLESSVYGKLMPALLANLKSSAEAFEKMGILSQAKTLMEILKAFKCDAQNPNLKELCGKGLVGRIQKKAALQGFQSAYLINQSPTGLYEYRTDLLH

SEQ ID NO: 20475 - protein, 1142 aa, unidentified
  REGION 1..1142: note = Cas Enzyme sequence
GRSVQTEESGADIQALSDLLAGAKVKLAALYDDESLKNAEPASVALSDDLDAVFDALSSALGERVELLLAAKKVFDAARLSEMRGGEAYLCDAKVRQYEKNHADLRALKDYVREAAPDKYRSIFYKNAKFPNNYAAYSRYRSESGDKTCKQEDFCAFLKSVLPKPAAEHPFAPQYAQIEEKTFLPRLTGSENGIIPYQLHRQELRKILDNASAYLPFLLEEDEDGISVREKIEAVFSFRVPYYVGPLKGRWAARTGEKVHPWNFEKTVDLDASAAAFLKDLIGKCTYTGAPVLPKDSLLYSEFMLLNELNPLRLNGNELPVSVKQQLIEDLFKKENRRVTKKRILDYLVMHGYAAKTDEISGIDDPVKTRLRSYHDFAPLIPVLGEEAVEKIIEGTLVYSDDKRMLRRWLKKNFPALNEDDVRKICRLKYADWGRLSKEFLTELYSGADEQGEAQNILYFLRNTNLNLMQLLNDPEHANLPAAAEERRHARFGRDSLRSQLDEMYISPAVRRSIWQTLKIAEEIAHIRGGAPAKIFVEVARGEDKEKKGTRTKSRKEQLLELYKACERDSGELYEKLAATEESALRRDKLFLYYTQFGKCMYSGEPIDLETALRDDTTYDIDHIFPRSRIKDDSIENRVLVKSVLNREKTNTYPISQEIRSRMLPFWSMLHDKKMIGDKKYDRLKRNTELTEDELASFVQRQLTETQQSTKALAQLLKERYPESEIVYSKAGNISEFRQKFEMLKCREVNDLHHAKDAYLNIVVGNVYKTEFTDRFFLNIRKENYSLKKVFDGDTPGAWKADGTSIATVKKYMAKNNPIITRMPREEKGQLFNLNIMPAGLGQLPIKAGKPIEKYGGYNKLAGSYYCVVEHTEKKKRVRSIETVLLYARGLYESDPVKYCREILGLVDPVVVAPKIRIDAFLELDGFRLYPSGRTGDRIIYKHAYQLAIDAERERYIRNLTKYIERCAKIEYPATAFDGISAEENVALYNWFVERLESSAYGKLMQALLANLKASDETFKNMDILSQAKTLMEILKAFKCDAQISNLKDLCGKGNVGKILKNASLQGFQSAYLIHQYRPSALKNHELAGRNGVQPVQAGLQNGLSRRAQYRRRKAHSPERNIRSDDRIHGGLADGLSAVRAE

SEQ ID NO: 20476 - protein, 1323 aa, unidentified
  REGION 1..1323: note = Cas Enzyme sequence
MEEKETIRRNPPYYLGLDVGTNSVGWAVTDPEYNVLRFKGNSMWGARLFDEAKPAADRRAARVARRRLERRKQRLLYLEELFSAEIGKTDPLFFRRLHESALFPEDKTSGIGKYTLFNDPNFTDRDYLRRYPTVYHLRSELVHSSAPHDPRLVFLALHHIIKRRGHFLYETSENGDECLTVDAAMKELKKYLAEEMEIDFTPDASFAALLSDRDLRISQKKMALRAALGASVMTDESGADIKAIADLLAGAKVKLAAIYDDPELKDAEPASIALSDDLDAVFETLSAALGERVELLLVAKKVFDAARLSEMRGGEAYLCDAKVRQYEKNHADLRILKAYVREAVPDKYRSIFYKSTKYPNNYAAYSRHRSESGDKTCKQEDFCAFLKSVLPKPAAEHPFAPLYAQIEEKTFLPRLTGSENGIIPYQLHRQELRKILDNASVYLPFLLEEDGDGISVREKIEAVFSFRVPYYVGPMKGHWAERTEDAKQAGEKVYPWNFEKVVDLDASAAAFLKNLIGKCTYTGAPVLPKDSLLYSEFMLLNELNPLRVNGKELPVSIKEQLIEDLFKKENRRVTKKRILDYLVMHGYAAKTDEVSGIDDPIKTRLRSYHDFAPLLPKLGKEAVEKIIEATLVYSDDKRMLRRWLKKNYPVLTEDEMRSICRLKYADWGRLSQEFLTELYSAADEQGEAQNIIGFLRNTNLNLMQLLNDPQYGNLAAAAEERRRSRFGSDSLRSQLDEMYISPAVRRSIWQTLKITEEIAHIRGGAPEKIFVEVARGEDAAKKGKRTKSRKEQLLELYKACGEDSGKLYDQLAATDENNLRKDKLFLYYTQFGKCMYSGEPIDLETALHDDETYDIDHIFPRSRIKDDSIDNRVLVKSVLNREKTNTYPISQDIRGKMYSFWSALHEQHMISDKKFDRLKRNTELTDEELASFVQRQLTETQQSTKALAQLLQERYPESKIVYSKAGNVSEFRQKYEMLKCREVNDLHHAKDAYLNIVVGNVYKTKFTDRFFLNIRKENYSLNAVFDRDTPGAWKKDESIVTVKKYMAKNNPIITRMPREEKGQLFNLNIMPAGQGQLPIKAGKPIEKYGGYNKLTGSYYCVVEHTEKKKRVRSIETVLLYARGRYESNPVKYCCEILGLVDPVIVVPKIRIDALLELDGFRLYPSARTNDKIVYKHSYPLAIDAEREKYIRNLTKYTERCAKAELPVTAYDKISAEENVALYNWFIERLESSVYGKLMPALLTNLKASIETFEGMSILSQAKTLMEILKAFKCDAQNPNLKELCGKGVVGRIQKKAALQGFQSAYLIHQSPTGLYEYRTDLLH

SEQ ID NO: 20477 - protein, 1336 aa, unidentified
  REGION 1..1336: note = Cas Enzyme sequence
MEVREMKENGNDSRQGDYYVGIDAGTNSIGWAVTDENYRVKKFKGNAMWGVRLFDEAQGADERRTNRTARRRLVRKKQRLMLLELLFAEEIAKVDPNFYLRMQESGLWRDDKTGDSQFALFNDEGFTDREYFQKYPTAYHLRCELLHSEDPHDIRLVYLALHHIMKTRGHFLLDGVEDVEQMTTLDGALDELAAFLQEEYELYFVPKNRAEFIAALETRDIGINARKKALKDAYGKAEDAEDLSIPALLDLLAGAAVKPEVLFEDNSLKDGDVSSISFKNFEDEQENYSELLGDRMETLLKVKNLFDTAQLALILNDKTYISEAKVAQYEQNGHELHLLKEYVRKRIPDKYKLIFDEKKEKLDNYVAYSGDKRRSGAYTCTQEAFCKFLRGKNVELPEPDASDTEMCTIYAKIKDNIFLPKLRSSENGVIPYQLNKQELERILELAAQYLPFLNVVDDDGLSVREKIVKTFEFRVPYYVGPVSDKAKHRWAVRFDEKAKTKVLPWNFEHVIDTEGSAIAFMEQLIGRCTYTGEKVLPKDSLLYSEFALLNELNLLKINGKSLPINVKKQLVQDLFYSSKKNVTKKTISRYLRAEGLMTEEDEVSGIDDKIKSKLRSYHDFRDILVRTGDTAMVEDIIRSILVFGNDKKMLRRWLEHNTHDLTEAEIKHICHLNYQDWGRLSEIFLTKIYSPDENGEAKTIMDYLRETNCNLMQLMSDQYLFAENAKKHYDELFGNGQTLTARLDSMYIAPAVRRCIRQTLRIVDEIVDIEKSVPKKIFIEMARDRAQDVKKGRTESRKDKLIALYRSCKETGNELFKRLENEDENRLRSDKLYLYYTQLGRCMYSGEPIDLESLLRGELYDIDHIFPQSRVKDNSLENRVLVKNTLNREKTNEYPIKSEIRKKMQGFWYGLRQKGLIGQKKLERLTRATPLAEAELSSFVARQLVETQQSTKAMATLLQDIYGDKVRIVYSKAGNVSEFRQKFEFIKCRDVNDLHHAKDAYLNIVVGNVYDTKFTQRFFVNIKNEKYSLRRIFEFDTDGAWKVGETIRTVKKYMAKNNVLVTRMPREVRGALFDLQLMPATKGQLARKQGMDIGRYGGYNKLTGAYFCVVEHTEKKKRIRTIEPVYLYQKSAYESDPVAYCKDILGLCEPVIIVPEVRIDSLLEINGSRFMISGRTGNRIVVKHTYQLLLSNAEEQYVKNLGKYNDRCAAKKEELPVTEHDGISAEENLNLYRLLVKKCNEKVYSTCFTTFIIMGNEMKEYENKFIAMSIWEQTKILLEALKAFRCNAVYGNFKELSGKGTRGLILMNKKISELSSAYMINQSITGLYEHRVDLLK

SEQ ID NO: 20478 - protein, 1351 aa, unidentified
  REGION 1..1351: note = Cas Enzyme sequence
MKKQFGEYYLAFDIGTDSVGWAVTDLNYNLERLNGKYMWGTRLFEAGKTAAERRSFRAARRRLQRRTQRIRLLQEIFAEEISKADMGFFHRLAESKYRLEDKNNQTNTLFNDANFKDKDYHAKFPTIFHLRKTLIESKEKFDVRLVYLALQHILKNRGHFLFEGQRMENVTSFDAAFSPLNNYLEDEYQFAFADDSLDKVQNILKDSSLGVKDKNKYLNDLLGADTKQKKEMVNLICGGTAKIKNILDIAEDTDLEIDKLCFKTMDYADIHDKLLDTIGDLSKIECLDRLKSIFDWSLLAEIKKGNDYLSFAKVDVYEKHKQDIKLLKSLIKKYYDNAAYNEIFNDVNTANNYVAYVGMTKKNNKKQVVLSRKCTQEEFCKFVKGYLDRIKSMDSDVEQLKSKCANVSFAPKQINRDNGVIPYQMHLLELEKILENAKRYLPFLNEKDASGYTAAEKIVKIMTFRIPYYVGPLNDHHKIADGQKGHCWIVKNSDEKIRPWNFERVVDQEACAEAFIRRMTNKCTYMHDADVLPKDSLLYSKFVVLNELNNVCVNGDRLPTDLKQHIYRELFMRQKKVKAKNFRDFMINNGYMRETDSLSGFDGDFKGSLGSLIDFRKIIGVKAGDNKMVEEIIKWIVLFGDTKKLLKDRINKFYGDKLSENEIKAIVNLKYTGWGRLSREFLEQITSQIPGFANELGIITAMYETPNNLMELLSGQYQYLDKLQAYNNTMHEATGSLTYETVADLYVSPAVKRSIWQTLVLAEEIKNVMGHEPKKVFIEMTRSDVQNKKRTVSRKNSLISLYKACKGETRDWLAELENRTDGDLRGDKLFLYYTQMGRCMYTGERIEIGELFSTGADGRALYDIEHIFPQSKIKDDSIDNRVLVKAGANRAKGDQYPVPQEYRNKCGGIWKMLLERGFISQKKYDRLVRNTPFSEDELAGFIARQIVETSQSTKAVAEILKREYKNTEIVYVKAGNVSAFRQKNDFVKCREINDYHHAKDAYLNIVVGNVYNTKFTHSPINFIKSKNNKYSLNKMYDFKVERNGNVAWKPGDNGTIATVKQTMHNNRVLFTRYASQAKGGFFKQMLLKKGKGQHPIKGNMNDPISKIENYGGYDKVAGAYFFLVEHTLKNKRVKTIEYVPILKAVMLQDNPAALLQYCLDDLILHEPRILLAGIKINTLFKVDGFKMHLSGRTGNQLIYKGAEQLVLAVNDAKYIKKIAKYIQRNKEAKGQLPVTVFDKFDKDTNIALYDKLLDKLQNTVYGVRLSAQIKNLEKGRETFINLGVKEQVITLFEILHLFQCNSVNGDLTAIGGAKSAGILVLGKNISELTKISIINQSPTGLFEQEIDLLKL

SEQ ID NO: 20479 - protein, 1351 aa, unidentified
  REGION 1..1351: note = Cas Enzyme sequence
MKKQFGEYYLAFDIGTDSVGWAVTDLNYNLERLNGKYMWGTRLFEAGKTAAERRSFRAARRRLQRRTQRIRLLQEIFAEEISKADMGFFHRLAESKYRPEDKNNQTNTLFNDANFKDKDYHAKFPTIFHLRKTLIESKEKFDVRLVYLALQHILKNRGHFLFEGQRMENVTSFDAAFSPLNNYLEDEYQFAFADDSLDKVQNILKDSSLGVKDKNKYLNDLLGADTKQKKEMVNLICGGTAKIKNILDIVEDTDLEIDKLCFKTMDYADIHDKLLDTIGDLSKIECLDRLKSIFDWSLLAEIKKGNDYLSFAKVDVYEKHKQDIKLLKSLIKKYYDNAAYNEIFNDVNTANNYVAYVGMTKKNNKKQVVLSRKCTQEEFCKFVKGYLDRIKSMDADVEQLKSKCANVSFAPKQINRDNGVIPYQMHLLELEKILENAKRYLPFLNEKDASGYTAAEKIVKIMTFRIPYYVGPLNDHHKIADGQKGHCWIVKNSDEKIRPWNFERVVDQEACAEAFIRRMTNKCTYMHDADVLPKDSLLYSKFVVLNELNNVCVNGDRLPTDLKQHIYRELFMRQKKVKAKNFRDFMINNGYMRETDSLSGFDGDFKGSLGSLIDFRKIIGVKAGDNKMVEEIIKWIVLFGDTKKLLKDRINKFYGDKLSENEIKAIVNLKYTGWGRLSREFLEQITSQIPGFANELGIITAMYETPNNLMELLSGQYQYLDKLQAYNNTMHEATGSLTYETVADLYVSPAVKRSIWQTLVLAEEIKNVMGHEPKKVFIEMTRSDVQNKKRTVSRKNSLISLYKACKGETRDWLAELENRTDGDLRGDKLFLYYTQMGRCMYTGERIEIGELFSTGADGRALYDIEHIFPQSKIKDDSIDNRVLVKAGANRAKGDQYPVPQEYRNKCGGIWKMLLERGFISQKKYDRLVRNTPFSEDELAGFIARQIVETSQSTKAVAEILKREYKNTEIVYVKAGNVSAFRQQNDFVKCREINDYHHAKDAYLNIVVGNVYNTKFTHSPINFIKSKNNKYSLNKMYDFKVERNGNVAWEPGDNGTIATVKQTMHNNRVLFTRYASQAKGGFFKQMLLKKGKGQHPIKGNMNDPISKIENYGGYDKVAGAYFFLVEHTLKNKRVKTIEYVPILKAVMLQDNPAALLHYCLDDLILHEPRILLAGIKINTLFKVDGFKMHLSGRTGNRLIYKGAEQLVLAVNDEKYIKKIAKYIQRNKEVKGQLPVTVFDKFDKDTNIALYDKLLDKLQNTVYGVRLSAQIKNLEKGRETFINLGIKEQVITLFEILHLFQCNSVNGDLTAIGGAKSAGILVLGKNISELPKISIINQSPTGLFEQEIDLLKL

SEQ ID NO: 20480 - protein, 1410 aa, unidentified
  REGION 1..1410: note = Cas Enzyme sequence
MEKELNESKKLYIGLDIGTESVGFALTDENYNVIMHKGKPCMGVRLFDEAKTASERRVLRGAKVRQGRGKFRITLLQGLFESEILKVDPLFFIRMTASGLWQEDKIQKNLGLNTADSLFADNGYKDKAYFANFKTAYHLRWHLLNDSSWAERKPDIRLVYLACHHILKSRGHFLYDADEFKISEAGCDLFKKLNSYLIKENDESDNQKPSISTFKTDSFNEVENLAKDKKLKYKLKLEKLTAVLLGEKDKRLEAMIKSMLGKDFKLSDILDDYQDEENKKFSFNSDWEVLAPELAELAGESFQLIETLKEIYDWFVLEALLGGKQSISEAMIEKHNQHQSQLKALKQLVKDKAKDKYFKIFRSNKEKANYASYIDSNLVGGKEIMNHDNKQCTAEAFYDFLKKELKDLLTEDILADMENGQYLAKLRTKANASVPYQLHKAEMAKILNNAVKHYEIDKDKALSLISFRVPYYVGRLNTHNSENRPVWAEKTAKFIGERTKIAPWNFKEIIDEDKSAEKFIYRMLSKCSRLINETVLPKNSLTYSKFCVLNELNKLKINSAPISVEEKQDIYNKLFLKEKKVTVNKLIGCLGNQITKNDISGFDKDGGGFTSSLAPHIQFLNIFGLNSNEESEAVMESVILWHALFSDKKQVERKIRAEYPNLTNDKVLNLKGLNFSGFGNLSRKFLTEESVVIKSKGEFTSILNILWETNQNLMEIIHNPDYNIAEWLSTENFKDNEAIGYDQVGRSYCAPSVKRSAWQAMLVVDELIKLNGGKKPDKIFIEVTRENLPETKKKRTNSREKQLSELWAKCKDNKSEIAKLKQELAEKSNKQLRAEKLYLYFLQFGKCAYSGDSINISEINNENLWDIDHIIPRALKKDDSLTNKVLVRQVLNKFKDKNYPLNKTSQIHANISKTLPMWEGWLKAGSISEEKFNRLKRTTELSTKDLEGFIARSLVFTGQATTVVADLLEQKYKEEGSNSKKVVYSKAENVSDFRKQFEILKCRDINDLHHAHDAYLNIVVGNAWHTRFSWNKTIWARKYGQEGADWRAYSTNNMFKYDIQGAWVADETINTVRKSLSYSYLPVSKKTGENKGELYKQTVFPAVAKQKEILDGRKKQCDLEVESSLIARKGLAVNPLSNVAKYGGYKGERPAYFMIVEYTEKGKPLRVFDAISILDKKRWEKLQDKEREDELCTKYKASVKIIAPKILIGTLFEIGDIQARLSGRSGSMVLFNNAKQLYLGSESVSYIRTIAKYNEMVKARKIDPSKFEEKKDITVASGEKRDSKTQKLTAGDNLKLWNVLLNKIDKLYGEKTKDLQGKNIGLPDILRKVQGKGYEFSLLSVSGQAEVLTSIIRGLGCNPNAFNFSKIGLGASVGNICPNFKIAYPLTLVKQSVTGLLERRIKIYPFNQEE

SEQ ID NO: 20481 - protein, 1345 aa, unidentified
  REGION 1..1345: note = Cas Enzyme sequence
MKEKTQIPYYLGIDAGSSSIGWAVTDTMYHVLKTKGKAMWGVRLFPDASTAAERRTHRAARRRLQRRKQRLDILEMLFAPALNEKDPQFLARMHESDLWQEDKSINSKYSLFSDSNFNDCDYHAQYPTTYHLRSELAHSTDSHDVRLVYLALHHLMKSRGHFLYEISETSDNDSSLRDKFDDFCTLLSDAYGLDFVPHNTDNYLNILKTPNMRVTEKAALLTEGLKKPSKNEAGISPFYISELLAGRSVALSNLFGDDRFKDAKKITLQNDLDANYNELCEVLDDHISVVTAAKDVYDAARFAEIIGTHRYLCDAKIAVYKQNNIDLRVLKDYIKAHCIERYNSIFCDKEDKLDNYAAYSQYHHKSGDYTCSQEAFCKFLKKSLPEMAESKSPVIATIYQKIVDGSFLPRLRSSENGVIPYQLQLRELDAILKNASLYLPFLAQQQCDGYTPAEKIRKTFEFRVPYYVGPLNDKAAHHWAVRSNTDSKEKIYPWNFNQLIDLDHSAEAFLVNLIGRCTYTGDPVLPKDSLLYSEYMLLNELNPLKINGQPLSTEHKKQLIKDMFIHPVSKQKGKVTKKKIYEYLKSKGWISKATNIDSINGIDDKIKSDLRSRRDFADFLKRTGDYQLTEDIIRHILVFGEDKKMLRRWLRTHTDVLTEDDIKKICRLRYTDWGRLSKTFLTNIYTVGEYGEAKSIMDMLRDTNDNLMQILSDKYEFAAHAEAYRNEKFGNNRSLTDQLDEMYISPSARRSIRQTLRIVDEIVKLRGIPPTKIFIEMARDNRKDMKGKRTESRKEQLLALYKECQKDSRIFAQMCLSEQEIKELNQKLVSEDENHLRNERLYLYYTQFGRCMYSGEPIDLSAVMRGERYDRDHIFPRSKIKDDSLGNLVLVKNELNREKKNTYPIESSIRQKMLPFWKLLKDKGMISEKKYERLCRSTPLTTEELSDFVARQLVQTQQSTKALAVLLNERYGNQTRIVFSKAGNVSEFRQEFGIVKCREVNDLHHAKDAYLNIAVGNVYDTRFTAKFFKNIQNEDYSIKTKTLFTQLNTPCAWDKVESIKTVQHYMEKNNILITRMPHEQKGALSNLQLLPAGKGQLRKKQGLDIQKYGGYNKQRTAYFFAVEFTENKKRIRAIQPVFLHQKALYEKDPITYCRIHLHLNNPLIIRKKILLDALLELDGKRLYPSARTGNNIIYEHSYQLAVNNEQMQYIKNTVKYVERCNAAKKELAVTKFDGISIQQNIQYYDWFITKCHQPIYAEFVNTMQAYLQNNRDQFIHLSLLGQSKLLLEILKAFQCGPQNPNLDALCGVKTVARISKSSNLSNYRSIFLVDQSITGLFEHKIDLLK

SEQ ID NO: 20482 - protein, 992 aa, unidentified
  REGION 1..992: note = Cas Enzyme sequence
YKYTKKVVEGLPDSKDKEYILSEIELQTLLPLQRIKDNGVIPYQLHLAELKAILKTCGPKFPFLNEVADGYSVAEKLIKMLEFRIPYYVGPLNTYHNVDKGGFAWAVRKASGRVTPWNFDDKIDREKSAAAFIKNLTNKCTYLLGEDVLPKSSLLYSEFMLLNELNNIRIDGKPLETAVKEHLIEAVFKQDHKKMTKNRIEQFLKDNNYIPKKHKPDITGLDGEIKNDLTSYRDMVRILGANCDRSMAEDIIMDITIFGESKKMLRETLRNKFASHLDDETIKKLSKLRYRDWGRLSKKLLNGVEGCDKAGDGTPETIIELMRNFSYNLMELLGDKFSFMERIQEINDKLTEGQVVDPQDIIDELALSPAVKRAVWQALRIVDEVIHIKKALPSRIFVEVTRSNKTEKKKKGSRQKRLSDLYAAIKKDEALLSGLKDTEFDGLKSGLANYDDAALRSKKLYLYYTQMGRCAYTGEVIELSQLNTDNYDIDHIYPRSLTKDDSFDNLVLCKRTANAQKSDTYPIAEKIQKAQKPFWTFLKQQGLISERKYERLTRNIPLAADDLSGFIARQLVETNHSVKAATTLLRRLYPKIDVVFVKAENVTDFRHDNNFIKVRSLNHHHHAKDAYLNIVVGNVYHEKFTRNFRAFFKKNGANRTYNLAKMFNYDVTCTNAKDGKAWDVKTSMNIVKKMMDSNDVRVTKRLLEQSGALADATVYKATVAAKAKDGAYIGMKTKSSVFADVTKYGGMTKIKNAYSIIVQYIGKKGEVVKEIVPLPIYLTNRNTTDQDLIDYVASITPEAKDISIIYRKLCINQLVKVNGFYYYLGGKTSNSICIDNAIQVLLSNEFLIYAKLLDKVNTLRKSDPSINIQNISTLSPFAKEQISITINDNLKFYDYLVEKLNSNIYIKMKGNKACDLIDIGREKFKGIDVSSQCILLLEILNMLTNMKTTYDIKLLGFSTSRTKIALKVSILDEFKIINQSITGLYSSEITIV

SEQ ID NO: 20483 - protein, 1320 aa, unidentified
  REGION 1..1320: note = Cas Enzyme sequence
MKNNGNNLKTGDYYIGLDIGTNSVGWAVTDEEYNVQRFKGNSMWGVRLFEEASGAAERRSSRAARRRLARRKQRMLILELLFSEEIAKVDPNFFVRLRESFLKTDDRSTDARYSLFNDKNYTDKDYLKQFPTIYHLRSELIHSKEKHDIRLVYLALHHIMKKRGHFLYEADGNVTEKSLVEYIDELNYFLSSEYGYELDFEDKEKYALVLEKNDINVTQKKKLLREKLGAQQEQQEYNPLVLSDLLAGATVKFSDLFCDDELKNTEVKSISLKNDIDAVFESLTAAIGERIELILNCKIVFDAARLSQILGGNTYISDAKIQLYNKNKNDLAKLKEYIKTNYPQKYKEVFTTKKDKLNNYVAYSKNKLRSGDYCCSQESFCKYLISQFPEMKNTQGYENMCFEIENSTFLSPLTGTSNSVIPHQLNLSELEKILENASSYLSFLNTKDEDGLSVADKIISTFKFRIPYYVGPLSEKSPNHWIVRSKEKIYPWNFHKTVDTKRSAENFIINLIGRCTYTGEYVLPKDSLLYSEYCLRNEINLLRINGKELPRTVMDELYETLFVSSNKKVTKKTIKDFLLIKGYIINTDELSGIDDTIKTKLKSYHDLKNILLKTSNPELVEEIIQRILVFGDDKRMLRQWLVENCRMLDKKDIDYVCRLKYKDWGRFSKRFLTEIYHTDKSGKAFSIMDMLRTNNMNLMQLLSSDYNFLEEAEKVRKENSSQDYSLQKRIDEMYLSPAVRRSVRQALKIVDEIVDIKKCAPKKIFIEVARGSREEMKNKRTTSRKNKLIELYQACKEDSNPLFEQLCNEEENRLRSDKLYLYYTQLGKCMYSGEIIDFSSLATENSKYDIDHIFPRSRVKDDSLDNRVLVKAELNREKTNTYPVDNIIRERMHSFWKMLKEKGFISDKKFTKLQRQTPLTDKELSEFVARQIVETQQSTKAVASLMKDMYKDTRIVYSKAGNVSDFRHKYEFIKCRDINNLHHAKDAYLNIVVGNVYDTKFTDNFFKNISGENYSLNKVFEFDTPSAWDAGGSSIKTVKHYMGKNNILVTRMAREGRGKLYDLTVLPAGKGQHSINENLEIEKYGGYNNVYGAYFIVVEHTSKKKRIRTIESVLLCDKPLYEKNPTEYCVKKLALEDPEIIVPIIRMDSLLEINGSRRVITGRSNVQLIYKHTYELAIDTIHEQYIKNISKYVDRCSGLKKELDITEFDKISAEENMELYSWFIKKLGANVYRPLFSNVLNYLNKCGNVFESLNMLEQCKVLLEILKTFKCDRQVSNLSSLCGKSSVGTILTSKNLSNMDSAYLINQSPTGLYEVKVNLL

SEQ ID NO: 20484 - protein, 1409 aa, unidentified
  REGION 1..1409: note = Cas Enzyme sequence
MSIINFQRRGLMETQASNQLISSHLKGYPIKDYFVGLDIGTSSVGWAVTNKAYELLKFRSHKMWGSRLFDEGESAVARRGFRSMRRRLERRKLRLKLLEELFADAMAQVDPTFFMRLRESKYHYEDKTTGHSSKHILFIDKNYTDQDYYKAYPTIYHLRAELMKDGTDDIRKLFLAVHHILKYRGNFLYEGASFDSNASTLDDVLKQALENITFNCFDSSVAIGSIGQILMELGKTKSDKAKAIERLVDTYIITDEVDTSGKTQKEQVKEDKKRLKSFANLVLGLSASLTDLFGSVEDLVEDLKKLQIIGDTYDERRDDLAKVWGDEIHIIDDCKSVYDAIILMSIKEPGLTISESKVKAFNKHKDDLAILKSLLKSDRSIYNTMFKVDEKGLHNYVHYIKQGRKEETSCNREEFYKYTKKVVEGLPDSKDKEYILSEIELQTLLPLQRIKDNGVIPYQLHLEELKTILDTCKSKFPFLNVVADGYSVADKLIKMLEFRIPYYVGPLNTHHNVDNGGFAWAVRKASGRVTPWNFDDKIDREKSAAAFIKNLTNKCTYLLGEDVLPKSSLLYSEFMLLNELNNVRIDGKPLEKAVKEHLIEAVFKQDHKKMTKNRIEQFLKDNNYIPEKHKPEITGLDGEIKNDLASYRDMVRILGNNFDLSMAEEIITDITIFGESKKMLRETLRKKFASCLDDEAIKKLSKLRYRDWGRLSKKLLNGIDGCDKAGDGTSVTIIEAMRDFSYNLMELLGDRFSFMERIQEINDKLTEGQIVNPHDIIDDLALSPAVKRAVWQALRIVDEIVHIKKTLPARIFVEVTRSNKAEKKKKDSRQKRLSDLYAAIKKDDALLSGLTNEEFGGLKSGLAKYDDAALRSKKLYLYYTQMGRCAYTGEVIDLSQLNTDNYDIDHIYPRSLTKDDSFDNLVLCKRTANAQKSDTYPISKEIQKAQKAFWIFLKQQGLISERKYERLTRITPLTADDLSGFIARQLVETNQSVKAATTLLRRLYPDIDVVFVKAENVTDFRHDNNFIKVRSLNHHHHAKDAYLNIVVGNVYHEKFTRNFRAFFKKNGANRTYNLAKMFNYDVNCTNAKDGKAWDVKTSMDTVKKMMDSNDVRVTKRLLEQTGALADATIYKATVAGKAKDGAYIGMKTKSSVFADVSKYGGMTKIKNAYSIIVQYTGKKGEVIKEIVPLPIYLTNRNTTDQDLINYVASIIPQAKDISIIYGKLCINQLVKVNGFYYYLGGKTNSKFCIDNAIQVIVSNEWIPYLKVLEKFNNMRKDNKDLKANVVSTRALDNKHTIEVRIVEEKNIEFFDYLVSKLKMPIYQKMKGNKAAELSEKGYGLFKKMSLEEQSIHLIELLNLLTNQKTTFEVKPLGITASRSTVGSKISNQDEFKVINESITGLYSNEVTIV

SEQ ID NO: 20485 - protein, 1409 aa, unidentified
  REGION 1..1409: note = Cas Enzyme sequence
MSIINFPRRGLMEMQTSKQLISSHLKEYPIKDYFVGLDIGTSSVGWAVTNKLYELLKFRSHKMWGSRLFDEGESAVGRRSFRSIRRRLERRKLRLKLLEELFADAMAQVDPTFFMRLRESKYHYEDKTTGHSSKHILFIDKDYTDQDYFKEYPTIYHLRAELMKSGTDDIRKLFLAVHHILKYRGNFLYEGATFDSNASTLDDVLKQALENITFNCFDCNSAISSIGQILMDAGKTKSDKAKAIERLVDTYIATDTEDISSKTQKEQVKEDKKRLKAFANLVLGLSASLTDLFGSVEELDDDLKKLQITGDTYDDKRDELAKAWGDEVHIIDDCKSVYDAIILMSIKEPGLTISESKVKAFNKHKEDLVILKSLLKTDRSIYNAMFKADEKGLHNYVHYIKQGRKEETSCNREDFYKYTKKVVEGLPDSKDKEYILSEIELQTLLPLQRIKDNGVIPYQLHLAELKAILKTCGPKFPFLNEVADGYSVAEKLIKMLEFRIPYYVGPLNTHHNVNNGGFAWAVRKASGRVTPWNFDDKIDREKSAAAFIKNLTNKCTYLLGEDVLPKSSLLYSEFMLLNELNNIRIDGKPLEMAVKEHLIEAVFKQDHKKMTKNRIEQFLKDNNYIPNKHKPDITGLDGEIKNDLTSYRDMVRILGTNFDRSMAEDIIMDITIFGESKKMLRETLRNKFASHLDDETIKKLSKLRYRDWGRLSKKLLNGVEGCDKAGDGTPETIIELMRNFSYNLMELLGDKFSFMERIQEINDKLTEDQVVDPQDIIDELALSPAVKRAVWQALRIVDEVIHIKKALPSRIFVEVTRSNKTEKKKKDSRQKRLSDLYAAIKKDEALLSGLKDTEFEGLKSGLANYDDAALRSKKLYLYYTQMGRCAYTGEVIELSQLNTDNYDIDHIYPRSLTKDDSFDNLVLCKRIANAQKSDTYPIAEKIQKAQKPFWTFLKQQGLISERKYERLTRNTPLTADDLSGFIARQLVETNQSVKAATTLLRRLYPEIDVVFVKAENVTDFRHDNNFIKVRSLNHHHHAKDAYLNIVVGNVYHEKFTRNFRAFFKKNGANRTYNLAKMFNYDVKCTNAKDGKAWDIKTSMDIVKKMMDSNDVRVTKRLLEQSGALADATVYKATVAGKAKDSAYIGMKTKSSVFADVAKYGGMTKIKNAYSIIVQYVGKKGEIVKEIVPLPIYLTNRNTTDQDLIDYVVSIIPQAKNISIIYRKLCINQLVKVNGFYYYLGGKTNNNIYIDNAIELVVPTNIAAYIKVLEKFDLLRKDNKQSKASTVTTRIYNEGSTAIVSITDKDGLILYDYLMSKLRTPLYMKMKGNKVDELSTIGRSKFTNMTLEEQSIYLLEVLNLLTNSKTTFDVKPLGITASRSTIGVKIHTLDEFKIINESVTGLYSNEITIV

SEQ ID NO: 20486 - protein, 1398 aa, unidentified
  REGION 1..1398: note = Cas Enzyme sequence
METQASNQLISSHLKGYPIKDYFVGLDIGTSSVGWAVTNKAYELLKFRSHKMWGSRLFDEGESAVARRGFRSMRRRLERRKLRLKLLEELFADAMAQVDPTFFMRLRESKYHYEDKTTGHSSKHILFIDKNYNDQDYFKEYPTVYHLRSELMKSGTDDIRKLFLAVHHILKYRGNFLYEGATFDSNASTLDDVIKQALENITFNCFDCNSAISSIGQILMEAGKTKSDKAKAIEHLVDTYIATDTVDTSSKTQKDQVKEDKKRLKAFANLVLGLNASLIDLFGSVEELEEDLKKLQITGDTYDDKRDELAKAWSDEIYIIDDCKSVYDAIILLSIKEPGLTISESKVKAFNKHKDDLAILKSLLKADRSIYNEMFKADEKGLHNYVHYIKQGRKEETSCNREEFYKYTKKVVEGLPDSKDKEYILSEIELQTLLPLQRIKDNGVIPYQLHLEELKTILDTCKSKFPFLNVVADGYSVADKLIKMLEFRIPYYVGPLNTHHNVDNGGFAWAVRKASGRVTPWNFDDKIDREKSAAAFIKNLTNKCTYLLGEDVLPKSSLLYSEFMLLNELNNVRIDGKPLEKAVKEHLIEAVFKQDHKKMTKNRIEQFLKDNNYIPEKHKPEITGLDGEIKNDLASYRDMVRILGNNFDLSMAEEIITDITIFGESKKMLRETLRKKFASCLDDEAIKKLSKLRYRDWGRLSKKLLNGIDGCDKAGDGTSVTIIEAMRDFSYNLMELLGDRFSFMERIQEINDKLTEGQIVNPHDIIDDLALSPAVKRAVWQALRIVDEIVHIKKTLPARIFVEVTRSNKAEKKKKDSRQKRLSDLYAAIKKDDALLSGLTNEEFGGLKSGLAKYDDAALRSKKLYLYYTQMGRCAYTGEVIDLSQLNTDNYDIDHIYPRSLTKDDSFDNLVLCKRTANAQKSDTYPISKEIQKAQKAFWIFLKQQGLISERKYERLTRITPLTADDLSGFIARQLVETNQSVKAATTLLRRLYPGVDVVFVKAENVTDFRHDNNFIKVRSLNHHHHAKDAYLNIVVGNVYHERFTRNFRAFFKKNGANRTYNLAKMFNYDVNCTNAKDGKAWAVKTSMDTVKKMMDSNDVRVTKRLLEQTGALADVTIYKAIVAGKAKDGAYIGMKTKSSVFADVSKYGGMTKIKNAYSIIVQYTGKKGEVIKEIVPLPIYLTNRNTTDQDLINYVASITPQAKDISIIYGKLCINQLVKVNGFYYYLGGKTNSNFCIDNAIQVIVSDEWIPYLKVLEKFNNMRKDNKDLKANVVSTRVLDNKHTIEVRIVEEKNIEFFDYLVSKLKMPIYQKMKGNKAAELSEKGYGLFKKMSLEEQSIHLIELLNLLTNQKTTFEVKPLGITASRSTVGSKISNQDEFKVINESITGLYSNEVTIV

SEQ ID NO: 20487 - protein, 1398 aa, unidentified; identical to SEQ ID NO: 20486
  REGION 1..1398: note = Cas Enzyme sequence

SEQ ID NO: 20488 - protein, 1366 aa, unidentified
  REGION 1..1366: note = Cas Enzyme sequence
MGLDIGTDSVGWAVTNKKYEVLKFHSKGMWGVRKYDSANTAAGRRKFRSNRRRNDRVKQRIKLLQELFAEEISKVDPSFFIRLKESKYYLEDKNKAVRQPYSLFADENFTDKQFYKQYPTIYHLRKTLIESKKKYDIRFYYLAIHNIIKNRGHFLFEGMKLSEVKDFQYVYNNWKKLMEDIYDIQISCDSITELARVIKDTSIGFKDKKNKFKNLFHDNSKMFKAVYIALAGGKFALSDLYDDENLIEIDENKISFSDHKYEERFEILQNVLLDRIQLLEYLKAIYDWGILARVLGDEKYLSYAKTKVYDKHKNDLFLLRKILKKYYQKSVYDEVLKDVSKKIRNYCSYIGYTRINGQKIQAVKKVGQEEFCKYLENKLKLKELSNTDSDLQYIIKEITARTFLPKQVSKINGIIPYQVHQMELNAILDNMELYYPFLKEKDENDKTVREKIERIFDFKIPYYVGPLNDMHANKEDWTKGNCWIVKKSPGKVLPWNFDQMVDVDATAERFIRRMTNKCTYLVGEDVLPKDSLLYSEFMVLNEINKLKINGQGISVELKQKIFNDVFKNKCIKGKITRKKLIDYLIIENVIGKNDTLSGIDKEIKSNFKSYQEMKDILGDKVNQQREMVEDIIQSSVIFGGDKKLLEKRLYSNYVEKNMLSEAELKSILKKRYSGWGRLSRVFLEEIKSVNEETGEETNIINALRNTNQNLMELLSRGWGFTEKIEKENKLEMGEASSIDDIVNKLQVSAPVKRSIWQTLRIVQEVRKITNKDPEKIFIEMAREKRKKKRTTSRKDMLIGLYKKCKDEERDWYDEISKIEEGKFSSNKLFLYYTQMGRCMYSGEPITLDSLYNSNIYDKDHIFPQSKTKDDSLDNIVLVKRTINSNKSDQYPIDIEIRKKQHNFWKMLKEKKLISDEKYNRLTRNTPLTNEELSDFINRQIVETRQSTKAVASILSMILPNSKIVYVKAKAVSDFRHDYGIPKVRELNDLHHAKDAYLNIVVGNVYNTKFTNNPMVFLKDKDNKYNLNRMYDFDVVRNNNVAWIKGRNGTIKTVRKYMNKNNIQVTKYAAPVKGGLFDQLLLRKGKGQVPIKESDKRLSIEKYGGYNKATGSYFMLVDSDGKKGRKRTLEFVPLYMAKRLEESLNAKLNYCKNIGLKNPIIIKECIKMNSLLIIDGFPMYISGRTNDYIIMKGAVQLILNTEEELYLKKIIKCNDKIQEAKKKTGKKDEKNDEKNKDEKNDEKDDTSYKIRESDNISCEMNIKVYSSLINKIKYGIYSKAPGFPKKILFSSIDTFTNLKLEEQIYVILELLKLYQGRNMKADLRLINGKKGSGSKQISKNISKYDSVILRNQSVTGLFSNDIDLLKI

SEQ ID NO: 20489 - protein, 1396 aa, unidentified
  REGION 1..1396: note = Cas Enzyme sequence
METQTSNQLITSHLKDYPKQDYFVGLDIGTNSVGWAVTNTSYELLKFHSHKMWGSRLFEEGESAVTRRGFRSMRRRLERRKLRLKLLEELFADAMAQVDSTFFIRLHESKYHYEDKTTGHNSKHILFIDEDYTDQDYFTEYPTIYHLRKDLMENGTDDIRKLFLAVHHILKYRGNFLYEGATFNSNAFTFEDVLKQALVNITFNCFDTNSAISSISNILMESGKTKSDKAKAIERLVDTYTVFDEVNTPDKPQKEQVKEDKKTLKAFANLVLGLSANLIDLFGSVEDIDDDLKKLQIVGDTYDEKRDELAKVWGDEIHIIDDCKSVYDAIILMSIKEPGLTISQSKVKAFDKHKDDLVILKSLLKLDRNVYNEMFKSDKKGLHNYVHYIKQGRTEETSCSREDFYKYTKKIVEGLADSKDKEYILNEIELQTLLPLQRIKDNGVIPYQLHLEELKVILDKCGPKFPFLHTVSDGFSVTEKLIKMLEFRIPYYVGPLNTHHNIDNGGFSWAVRKQAGRVTPWNFEEKIDREKSAAAFIKNLTNKCTYLFGEDVLPKSSLLYSEFMLLNELNNVRIDGKALAQGVKQHLIDSIFKQDHKKMTKNRIELFLKDNNYITKKHKPEITGLDGEIKNDLTSYRDMVRILGNNFDVSMAEDIIIDITIFGESKKMLRQTLRNKFGSQLNDETIKKLSKLRYRDWGRLSKKLLKGIDGYDKAGNGAPKTIIELMRNDSYNLMEILGDKFSFMECIEEENAKLTQGQVVNPHDIIDELALSPAVKRAVWQALRIVDEVAHIKKALPSRIFVEVARTNKSEKKKKDSRQKRLSDLYSAIKKDDVLQSGLQDKEFGALKSGLANYDDAALRSKKLYLYYTQMGRCAYTGNIIDLNQLNTDNYDIDHIYPRSLTKDDSFDNLVLCERTANAKKSDIYPIDNTIQMKQRSFWAFLKHQGLISERKYERLTRIAPLTADDLSGFIARQLVETNQSVKATTTLLRRLYPDIDVVFVKAENVTDFRHDNNFIKVRSLNHHHHAKDAYLNIVVGNVYHEKFTRNFRLFFKKNGANRTYNLAKMFNYDVICTNAQDGKAWNKDTSMDTVKKMMASNDVRVTRRLLEQSGALADATIYKASVAAKAKDGAYIGMKTKSSVFADVTKYGGMTKIKNAYSIIVQYTGKKDEKIKEIVPLPIYLINRNTTDVDLIDYVKSVIPQAKDISIKYRKLCINQLVKINGFYYYLGGKTSNSICIDNGIQVLFSPEFEVYIKLIDKFYIMQKSNLNIDIKNVSTFNPQNNQQVFITVEDNIKLYDYFIDKLNSNIYQKMKGNKVNDLISIGRDRFIELPINIQCVLLLEILNMLTNMKTTYDIKLLGFSTSRTKIALKISNLNEFKIINESITGLYSNEVTIV

SEQ ID NO: 20490 - protein, 913 aa, unidentified
  REGION 1..913: note = Cas Enzyme sequence
MLEFRIPYYVGPLNTHHNIDNGGFSWAVRKQAGRVTPWNFEDKIDREKSAAAFIKNLTNKCTYLFGEDVLPKSSLLYSEFMLLNELNNVRIDGKALAQGVKQHLIDSIFKQDHKKMTKNRIELFLKDNNYITKKHKPEITGLDGEIKNDLTSYRDMVRILGNNFDASMAEDIITDITIFGESKKMLRQTLRNKFGSQLNDETIKKLSKLRYRDWGRLSKKLLKGIDGCDKAGNGAPKTIIELMRNDSYNLMELLGDKFSFMECIEEENAKLTQGQVVNPHDIIDELALSPAVKRAVWQALRIVDEVAHIKKALPSRIFVEVARTNKSEKKKKDSRQKRLSDLYSAIKKDDVLQSGLQDKEFGALKSGLANYDDAALRSKKLYLYYTQMGRCAYTGNIIDLNQLNTDNYDIDHIYPRSLTKDDSFDNLVLCERTANAKKSDTYPIDNTIQMKQRSFWAFLKHQGLISERKYERLTRIAPLTADDLSGFIARQLVETNQSVKATTTVLRRLYSDIDVVFVKAENVSDFRHDNNFIKVRSLNHHHHAKDAYLNIVVGNVYHEKFTRNFRLFFKKNGANRTYNLAKMFNYDVICTNAQDGKAWNKDTSMDTVKKMMASNDVRVTRRLLEQSGALADATIYKASVAAKAKDGAYIGMKTKSSVFSDVTKYGGMTKIKNAYSIIVQYTGKKGEEIKEIVPLPIYLINRNSTDIELIDYVKSVIPQAKDISIKYRKLCINQLVKINGFYYYLGGKTSNSICIDNGIQVLFSPEFEVYIKLIDKFYIMQKSNLNIDIKNVSTFNPQNNQQVFITVEDNIKLYDYFIDKLNSNIYQKMKGNKVNDLISIGRDRFIELPINIQCVLLLEILNMLTNMKTTYDIKLLGFGTSRTKIALKISNLNEFKIINESITGLYSNEVTIV

SEQ ID NO: 20491 - protein, 1407 aa, unidentified
  REGION 1..1407: note = Cas Enzyme sequence
MSIINFPRRGLMEMQTSKQLISSHLKEYPIKDYFVGLDIGTSSVGWAVTNKLYELLKFRSHKMWGSRLFDEDESAVGRRSFRSIRRRLERRKLRLKLLEELFADAMAQVDPTFFMRLRESKYHYEDKTTGHSSKHILFIDKDYTDQDYFKEYPTIYHLRAELMKSGTDDIRKLFLAVHHILKYRGNFLYEGATFDSNASTLDDVLKQALENITFNCFDCNSAISSIGQILMDAGKTKSDKAKAIERLVDTYIATDTEDISSKTQKEQVKEDKKRLKAFANLVLGLSASLTDLFGSVEELDDDLKKLQITGDTYDDKRDELAKAWGDEVHIIDDCKSVYDAIILMSIKEPGLTISESKVKAFNKHKEDLVILKSLLKTDRSIYNAMFKADEKGLHNYVHYIKQGRKEETSCNREDFYKYTKKVVEGLPDSKDKEYILSEIELQTLLPLQRIKDNGVIPYQLHLAELKAILKTCGPKFPFLNEVADGYSVAEKLIKMLEFRIPYYVGPLNTYHNVDKGGFAWAVRKASGRVTPWNFDDKIDREKSAAAFIKNLTNKCTYLLGEDVLPKSSLLYSEFMLLNELNNIRIDGKPLETAVKEHLIEAVFKQDHKKMTKNRIEQFLKDNNYIPKKHKPDITGLDGEIKNDLTSYRDMVRILGANCDRSMAEDIIMDITIFGESKKMLRETLRNKFASHLDDETIKKLSKLRYRDWGRLSKKLLNGVEGCDKAGDGTPETIIELMRNFSYNLMELLGDKFSFMERIQEINDKLTEGQVVDPQDIIDELALSPAVKRAVWQALRIVDEVIHIKKALPSRIFVEVTRSNKTEKKKKGSRQKRLSDLYAAIKKDEALLSGLKDTEFDGLKSGLANYDDAALRSKKLYLYYTQMGRCAYTGEVIELSQLNTDNYDIDHIYPRSLTKDDSFDNLVLCKRTANAQKSDTYPIAEKIQKAQKPFWTFLKQQGLISERKYERLTRNIPLAADDLSGFIARQLVETNHSVKAATTLLRRLYPKIDVVFVKAENVTDFRHDNNFIKVRSLNHHHHAKDAYLNIVVGNVYHEKFTRNFRAFFKKNGANRTYNLAKMFNYDVTCTNAKDGKAWDVKTSMNIVKKMMDSNDVRVTKRLLEQSGALADATVYKATVAAKAKDGAYIGMKTKSSVFADVTKYGGMTKIKNAYSIIVQYIGKKGEVVKEIVPLPIYLTNRNTTDQDLIDYVASITPEAKDISIIYRKLCINQLVKVNGFYYYLGGKTSNSICIDNAIQVLLSNEFLIYAKLLDKVNTLRKSDPSINIQNISTLSPFAKEQISITINDNLKFYDYLVEKLNSNIYIKMKGNKACDLIDIGREKFKGIDVSSQCILLLEILNMLTNMKTTYDIKLLGFSTSRTKIALKVSILDEFKIINQSITGLYSSEITIV

SEQ ID NO: 20492 - protein, 1407 aa, unidentified
  REGION 1..1407: note = Cas Enzyme sequence
MSIINFPRRGLMEMQTSKQLISSHLKEYPIKDYFVGLDIGTSSVGWAVTNKLYELLKFRSHKMWGSRLFDEGESAVGRRSFRSIRRRLERRKLRLKLLEELFADAMAQVDPTFFMRLRESKYHYEDKTTGHSSKHILFIDKDYTDQDYFKEYPTIYHLRAELMKSGTDDIRKLFLAVHHILKYRGNFLYEGATFDSNASTLDDVLKQALENITFNCFDCNSAISSIGQILMDAGKTKSDKAKAIERLVDTYIATDTEDISSKTQKEQVKEDKKRLKAFANLVLGLSASLTDLFGSVEELDDDLKKLQITGDTYDDKRDELAKAWGDEVHIIDDCKSVYDAIILMSIKEPGLTISESKVKAFNKHKEDLVILKSLLKTDRSIYNAMFKADEKGLHNYVHYIKQGRKEETSCNREDFYKYTKKVVEGLPDSKDKEYILSEIELQTLLPLQRIKDNGVIPYQLHLAELKAILKTCGPKFPFLNEVADGYSVAEKLIKMLEFRIPYYVGPLNTYHNVDKGGFAWAVRKASGRVTPWNFDDKIDREKSAAAFIKNLTNKCTYLLGEDVLPKSSLLYSEFMLLNELNNIRIDGKPLETAVKEHLIEAVFKQDHKKMTKNRIEQFLKDNNYIPKKHKPDITGLDGEIKNDLTSYRDMVRILGANCDRSMAEDIIMDITIFGESKKMLRETLRNKFASHLDDETIKKLSKLRYRDWGRLSKKLLNGVEGCDKAGDGTPETIIELMRNFSYNLMELLGDKFSFMERIQEINDKLTEGQVVDPQDIIDELALSPAVKRAVWQALRIVDEVIHIKKALPSRIFVEVTRSNKTEKKKKGSRQKRLSDLYAAIKKDEALLSGLKDTEFDGLKSGLANYDDAALRSKKLYLYYTQMGRCAYTGEVIELSQLNTDNYDIDHIYPRSLTKDDSFDNLVLCKRTANAQKSDTYPIAEKIQKAQKPFWTFLKQQGLISERKYERLTRNIPLAADDLSGFIARQLVETNHSVKAATTLLRRLYPKIDVVFVKAENVTDFRHDNNFIKVRSLNHHHHAKDAYLNIVVGNVYHEKFTRNFRAFFKKNGANRTYNLAKMFNYDVTCTNAKDGKAWDVKTSMNIVKKMMDSNDVRVTKRLLEQSGALADATVYKATVAAKAKDGAYIGMKTKSSVFADVTKYGGMTKIKNAYSIIVQYIGKKGEVVKEIVPLPIYLTNRNTTDQDLIDYVASITPEAKDISIIYRKLCINQLVKVNGFYYYLGGKTSNSICIDNAIQVLLSNEFLIYAKLLDKVNTLRKSDPSINIQNISTLSPFAKEQISITINDNLKFYDYLVEKLNSNIYIKMKGNKACDLIDIGREKFKGIDVSSQCILLLEILNMLTNMKTTYDIKLLGFSTSRTKIALKVSILDEFKIINQSITGLYSSEITIV

SEQ ID NO: 20493 - protein, 1407 aa, unidentified
  REGION 1..1407: note = Cas Enzyme sequence
MSIINFRRRGLMEMQTAKQLISSHLKGYPIKDYFVGLDIGTSSVGWAVTNKLYELLKFRSHKMWGSRLFDEGESAVGRRSFRSIRRRLERRKLRLKLLEELFADAMAQVDSTFFIRLHESKYHYEDKTTGHSSKHILFIDKDYTDQDYFKEYPTIYHLRAELMKSGTDDIRKLFLAVHHILKYRGNFLYEGATFDSNASTLDDVLKQALENITFNCFDCNSAISSIGQILMDAGKTKSDKAKVIERLVDTYIATHTEGISSKTQKEHVKEDKKRLKAFASLVLGLSASLTDLFGSVEELEDDLKKLQITGDTYDDKRDELAKAWGDKIHIIDDCKSVYDAIILMSIKEPGLTISESKVKAFNKHKEDLVILKSLLKTDRSIYNTMFKADEKGLHNYVHYIKQGRKEETSCNREDFYKYTKKVVEGLPDSKDKEYILSEIELQTLLPLQRIKDNGVIPYQLHLEELKTILKTCGAKFPFLNEVADGYSVAEKLIKMLEFRIPYYVGPLNTYHNVEKGGFAWAVRKASGRVTPWNFDDKIDREKSAAAFIKNLTNKCTYLLGEDVLPKSSLLYSEFMLLNELNNIRIDGKPLEPGVKEHLIEAIFKQDHKKMTKNRIEQFLKDNNYIPKKHKPDITGLDGEIKNDLTSYRDMVRILGTNFDRSMAEDIIMDITIFGESKKMLRETLRNKFASHLDDETIKKLSKLRYRDWGRLSKKLLNGIEGCDKAGDGTPETIIELMRNFSYNLMELLGDKFSFMERIQEINDKLTEGQVVDPQDIIDELALPPAVKRAVWQALRIVDEVIHIKKALPSRIFVEVTRSNKTEKKKKDSRQKRLSDLYAAIKKDEALLSGLKDTEFEGLKSGLASYDDAALRSKKLYLYYTQMGRCAYTGNIIDLNLLNTDNCDIDHIYPRSLTKDDSFDNLVLCERTANAKKSDTYPIDNTIQTNQKAFWSFLKHQGLISERKYERLTRNTPLTADDLSGFIARQLVETNQSVKAATTLLRRLYPDVDVVFVKAENVTDFRHDNNFIKVRSLNHHHHAKDAYLNIVVGNVYHEKFTRNFRAFFKKNGANRTYNLAKMFNYDVKCTNAKDGKAWDIKTSMDIVKKMMDSNDVRVTKRLLEQSGALADATVYKATVAAKANDGAYIGMKTKSSVFADVTKYGGMTKIKNAYSIIVQYIGKKGEVVKEIVPLPIYLTNRNITDQDLIDYVASITPEAKDISIIYRKLCINQLVKVNGFYYYLGGKTSNSICIDNAIQVLLSNEFLIYAKLLDKVNTLRKSDPSINIQKISTLSPFAKEQISITINDNLKFYDYLVEKLNSNIYIKMKGNKASDLIDIGREKFKGIDVSSQCILLLEILNMLTNMKTTYDIKLLGFSTSRTKIALKVSTLDEFKIINQSITGLYSSEITIV

SEQ ID NO: 20494 - protein, 1116 aa, unidentified
  REGION 1..1116: note = Cas Enzyme sequence
LFGSVEELDDDLKKLQITGDTYDDKRDELAKAWGDEIHIIDDCKSVYDVIILMSIKEPGLTISESKVKAFNKHKEDLAILKSLLKTDRSIYNAMFKADEKGLHNYVHYIKQGRIEETSCNREDFYKYTKKVVEGLPDSKDKNYILSEIELQTLLPLQRIKDNGVIPYQLHLEELKIILKTCGPKFPFLNEVADGYSVAEKLIKMLEFRIPYYVGPLNTHHNVDKGGFAWAVRKASGRVTPWNFDDKIDREKSAAAFIKNLTNKCTYLLGEDVLPKSSLLYSEFMLLNELNNIRIDGKPLETALKEHLIDAVFKQDHKKMTKNRIEQFLKDNNYIPNKHKPDITGLDGEIKNDLTSYRDMVRILGTNFDKSIAEDIIMDITIFGESKKMLRETLRNKFASHLDDETIKKLAKLRYRDWGRISKKLLNGLEDCDKTGDCEAATIIKFMRNFSYNLMELLGDKFSFMERIQEINNKLTEGQVVNPHDIIDDFALSPAVKRAVWQALRIVDEVVHIKKALPSRIFVEVTRSNKTEKKKKDSRQKRLSDLYAAIKKDDALLNGLKNEEFSGLKSELATYDDAALRSKKLYLYYTQMGRCAYTGESIDIAILNTDNYDIDHIYPRSLTKDDSFDNLVLCKRTANAQKSDTYPIAEEIQKAQKSFWTFLKQQGLISERKYERLTRNTPLTADDLSGFIARQLVETNQSVKAATTLLRRLYPEIDVVFVKAENVTDFRHDNNFIKVRSLNHHHHAKDAYLNIVVGNVYYEKFTRNFRVFFKKNGANRTYNLAKMFNYDVKCTNAKDGKAWDVKTSMDIVKKMMASNDVRVTKRLLEQSGALADATVYKATVAGKAKDGAYIGMKTKSSVFADVSKYGGMTKIKNAYSIIVQYVGKKDEIVKEIVPLPIYLTNSNTIDQDLIDYVASITPEAKDISIIYRKLCINQLVKINGFYYYLGGKTSNSICIDNAIQVLLSNEFLIYAKLLDKVNTLRKSDPSINIQNISTLSPFAKKQISITINDNLKFYDYLVEKLNSNIYIKMKGNKASDLIDIGREKFKGIDVSSQCILLLEILNMLTNMKTTYDIKLLGFSTSRTKIALKVSTLDEFKIINQSITGLYSNEITIV

SEQ ID NO: 20495 - protein, 1407 aa, unidentified
  REGION 1..1407: note = Cas Enzyme sequence
MSIINFPRRVLMEMQTSKQFISSHLKEYPIKDYFVGLDIGTNSVGWAVTNKLYELLKFRSHKMWGSRLFDEGESAVGRRSFRSIRRRLERRKLRLKLLEELFADAMAQVDPTFFMRLRESKYHYEDKTTGHSSKHILFIDKDYTDQDYFKEYPTIYHLRAELMKSGTDDIRKLFLAVHHILKYRGNFLYEGATFDFNASTLDDVLKQALEKITFNCFDCNSAISAIGQILMDAGKTKSDKAKAIERLVDTYIATDTEDSSSKTQKEQVKEDKKRLKAFANLVLGLSASLTDLFGSVEELDDDLKKLQITGDTYDDKRDELAKVWGDEVHIIDDCKSVYDAIILMSIKEPGLTISESKVKAFNKHKEDLVILKSLLKTDRSIYNTMFKADEKGLHNYVHYIKQGRKEETSCNREDFYKYTKKVVEGLPDSKDKEYILSEIELQTLLPLQRIKDNGVIPYQLHLEELKTILKTCGAKFPFLNEVADGYSVAEKLIKMLEFRIPYYVGPLNTYHNVEKGGFAWAVRKASGRVTPWNFDDKIDREKSAAAFIKNLTNKCTYLLGEDVLPKSSLLYSEFMLLNELNNIRINGKPLEPGVKEHLIEAVFKQDHKKMTKNRIEQFLKDNNYIPKKHKPDITGLDGEIKNDLTSYRDMVRILGTNFDRSMAEDIIMDITIFGESKKMLRETLRNKFASHLDDETIKKLSKLRYRDWGRLSKKLLNGVEGCDKAGDGTPETIIELMRNFSYNLMELLGDKFSFMERIQEINDKLTEDQVVDPQDIIDELALSPAVKRAVWQALRIVDEVIHIKKALPSRIFVEVTRSNKTEKKKKDSRQKRLSDLYAAIKKDEALLSGLKETEFEGLKSGLANYDDAALRSKKLYLYYTQMGRCAYTGEVIELSQLNTDNYDIDHIYPRSLTKDDSFDNLVLCKRIANAQKSDTYPIAEKIQKAQKPFWTFLKQQGLISERKYERLIRNTPLTADDLSGFIARQLVETNQSVKAATTLLRRLYPEIDVVFVKAENVTDFRHDNNFIKVRSLNHHHHAKDAYLNIVVGNVYHEKFTRNFRSFFQKNGASRTYNLAKMFNYDVTCTNAKDGKAWDVKTSMNIVKKMMGSNDVRVTKRLLEQSGALADATVYKATVAAMAKDGAYIGMKTKSSVFADVTKYGGMTKIKNAYSIIVQYIGKKGEVVKEIVPLPIYLTNRNTTDQDLIDYVASITPEAKDISIIYRKLCINQLVKVNGFYYYLGGKTSNSICIDNAIQVLLSNEFLIYAKLLDKVNTLRKSDPSINIQNISTLSPFAKEQISITINDNLKFYDYLVEKLNSNIYIKMKGNKASDLIDIGREKFKGIDVSSQCILLLEILNMLTNMKTTYDIKLLGFSTSRTKIALKVSTLDEFKIINQSITGLYSSEITIV

SEQ ID NO: 20496 - protein, 1409 aa, unidentified
  REGION 1..1409: note = Cas Enzyme sequence
MSIINFQRRGLMETQASNQLISSHLKGYPIKDYFVGLDIGTSSVGWAVTNKAYELLKFRSHKMWGSRLFDEGESAVARRGFRSMRRRLERRKLRLKLLEELFADAMAQVDPTFFMRLRESKYHYEDKTTGHSSKHILFIDKNYTDQDYYKAYPTIYHLRAELMKDGTDDIRKLFLAVHHILKYRGNFLYEGATFDSNASTLDDVIKQALENITFNCFDCNSAISSIGQILMEAGKTKSDKAKAIEHLVDTYIATDTVDTSSKTQKDQVKEDKKRLKAFANLVLGLNASLIDLFGSVEELEEDLKKLQITGDTYDDKRDELAKAWSDEIYIIDDCKSVYDAIILLSIKEPGLTISESKVKAFNKHKDDLAILKSLLKSDRSIYNTMFKVDEKGLHNYVHYIKQGRTEETSCNREDFYKYTKKVVEGLPDSKDKEYILSEIELQTLLPLQRIKDNGVIPYQLHLEELKVILAKCGPKFPFLNEVADGFSVAEKLIKMLEFRIPYYVGPLNTHHNVDNGGFAWAVRKASGRVTPWNFDDKIDREKSAAAFIKNLTNKCTYLLGEDVLPKSSLLYSEFMLLNELNNVRIDGKPLEKAVKEHLIEAVFKQDHKKMTKNRIEQFLKDNNYIPEKHKPEITGLDGEIKNDLASYRDMVRILGNNFDLSMAEEIITDITIFGESKKMLRETLRNKFSSRLDDEAIKKLSKLRYRDWGRLSRKLLNVIEGCDKAGDGTPETIIILMRNFSYNLMELLGDKFSFMERIQEINAKLIEGQIVNPHDIIDDLALSPAVKRAVWQALRIVDEIVHIKKTLPARIFVEVTRSNKAEKKKKDSRQKRLSDLYAAIKKDDALLSGLTNEEFGGLKSGLAKYDDAALRSKKLYLYYTQMGRCAYTGEVIDLSQLNTDNYDIDHIYPRSLTKDDSFDNLVLCKRTANAQKSDTYPISKEIQKAQKAFWIFLKQQGLISERKYERLTRITPLTADDLSGFIARQLVETNQSVKAATTLLRRLYPGVDVVFVKAENVTDFRHDNDFIKVRSLNHHHHAKDAYLNIVVGNVYHERFTRNFRAFFKKNGANRTYNLAKMFNYDVNCTNAKDGKAWDVKTSMDTVKKMMASNDVRVTKRLLEQSGALADATVYKAAVAEKAKDGAYIGMKTKSSVFADVSKYGGMTKIKNAYSIIVQYAGKKGEVVKEIVPLPIYLTNRNTTDQDLIDYVASIIPQAKDISIIYRKLCINQLVKVNGFYYYLGGKTNSKFCIDNAIQVIVSNEWIPYLKVLEKFNNMRKDNKDLKANVVSTRALDNKHTIEVRIVEEKNIEFFDYLVSKLKMPIYQKMKGNKAAELSEKGYGLFKKMSLEEQSIHLIELLNLLTNQKTTFEVKPLGITASRSTVGSKISNQDEFKVINESITGLYSNEVTIV

SEQ ID NO: 20497 - protein, 1396 aa, unidentified
  REGION 1..1396: note = Cas Enzyme sequence
METQTSNQLITSHLKEYPKQDYFVGLDIGAGSVGWAVTNKLYELLKFKSHKMWGSRLFDEGESAVGRRSFRSIRRRLERRKLRLKLLEELFADAMAQVDSTFFMRLRESKYHHEDKTTGHSSKHILFIDKDYTDQDYFKEYPTIYHLRAELMKSGTDDIRKLFLAAHHILKYRGNFLYEGATFDSNASTLDDVLKQAIENITFNCFDAKAAISSIGEILMEQGKTKSDKAKAIERLVDTYIATVTEDTSSKTQKEQVKEDKKRLKAFANLALGLSASLTDLFGSVEELDDDLKKLQITGDTYDDKRDELAKAWGDEIHIIDDCKSVYDAIILMSIKEPGLTISESKVKAFNKHKEDLAILKSLLKTDRSIYNAMFKADEKGLHNYVHYIKQGRTEETSCNREDFYKYTKKVVEGLPDSKDKDYILSEIELQTLLPLQRIKDNGVIPYQLHLEELKIILKTCGPKFPFLNEVADGYSVAEKLIKMLEFRIPYYVGPLNSHHNVDKGGFAWAVRKASGRVTPWNFDDKIDREKSAAAFIKNLTNKCTYLLGEDVLPKSSLLYSEFMLLNELNNIRIDGKPLETGVKEHLIEAVFKQDHKKMTKNRIEQFLKDNNYISNKHKPDITGLDGEIKNDLTSYRDMVRILGTNFDKSMAEDIIMDITIFGESKKMLRETLRNKFASHLDDETIKKLAKLRYRDWGRISKKLLNGLEGCDKTGDCEAATIIKFMRNFSYNLMELLGDKFSFMERIQEINNKLTEGQVVNPHDIIDDLALSPAVKRAVWQALRIVDEVVHIKKALPSRIFVEVTRSNKTEKKKKDSRQKRLSDLYAAIKKDDALLNGLKNEEFSGLKSELATYDDAALRSKKLYLYYTQMGRCAYTGESIDIAILNTDNYDIDHIYPRSLTKDDSFDNLVLCKRTANAQKSDTYPIAEEIQKAQKPFWTFLKQQGLISERKYERLTRNTPLTADDLSGFIARQLVETNQSVKAATTLLRRLYPEIDVVFVKAENVTDFRHDNNFIKVRSLNHHHHAKDAYLNIVVGNVYHEKFTRNFRVFFKKNGANRTYNLAKMFNYDVKCTNAKDGKAWDVKTSMDIVKKMMASNDVRVTKRLLEQSGALADATVYKATVAGKAKDGAYIGMKTKSSVFADVSKYGGMTKIKNAYSIIVQYVGKKDEIVKEIVPLPIYLTNSNTIDQDLIDYVASITPEAKDISIIYRKLCINQLVKINGFYYYLGGKTSNSICIDNAIQVLLSNEFLIYAKLLDKVNTLRKSDPSINIQNISTLSPLAKEQISITINDNLKFYDYLVEKLNSNIYKKMKGNKARDLIDIGREKFKGIDVSSQCILLLEILNMLTNMKTTYDIKLLGFSTSRTKIALKVSTLDEFKIINESITGLYSNEITIV

SEQ ID NO: 20498 - protein, 1398 aa, unidentified
  REGION 1..1398: note = Cas Enzyme sequence
MEMQTSKQLISSHLKEYPIKDYFVGLDIGTSSVGWAVTNKLYELLKFRSHKMWGSRLFDEGESAVGRRSFRSIRRRLERRKLRLKLLEELFADAMAQVDPTFFIRLHESKHHYEDKTTSHSSKHILFIDKNYTDQDYFKEYPTIYHLRAELMKSGTDDIRKLFLAVHHILKYRGNFLYEGATFDSNASTLDDVLKQALENITFNCFDCNSAISSIGQILMETGKTKSDKAKAIERLVDTYITTDTEDSSSKIQKEQVKEDKKRLKAFANLVLGLSASLTDLFGSVEELDDDLKKLQITGDTYDDKRDELAKAWGDEIHIIDDCKSVYDAIILMSIKEPGLTISESKIKAFNKHKEDLVILKSLLKTDRSIYNAMFKADEKGLHNYVHYIKQGRKEETSCNREDFYKYTKKIVEGLPDSKDKAYILSEIELQTLLPLQRIKDNGVIPYQLHLEELKTILDTCKSKFPFLNEVADGYSVAEKLIKMLEFRIPYYVGPLNTYHNVNNGGFAWAVRKASGRVTPWNFDDKIDREKSAAAFIKNLTNKCTYLLGEDVLPKSSLLYSEFMLLNELNNIRIDGKPLETAVKEHLIEAVFKQDHKKMTKNRIEQFLKDNNYIPKKHKPDITGLDGEIKNDLTSYRDMVRILGIDFDRSMAEDIIMDITIFGESKKMLRETLRNKFASRLDNEAIKKLSKLRYRDWGRLSKKLLNGIEGCDKAGDGTPKTIIKLMRNFSYNLMELLGDKFSFMERIQELNDELTRGQVVDPHDIIDELGLSSAVKRAVWQALRIVDEVIHIKKALPSRIFVEVTRSNKAEKKKKDSRQKRLSDLYAAIKKDEALLSGLKDTEFDGLKLGLANYDDAALRSKKLYLYYTQMGRCAYTGNIIDLNLLNTDNYDIDHIYPRSLTKDDSFDNLVLCERTANAKKSDTYPIDNTIQTNQKVFWSFLKHQGLISERKYERLTRIVPLTEDDLSGFIARQLVETNQSVKAATTLLRRLYPGVDVVFVKAENVTDFRHDNNFIKVRSLNHHHHAKDAYLNIVVGNVYHEKFTRNFRAFFKKNGANRTYNLAKMFNYDVKCTNAKDGKAWDIKTSMDIVKKMMDSNDVRVTKRLLEQSGALADATVYKATVAAKANDGAYIGMKTKSSVFADVTKYGGMTKIKNAYSIIVQYIGKKGEVVKEIVPLPIYLTNRNITDQDLIDYVASITPDAKNISIIYRKLCINQLVKVNGFYYYLGGKTNSKIYIDNAVEVVVPTNIAVYIKVLEKFDLLRKDNKALKASTVTTRIYSESSTEIVSITDNDGLIVYDYLMSKLRTPLYMKMKGNKVDELSTVGRSKFTKMTLEEQSIYLLEVLNLLTNSKTTFDVKPLGITASRSTIGVKIHTLDEFKIINQSITGLYSNEITIV

SEQ ID NO: 20499 - protein, 1395 aa, unidentified
  REGION 1..1395: note = Cas Enzyme sequence
MEMQTSKQLISSHLKGYPIKDYFVGLDIGTSSVGWAVTNKLYELLKFRSHKMWGSRLFDEGESAVGRRSFRSIRRRLERRKLRLKLLEELFADAMAQVDSTFFIRLHESKYHYEDKTTGHSSKHILFIDKDYTDQDYFKEYPTIYHLRAELMKSGTDDIRKLFLAVHHILKYRGNFLYEGATFDSNASTLDDVLKQALENIAFNCFDCNSAISSIGQILMEAGKTKSDKAKAIERLVDTYIATDTEGTSSKTQKEQAKEDKKRLKAFANLVLGLSASLTDLFGSVEELDDDLKKLQITGDTYDDKRDELAKAWGDEIHIIDDCKSVYDAIILMSIKEPGLTISESKVKAFNKHKEDLVILKSLLKTDRSIYNAMFKADEKGLHNYVHYIKQGRKEETSCNREDFYKYTKKIVEGLPDSKNKEYILSEIELQTLLPLQRIKDNGVIPYQLHLEELKAILDTCGPKFPFLNEVADGYSVAEKLIKMLEFRIPYYVGPLNTHHNVDKGGFAWAVRKASGRVTPWNFDDKIDREKSAAAFIKNLTNKCTYLLGEDVLPKSSLLYSEFMLLNELNNIRIDGKPLETAVKEHLIEAVFKQDHKKMTKNRIEQFLQDNNYIPNKHKSDITGLDGEIKNDLKSYRDMVRILGTNFDISMAEDIIMDITIFGESKKMLRETLRNKFASRLDDEAIKKLSKLRYRDWGRLSKKLLNGIEGCDKAGDGTPETIIKLMRNFSYNLMELLGDKFSFMERIQELNDELTMGQVVDPHDIIDELGLSPAVKRAVWQALRIVDEVIHIKKALPSRIFVEVTRSNKAEKKKKDSRQKRLSDLYTAIKKDEALLNGLKDTEFDGLKLGLSNYDDAALRSKKLYLYYTQMGRCAYTGEVIDIALLNTDNYDIDHIYPRSLTKDDSFDNLVLCKRAANAQKSDTYPIAEGIQKDQKPFWNFLKQQGLISERKYERLTRNTPLTADDLSGFIARQLVETNQSVKAVTTLLRRLYPEIDVVFVKAENVTDFRHDNNFIKVRSLNHHHHAKDAYLNIVVGNVYHEKFTRNFRAFFKKNGANRTYNLAKMFNYDVKCTNAKDGKAWDVKTSMDIVKKMMDSNDVRVTKRIYEQKGQLADINLTKASKVKADIYLPIKGNDLIMSQNTKYGGYSDIKNAYYTIIEYKDKKNNSIISFLPIPIFIATKNLTNQALLEYIKTILPKANNLRIIYKKVYNDQLLKIDGFNYYLGGRSNDRFCIDNAIQLIVPLEMQFYIKLVEKFIAIISENKNVALKASSVKSRNPLNNQVENISLEYTQKLFDYLVSKFNEPIYLKMRGNKLTDVDNIGRKEFIKLSLDERCKALAELLNIFTNMNKKLSLSTINVSVSRKVVNFKISSLDEFKIVNESVTGLYSNEITIV

SEQ ID NO: 20500 - protein, 1396 aa, unidentified
  REGION 1..1396: note = Cas Enzyme sequence
MEMQTSKQFISSHLKEYPIKDYFVGLDIGTNSVGWAVTNKLYELLKFRSHKMWGSRLFDEGESAVGRRSFRSIRRRLERRKLRLKLLEELFADAMAQVDPTFFMRLRESKYHYEDKTTGHSSKHILFIDKDYTDQDYFKEYPTIYHLRAELMKSGTDDNRKLFLAVHHILKYRGNFLYEGATFDFNASTLDDVLKQALEKITFNCFDCNSAISAIGQILMDAGKTKSDKAKAIERLVDTYIATDTEDSSSKTQKEQVKEDKKRLKAFANLVLGLSASLTDLFGSVEELDDDLKKLQITGDTYDDKRDELAKVWGDEVHIIDDCKSVYDAIILMSIKEPGLTISESKVKAFNKHKEDLVILKSLLKTDRSIYNTMFKADEKGLHNYVHYIKQGRKEETSCNREDFYKYTKKVVEGLPDSKDKEYILSEIELQTLLPLQRIKDNGVIPYQLHLEELKTILKTCGAKFPFLNEVADGYSVAEKLIKMLEFRIPYYVGPLNTYHNVEKGGFSWAVRKASGRVTPWNFDDKIDREKSAAAFIKNLTNKCTYLLGEDVLPKSSLLYSEFMLLNELNNIRINGKPLEPGVKEHLIEAVFKQDHKKMTKNRIEQFLKDNNYIPKKHKPDITGLDGEIKNDLTSYRDMVRILGTNFDRSMAEDIIMDITIFGESKKMLRETLRNKFASHLDDETIKKLSKLRYRDWGRLSKKLLNGVEGCDKAGDGTPETIIELMRNFSYNLMELLGDKFSFMERIQEINDKLTEDQVVDPQDIIDELALSPAVKRAVWQALRIVDEVIHIKKALPSRIFVEVTRSNKTEKKKKDSRQKRLSDLYAAIKKDEALLSGLKETEFEGLKSGLANYDDAALRSKKLYLYYTQMGRCAYTGEVIELSQLNTDNYDIDHIYPRSLTKDDSFDNLVLCKRIANAQKSDTYPIAEKIQKAQKPFWTFLKQQGLISERKYERLTRNTPLTADDLSGFIARQLVETNQSVKAATTLLRRLYPEIDVVFVKAENVTDFRHDNNFIKVRSLNHHHHAKDAYLNIVVGNVYHEKFTRNFRSFFQKNGASRTYNLAKMFNYDVTCTNAKDGKAWDVKTSMNIVKKMMGSNDVRVTKRLLEQSGALADATVYKATVAAMAKDGAYIGMKTKSSVFADVTKYGGMTKIKNAYSIIVQYIGKKGEVVKEIVPLPIYLTNRNTTDQDLIDYVASITPEAKDISIIYRKLCINQLVKVNGFYYYLGGKTSNSICIDNAIQVLLSNEFLIYAKLLDKVNTLRKSDPSINIQNISTLSPFAKEQISITINDNLKFYDYLVEKLNSNIYIKMKGNKASDLIDIGREKFKGIDVSSQCILLLEILNMLTNMKTTYDIKLLGFSTSRTKIALKVSTLDEFKIINQSITGLYSSEITIV

SEQ ID NO: 20501 - protein, 1395 aa, unidentified
  REGION 1..1395: note = Cas Enzyme sequence
METQASNQLISSHLKGYPIKDYFVGLDIGTSSVGWAVTNKAYELLKFRSHKMWGSRLFDEGESAVARRGFRSMRRRLERRKLRLKLLEELFADAMAQVDPTFFMRLRESKYHYEDKTTGHSSKHILFIDKNYNDQDYFKEYPTVYHLRSELMKSGTDDIRKLFLAVHHILKYRGNFLYEGATFDSNASTLDDVIKQALENITFNCFDCNSAISSIGQILMEAGKTKSDKAKAIEHLVDTYIATDTVDTSSKTQKDQVKEDKKRLKSFANLVLGLSASLTDLFGSVEDLDEDLKKLQIIGDTYDERRDDLAKVWGDEIHIIDDCKSVYDAIILLSIKEPGLTISESKVKAFNKHKDDLAILKSLLKSDRSIYNTMFKVDEKGLHNYVHYIKQGRTEETSCNREDFYKYTKKVVEGLPDSKDKEYILSEIELQTLLPLQRIKDNGVIPYQLHLEELKVILAKCGPKFPFLNEVADGFSVAEKLIKMLEFRIPYYVGPLNTHHNVDNGGFAWAVRKASGRVTPWNFDDKIDREKSAAAFIKNLTNKCTYLLGEDVLPKSSLLYSEFMLLNELNNVRIDGKPLEKAVKEHLIEAVFKQDHKKMTKNRIEQFLKDNNYIPEKNKPEITGLDGEIKNDLASYRDMVRILGNNFDLSMAEEIITDITIFGESKKMLRETLRNKFSSRLDDEAIKKLSKLRYRDWGRLSRKLLNVIEGCDKAGDGTPETIIILMRNFSYNLMELLGDKFSFMERIQEINAKLIEGQIVNPHDIIDDLALSPAVKRAVWQALRIVDEIVHIKKTLPARIFVEVTRSNKAEKKKKDSRQKRLSDLYAAIKKDDALLSGLTNEEFGGLKSGLAKYDDAALRSKKLYLYYTQMGRCAYTGEVIDLSQLNTDNYDIDHIYPRSLTKDDSFDNLVLCKRTANAQKSDTYPISKEIQKAQKAFWIFLKQQGLISERKYERLTRITPLTADDLSGFIARQLVETNQSVKAATTLLRRLYPGVDVVFVKAENVTDFRHDNNFIKVRSLNHHHHAKDAYLNIVVGNVYHERFTRNFRAFFKKNGANRTYNLAKMFNYDVNCTNAKDGKAWTVKTSMDTVKKMMDSNDVRVTKRVYEQKGQLSDINLTKASKVKADIYLPIKANDPIMSQNMKYGGYSDIKNAYYTIIEYSDKKNNSIKAFIPIPIFIATKTLTKQALLEYIKTVLPKANNLRIIYKKVYNDQLLKIDGFNYYLGGRSNDRFCIDNAIQLIVPLEIQFYIKLVEKFTAIISENKNIALKASSVKSRNPINNQVENITLEYTQKLFDYLVSKFNELIYLKMRGNKLTDVNNIGRKQFIKLSLEERCKALAELLNIFTNMNKKLSLSTINVSASRKVVNFKISSLDEFKIVNESITGLYSHEITIV

SEQ ID NO: 20502 - protein, 1407 aa, unidentified
  REGION 1..1407: note = Cas Enzyme sequence
MSIINFPRRGLMEMQTSKQLISSHLKEYPIKDYFVGLDIGTSSVGWAVTNKLYELLKFRSHKMWGSRLFDEAESAVGRRSFRSIRRRLERRKLRLKLLEELFADAMAQVDSTFFIRLHESKYHYEDKTTGHSSKHILFIDKDYTDQDYFKEYPTIYHLRAELMKSGTDDIRKLFLAVHHILKYRGNFLYEGATFDSNASTLDDVLKQALENITFNCFDCNSAISSIGQILMDASKTKSDKAKAIERLVDTYIATDTEDSSSKTQKEQVKEDKKRLKAFANLVLGLSASLTDLFGSVEELDDDLKKLQITGDTYDDKRDELAKVWGDEVHIIDDCKSVYDAIILMSIKEPGLTISESKVKAFNKHKEDLVILKSLLKTDRSIYNTMFKADEKGLHNYVHYIKQGRKEETSCNREDFYKYTKKIVEGLPDSKDKEYILSEIELQTLLPLQRIKDNGVIPYQLHLEELKTILKTCGAKFPFLNEVADGYSVAEKLIKMLEFRIPYYVGPLNTYHNVEKGGFAWAVRKASGRVTPWNFDDKIDREKSAAAFIKNLTNKCTYLLGEDVLPKSSLLYSEFMLLNELNNIRIDGKPLEPGVKEHLIEAIFKQDHKKMTKNRIEQFLKDNNYIPKKHKPDITGLDGEIKNDLTSYRDMVRILGTNFDRSMAEDIIMDITIFGESKKMLRETLRNKFASHLDDETIKKLSKLRYRDWGRLSKKLLNGIEGCDKAGDGTPETIIELMRNFSYNLMELLGDKFSFMERIQEINDKLTEGQVVDPQDIIDELALPPAVKRAVWQALRIVDEVIHIKKALPSRIFVEVTRSNKTEKKKKDSRQKRLSDLYAAIKKDEALLSGLKDTEFEGLKSGLASYDDAALRSKKLYLYYTQMGRCAYTGNIIDLNLLNTDNCDIDHIYPRSLTKDDSFDNLVLCERTANAKKSDTYPIDNTIQTNQKAFWSFLKHQGLISERKYERLTRNTPLTADDLSGFIARQLVETNQSVKAATTLLRRLYPDVDVVFVKAENVTDFRHDNNFIKVRSLNHHHHAKDAYLNIVVGNVYHEKFTRNFRAFFKKNGANRTYNLAKMFNYDVKCTNAKDGKAWDIKTSMDIVKKMMDSNDVRVTKRLLEQSGALADATVYKATVAAKANDGAYIGMKTKSSVFADVTKYGGMTKIKNAYSIIVQYIGKKGEVVKEIVPLPIYLTNRNITDQDLIDYVASITPEAKDISIIYRKLCINQLVKVNGFYYYLGGKTSNSICIDNAIQVLLSNEFLIYAKLLDKVNTLRKSDPSINIQKISTLSPFAKEQISITINDNLKFYDYLVEKLNSNIYIKMKGNKASDLIDIGREKFKGIDVSSQCILLLEILNMLTNMKTTYDIKLLGFSTSRTKIALKVSTLDEFKIINQSITGLYSSEITIV

SEQ ID NO: 20503 - protein, 1069 aa, unidentified
  REGION 1..1069: note = Cas Enzyme sequence
  REGION 1038..1040: note = misc_feature - Xaa can be any naturally occurring amino acid
METQASNQLISSHLKGYPIKDYFVGLDIGTSSVGWAVTNKAYELLKFRSHKMWGSRLFDEGESAVARRGFRSMRRRLERRKLRLKLLEELFADAMAQVDPTFFMRLRESKYHYEDKTTGHSSKHILFIDKNYNDQDYFKEYPTVYHLRSELMKSGTDDIRKLFLAVHHILKYRGNFLYEGATFDSNASTLDDVIKQALENITFNCFDCNSAISSIGQILMEAGKTKSDKAKAIEHLVDTYIATDTVDTSSKTQKDQVKEDKKRLKAFANLVLGLNASLIDLFGSVEELEEDLKKLQITGDTYDDKRDELAKAWSDEIYIIDDCKSVYDAIILLSIKEPGLTISESKVKAFNKHKDDLAILKSLLKADRSIYNEMFKADEKGLHNYVHYIKQGRKEETSCNREEFYKYTKKVVEGLPDSKDKEYILSEIELQTLLPLQRIKDNGVIPYQLHLEELKTILDTCKSKFPFLNVVADGYSVADKLIKMLEFRIPYYVGPLNTHHNVDNGGFAWAVRKASGRVTPWNFDDKIDREKSAAAFIKNLTNKCTYLLGEDVLPKSSLLYSEFMLLNELNNVRIDGKPLEKAVKEHLIEAVFKQDHKKMTKNRIEQFLKDNNYIPEKHKPEITGLDGEIKNDLASYRDMVRILGNNFDLSMAEEIITDITIFGESKKMLRETLRKKFASCLDDEAIKKLSKLRYRDWGRLSKKLLNGIDGCDKAGDGTSVTIIEAMRDFSYNLMELLGDRFSFMERIQEINDKLTEGQIVNPHDIIDDLALSPAVKRAVWQALRIVDEIVHIKKTLPARIFVEVTRSNKAEKKKKDSRQKRLSDLYAAIKKDDALLSGLTNEEFGGLKSGLAKYDDAALRSKKLYLYYTQMGRCAYTGEVIDLSQLNTDNYDIDHIYPRSLTKDDSFDNLVLCKRTANAQKSDTYPISKEIQKAQKAFWIFLKQQGLISERKYERLTRITPLTADDLSGFIARQLVETNQSVKAATTLLRRLYPGVDVVFVKAENVTDFRHDNNFIKVRSLNHHHHAKDAYLNIVVGXXXLLLVMYIMKDLLVTSVHSLKRMELIVHII

SEQ ID NO: 20504 - protein, 1398 aa, unidentified
  REGION 1..1398: note = Cas Enzyme sequence
METQASNQLISSHLKGYPIKDYFVGLDIGTSSVGWAVTNKAYELLKFRSHKMWGSRLFDEGESAVARRGFRSMRRRLERRKLRLKLLEELFADAMAQVDPTFFMRLRESKYHYEDKTTGHSSKHILFIDKNYNDQDYFKEYPTVYHLRSELMKSGTDDIRKLFLAVHHILKYRGNFLYEGATFDSNASTLDDVIKQALENITFNCFDCNSAISSIGQILMEAGKTKSDKAKAIEHLVDTYIATDTVDTSSKTQKDQVKEDKKRLKAFANLVLGLNASLIDLFGSVEELEEDLKKLQITGDTYDDKRDELAKAWSDEIYIIDDCKSVYDAIILLSIKEPGLTISESKVKAFNKHKDDLAILKSLLKADRSIYNEMFKADEKGLHNYVHYIKQGRKEETSCNREEFYKYTKKVVEGLPDSKDKEYILSEIELQTLLPLQRIKDNGVIPYQLHLEELKTILDTCKSKFPFLNVVADGYSVADKLIKMLEFRIPYYVGPLNTHHNVDNGGFAWAVRKASGRVTPWNFDDKIDREKSAAAFIKNLTNKCTYLLGEDVLPKSSLLYSKFMLLNELNNVRIDGKPLETKVKAHLIKAVFKQDHKKMTKNRIEQFLKDNNYIPEKHKPEITGLDGEIKNDLASYRDMVRILGDGFDKSMAEEIITDITIFGESKKMLRETLRNKFSSRLDDEAIKKLSKLRYRDWGRLSKKLLNGIDGCDKAGDGTSVTIIEEMRDFSYNLMELLGDRFSFMERIQEINDKLTEGQIVNPHDIIDDLALSPAVKRAVWQALRIVDEIVHIKKALPARIFVEVTRSNKAEKKKKDSRQKRLSDLYAAIKKDDALLSGLTNEEFGGLKSGLAKYDDAALRSKKLYLYYTQMGRCAYTGEVIDLSQLNTDNYDIDHIYPRSLTKDDSFDNLVLCKRTANAQKSDTYPISKDIQKAQKPFWTFLKQQGLISERKYERLTRITPLTADDLSGFIARQLVETNQSVKAATTLLRRLYPGVDVVFVKAENVTDFRHDNDFIKVRSLNHHHHAKDAYLNIVVGNVYHEKFTRNFRAFFKKNGANRTYNLAKMFNYDVNCTNAKDGKAWDVKTSMDTVKKMMDSNDVRVTKRLLEQTGALADATIYKATVAGKAKDGAYIGMKTKSSVFADVSKYGGMTKIKNAYSIIVQYTGKKGEVIKEIVPLPIYLTNRNTTDQDLINYVASIIPQAKDISIIYGKLCINQLVKVNGFYYYLGGKTNSKFCIDNAIQVIVSNEWIPYLKVLEKFNNMRKDNKDLKANVVSTRALDNKHTIEVRIVEEKNIEFFDYLVSKLKMPIYQKMKGNKAAELSEKGYGLFKKMSLEEQSIHLIELLNLLTNQKTTFEVKPLGITASRSTVGSKISNQDEFKVINESITGLYSNEVTIV

SEQ ID NO: 20505 - protein, 1396 aa, unidentified
  REGION 1..1396: note = Cas Enzyme sequence
METQTSNQLITSHLKEYPKQDYFVGLDIGTSSVGWAVTNKSYELLKFHSHKMWGSRLFDEGESAVARRGFRSMRRRLERRKLRLKLLEELFADAMAQVDPTFFMRLRESKYHYEDKTTGHSSKHILFIDKDYTDQDYFKEYPTIYHLRAELMKSGTDDIRKLFLAVHHILKYRGNFLYEGATFDSNASTLDDVLKQAIENITFNCFDAKAAISSIGEILMEQGKTKSDKAKAIERLVDTYIATVTEDTSSKTQKEQVKEDKKRLKAFANLALGLSASLTDLFGSVEELDDDLKKLQITGDTYDDKRDELAKAWGDEIHIIDDCKSVYDAIILMSIKEPGLTISESKVKAFNKHKEDLAILKSLLKTDRSIYNAMFKADEKGLHNYVHYIKQGRTEETSCNREDFYKYTKKVVEGLPDSKDKDYILSEIELQTLLPLQRIKDNGVIPYQLHLEELKIILKTCGPKFPFLNEVADGYSVAEKLIKMLEFRIPYYVGPLNSHHNVDKGGFAWAVRKASGRVTPWNFDDKIDREKSAAAFIKNLTNKCTYLLGEDVLPKSSLLYSEFMLLNELNNIRIDGKPLETGVKEHLIEAEFKQDHKKMTKNRIEQFLKDNNYIPNKHKPDITGLDGEIKNDLTSYRDMVRILGTNFDRSMAEDIIMDITIFGESKKMLRETLRNKFASHLDDETIKKLAKLRYRDWGRISKKLLNGLEGCDKTGDCEAATIIKFMRNFSYNLMELLGDKFSFMERIQEINNKLTEGQVVNPHDIIDDLALSPAVKRAVWQALRIVDEVVHIKKALPSRIFVEVTRSNKTEKKKKDSRQKRLSDLYAAIKKDDALLNGLKNEEFSGLKSELATYDDAALRSKKLYLYYTQMGRCAYTGESIDIAILNTDNYDIDHIYPRSLTKDDSFDNLVLCKRTANAQKSDTYPIAEEIQKAQKSFWTFLKQQGLISERKYERLTRNTPLTADDLSGFIARQLVETNQSVKAATTLLRRLYPEIDVVFVKAENVTDFRHDNNFIKVRSLNHHHHAKDAYLNIVVGNVYHEKFTRNFRVFFKKNGANRTYNLAKMFNYDVKCTNAKDGKAWDVKTSMDIVKKMMASNDVRVTKRLLEQSGALADATVYKATVAGKAKDGAYIGMKTKSSVFADVSKYGGMTKIKNAYSIIVQYVGKKDEIVKEIVPLPIYLTNSNTIDQDLIDYVASITPEAKDISIIYRKLCINQLVKINGFYYYLGGKTSNSICIDNAIQVLLSNEFLIYAKLLDKVNTLRKSDPSINIQNISTLSPFAKEQISITINDNLKFYDYLVEKLNSNIYIKMKGNKASDLIDIGREKFKGIDVSSQCILLLEILNMLTNMKTTYDIKLLGFSTSRTKIALKVSTLDEFKIINQSITGLYSNEITIV

SEQ ID NO: 20506 - protein, 1406 aa, unidentified
  REGION 1..1406: note = Cas Enzyme sequence
MSIINFPRRGLMEMQTSKQLISSHLKEYPIKDYFVGLDIGTSSVGWAVTNKLYELLKFRSHKMWGSRLFDEAESAVGRRSFRSIRRRLERRKLRLKLLEELFADAMAQVDSTFFIRLHESKYHYEDKTTGHSSKHILFIDKDYTDQDYFKEYPTIYHLRAELMKSGTDDIRKLFLAVHHILKYRGNFLYEGATFDSNASTLDDVLKQALENITFNCFDCNSAISSIGQILMDASKTKSDKAKAIERLVDTYIATDTEDSSSKTQKEQVKEDKKRLKAFANLVLGLSASLTDLFGSVEELDDDLKKLQITGDTYDDKRDELAKVWGDEVHIIDDCKSVYDAIILMSIKEPGLTISESKVKAFNKHKEDLVILKSLLKTDRSIYNTMFKADEKGLHNYVHYIKQGRKEETSCNREDFYKYTKKIVEGLPDSKDKEYILSEIELQTLLPLQRIKDNGVIPYQLHLEELKTIFKTCGAKFPFLNEVADGYSVAEKLIKMLEFRIPYYVGPLNTYHNVEKGGFAWAVRKASGRVTPWNFDDKIDREKSAAAFIKNLTNKCTYLLGEDVLPKSSLLYSEFMLLNELNNIRIDGKPLETAVKEHLIEAVFKQDHKKMTKNRIEQFLQDNNYIPNKHKSDITGLDGEIKNDLKSYRDMVRILGTNFDISMAEDIIMDITIFGESKKMLRETLRNKFASRLDDEAIKKLSKLRYRDWGRLSKKLLNGIEGCDKAGDGTPETIIKLMRNFSYNLMELLGDKFSFMERIQELNDELTMGQVVDPHDIIDELGLSPAVKRAVWQALRIVDEVIHIKKALPSRIFVEVTRSNKAEKKKKDSRQKRLSDLYTAIKKDEALLNGLKDTEFDGLKLGLSNYDDAALRSKKLYLYYTQMGRCAYTGEVIDIALLNTDNYDIDHIYPRSLTKDDSFDNLVLCKRAANAQKSDTYPIAEGIQKDQKPFWNFLKQQGLISERKYERLTRNTPLTADDLSGFIARQLVETNQSVKAVTTLLRRLYPEIDVVFVKAENVTDFRHDNNFIKVRSLNHHHHAKDAYLNIVVGNVYHEKFTRNFRAFFKKNGANRTYNLAKMFNYDVKCTNAKDGKAWDVKTSMDIVKKMMDSNDVRVTKRIYEQKGQLADINLTKASKVKADIYLPIKGNDLIMSQNTKYGGYSDIKNAYYTIIEYKDKKNNSIKSFLPIPIFIATKNLTNQALLEYIKTILPKANNLRIIYKKVYNDQLLKIDGFNYYLGGRSNDRFCIDNAIQLIVPLEMQFYIKLVEKFIAIISENKNVALKASSVKSRNPLNNQVENISLEYTQKLFDYLVSKFNEPIYLKMRGNKLTDVDNIGRKEFIKLSLDERCKALAELLNIFTNMNKKLSLSTINVSVSRKVVNFKISSLDEFKIVNESVTGLYSNEITIV

SEQ ID NO: 20507 - protein, 1409 aa, unidentified
  REGION 1..1409: note = Cas Enzyme sequence
MSIINFQRRGLMETQASNQLISSHLKGYPIKDYFVGLDIGTSSVGWAVTNKAYELLKFRSHKMWGSRLFDEGESAVARRGFRSMRRRLERRKLRLKLLEELFADAMAQVDPTFFMRLRESKYHYEDKTTGHSSKYILFIDKNYNDQDYFKEYPTVYHLRSELMKSGTDDIRKLFLAVHHILKYRGNFLYEGATFDSNASTLDDVIKQALENITFNCFDCNSAISSIGQILMEAGKTKSDKAKAIEHLVDTYIATDTVDTSSKTQKDQVKEDKKRLKAFANLVLGLNASLIDLFGSVEELEEDLKKLQITGDTYDDKRDELAKAWSDEIYIIDDCKSVYDAIILLSIKEPGLTISESKVKAFNKHKDDLAILKSLLKSDRSIYNTMFKVDEKGLHNYVHYIKQGRKEETSCNREEFYKYTKKVVEGLPDSKDKEYILSEIELQTLLPLQRIKDNGVIPYQLHLEELKTILDTCKSKFPFLNVVADGYSVADKLIKMLEFRIPYYVGPLNTHHNVDNGGFAWAVRKASGRVTPWNFDDKIDREKSAAAFIKNLTNKCTYLLGEDVLPKSSLLYSKFMLLNELNNVRIDGKPLETKVKAHLIKAVFKQDHKKMTKNRIEQFLKDNNYIPEKHKPEITGLDGEIKNDLASYRDMVRILGDGFDRSMAEDIIADITIFGESKKMLRETLRNKFSSRLDDEAIKKLSKLRYRDWGRLSKKLLNGIDGCDKAGDGTSVTIIEAMRDFSYNLMELLGDRFSFMERIQEINDKLTEDQIVDPHDIIDDLALSPAVKRAVWQALRIVDEVAHIKKASPARIFVEVTRSNKNEKKKKDSRQKRLSDLYAAIKKDDVLLNGFSNEIFGELKASLAKYDDAALRSKKLYLYYTQMGRCAYTGEIIELSLLNTDNYDIDHIYPRSLTKDDSFDNLVLCKRTANAQKSDTYPISKEIQKTQKAFWIFLKQQGLISERKYERLTRITPLTADDLSGFIARQLVETNQSVKAATTLLRSLYPGVDVVFVKAENVTDFRHDNNFIKVRSLNHHHHAKDAYLNIVVGNVYHERFTRNFRAFFKKNGANRTYNLAKMFNYDVNCTNAKDGKAWDVKTSMDTVNKMMTSNDVRVTKRLLEQSGALADATVYKATVAAKAKDGAYIGMKTKSSVFADVTKYGGMTKIKNAYSIIVQYIGKKGEVVKEIVPLPIYLTNRNITDQDLIDYVASITPQAKDISIIYRKLCINQLVKVNGFYYYLGGKTNSKFCIDNAIQVIVSNEWIPYLKVLEKFNNMRKDNKDLKANVVSTRALDNKHTIEVRIVEEKNIEFFDYLVSKLKMPIYQKMKGNKADELSEKGYGLFKKMSLEEQSIHLIELLNLLTNQKTTFEVKPLGITASRSTVGSKISNQDEFKVINESITGLYSNEVTIV

SEQ ID NO: 20508 - protein, 1398 aa, unidentified
  REGION 1..1398: note = Cas Enzyme sequence
METQASNQLISSHLKGYPIKDYFVGLDIGTSSVGWAVTNKAYELLKFRSHKMWGSRLFDEGESAVARRGFRSMRRRLERRKLRLKLLEELFADAMAQVDPTFFMRLRESKYHYEDKTTGHSSKHILFIDKNYTDQDYYKAYPTIYHLRAELMKDGTDDIRKLFLAVHHILKYRGNFLYEGASFDSNASTLDDVLKQALENITFNCFDSSVAIGSIGQILMELGKTKSDKAKAIERLVDTYIITDEVDTSGKTQKEQVKEDKKRLKSFANLVLGLSASLTDLFGSVEDLDEDLKKLQIIGDTYDERRDDLAKVWGDEIHIIDDCKSVYDAIILMSIKEPGLTISESKVKAFNKHKDDLAILKSLLKSDRSIYNTMFKVDEKGLHNYVHYIKQGRTEETSCNREDFYKYTKKVVEGLPDSKDKEYILSEIELQTLLPLQRIKDNGVIPYQLHLEELKVILAKCGPKFPFLNEVADGFSVAEKLIKMLEFRIPYYVGPLNTHHNVDNGGFAWAVRKASGRVTPWNFDDKIDREKSAAAFIKNLTNKCTYLLGEDVLPKSSLLYSEFMLLNELNNVRIDGKPLEKAVKEHLIEAVFKQDHKKMTKNRIEQFLKDNNYIPEKHKPEITGLDGEIKNDLASYRDMVRILGNNFDLSMAEEIITDITIFGESKKMLRETLRNKFSSRLDDEAIKKLSKLRYRDWGRLSRKLLNVIEGCDKAGDGTPETIIILMRNFSYNLMELLGDKFSFMERIQEINAKLTEGQIVNPHDIIDDLALSPAVKRAVWQALRIVDEIVHIKKTLPARIFVEVTRSNKNEKKKKDSRQKRLSDLYAAIKKDDVLLNGLNNEIFGELKSSLAKYDDAALRSKKLYLYYTQMGRCAYTGEIIELSLLNTDNYDIDHIYPRSLTKDDSFDNLVLCKRTANAQKSDAYPISEEIQKTQKPFWTFLKQQGLISERKYERLTRITPLTADDLSGFIARQLVETNQSVKAATTLLRRLYPGVDVVFVKAENVTDFRHDNNFIKVRSLNHHHHAKDAYLNIVVGNVYHERFTRNFRAFFKKNGANRTYNLAKMFNYDVNCTNAKDGKAWDVKTSMDTVKKMMDSNDVRVTKRLLEQTGALADATIYKATVAGKAKDGAYIGMKTKSSVFADVSKYGGMTKIKNAYSIIVQYTGKKGEVIKEIVPLPIYLTNRNTTDQDLINYVASIIPQAKDISIIYGKLCINQLVKVNGFYYYLGGKTNSKFCIDNAIQVIVSNEWIPYLKVLEKFNNMRKDNKDLKANVVSTRALDNKHTIEVRIVEEKNIEFFDYLVSKLKMPIYQKMKGNKAAELSEKGYGLFKKMSLEEQSIHLIELLNLLTNQKTTFEVKPLGITASRSTVGSKISNQDEFKVINESITGLYSNEVTIV

SEQ ID NO: 20509 - protein, 1396 aa, unidentified; identical to SEQ ID NO: 20497
  REGION 1..1396: note = Cas Enzyme sequence

SEQ ID NO: 20510 - protein, 1398 aa, unidentified
  REGION 1..1398: note = Cas Enzyme sequence
MEMQTSKQLISSHLKEYPIKDYFVGLDIGTSSVGWAVTNKLYELLKFRSHKMWGSRLFDEGESAVGRRSFRSIRRRLERRKLRLKLLEELFADAMAQVDPTFFIRLHESKHHYEDKTTSHSSKHILFIDKNYTDQDYFKEYPTIYHLRAELMKSGTDDIRKLFLAVHHILKYRGNFLYEGATFDSNASTLDDVLKQALENITFNCFDCNSAISSIGQILMETGKTKSDKAKAIERLVDTYITTDTEDSSSKIQKEQVKEDKKRLKAFANLVLGLSARLTDLFGSVEELDDDLKKLQITGDTYDDKRDELAKAWGDEIHIIDDCKSVYDAIILMSIKEPGLTISESKIKAFNKHKEDLVILKSLLKTDRSIYNAMFKADEKGLHNYVHYIKQGRKEETSCNREDFYKYTKKIVEGLPDSKDKAYILSEIELQTLLPLQRIKDNGVIPYQLHLEELKTILDTCKSKFPFLNEVADGYSVAEKLIKMLEFRIPYYVGPLNTYHNVNNGGFAWAVRKASGRVTPWNFDDKIDREKSAAAFIKNLTNKCTYLLGEDVLPKSSLLYSEFMLLNELNNIRIDGKPLETPVKEHLIEAVFKQDHKKMTKNRIEQFLKDNNYIPKKHKPDITGLDGEIKNDLTSYRDMVRILGIDFDRSMAEDIIMDITIFGESKKMLRETLRNKFASRLDNEAIKKLSKLRYRDWGRLSKKLLNGIEGCDKAGDGTPKTIIKLMRNFSYNLMELLGDKFSFMERIQELNDELTRGQVVDPHDIIDELGLSSAVKRAVWQALRIVDEVIHIKKALPSRIFVEVTRSNKAEKKKKDSRQKRLSDLYAAIKKDEALLSGLKDTEFDGLKLGLANYDDAALRSKKLYLYYTQMGRCAYTGNIIDLNLLNTDNYDIDHIYPRSLTKDDSFDNLVLCERTANAKKSDTYPIDNTIQTNQKVFWSFLKHQGLISERKYERLTRIVPLTEDDLSGFIARQLVETNQSVKAATTLLRRLYPGVDVVFVKAENVTDFRHDNNFIKVRSLNHHHHAKDAYLNIVVGNVYHEKFTRNFRAFFKKNGANRTYNLAKMFNYDVKCTNAKDGKAWDIKTSMDIVKKMMDSNDVRVTKRLLEQSGALADATVYKATVAAKANDGAYIGMKTKSSVFADVTKYGGMTKIKNAYSIIVQYIGKKGEVVKEIVPLPIYLTNRNITDQDLIDYVASITPDAKNISIIYRKLCINQLVKVNGFYYYLGGKTNSKIYIDNAVEVVVPTNIAVYIKVLEKFDLLRKDNKALKASTVTTRIYSESSTEIVSITDNDGLIVYDYLMSKLRTPLYMKMKGNKVDELSTVGRSKFTKMTLEEQSIYLLEVLNLLTNSKTTFDVKPLGITASRSTIGVKIHTLDEFKIINQSITGLYSNEITIV

SEQ ID NO: 20511 - protein, 1409 aa, unidentified
  REGION 1..1409: note = Cas Enzyme sequence
MSIINFQRSRLMETQTSNQLISSHLKSYPVQDYFMGLDVGTNSVGWAVTNKSYELLKFRSHKMWGSRLFDEGESAVVRRGFRSMRRRLERRKLRLKLLEELFADTMAQVDPTFFMRLRESKYHYEDKTTGHKSKHILFIDEDYTDQDYFTEYPTIYHLRKDLMENGTDDIRKLFLAVHHILKYRGNFLYEGATFNSNAFTFEDVLKQALVNITFNCFDTNSAISSISNILMESGKTKSDKAKAIERLVETYTVFDEVNTPDKPQKEQVKEDKKTLKAFSNLVLGLSANLIDLFGSVEDIDDDLKKLQIVGDTYDEKRDELAKVWGDEIHIIDDCKSVYDAIILMSIKEPGLTISQSKVKAFDKHKEDLVILKSLLKLDRNVYNEMFKSDKKGLHNYVHYIKQGRTEETSCSREDFYKYTKKIVEGLADSKDKEYILNEIELQTLLPLQRIKDNGVIPYQLHLEELKVILDKCGPKFPFLHTVSDGFSIIEKLIKMLEFRIPYYVGPLNTHHNIDNGGFSWAVRKQAGRVTPWNFEEKIDREKSAAAFIKNLTNKCTYLFGEDVLPKSSLLYSEFMLFNELNNVRIDGKPLAQGVKQHLIDSIFKQDHKKMTKNRIELFLKDNNYITKKHKPEITGLDGEIKNDLTSYRDMVRILGNNFDVSMAEEIITDITIFGESKKMLRETLRNKFGSQLNDETIKKLSKLRYRDWGRLSKKLLNGIDGCDKGGNGIPKTIIELMRNDSYNLMELLGDKFSFMECIEEENAKLTQGQVVNPHDIIDELALSPAVKRAVWQALRIVDEVAHIKKALPSRIFVEVARTNKSEKKKKDSRQKRLSDLYAAIKKDDVLQSGLQDKEFGALKSGLSNYDDAALRSKKLYLYYTQMGRCAYTGNAIDLNLLNTDNYDIDHIYPRSLTKDDSFDNLVLCERTANAKKSDTYPIDNTIQTKQKSFWAFLKHQGLISERKYERLTRIAPLTVDDLSGFIARQLVETNQSVKATTTLLRRLYPDIDVVFVKAENVTDFRHDNNFIKVRSLNHHHHAKDAYLNIVVGNVYHEKFTRNFRLFFKKNGANRTYNLAKMFNYDVKCTNAQDGKAWDKQTSMDTVKKMMASNDVRVTRHLLEQSGALADATVYKASVAAKAKDGAYIGMKTKSSVFADVSKYGGMTKIKNAYSIIVQYTGKKNEVIKEIVPLPIYLTNRNTTDSDLLDYVKSVIPKAKDITIIYRKLCINQLVKVNGFYYYLGGKTNDKIYIDNAIELVVPDDIAMYIKLLDKYDLLRKENKDLKASNITTSIYNINTSTVVSLSNNVGIDVFDYFMSKLRTPLYMKMKGNKVDELSSIGRSKFIKMSLEDQSIYLLEVLNLLTNSKTTFDVKPLGITGSRSTIGVKIHNLDEFKIINESITGLYSNEITIV

SEQ ID NO: 20512 - protein, 1398 aa, unidentified
  REGION 1..1398: note = Cas Enzyme sequence
METQTSNQLITSHLKDYPKQDYFVGLDIGTNSVGWAVTNKSYELLKFHSHKMWGSRLFEEGESAVTRRGFRSMRRRLERRKLRLKLLEELFADAMAQVDSTFFIRLHESKYHYEDKTTGHSSKHILFIDEDYTDQDYFTEYPTIYHLRKDLMANGTDDIRKLFLAVHHILKYRGNFLYEGATFNSNAFTFEDVLKQALVNITFNCFDTNSAISSISNILMESGKTKSDKAKAIERLIDTYTVFDEVNTPDKPQKEQVKEDKKTLKAFANLVLGLSANLIDLFGSVEDIDDDLKKLQIVGDTYDEKRDELAKVWGDEIHIIDDCKSVYDAIILMSIKEPGLTISQSKVKAFDKHKEDLVILKSLLKLDRNVYNEMFKFDKKGLHNYVHYIKQGRTEETSCSREDFYKYTKKIVEGLADSKDKEYILNEIELQTLLPLQRIKDNGVIPYQLHLEELKVILDKCGPKFPFLHTVSDGFSVTEKLIKMLEFRIPYYVGPLNTHHNIANGGFSWAVRKQAGRVTPWNFEEKIDREKSAAAFIKNLTNKCTYLFGEDVLPKSSLLYSEFMLLNELNNVRIDGKALAQGVKQHLIDSIFKQDHKKMTKNRIELFLKDNNYITKKHKPEITGLDGEIKNDLTSYRDMVRILGNNFDVSMAEDIITDITIFGESKKMLRQTLRNKFGSQLNDETIKKLSKLRYRDWGRLSKKLLKGIDGCDKAGNCAPKTIIELMRNDSYNLMELLGDKFSFMECIEEENAKLTQGQVVNPHDIIDELALSPAVKRAVWQALRIVDEVAHIKKALPSRIFVEVARTNKSEKKKKDSRQKRLSDLYSAIKKDDVLQSGLQDKEFGALKSGLANYDDAALRSKKLYLYYTQMGRCAYTGNIIDLNQLNTDNYDIDHIYPRSLTKDDSFDNLVLCERTANAKKSDTYPIDNTIQMKQKSFWAFLKHQGLISERKYERLTRILPLTADDLSGFIARQLVETNQSVKATTTLLRRLYPDIDVVFVKAENVTDFRHDNNFIKVRSLNHHHHAKDAYLNIVVGNVYHEKFTRNFRLFFKKNGANRTYNLAKMFNYDVICTNAQDGKAWDVKTSMNTVKKIMASNDVRVTRRLLEQSGALADATIYKASVAAKAKDGAYIGMKTKSSVFADVTKYGGMTKIKNAYSIIVQYTGKKDEGIKEIVPLPIYLTNRNTTDSDLIDYVKSVIPQAKDISIKYRKLCINQLVKINGFYYYLGGKTNNNIYIDNAIELVVPHNIATYIKLLDKYDLLRKENKALKASSITTSIYNINTSTVVFLSNKVGIDVFDYFMSKLRTPLYMKMKGNKVDELSSIGRSKFIKMSLEEQSIYLLEILNLLTNSKTTFDVKPLGITGSRSTIGVKIHNLDEFKIINESITGLYSNEVTIV

SEQ ID NO: 20513 - protein, 1395 aa, unidentified
  REGION 1..1395: note = Cas Enzyme sequence
METQTSNQLITSHLKDYPKQDYFVGLDIGTNSVGWAVTNKSYELLKFHSHKMWGSRLFEEGESAVTRRGFRSMRRRLERRKLRLKLLEELFADAMAQVDSTFFIRLHESKYHYEDKTTGHSSKHILFIDEDYTDQDYFTEYPTIYHLRKDLMANGTDDIRKLFLAVHHILKYRGNFLYEGATFNSNAFTFEDVLKQALVNITFNCFDTNSAISSISNILMESGKTKSDKAKAIERLIDTYTVFDEVNTPDKPQKEQVKEDKKTLKAFANLVLGLSANLIDLFGSVEDIDDDLKKLQIVGDTYDEKRDELAKVWGDEIHIIDDCKSVYDAIILMSIKEPGLTISQSKVKAFDKHKEDLVILKSLLKLDRNVYNEMFKFDKKGLHNYVHYIKQGRTEETSCSREDFYKYTKKIVEGLADSKDKEYILNEIELQTLLPLQRIKDNGVIPYQLHLEELKVILDKCGPKFPFLHTVSDGFSVTEKLIKMLEFRIPYYVGPLNTHHNIANGGFSWAVRKQAGRVTPWNFEEKIDREKSAAAFIKNLTNKCTYLFGEDVLPKSSLLYSEFMLLNELNNVRIDGKALAQGVKQHLIDSIFKQDHKKMTKNRIELFLKDNNYITKKHKPEITGLDGEIKNDLTSYRDMVRILGNNFDVSMAEDIITDITIFGESKKMLRQTLRNKFGSQLNDDTIKKLSKLRYRDWGRLSKKLLKGIDGCDKAGNGAPKTIIELMRNDSYNLMEILGDKFSFMECIEEENAKLTQGQVVNPHDIIDELALSPAVKRAVWQALRIVDEVAHIKKALPSRIFVEVARTNKSEKKKKDSRQKRLSDLYSAIKKDDVLQSGLQDKEFGALKSGLANYDDAALRSKKLYLYYTQMGRCAYTGNIIDLNQLNTDNYDIDHIYPRSLTKDDSFDNLVLCERTANAKKSDIYPIDNTIQMKQRSFWAFLKHQGLISERKYERLTRIAPLTADDLSGFIARQLVETNQSVKATTTLLRRLYPDIDVVFVKAENVTDFRHDNNFIKVRSLNHHHHAKDAYLNIVVGNVYHEKFTRNFRLFFKKNGANRTYNLAKMFNYDVICTNAQDGKAWDVKTSMNTVKKMMASNDVRVTRRVYEQKGQLADINLTKASKVKADIYLPIKGNDLIMSQNTKYGGYSDIKNAYYTIIEYSDKKNNSIKSFLPIPIFIATKNLTNQALLEYINTILPKANNIRIIYKKVYNDQLLKIDGFNYYLGGRSNDRFCIDNAIQLIAPLEMQFYIKLVEKFTAIISENKNIKLKASSVKSRNPINNQVENITLEYSQKLFDYLVSKFNEPIYTKMRGNKSTDIDSVGRRQFTKLSLEERCKTLAEMLNIITNMNKKLSLSNINVSASRKVVNFKISSLNEFKIINESITGLYSNEVTIV

SEQ ID NO: 20514 - protein, 1399 aa, unidentified
  REGION 1..1399: note = Cas Enzyme sequence
METQTSNQLITSHLKDYPKQDYFVGLDIGTNSVGWAVTNTSYELLKFHSHKMWGSRLFEEGESAVTRRGFRSMRRRLERRKLRLKLLEELFADAMAQVDSTFFIRLHESKYHYEDKTTGHSSKHILFIDEDYTDQDYFTEYPTIYHLRKDLMENGTDDIRKLFLAVHHILKYRGNFLYEGATFNSNAFTFEDVLKRALVNITFNCFDTNSAISSISNILMESGKTKSDKAKVIERLVDTYTVFDEVNTPDKPQKEQVKEDKKTLKAFANLVLGLSANLIDLFGSVEDIDDDLKKLQIVGDTYDEKRDELAKVWGDEIHIIDDCKSVYDAIILMSIKEPGLTISQSKVKAFDKHKDDLVILKSLLKLDRNVYNEMFKSDKKGLHNYVHYIKQGRTEETSCSREDFYKYTKKIVEGLADSKDKEYILNEIELQTLLPLQRIKDNGVIPYQLHLEELKVILDKCGPKFPFLHTVSDGFSVTEKLIKMLEFRIPYYVGPLNTHHNIDNGGFSWAVRKQAGRVTPWNFEEKIDREKSAAAFIKNLTNKCTYLFGEDVLPKSSLLYSEFMLLNELNNVRIDGKALAQGVKQHLIDYIFKQDHKKMTKNRIELFLKDNNYITKKHKPEITGLDGEIKNDLTSYRDMVRILGNNFDVSMAEEIITDITIFGESKKMLRQTLRNKFGSQLNDETIKKLSKLRYRDWGRLSKKLLKGIAGCDKAGNCAPKTIIELMRNDSYNLMELLGDKFSFMECIEEENAKLTQGQVVNPHDIIDELALSPAVKRAVWQALRIIDEVVHIKKALPSRIFVEVARTNKSEKKKKDSRQKRLSDLYSAIKKDDVLQSGLQDKEFGALKSGLANYDDAALRSKKLYLYYTQMGRCAYTGNIIDLNQLNTDNYDIDHIYPRSLTKDDSFDNLVLCERTANAKKSDTYPIDNTIQMKQKSFWAFLKHQGLISERKYERLTRILPLTADDLSGFIARQLVETNQSVKATTTLLRRLYPDIDVVFVKAENVSDFRHDNNFIKVRSLNHHHHAKDAYLNIVVGNVYHEKFTRNFRLFFKKNGANRTYNLAKMFNYDVICTNAQDGKAWDVKTSMNTVKKMMASNDVRVTRRLLEQSGALADATVYKASVAVKAKDGAYIGMKTKSSVFADVSKYGGMTKIKNAYSIIVQYNTGKRDEEIKEIVPLPIYLTNRNTTDSDLIDYVKSVIPKAKDISIKYRKLCINQLVKVNGFYYYLGGKTNSNFCIDNAVQLVVSHDWISYFKVLEKFNNIKKTNKDLKANSVSTRIHSNMGTVEINIDKNKNLDCFDYLMTKFKMPLYQKMKGNKVAELSTKGRSFFEKMSLEEQCVYLMAILNLLTNQKTTFDVKALGITASRSTVGSKVSTQEEFKIINESITGLFSNEVTIV

SEQ ID NO: 20515 - protein, 1398 aa, unidentified
  REGION 1..1398: note = Cas Enzyme sequence
METQTSNQLITSHLKDYPKQDYFVGLDIGTNSVGWAVTNKSYELLKFHSHKMWGSRLFEEGESAVTRRGFRSMRRRLERRKLRLKLLEELFADAMAQVDSTFFIRLHESKYHYEDKTTGHSSKHILFIDEDYTDQDYFSEYPTIYHLRKDLMENGTDDIRKLFLAVHHILKYRGNFLYEGATFNSNASTFEDVLKQALENITFNCFNTNSAISSISNILMESGKTKSDKAKAIERLVDTYTVFDEVNAFDKTQKEQVKEDKKTLKAFANLVLGLTANLIDLFGSVEDIEDDLKKLQIVGDTYDEKRDELAKVWGDEIHIIDDCKSVYDAIILMSIKEPGLTISQSKVKAFDKHKEDLVILKSLLKSDRNVYHEMFKSDKKGLHNYVHYIKQGRTEETSCSREDFYKYTKKIVEELADSKEKEYILNEIELQTLLPLQRVKDNGVIPYQLHLEELKVILDKCGPRFPFLHTVSDGFSVTEKLIKMLEFRIPYYVGPLNTHHNVDNGGFAWAVRKQAGRVTPWNFEEKIDREKSAAAFIKNLTNKCTYLFGEDVLPKSSLLYSEFMLLNELNNVRIDGKPLAQGVKQHLIDSIFKQDHKKMTKNRIELFLKDNNYITKKHKPEITGLDGEIKNDLTSYRDMVRILGNNFDVSMAEEIITDITIFGESKKMLRETLRNKFGSQLNDETIKKLSKLRYRDWGRLSKKLLNGIDGCDKGGNGIPETIIELMRNDSYNLMELLGDKFSFVECIEEENAKLTQGQVVNPHDIIDELALSPAVKRAVWQALRIIDEVVHIKKALPSRIFVEVARTNKSEKKKKDSRQKRLFDLYAAIKKDDVLQSGLQDKEFGALKSGLSNYDDAALRSKKLYLYYTQMGRCAYTGNAIDLNLLNTDNYDIDHIYPRSLTKDDSFDNLVLCERTANAKKSDTYPIDNTIQTKQKSFWAFLKHQGLISERKYERLTRIAPLTADDLSGFIARQLVETNQSVKATTTLLRRLYPEIDVVFVKAENVTDFRHDNNFIKVRSLNHHHHAKDAYLNIVVGNVYHEKFTRNFRLFFKKNGANRTYNLAKMFNYDVKCTNPQDGKAWDKQTSMDTVKKMMASNDVRVTRRLLEQSGALADATVYKASVAAKAKDGAYIGMKTKSSVFADVSKYGGMTKIKNAYSIIVQYTGKKNEVIKEIVPLPIYLTNQNTTDNDLIDYVKSVIPQAKDISIIYRKLCINQLVKINGFYYYLGGKTNNNIYIDNAIELVVPNDIATYIKLLDKYDLLRKENKDLKASNIKTSIYNINTSTVVSLSNKVGIDVFDYFMSKLRTPLYMKMKGNKVDELSSIGRSKFIKMSLEEQSIYLLEVLNLLTNSKTTFDVKPLGITGSRSTIGVKIHNLDEFRIINESITGLYSNEVTIV

SEQ ID NO: 20516 - protein, 1396 aa, unidentified
  REGION 1..1396: note = Cas Enzyme sequence
MEMQTSKQFISSHLKEYPIKDYFVGLDIGTNSVGWAVTNKLYELLKFRSHKMWGSRLFDEGESAVGRRSFRSIRRRLERRKLRLKLLEELFADAMAQVDSTFFMRLRESKYHYEDKTTGHSSKHILFIDKDYTDQDYFKEYPTIYHLRAELMKSGTDDIRKLFLAVHHILKYRGNFLYEGATFDSNASTLDDVLKQALEKITFNCFDCNSAISVIGQILMDAGKTKSDKAKAIERLVDTYIATDTEDASSKTQKEQVKEDKKRLKAFANLVLGLSASLTDLFGSVEELDDDLKKLQITGDTYDDKRDELAKAWGDEVHIIDDCKSVYDAIILMSIKEPGLTISESKVKAFTKHKEDLVILKSLLKTDRSIYNAMFKADEKGLHNYVHYIKQGRKEETSCNREDFYKHTKKVVEGLPDSKDKEYILSEIELQTLLPLQRIKDNGVIPYQLHLEELKTILKTCGPKFPFLNEVADGYSVAEKLIKMLEFRIPYYVGPLNTYHNVDKGGFTWAVRKASGRVTPWNFDDKIDREKSAAAFIKNLTNKCTYLLGEDVLPKSSLLYSEFMLLNELNNIRIDGKPLETAVKEHLIEAVFKQDHKKMTKNRIEQFLKDNNYIPKKHKPDITGLDGEVKNDLTSYRDMVRILGTNFDRSMAEDIIMDITIFGESKKMLQETLRNKFASHLDDETIKKLSKLRYRDWGRLSKKLLNGIQGCDKAGDGTPKTIIELMRNFSYNLMELLGDKFSFMERIQEINDKLTEGRVVYPQDIIDELALSPAVKRAVWQALRIVDEVIYIKKALPSRIFVEVTRSNKTEKKKKDSRQKRLSNLYAAIKKDEALLSGVKDTEFEGLKSGLASYDDAALRSKKLYLYYTQMGRCAYTGNIIDLNLLNTDNYDIDHIYPRSLTKDDSFDNLVLCERTANAKKSDTYPIDNTIQTNQKAFWSFLKHQGLISERKYERLTRNTPLTADDLSGFIARQLVETNQSVKAATTLLRRLYPDVDVVFVKAENVTDFRHDNNFIKVRSLNHHHHAKDAYLNIVVGNVYHEKFTRNFRAFFKKNGANRTYNLAKMFNYDVKCTNAKDGKAWDIKTSMDIVKKMMDSNDVRVTKRLLEQSGALADATVYKATVAAKANDGAYIGMKTKSSVFADVTKYGGMTKIKNAYSIIVQYIGKKGEVVKEIVPLPIYLTNRNTTDQDLIDYVASITPEAKDISIIYRKLCINQLVKVNGFYYYLGGKTSNSICIDNAIQVLLSNEFLIYAKLLDKVNTLRKSDPSINIQNISTLSPFAKEQISITINDNLKFYDYLVEKLNSNIYIKMKGNKASDLIDIGREKFKGIDVSSQCILLLEILNMLTNMKTTYDIKLLGFSTSRTKIALKVSTLDEFKIINQSITGLYSSEITIV

SEQ ID NO: 20517 - protein, 1398 aa, unidentified
  REGION 1..1398: note = Cas Enzyme sequence
METQTSNQLITSHLKDYPKQDYFVGLDIGTNSVGWAVTNTSYELLKFHSHKMWGSRLFEEGESAVTRRGFRSMRRRLERRKLRLKLLEELFADAMAQVDSTFFIRLHESKYHYEDKTTGHSSKHILFIDDDYTDQDYFTEYPTIYHLRKDLMENGTDDIRKLFLAVHHILKYRGNFLYEGATFNSNAFTFEDVLKQALVNITFNCFDTNSAISSISNILMESGRTKSDKAKAIERLVDTYTVFDEVNTPDKSQKEQVKEDKKTLKSFANLVLGLSANLIDLFGSVEDIDDDLKKLQIVGDTYDEKRDELAKVWGDEIHIIDDCKSVYDAIILMSIKEPGLTISQSKVKAFDKHKEDLVILKSLLKLDRNIYNEMFKSDKKGLHNYVHYIKQGRTEETSCSREDFYKYTKKIVEGLADSKDKEYILNEIELQTLLPLQRIKDNGVIPYQLHLEELKVILDKCGPKFPFLHTVSDGFSVTEKLIKMLEFRIPYYVGPLNTHHNIDNGGFSWAVRKQAGRVTPWNFEEKIDREKSAAAFIKNLTNKCTYLFGEDVLPKSSLLYSEFMLLNELNNVRIDGKALAQGVKQHLIDSIFKQEHKKMTKNRIELFLKDNNYITKKHKPEITGLDGEIKNDLTSYRDMVRILGNNFDVSMAEDIITDITIFGESKKMLRQTLRNKFGTQLNDETIKKLSKLRYRDWGRLSKKLLKGIDGCDKAGNGAPKTIIELMRNDSYNLMELLGDKFSFMEYIEEENAKLTQGQVVNPHDIIDELALSPAVKRAVWQALRIVDEVAHIKKALPSRIFVEVARTNKSEKKKKDSRQKRLSDLYSAIKKDDVLQSGLQDKEFGALKSGLANYDDAALRSKKLYLYYTQMGRCAYTGNIIDLNQLNTDNYDIDHIYPRSLTKDDSFDNLVLCERTANAKKSDIYPIDNRIQTKQKPFWAFLKHQGLISERKYERLTRIAPLTADDLSGFIARQLVETNQSVKATTTLLRRLYPDIDVVFVKAENVSDFRHNNNFIKVRSLNHHHHAKDAYLNIVVGNVYHEKFTRNFRLFFKKNGANRTYNLAKMFNYDVICTNAQDGKAWDVKTSMNTVKKMMASNDVRVTRRLLEQSGALADATVYKASVAAKAKDGAYIGMKTKSSVFADVSKYGGMTKIKNAYSIIVQYTGKKNEVIKEIVPLPIYLTNRNTTDSDLLDYVKSVIPKAKDITIIYRKLCINQLVKVNGFYYYLGGKTNDKIYIDNAIELVVLDDIAMYIKLLDKYDLLRKENKDLKASNITTSIYNINTSTVVSLSNNVGIDVFDYFMSKLRTPLYMKMKGNKVDELSSIGRSKFIKMSLEDQSIYLLEVLNLLTNSKTTFDVKPLGITGSRSTIGVKIHNLDEFKIINESITGLYSNEITIV

SEQ ID NO: 20518 - protein, 1396 aa, unidentified
  REGION 1..1396: note = Cas Enzyme sequence
METQTSNQLITSHLKDYPKQDYFVGLDIGTNSVGWAVTNKSYELLKFHSHKMWGSRLFEEGESAVTRRGFRSMRRRLERRKLRLKLLEELFADAMAQVDATFFIRLHESKYHYEDKTTGHSSKHILFIDEDYTDQDYFTEYPTIYHLRKDLMENGTDDIRKLFLAVHHILKYRGNFLYEGATFNSNAFTFEDVLKQALVNITFNCFDTNSAISSISNILMESGKTKSDKAKAIERLVETYTVFDEVNTPDKPQKEQVKEDKKTLKAFSNLVLGLSANLIDLFGSVEDIDDDLKKLQIVGDTYDEKRDELAKVWGDEIHIIDDCKSVYDAIILMSIKEPGLTISQSKVKAFDKHKEDLVILKSLLKLDRNVYNEMFKSDKKGLHNYVHYIKQGRTEETSCSREDFYKYTKKIVEGLADSKDKEYILNEIELQTLLPLQRIKDNGVIPYQLHLEELKVILDKCGPKFPFLHTVSDGFSIIEKLIKMLEFRIPYYVGPLNTHHNIDNGGFSWAVRKQAGRVTPWNFEDKIDREKSAAAFIKNLTNKCTYLFGEDVLPKSSLLYSEFMLLNELNNVRIDGKALAQGVKQHLIDSIFKQDHKKMTKNRIELFLKDNNYITKKHKPEITGLDGEIKNDLTSYRDMVRILGNNFDVSMAEDIITDITIFGESKKMLRQTLRNKFGSQINDETIKKLSKLRYRDWGRLSKKLLKGIDGCDKAGNGAPKTIIELMRNDSYNLMELLGDKFSFMECIEEENAKLTQGQVVNPHDIIDELALSPAVKRAVWQALRIIDEVVHIKKALPSRIFVEVARTNKSEKKKKDSRQKRLSDLYSAIKKDDVLQSGLQDKEFGALKSGLANYDDAALRSKKLYLYYTQMGRCAYTGNAIDLNLLNTDNYDIDHIYPRSLTKDNSFDNLVLCERTANAKKSDTYPIDNTIQTKQKSFWAFLKHQGLISERKYERLTRIAPLTVDDLSGFIARQLVETNQSVKATTTLLRRLYPDIDVVFVKAENVTDFRHDNNFIKVRSLNHHHHAKDAYLNIVVGNVYHEKFTRNFRLFFKKNGANRTYNLAKMFNYDVKCTNAQDGKAWDKQTSMDTVKKMMVSNDVRVTRRLLEQSGALADATIYKASVAAKAKDGAYIGMKTKSSVFSDVTKYGGMTKIKNAYSIIVQYTGKKGEEIKEIVPLPIYLINRNATDIELIDYVKSVIPQAKDISIKYRKLCINQLVKINGFYYYLGGKTSNSICIDNGIQVLFSPEFEVYIKLIDKFYIMQKSNLNIDIKNVSTFNPQNNQQVFITVEDNIKLYDYFIDKLNSNIYQKMKGNKVNDLISIGRDRFIELPINIQCVLLLEILNMLTNMKTTYDIKLLGFSTSRTKIALKISNLNEFKIINESITGLYSNEVTIV

SEQ ID NO: 20519 - protein, 1398 aa, unidentified
  REGION 1..1398: note = Cas Enzyme sequence
METQTSNQLITSHLKDYPKQDYFVGLDIGTNSVGWAVTNKSYELLKFHSHKMWGSRLFEEGESAVTRRGFRSMRRRLERRKLRLKLLEELFADAMAQVDSTFFIRLHESKYHYEDKTTGHSSKHILFIDDDYTDQDYFTEYPTIYHLRKDLMENGTDDIRKLFLAVHHILKYRGNFLYEGATFNSNAFTFEDVLKQALVNITFNCFDTNSAISSISNILMESGKTKSDKAKAIERLVDTYTVFDEVNTPDKSQKEQVKEDKKTLKSFANLVLGLSANLIDLFGSVEDIDDDLKKLQIVGDTYDEKRDELAKVWGDEIHIIDDCKSVYDAIILMSIKEPGLTISQSKVKAFDKHKEDLVILKSLLKLDRNVYNEMFKSDKKGLHNYVHYIKQGRTEETSCSREDFYKYTKKIVEGLADSKDKEYILNEIELQTLLPLQRIKDNGVIPYQLHLEELKVILDKCGPKFPFLHTVSDGFSVTEKLIKMLEFRIPYYVGPLNTHHNIDNGGFSWAVRKQAGRVTPWNFEEKIDREKSAAAFIKNLTNKCTYLFGEDVLPKSSLLYSEFMLLNELNNVRIDGKALAQGVKQHLIDSIFKQDHKKMTKNRIELFLKDNNYITKKHKPEITGLDGEIKNDLTSYRDMVRILGNNFDVSMAEDIITDITIFGESKKMLRQTLRNKFGSQLNDETIKKLSKLRYRDWGRLSKKLLKGIDGCDKAGNGAPKTIIELMRNDSYNLMELLGDKFSFMECIEEENAKLTQGQVVNPHDIIDELALSPAVKRAVWQALRIIDEVVHIKKALPSRIFVEVARTNKSEKKKKDSRQKRLSDLYSAIKKDDVLQSGLQDKEFGALKSGLANYDDAELRSKKLYLYYTQMGRCAYTGNIIDLNQLNTDNYDIDHIYPRSLTKDDSFDNLVLCERTANAKKSDIYPIDNTIQMKQRSFWAFLKHQGLISERKYERLTRIAPLTADDLSGFIARQLVETNQSVKATTTLLRRLYPDIDVVFVKAENVTDFRHDNNFIKVRSLNHHHHAKDAYLNIVVGNVYHEKFTRNFRLFFKKNGANRTYNLAKMFNYDVICTNAQDGKAWDVKTSMNTVKKMMASNDVRVTRRLLEQSGALADATIYKASVAAKAKDGAYIGMKTKSTVFADVTKYGGMTKIKNAYSIIVQYTGKKGEEIKEIVPLPIYLINRNATDIELIDYVKSVIPKAKDISIKYRKLCINQLVKINGFYYYLGGKTNDKIYIDNAIELVVPHDIATYIKLLDKYDLLRKENKTLKASSITTSIYNINTSTVVSLSNKVGIDVFDYFMSKLRTPLYMKMKGNKVDELSSTGRSKFIKMTLEEQSIYLLEVLNLLTNSKTTFDVKPLGITGSRSTIGVKIHNLDEFKIINESITGLYSNEVTIV

SEQ ID NO: 20520 - protein, 1409 aa, unidentified
  REGION 1..1409: note = Cas Enzyme sequence
MSIINFQRSRLMETQTSNQLITSHLKDYPKQDYFVGLDIGTNSVGWAVTNKSYELLKFHSHKMWGSRLFEEGESAVTRRGFRSMRRRLERRKLRLKLLEELFADAMAQVDSTFFIRLHESKYHYEDKTTGHSSKHILFIDEDYTDQDYFTEYPTIYHLRKDLMENGTDDIRKLFLAVHHILKYRGNFLYEGATFNSNAFTFEDVLKQALVNITFNCFDTNSAISSISNILMESGKTKSDKAKAIERLVDTYTVFDEVNTPDKPQKEQVKEDKKTLKAFANLVLGLSANLIDLFGSVEDIDDDLKKLQIVGDTYDEKRDELAKVWGDEIHIIDDCKSVYDAIILMSIKEPGLTISQSKVKAFDKHKEDLVILKSLLKLDRNVYNEMFKSDKKGLHNYVHYIKQGRTEETSCSREDFYKYTKKIVEGLADSKDKEYILNEIELQTLLPLQRIKDNGVIPYQLHLEELKVILDKCGPKFPFLHTVSDGFSVTEKLIKMLEFRIPYYVGPLNTHHNIDNGGFSWAVRKQAGRVTPWNFEEKIDREKSAAAFIKNLTNKCTYLFGEDVLPKSSLLYSEFMLLNELNNVCIDGKALAQGVKQHLIDSIFKQDHKKMTKNRIELFLKDNNYITKKHKPEITGLDGEIKNDLTSYRDMVRILGNNFDVSMAEDIITDITIFGESKKMLRQTLRNKFRSQLNDETIKKLSKLRYRDWGRLSKKLLKGIDGCDKAGNCAPKTIIELMRNDSYNLMELLGDKFSFVECIEEENAKLTQGQVVNPHDIIDELALSPAVKRAVWQALRIIDEVVHIKKALPSRIFVEVARTNKSEKKKKDSRQKRLSDLYSAIKKDDVLQSGLQDKEFGALKSGLANYDDAALRSKKLYLYYTQMGRCAYTGNIIDLNQLNTDNYDIDHIYPRSLTKDDSFDNLVLCERTANAKKSDTYPIDNTIQMKQRSFWAFLKHQGLISERKYERLTRIAPLTSDDLSGFIARQLVETNQSVKATTTLLRRLYPDIDVVFVKAENVSDFRHDNNFIKVRSLNHHHHAKDAYLNIVVGNVYHEKFTRNFRLFLKKNGANRTYNLAKMFNYDVICTNAQDGKAWNKDTSMDTVKKMMASNDVRVTRRLLEQSGALADATIYKASVAAKAKDGAYIGMKTKSSVFADVTKYGGMTKIKNAYSIIVQYTGKKGEEINEIVPLPIYLINRNATDIELIDYVKFVIPQAKDISIKYRKLCINQLVKVNGFYYYLGGKTNDKIYIDNAIELVVPHDIATYIKLLDKYDLLRKENKTLKASSITTSIYNINTSTVISLSNKVGIDVFDYFMSKLRTPLYMKMKGNKVDELSSTGRSKFIKMTLEEQSIYLLEVLNLLTNSKTTFDVKPLGITGSRSTIGVKIHNLDEFKIINESITGLYSNEVTIV

SEQ ID NO: 20521 - protein, 935 aa, unidentified
  REGION 1..935: note = Cas Enzyme sequence
FPFLYTVSDGFSVTEKLIKMLEFRIPYYVGPLNTHHNIDNGGFSWAVRKQAGRVTPWNFEEKIDREKSAAAFIKNLTNKCTYLFGEDVLPKSSLLYSEFMLLNELNNVRIDGKPLAQGVKQHLIDSIFKKDHKKMTKNRIELFLKENNYITKKHKPEITGLDGEIKNDLTSYRDMVRILGNNFDVSMAEDIITDITIFGESKKMLRQTLRNKFGSQLNDETIKKLSKLRYRDWGRLSKKLLKGIDGCDKAGNGAPKTIIELMRNDSYNLMELLGDKFSFMECIEEENAKLTQGQVVNPHDIIDELALSPAVKRAVWQALRIVDEVAHIKKALPSRIFVEVARTNKWEKKKKDSRQKRLSDLYSAIKKDDILQSGLQDKEFGALKSGLANYDDAALRSKKLYLYYTQMGRCAYTGNIIDLNQLNTDNYDIDHIYPRSLTKDDSFDNLVLCERTANAKKSDIYPIDNRIQTKQKPFWVFLKHQGLISERKYERLTRIAPLTADDLSGFIARQLVETNQSVKATTTLLRRLYPDIDVVFVKAENVSDFRHDNNFIKVRSLNHHHHAKDAYLNIVVGNVYHEKFTRNFRLFFKKNGANRTYNLAKMFNYDVICTNAQDGKAWNKDTSMDTVKKMMASNDVRVTRRLVEQSGALADATVYKASVAAKAKDGAYIGMKTKSSVFADVSKYGGMTKIKNAYSIIVQYNTGKRDEEIKEIVPLPIYLTNRNTTDSDLIDYVKSVIPQAKDISIKYRKLCINQLVKVNGFYYYLGGKTNSNFCIDNAVQLVVSHDWISYFKVLEKFNNIKKINKDLKANSVSTRIHSNMGTVEINIDKNKNIDCFDYLMTKFKMPLYQKMKGNKVAELSTKGRSFFEKMSLEEQCVYLMAILNLLTNQKTTFDVKALGITASRSTVGSKVSTQEEFKIINESITGLFSNEVTIV

SEQ ID NO: 20522 - protein, 1398 aa, unidentified
  REGION 1..1398: note = Cas Enzyme sequence
METQTSNQLITSHLKDYPKQDYFVGLDIGTNSVGWAVTNKSYELLKFHSHKMWGSRLFEEGESAVIRRGFRSMRRRLERRKLRLKLLEELFADAMAQVDSTFFIRLHESKYHYEDKTTGHSSKHILFIDDDYTDQDYFTEYPTIYHLRKDLMENGTDDIRKLFLAVHHILKYRGNFLYEGATFNSNAFTFEDVLKQALVNITFNCFDTNSAISSISNILMESGKTKSDKAKAIERLVDTYTVFDEVNTPDKPQKEQVKEDKKTLKAFANLVLGLSANLIDLFGSVEDIDDDLKKLQIVGDTYDEKRDELAKVWGDEIHIIDDCKSVYDAIILMSIKEPGLTISQSKVKAFDKHKEDLVILKSLLKLDRNVYNEMFKSDKKGLHNYVHYIKQGRTEETSCSREDFYKYTKKIVEGLADSKDKEYILNEIELQTLLPLQRIKDNGVIPYQLHLEELKVILDKCGPKFPFLHTVSDGFSVTEKLIKILEFRIPYYVGPLNTHHNIDNGGFSWAVRKQAGRVTPWNFEEKIDREKSAAAFIKNLTNKCTYLFGEDVLPKSSLLYSEFMLLNELNNVCIDGKALAQGVKQHLIDSIFKQDHKKMTKNRIELFLKDNNYITKKHKPEITGLDGEIKNDLTSYRDMIRILGSNFDVSMAEDIITDITIFGESKKMLRQTLRNKFGSQLNDETIKKLSKLRYRDWGRLSKKLLKGIDGCDKAGNGAPKTIIELMRNDSYNLMEILGDKFSFMECIEEENAKLTQGQVVNPHDIIDELALSPAVKRAVWQALRIVDEVAHIKKALPSRIFVEVARTNKSEKKKKDSRQKRLSDLYSAIKKDDVLQSGLQDKEFGALKSGLANYDDAALRSKKLYLYYTQMGRCAYTGNIIDLNQLNTDNYDIDHIYPRSLTKDDSFDNLVLCERTANAKKSDIYPIDNTIQMKQRSFWAFLKHQGLISERKYERLTRIAPLTADDLSGFIARQLVETNQSVKATTTLLRRLYPDIDVVFVKAENVTDFRHDNNFIKVRSLNHHHHAKDAYLNIVVGNVYHEKFTRNFRLFFKKNGANRTYNLAKMFNYDVICTNAQDGKAWNKDTSMDTVKKMMASNDVRVTRRLLEQSGALADATIYKASVAAKAKDGAYIGMKTKSSVFADVTKYGGMTKIKNAYSIIVQYTGKKGEEIKEIVPLPIYLINRNATDIELIDYVKSVIPKAKDISIKYRKLCINQLVKINGFYYYLGGKTNNNIYIDNAIELVVPHNIATYIKLLDKYDLLRKENKALKASSITTSIYNINTSTVVFLSNKVGIDVFDYFMSKLRTPLYMKMKGNKVDELSSIGRSKFIKMSLEEQSIYLLEILNLLTNSKTTFDVKPLGITGSRSTIGVKIHNLDEFKIINESITGLYSNEVTIV

SEQ ID NO: 20523 - protein, 1398 aa, unidentified
  REGION 1..1398: note = Cas Enzyme sequence
METQTSNQLITSHLKDYPKQDYFVGLDIGTNSVGWAVTNKSYELLKFHSHKMWGSRLFEEGESAVTRRGFRSMRRRLERRKLRLKLLEELFADAMAQVDSTFFIRLHESKYHYEDKTTGHSSKHILFIDEDYTDQDYFTEYPTIYHLRKDLMANGTDDIRKLFLAVHHILKYRGNFLYEGATFNSNAFTFEDVLKQALVNITFNCFDTNSAISSISNILMESGKTKSDKAKAIERLIDTYTVFDEVNTPDKPQKEQVKEDKKTLKAFANLVLGLSANLIDLFGSVEDIDDDLKKLQIVGDTYDEKRDELAKVWGDEIHIIDDCKSVYDAIILMSIKEPGLTISQSKVKAFDKHKDDLVILKSLLKLDRNVYNEMFKFDKKGLHNYVHYIKQGRTEETSCSREDFYKYTKKIVEGLADSKDKEYILNEIELQTLLPLQRIKDNGVIPYQLHLEELKVILDKCGPKFPFLHTVSDGFSVTEKLIKMLEFRIPYYVGPLNTHHNIANGGFSWAVRKQAGRVTPWNFEEKIDREKSAAAFIKNLTNKCTYLFGEDVLPKSSLLYSEFMLLNELNNVRIDGKALAQGVKQHLIDSIFKQDHKKMTKNRIELFLKDNNYITKKHKPEITGLDGEIKNDLTSYRDMVRILGNNFDVSMAEDIITDITIFGESKKMLRQTLRNKFGSQLNDYTIKKLSKLRYRDWGRLSKKLLKGIDGCDKAGNCAPKTIIELMRNDSYNLMELLGDKFSFMECIEEENAKLTQGQVVNPHDIIDELALSPAVKRAVWQALRIVDEVAHIKKALPSRIFVEVARTNKSEKKKKDSRQKRLSDLYSAIKKDDVLQSGLQDKEFGALKSGLANYDDAALRSKKLYLYYTQMGRCAYTGNIIDLNQLNTDNYDIDHIYPRSLTKDDSFDNLVLCERTANAKKSDTYPIDNTIQMKQKSFWAFLKHQGLISERKYERLTRILPLTADDLSGFIARQLVETNQSVKATTTLLRRLYPDIDVVFVKAENVSDFRHNNNFIKVRSLNHHHHAKDAYLNIVVGNVYHEKFTRNFRLFFKKNGANRTYNLAKMFNYDVICTNAQDGKAWNKDTSMDTVKKMMASNDVRVTRRLLEQSGALADATIYKASVAAKAKDGAYIGMKTKSSVFADVTKYGGMTKIKNAYSIIVQYTGKKDEGIKEIVPLPIYLTNRNTTDSDLIDYVKSVIPQAKDISIKYRKLCINQLVKINGFYYYLGGKTNNNIYIDNAIELVVPHNIATYIKLLDKYDLLRKENKALKASSITTSIYNINTSTVVFLSNKVGIDVFDYFMSKLRTPLYMKMKGNKVDELSSIGRSKFIKMSLEEQSIYLLEILNLLTNSKTTFDVKPLGITGSRSTIGVKIHNLDEFKIINESITGLYSNEVTIV

SEQ ID NO: 20524 - protein, 1376 aa, unidentified
  REGION 1..1376: note = Cas Enzyme sequence
MSNFDKYKEQICKHKGFKGGNYFIGFDIGTNSVGWAVTNEKYELLKFKSHKMWGSRLFTEAQTAVDTRMKRSGRRRLQRRKFRLLLLESLFAKEINAVDETFFMRLHESKYHVEDKTDPVKYTLFMDKEYTDVDYYKEFPTIYHLRHHLMTEGTKDIRLLFLGIHHILKYRGNFLYGKKEFSVDGEINEVVQATLRELGFCTYIDDDQVLSSVVTLLLDRSVGRSDTVKQLEPIISNWKKLSSIDKKRLKAWGNLIVGLKANLVDLFTEEDIEIVVPEDKEFKDICLSKIIYDDVRDAYAEVWGDKFAIVDQCKVLHDIIVISSIIKPGQSLSEAKIESYMQHKEDLVLLKSVLKDDRKLYDAMFVADVDKGANYVKYIKQGVTGNTSTTEEDFFKYVKKVVSALPVTEDTATVLQKIEEGVFLPLQRISKNGVVPYQLHKEELVRILDKAKANFPFLNEVEDGLTVADKIISILEFKIPYYVGPLNPTHSIENGGFAWVVRKEAGQVLPWNFEQKVDVQASAVKFIENLTNKCTYLIDRDVLPKYSLLYAEFSLLNELNNVRVNDKLLPADVKQAFIRDHFMSLQDSKTATKKVVAKYLVDNNYVSQPPIITGMDQHIATKLTSHRDMKRILGEHFDHAMAEDIIRYITIFGESKDMLRQVLKNYYGDHLTTEQIKKLGKLTYTGWGRLSKKFLSDILGMKKNDDDAEAGTIIEHMREGQENLMQLLSSSYSFIDVVQEYVTKVLGSKEKTAFEMLEDLSLSPMVKRSVWQTLRILDEIVSIRKELPKKIFVEVARTNKADKKRTQSRKALLVELYKQIKDEDVHALQQELESKEDSALNSKKLYLYFTQMGRCMYSGRRIDIHELFTNKYDIDHIYPQSLTKDDSWHNIVLVEKQMNAEKTDCFPIYETIQAKQKGFWKLLWDRGFISEKKYDRLVRVEPLTDDELNQFINRQLVSTNQSIKAVTTLLRQLYPDTDVVFSKAENVSDFRSKNGFIKVRSINHHHHAKDAYLNIVVGNVYHEKFTKNFFGFAKQNGTHRTYNLTKMFEKEIRSTENKDSIIWDPQVSMDTVKTMMRSNDVRVTQRAVPQKGGLSDETVYKKGVAKRGVYLPLKSSDIHLSDVEKYGGRTKMTIAEYVILKIVDIRDKEKIEIFPLPLYVSNQGCLREDIIALYIKGAKDAKKIKFAEVMYRGLYIGSLVNINGFKYYLGGRTGDKVCVDCAIDLVLDNDISVYIKLLEKVEYQKIENPKTFDIHNITTTYLRNEIHVTAEDNKKLYQVFMDKLSTPLFLKLKGNKIEEFKTIGFDKFCELSLENQVTILMEILNIITNFKTERKLKLINITSSRSTVGINVSNTESFSVITTSITGLYENEIKIK

SEQ ID NO: 20525 - protein, 1398 aa, unidentified
  REGION 1..1398: note = Cas Enzyme sequence
METQTSNQLITSHLKDYPKQDYFVGLDIGTNSVGWAVTNKSYELLKFHSHKMWGSRLFEEGESAVTRRGFRSMRRRLERRKLRLKLLEELFADAMAQVDSTFFIRLHESKYHYEDKTTGHSSKHILFIDEDYTDQDYFSEYPTIYHLRKDLMENGTDDIRKLFLAVHHILKYRGNFLYEGATFNSNAFTFEDVLIQALVNITFNCFDTNSAISSISNILMESGKTKSDKAKAIERLVDTYTVFDEVNTPDKPQKEQVKEDKKTLKAFANLVLGLSANLIDLFGSVEDIDDDLKKLQIVGDTYDEKRDELAKVWGDEIHIIDDCKSVYDAIILMSIKEPGLTISQSKVKAFDKHKEDLVILKSLLKSDRSVYYEMFKSDKKGLHNYVHYIKQGRTEETSCSREDFYKYTKKIVEGLADSKDKEYILNEIELQTLLPLQRIKDNGVIPYQLHLEELKVILNKCGSRFPFLHTVSDGFSVTEKLIKMLEFRIPYYVGPLNTHHNVDNGGFAWAVRKQAGRVTPWNFEEKIDREKSAAAFIKNLTNKCTYLFGEDVLPKSSLLYSEFMLLNELNNVRIDGKPLAQGVKQHLIDSIFKQDHKKMTKNRIELFLKDNNYITKKHKPEITGLDGEIKNDLTSYRDMVRILGNNFDVSMAEEIITDITIFGESKKMLRETLRNKFGSQLNDETIKKLSKLRYRDWGRLSKKLLNGIDGCDKGGNGIPETIIELMRNDSYNLMELLGDKFSFMECIEEENAKLTQGQVVNPHDIIDELALSPAVKRAVWQALRIVDEVAHIKKALPSRIFVEVARTNKSEKKKKDSRQKRLSDLYSAIKKDDVLQSGLQDKEFGALKSGLSNYDDAALRSKKLYLYYTQMGRCAYTGNIIDLNQLNTDNYDIDHIYPRSLTKDDSFDNLVLCERTANAKKSDTYPIDNTIQTKQKSFWAFLKHQGLISERKYERLTRIAPLTVDDLSGFIARQLVETNQSVKATTTLLRRLYPDIDVVFVKAENVTDFRHDNNFIKVRSLNHHHHAKDAYLNIVVGNVYHEKFTRNFRLFFKKNGANRTYNLAKMFNYDVKCTNAQDGKAWDKQTSMDTVKKMMASNDVRVTRRLLEQSGALADATVYKASVAAKAKDGAYIGMKTKSSVFADVSKYGGMTKIKNAYSIIVQYTGKKNEVIKEIVPLPIYLTNRNTTDSDLLDYVKSVIPKSKDITIIYRKLCINQLVKVNGFYYYLGGKTNSKFCIDNAVEVVVSNDRIPYFKVIEKFNNMRKDDKDLKANSISTRTYNNMGTVIIKIDKDKNLDCFDYLMTKFKMPIYQKMKGNKGIELSTTGYALFEKMSLEEQCIYLMEILNLLTNQKTIFDVKALGITASRTTVGSKVSNQEEFKIINESITGLYSNEVTIV

SEQ ID NO: 20526 - protein, 1398 aa, unidentified
  REGION 1..1398: note = Cas Enzyme sequence
METQTSNQLITSHLKDYPKQDYFVGLDIGTNSVGWAVTNKSYELLKFHSHKMWGSRLFEEGESAVTRRGFRSMRRRLERRKLRLKLLEELFADAMAQVDSTFFIRLHESKYHYEDKTTGHSSKHILFIDEDYTDQDYFSEYPTIYHLRKDLMENGTDDIRKLFLAVHHILKYRGNFLYEGATFNSNAFTFEDVLIQALVNITFNCFDTNSAISSISNILMESGKTKSDKAKAIERLVDTYTVFDEVNTPDKPQKEQVKEDKKTLKAFANLVLGLSANLIDLFGSVEDIDDDLKKLQIVGDTYDEKRDELAKVWGDEIHIIDDCKSVYDAIILMSIKEPGLTISQSKVKAFDKHKEDLVILKSLLKSDRSVYYEMFKSDKKGLHNYVHYIKQGRTEETSCSREDFYKYTKKIVEGLADSKDKEYILNEIELQTLLPLQRIKDNGVIPYQLHLEELKVILNKCGSRFPFLHTVSDGFSVTEKLIKMLEFRIPYYVGPLNTHHNVDNGGFAWAVRKQAGRVTPWNFEEKIDREKSAAAFIKNLTNKCTYLFGEDVLPKSSLLYSEFMLLNELNNVRIDGKPLAQGVKQHLIDSIFKQDHKKMTKNRIELFLKDNNYITKKHKPEITGLDGEIKNDLTSYRDMVRILGNNFDVSMAEEIITDITIFGESKKMLRETLRNKFGSQLNDETIKKLSKLRYRDWGRLSKKLLNGIDGCDKGGNGIPETIIELMRNDSYNLMELLGDKFSFMECIEEENAKLTQGQVVNPHDIIDELALSPAVKRAVWQALRIVDEVAHIKKALPSRIFVEVARTNKSEKKKKDSRQKRLSDLYSAIKKDDVLQSGLQDKEFGALKSGLSNYDDAALRSKKLYLYYTQMGRCAYTGNIIDLNQLNTDNYDIDHIYPRSLTKDDSFDNLVLCERTANAKKSDTYPIDNTIQTKQKSFWAFLKHQGLISERKYERLTRIAPLTVDDLSGFIARQLVETNQSVKATTTLLRRLYPDIDVVFVKAENVTDFRHDNNFIKVRSLNHHHHAKDAYLNIVVGNVYHEKFTRNFRLFFKKNGANRTYNLAKMFNYDVKCTNAQDGKAWNKQTSMDTVKKMMASNDVRVTRRLLEQSGALADATVYKASVAAKAKDGAYIGMKTKSSVFADVSKYGGMTKIKNAYSIIVQYTGKKNEVIKEIVPLPIYLTNRNTTDSDLLDYVKSVIPKSKDITIIYRKLCINQLVKVNGFYYYLGGKTNSKFCIDNAVEVVVSNDRIPYFKVIEKFNNMRKDDKDLKANSISTRTYNNMGTVIIKIDKDKNLDCFDYLMTKFKMPIYQKMKGNKGIELSTTGYALFEKMSLEEQCIYLMEILNLLTNQKTIFDVKALGITASRTTVGSKVSNQEEFKIINESITGLYSNEVTIV

SEQ ID NO: 20527 - protein, 1345 aa, unidentified
  REGION 1..1345: note = Cas Enzyme sequence
MGNKLWNVDDYYLGLDIGTESVGWAVTDKDYVIPKFKGNAMWGVHLFDEGETSVKRRGFRSARRRTQRKRERLALLEALFDEEICKKDCTFFRRLHESDLWPEDKSGDDKYAVFADENYTDKDFHKEYPTIYHLRYELIKNKEPHDVRLVFLALHHIIKNRGHFLFDSLSSAEDFNSAYETMCSYLSDNEIQLNCSDIEQFKAILKDRRQGKIEKTKNLASLFGITKKSDPVSYAVMAVLSGSTVKMCDLFGDDELKTVEKNNISFASGYEENEEIYASVLGDRFELVNILKAVYDWAVLADILDGKKYISEAKVAVYEKHKNDLKTLKKYVKTYLPEKYNEIFKISDGKKDNYVAYSGHIKESGKTGELKKTCDSENFCAYLKKTLGKNADLSYKEMFDEIENKTFMPKQVTKSNGVVPMQVNEEELKAILDNAKDYLPFLNSCDENGVSVYDKIIKIFEYRIPYYVGPLNTHTEKSWLKRKDGVKIYPWNFDDVVDIDSSAEEFINNLTSKCTYLPECDVIPKCSLLYSKFTVLNEINNLKLNGEDVPVELKQGIYNDLFMTRRKVTVKQIKDYLKARGCYDNNDVLSGIDTTVKSSLKSYFDFKDFESLTFDDKESIIASSVIFGDDKKLLKKRLKKLFSEKLTDEDIKKICKLKYTGWSRLSKEFLCDVEFTYKKTGEVMNVITALWETNYNLMQILYSEDFCCDGDEKKNLNDKLDELSYTGDQHSLRKAVDALYVSPKVKRPILRALLIAKEIEKIQERPPKKIFVEVARGIDNREERHRDSRKNRLMELYKNCKKEAEKFCPYFDAMSKKLSDEDESKLRSDKLYFYYIQLGKCMYTGEEISLGELMNGNGRFDIDHIYPQSKIKDDSLTNRVLVNRTVNADKTNVYPIDSAVQAKMSPYWQMLRSSGLISEETYKRLTRKTPLTDDELSAFVSRQLTETQQSTKAVAHILEQLYPKPKTEIVYVKAALAHAFRQSNDMLKCREVNDLHHAKDAYLNIVVGNAYNVKVTHNKVNFIKGLQNNDKGYTVNPEKFFSHDIPGAWSVKDSMNTVCRFMNKNNIRYTRFPRKKQGGLFKINPLKKGNGQVPLKASGARSCIKKYGGYDKATSAYFSYVEYTDKKGKAVRQMFPVNLYEVKEYEADMQGFVTSRIDGASNVKILIPCVKYDACISFDGCRMFITKKAGNQIGYKPGIQLVLGYKYEKYIRNITNYLTKHKDREIIPRDNISSEENIELYDVLTGKMLNTVLSVRFSGIGKKLEKRREKFVLCSPEEQCYVLNEILKILHANVLLGDLRLIGESPNAGAMLTNAKFSEIKDVHSIKLINQSVTGLFEQEIDLLK

SEQ ID NO: 20528 - protein, 1387 aa, unidentified
  REGION 1..1387: note = Cas Enzyme sequence
MEKNYYIGLDIGTNSVGWAVTDEKYSVVKKKGKRLWGVRLFDTAATAKKRRLKRTARRRYLRRRQRIDLLQELFAPLILERDENFFRRLDESFFFEEDKKVDGKYSLFSDKNYTDKDFYKEYKTAYHLRNRLIKGDIPDDPRIVYLACHHIIKKRGHFLFNGEINGNNISCDNEIRGLQKFVTDGNDHDVPMFGGDNFKDFSLDEFVKIITLTDTRRESIEKTTELFGVSDGKYLKNAVRVMFGYKQKVKTLFASEYYGDCDIEIDFTSEQYEETSEALKIELGDDYSYVDTLKNLYDFVVLKRLLQEHSSISEAMVSKYERHAVELRMLKNIVRKYGKTSDYNEIFKETVSDASYAKYIGMNKKGGVKQVTERESAYSYETFYKALLGKLDSIVTDKSDADYLCIKNRIENKDFLIRYASSVNASIPNQLHRDELNRILDNASVKFPYLLEKDGDGLSVKDKIMSIMTYKIPYYVGPIPNDENSEAIGKYSWLVRKESGKVLPWNFEKKVDMNASMEKFIKSLINRCSYLNTENVLPKQSLIYQEYEVLNELNGIKFNGKRIDNETKLKIFEGLFKNSGKKKITEKILKAFLVNENVVSKSDINALKIDGYQKDKEFSTCLSSYVNIVKALGNDFDRGYVDNNIDTFERIIELSTVYADNKSLFVEKLKQEFPALDERVIAKVKGLTFTKWGRLSKRLLVGVVASNTATGEVSNILSLMRNTNANFMEIIFDKEWNFNALIEEENKSVSRQIDKIKYSDIAELYCSPSVKRAIWQSIKIVREIVEIMGYPPTKFFVEVTRSDEDKKRTSSRKSVLQKLYKGVDDSGDIKAIKEALEKENENSLKDERLYLYYSQQGKCMYTGKPINIDDLLNTKLYDIDHIYPQSMTTDESVHRNKVLVCRSANKDKSDVYPLNIEVQNKMAGFWKSLRDKEFITPEKYIRLTRKEPLTDKELGDFIARQLVFTSQSVKEVINLLKIEYPNSETCYVKAEVVKDFRSRNNYLKIRTLNDLHHAKDAYLNVVAGNILSTANKNNFRMQRINKGNEIDTDIIKNYSISNIFSRGYVVSTAKNLAWNCDLFDNVEKQYYRNDILVTKMQTVGKGAFYDETVRKSLANAKYAKAARKASIPLKKVEGNRYSIERYGGVTTVSPRWFALIGCSDKKNNQIYRIEPINIYDYAKMDKSRIKDEMASLLERQGHKNVDIIAILKKNTLLSIDGNRYYLTGTSGESLTLDNAKQLTVGREYELAVNRILKYTENPKRNKDVTEVAIRSKSKEDYNIDEKAVFVMLVDKLKTEFPQFRVVASKFDDESIEAFDTASKSRQCEIITNIIKMTGCNSTRGKLDGEPFNANFKASEGALTANKKVSYELTVIDQSVTGVYEYSKSIKK

SEQ ID NO: 20529 - protein, 1360 aa, unidentified
  REGION 1..1360: note = Cas Enzyme sequence
MKSEKYYVGLDIGTNSVGYAVANENYQLCKFKSEPMWGVTVFDEAQPAAERRGFRVARRRLERRQQRIRLIMDLFAEEISKTDADFYRRIKESYLYPATADEKIRIFGSYNEQKEYGKKYPTIHHLICELMNSTAAHDVRLVYIACAWLVAHRGHFLSEVDKQNIDAVTDFKTVYQHLADLILRDGTYALPWKESIDLDAVAEGLKKKQGVNYKTKALSEALFGTGKAPSAVDEQYEYNYALVLKLLCGGKVALKDLFGKDDYADLEEKSVSLDMDDEKLALIMQSVGDDAELIAVLKAIYDWSLLVDILKGSNTISEAKVAIYEQHQQDLKMLKTLIKKYVPQKYNAVFRAEKQANNYVAYIGKNKTANQTAKVGKTNNNDDFFKFIGSILKSMDVEPQDRGAYDSLCERAENRELLPKQVNGDNRLIPYQLYWFELNKILDNAKQYLPFLNKSDEDGITVAEKILSVFEFRVPYYVGPLGKNGKNRWMIRKAEGKIYPWNFDEKVDLDASEDAFIARMTNACTYLPGEDVLPKNSLVYAAFEVLNEINHIKINGQEIPIEAKQSIYCDLFMSPKKVTPKKIAEYLISNNYMTENDILSGLDVTVKSSLKPFLQFKNLVSNELLTYSDAEKIIARATYSEDKARFSGWIKANYSHLPETEIKYITGLKIKEFGRLSKRLLCGIAGTNKESGEEFSSIIRAMWETNYNLMQLLSDTFTFKDRISEIAREYYDANPRTLSERLEEMYVSNAVKRPIIRTLDILKDVVKVQGHAPERIFIEMARGAAEEQKGKRTKTRLTQILELYAKIKDEEVRLLSKQLEEWGDLAHNKLQSDKLFLYFIQLGKCLYTGKSIDLQSVISGDGNYNIEHIYPRSFVKDDSIINNKILVDSKANGEKSDTFPIDPRIQSNMRETWQRFHKNGLISDEKLKRLTRTTPFSDAEKFEFINRQLVETRQSTKALAALLKELYPDTQIVYVKAGLVSDFRQQFDLLKTRCINDLHHAKDAYLNIVAGNVWHCKFSRHFWREGEEHNAKAEIVFTHSVKCNGKIVWNGAADKDRVVRIVQKNTAHVTKYAFCRKGGFFDQMPVSAGKGLVPLKRNRPTEIYGGYNKSTATFFVLVRYQTTKKQDVMVMPVELLYAEKFIRDDGFAQQYAKQTIANIIGKPVDAVGFLLNKRILKVNTLLSLNGFIVSITGKSSGGKTIGIQSLTQFKASRQIEAYIKRLESFEAKRKKNDRIIFSEKYDCITAEKNLELYDLYIDKLGKAPYKYRPANPVETLTKGRLKFVELLPQKQVSVLLSVQGLFGREVKADLTAIGGVASAGVATLSSSISNWKKNYTDVRIVDQSASGLFEKTSENLLELL

SEQ ID NO: 20530 - protein, 1354 aa, unidentified
  REGION 1..1354: note = Cas Enzyme sequence
TKKYYIGLDIGTDSVGYAVTDENYNLLKHRGEPMWGVTVFDATIQGQERRSFRTARRRLDRRQHRVALTEELLAPYIVPQDRDFFKRIHQSALIKDEVDNSYLFDSIEKTKEYYKKYPTIHHLLCALMNGTAENDTRLLYIACAWLVAHRGHFLSEVDKEKIDAVTDFHSVYFDFCNFFENNDSPVPWDANCVESNFESVMKQKLGMNKKLKLLKEAVFKNGKIPQNDEDCIVSWEHALKLICGGKVKLADLFSNDSYSEFGSLSLDSDDETIAQAVADVDSDGEILVKLKMLYDWSVLVDALKGKNSISEGKVEVYNQHKKDLAMLKMLVHKYLPTKYKDIFDATDNPLNYAAYTYHSTKGKVNKKASKTDFCDYIKKLFKEVKIDSDDVAAFEDMSSRLETESFMPKQRDGDNRVIPYQLYWYELKTILDKSSEKFPFLNTKDDDGISIAEKLLSVFEFRVPYYVGPLRNDGNNKNAWMERKATGKIYPWNFDKIVDLDKSENAFIEKMLGRCTYLSGESVLPKNSLLYSSFTVLNEINNLKINNEPISVEIKQEIYSEIFMNPTNRRVSLKKIQNYLLSRGYIEKTDTLSGADINLTSTLNPYHLFRRLLEKNILSENEVEEIITRSTYTEDRNRFEKWLRENYSKLCDDDIKYVRSLKLKDFGRLSKKLLCDMFGCPDDETGEARSVIRAMWDTNLNINQLILSDNYTYKAQIEAFNHDYYSRHPKSLNDRLDDMYISNAVKRPIIRTLDILKDITKVMRSAPEAVFVEMARGTNEDLKGKRTQSRLAQVKTLYEKIDKEEVRLLSQQLDSLGETAENRLQSDKIFLYFMQLGKCLYTGKTITFESVLKGDGTYNIEHIYPRCHVKDDSIINNKILVDSKANEAKGDSYPIAAEIQADRAGLWKYLHDSELISDEKYKRLTRKTRFTDEEKNGFINRQLVETRQSTKAVATILKEKYPDTEICYVKAGLVSDFRQQFSMLKSRAINDLHHAKDAYLNIVVGNVYYSYFNKNYFRLDDDYNLKTEIMFSREVKCGSRVVWEGGKSVDMVRRNVAKNTAHLTKYAFCRKGGFFDQMPLKANEGLIPLKKGMPTEIYGGYNKPTASFFVLVKYKTAKKEDIMVMPVELLYADKFIANEDFAKEYSLKTVESIIGKKTESVEFLLNKRILKVNTMLSLDGLRVCLTGKSGGGSKIMTMIMSSFKSTYENENYIKKLESFTNKKRNNDNIVYDIRYDIISKEKNEEIYCHFIEKFQRWPYNKRPANPVNTLTKAKEEFLKLDVSTQADVLLRILGLFGRINNADLKIIGGSGATGVATLSTSMSNWRKSYTDVRIIDTSASGLFETQSENLLDLL

SEQ ID NO: 20531 - protein, 1383 aa, unidentified
  REGION 1..1383: note = Cas Enzyme sequence
MSRIKEKKMIKNKRDYYLGLDLGTSSVGWAVTDEEYNILRFNKKDMWGSRLFDEAKTAKERRIFRANRRRLERRARRLELLNEIFEEEIKKVDENFFRRLYESNLHKEDKSIDFEYPLFNDENYTDKDYHKEFPTIYHLRNALCKENKKFDIRLVYLAIHHILKNRGHFIFEGQKFSDIKNFENLFKETSEFLEKYGISTEDIDIKELEKAICNNKSKNEKENNIKNILKKNLNKEFLEVFLTCAIGSKVSINKVLGIEKELNIELSKVVYENERSEYEDVLGDDIELIDYCKKIYDFIILKNILKDSENISEFKVRQYEIHKEELKNLKYLFRKYLTKKDYFNFFTSRNEKENYAAYVNSTMYHGNKDIKEKICTIEKFNEKIKGYIKKIKDNEDSDKNIFDDINKKLKENKFLDKLRIRDNGVLPYQLNEIELRKILENQGQFYQFLLNKTNGKEYDILKLLTFRIPYYVGTTKGKFSWLSEEDIKNKEKITPWNFNEKIDIENAGMKFISHMTNKCSYLKSEDVLPKQSLIYQEYILLNELNKIRVDRKYLSLQLKNEIVNELFKKVQKVTLNKFKSFLLKKQAIIDKDSIEGIDNEFNSTLSSYVKLYRIMNDKLETNEGENFVERLIYLKTIYGKTTKFILKVLRQEFKEYIEKNIGEEKLNKIVKIEFDGWGRLSRKLLLDISFEDIRDGKKQRFENVLEALRTTNYNFMELMSNNFNLIEKIEEFNKKDNSNEKFNIYDYVNELYVSPSIKRPIIQAYKLAIEIKKINCADPKKVFIEMARGGGEKGKKTEKRQEKIKKYYEEFKKDENYKLIIEKLNKELENYNDNRLRQKKLFLYFMQLGKSMYTGEKIDLDELLNSNKYDIDHIIPQSKIKDDSFNNIVLVEKEINSHKNDSDFIDESIRNRMKGFWYVLLTKEMITKEKYNRLMRNTMFSTEELSGFVARQLVVTRQSTLEIKKLFESIFPNTEIICVKAGLVSDFREQFEIIKVRELNDTHHAQDAYLNIVVGNVYDAKFKDFWKLIQSKQRGEINESLNLKKIFDYNVYQESKQVWNKETDKNKVKTMCERKTVNVTKMLCEDKGKLFNLTIEKKCKNDNIVPNTPKALKGKNINSSEIAEKYGYYSNLNAAYYVIFKYTKIIKKKSKEILEIKPVYIYENNKKLSDSDIIKKLENLGYNNPILVTRIKKNQKILLNGYPYRVSGGTKKDQKYNLELKNDFDLYVDGEYLKYAKDLSNFCKDNDKNDGKNENIRYFVRFKKKKNIDEKNETYDECILRLNDEFNKLFCHLCIEKSNFGIYVNYLNIDKIKKFYKKNENEFEKSSLKEKSNKLKGILQVYNRKTSGILSTRLNNRNILGDKNLKIINESITGLIINEMEIK

SEQ ID NO: 20532 - protein, 1362 aa, unidentified
  REGION 1..1362: note = Cas Enzyme sequence
MKKREAYYLGLDIGTDSVGYAVTNQNYDLLKFKGEPMWGTHLFEGGQDAADRRLHRTSRRRIDRRQQRVSLINELFAEEIVKIDPHFFQRRKESSLYGDDGHYGVRIFGADTGLSDREYHEKYPTIHHLILELMTSNEPHDIRLVYIACAWLVAHRGHFLFDIAPDRMDKLLDFDAVYSDFCQYLLDQNCTLPWESSVTADDILNILKMDIGVTRKKDAFKTRIYNGKKISKEYAEDFPYSREAMVTLLSGGSVKPGLLFDNEMYGEIESVSLQMGDEDFDRIISELGDDGELLLKLRSMHNCVQLIATMSQKRGEDPVCVSSSKVAIYEQHREDLKLLKQIVKRYCPQNYYEIFRSAQAGNYVSYSQNTKSCPEPNKLKGANKDTFCDYLKKKLKNLKVSDADKKQYDAIMERLETRSFLPKQKDTDNRVIPQQLYRQELSVILSRAEAYLPMLLHKDDTGLSVSEKILSVFDFRIPYYVGPLVKKPGSTAWIVRKQEKILPWNFSEVVDLDASEQQFIRNMINYCTYLPGKEVLPVNSLLYEKFTVLNALNSLQADGIQIPVAVKQALFTDLFLQQPRVTFRQIRNYLLSKGLITKESSISGLDVTFKAGLKSYHIFKRMLLSGVLKESDVEEIIRHAAFTEDKGRMKKWLKKEFPQLPDEDVAYILRQKLKEFGRLSGELLTGLYGTEVDSDGEAFTIMEALWNTNQNLMQLLSEKYTFGDQIRAYSREYYSDKPRNMDEILSEMYVSNARKRAIYRTWDIVQDVVKANGKAPDKIFVEMARGGLPEQRGKRTQSRKDQLLALYKTVKTEDSRKLEKELQAMGTAADGRLQDRKLFLYYLQLGKCLYTGHPIDLTKLSDGTYNLDHIYPQSQVKDDSVLNNLVLVESNANGQKSDIYPIAKEIQERMVDYWTMLKNNGLMTEEKYRRLIRTKPFTQDEKMGFINRQLVETRQSTKAITALLKEKFPDTQIVYVKAGLVSEFRQEFGLLKCRAVNDLHHAKDAYLNIVVGNVYDQRFTKNWFRVDQPYNVQAKKLFTAAHRHGDLVYWDGEKDLAKVKKTVGKNAVHLTRYAFCRKGGLFDQQPVKKAPGLIPLKNGLPTEKYGGYNKPTASCYVLTRFMLDEKCEIMPVPVELHVKDAVLSEANRLLQYAEITIESILGKHPQDTQLLLNGRILKINTVFSLDGTLMTLAGKSSGGKNILLSPVAPLVLSLEWERYAKCLDSFRKKTETNKNLEPDEIHDGISREKNVAFYQLLTEKLNAWPFVNYPGNQGQTLVQGMEKFAAAQTKIQITCLLNILTMMGSGAAGVDLTACGGTSKAGAKVINAKLSNWKKRYQEVRIVDISASGLFRKASSNLLDLL

SEQ ID NO: 20533 - protein, 963 aa, unidentified
  REGION 1..963: note = Cas Enzyme sequence
MKKREAYYLGLDIGTDSVGYAVTNQNYDLLKFKGEPMWGTHLFEGGQDAADRRLHRTSRRRIDRRQQRVSLINELFAEEIVKIDPHFFQRRKESSLYGDDGHYGVRIFGADTGLSDREYHEKYPTIHHLILELMTSNEPHDIRLVYIACAWLVAHRGHFLFDIAPDRMDKLLDFDAVYSDFCQYLLDQNCTLPWESSVTADDILNILKMDIGVTRKKDAFKTRIYNGKKISKEYAEDFPYSREAMVTLLSGGSVKPGLLFDNEMYGEIESVSLQMGDEDFDRIISELGDDGELLLKLRSMHNCVQLIATMSQKRGEDPVCVSSSKVAIYEQHREDLKLLKQIVKRYCPQNYYEIFRSAQAGNYVSYSQNTKSCPEPNKLKGANKDTFCDYLKKKLKNLKVSDADKKQYDAIMERLETRSFLPKQKDTDNRVIPQQLYRQELSVILSRAEAYLPMLLHKDDTGLSVSEKILSVFDFRIPYYVGPLVKKPGSTAWIVRKQEKILPWNFSEVVDLDASEQQFIRNMINYCTYLPGKEVLPVNSLLYEKFTVLNALNSLQADGIQIPVAVKQALFTDLFLQQPRVTFRQIRNYLLSKGLITKESSISGLDVTFKAGLKSYHIFKRMLLSGVLKESDVEEIIRHAAFTEDKGRMKKWLKKEFPQLPDEDVAYILRQKLKEFGRLSGELLTGLYGTEVDSDGEAFTIMEALWNTNQNLMQLLSEKYTFGDQIRAYSREYYSDKPRNMDEILSEMYVSNARKRAIYRTWDIVQDVVKANGKAPDKIFVEMARGGLPEQRGKRTQSRKDQLLALYKTVKTEDSRKLEKELQAMGTAADGRLQDRKLFLYYLQLGKCLYTGHPIDLTKLSDGTYNLDHIYPQSQVKDDSVLNNLVLVESNANGQKSDIYPIAKEIQERMVDYWTMLKNNGLMTEEKYRRLIRTKPFTQDEKMGFINRQLVETRSPQKRLPHC

SEQ ID NO: 20534 - protein, 1140 aa, unidentified
  REGION 1..1140: note = Cas Enzyme sequence
VFGGKKPAKEGTEDFPYSPEGIVGLLSGGKVKPRDLFDKEAYEQMESVSLDMGDEEFDRIVSELGDDGELLRQLRSLHSCAKLIATMSNCREGDPVCISSSKVAIYERHQKDLELLKRLVRNYCPKQYNEIFRRAVADNYVAYSGNVQSCSENDKKKVKRINKVGFSEYLKKKLKGLKVEPADKAEYDSMMNRLEHYSFLPRQRDTDNRVIPQQLYRQELAAILERAEGYLPMLREKNADGLSVSEKLLSIFDFRIPYYVGPLVRHPNSTAWIERKQGKILPWNFEQMVDLDASEQKFIDKMLNKCTYLPGEDVMPVNSLLYERFTVLNALNNLKVNGREIPVAVKQELYTQLFQELPRVPVKRIREYLLQHGYMAKDEELTGLDSTFKSGLRSHHIFKRLLGSGALTEAQVEEIILHRAYTEDKSRMGRWLRSTYPQLTDGDVQYILKQKLKEFGRLSRKLLTGLYGTERDSYGDAYSIMEMLWNSNCNLMQLLSEKYTYAEQISEYCKEYYSEHPRRLTDRLSEMYVSNAAKRPIFRALDIVSDVVKATGEAPAKIFVEMARGGTPDQKGKRTDSRKKQLLDCYKKVKDEDVSQFVKALENMGAEVDDRLQDRKLYLYYLQLGRCAYTGRPIELSRLADGSYNLEHIYPQSLVKDDSLLNNLVLVESEVNGQKSDAYPVDGDIRKKMGAFWSMLKQNGLMTEEKYRRLTRPHPFTADEKLGFINRQLVETRQSTKVIAALLKERFPKTEIVYVKAGLVSEFRQEFGLLKCRSVNDLHHAKDAYLNIVVGNVYHERFTSKWFRLEEHYNVQVKKLFAKPHSHGGECYWNGEADIARVRKNMAKNAVHLTRYAFIRKGGLFDQQPVKAAEGLVELKKGLLTEKYGGYNKATASCFMLVRFELKGKREVMLVPVELLVKDRVLDDRTFAQQYAAQTVEKIIGKKPENLELLLNGRPLKINTVFSFDGTKMVLASKDNGGKNVMLSPLVALMLAPEWEQYAKRLESFQNKQKNNKNLQPNEVRDGITGEKNATLYRILAKKMGEWPFKQFPGNQQENLERGGEVFESKEITEQITCLMNILTLMGPGSAGVDLRGCGGTGQAGKKSANAKISNWKSRYSDVRIIDESASGLFSKTSGNLLDL

SEQ ID NO: 20535 - protein, 1320 aa, unidentified
  REGION 1..1320: note = Cas Enzyme sequence
LSRGNIMENYYLGLDLGTDSIGWAVTDKNYNIPKFKGNSMWGIRLLEGGNTAVERREFRSSRRRLERNKYRLNCLEMLFNEEISKKDIAFFQRLKDSALYDGDKNVSGKYSLFNDPDYTDKDYYKKYPTIYHLRKELIESVEPHDVRLVFLALHHIIKNRGHFLFDNDDLGKNGNFDFTAIFTELNEYIKSNSNYESEGFSCNDLKPVEDIIKNSSLTSSKKKEALIKEFALNKKVDVFEVAIVTLLSGATAKAKDLFNTDKYDDTEGKSICFKSGYDDKATTYESVFGENFELIEKLKAIYDWAILADILNGKEYISYAKVDTYEKHKRDLKLLKEYVKAYVPEKYSHIFNENSDKVSNYLSYSGYSSKNPVMKKCDQETFCDFLRKQLPKELLDEKYAQMYKEIETSSFMPKAVTKDNSVIPMQLNRAELEAILSNAKNYLPFLADRDSSGKTVSEKIIDIFKYRIPYYVGPLNKHSEKSWLVRTGEKIYPWNFENVVDADNSAEKFINNLTSKCTYLPKEDVIPKNSLLYSAFTVLNEINNIKIDGEEISVELKQGIYKDLFEKSNKVKVFDLKKYLASNGYMNIEITGIDTTIKGSLKPFIDLQNIDLSYSDKEEIIKSVTIFGDDKKLLKNRLKRLYGDRLTADDIKKISKLKYTGWSRLSEKLLTGIETVLPSTGEYTNIIHALWETNDNLMQLLSSNYDFRKKIDEENGDSTFTSLREEIDNLYVSPKIKRPIYQAMQIVEEIVKIQGHDPKKIFIEVARDEGEKKRTVSRKQKLIELYKYCKKDEQKLYEQLCNTDENDFRRDALYLYYTQLGKCMYTGKPIELSEIYNNNIYDIDHIFPRSKIKDDSLNNRVLVLKAENAKKGNIYPINSSIRNNMLPFWKTLFDKGLISKEKFERLVRNQPLTDEELSSFVSRQLVETRQSTKAVAQLLKKRYHNTAVEYIKASLVSDFRQENDFVKSRDVNDFHHAKDAYLNIVVGNVYTVRSHLAHFIDNVQSGKWSVNKMFDYTTNGAWIVENNKSINIVKSNMAKNNIRFTRYAFKQTGGLFDQNPLKKGLGQVPRKKDMDIDKYGGYNKPSSAYFAFVEYKNSKGEIVRSFEPVDLYAEKKYIRNPQEFIKRKLGVDYVKIIIPCVKYNALISINGFRMHISSKSSGGANLICKPAVQLVVSQEQEKYIKKISSYLAKCAELRKEKEITSFDGITEKDNADLYEALKHKTNHTIYNVKFSKLANILIDKQCEFEGLSLYEQCYILMQIINILHANVMSGDLSAIGEAKKSGVTTISNKMQPSYKTVKLINQSISGLFEQEIDLLK

SEQ ID NO: 20536 - protein, 1251 aa, unidentified
  REGION 1..1251: note = Cas Enzyme sequence
QRCLEMLFDKEISKTDQSFFQRLHDSSLWEEDKSVAGKYSLFNDEDFTDKKYYETYPTVYHLRRALIENKQPFDLRLVYLAISHIIKNRGHFLFDSDMLGDGGTLPFEEVWGELMAYLDDVFDIQLDYNYDIPLDDVLKDKHLTVTARKEILLKAFAVGKKEQPASSIIGLLAGGTVSSAELFGDEALKSSEAPKITLSGGYEEKASVYESVFGDRFELVEKLKAVYDWALLADILHGYSYISFAKCDVYENHKNDLRELKGFVKKYVPEKYKLIFDENKKGVCNYLAYSGHCSKGGVDKKCQKEDFIDFLKKQLPKECPAKKYAGMYEKIQSGSFMPKIVSKDNAVIPMQVNRAELSAILKNASGYIPLLNQKDGSGKTVSEKIMDIFSFRIPYYVGPLNMHSKNAWLERTGEKVYPWNFDSVVDIDKSAERFIENLTSKCTYIFGADVLPKNSLLYSKFSVLNELNNLKLDGKEISVELKQKIYHELFERNNKVTFSRLCKFLKSYYCFDGEVTGIDGDFKSSLKPYRDLYGFALTDAEKEEVIKSITIFGDDKGLLKKRLNALFGEKLSKDDIAKISKLKYSGWGRLSHEFLSGVKAPCIETDKLNNIIGFMWDTNCNLMQLLSNNYGFIKAIDEINGNNNFTTLRKEVESLYVSPKVKRPIYQAMQIVEELVKINGCQPEKIFVEVARGEQEKKRTVSRKNRLLDLYKSCKKDNGELYKSLADSNENDFRRDALYLYYTQLGRCMYTGKIIPIEDIFNRNLYDVDHIFPRSKIKDDSLDNRVLVTKQANEDKGNVYPVAQSIREDRLSFWKTLVDKELISQKKFERLTRNTELTDDELSSFISRQLVETRQSTKAIAQLLKKRYKSEVVYVKANLISEFRQQYDFVKCREINDFHHAKDAYLNVVVGNVYNTRFNHNKAVFISDLQTGKVSLNRMFDYPTKNAWSVDENNSSIVTVKNIMSKNNIRFTRYSFKQKGGLFDQNILKKGNGQVPIKRSKIGDIDKYGGYNNAKSTCFALVSYADEKGNDIKHFVPIDLYEENKYIKNPKAYIDGKLGCDCAVILPCVKYNALVSVDGFRMHISSKSGGGSAIIYKPAMQLVLDISSEKYVRKIANYLNKCIELKKEKPITEHDGITYSDNIKLYDELLNKIINTVFYVKFANVAKKMSDKKTVFEKLSIKDQCEVIMQILNILHSNVRSGDLSLLGESKQSGIVTTSSKIAPVKSIKSFKLINQSITGLFEQETELLDK

SEQ ID NO: 20537 - protein, 1319 aa, unidentified
  REGION 1..1319: note = Cas Enzyme sequence
MKKTKDYYIGLDVGTDSIGWAVTDTEYNVLKFKGNAQWGIRLLEESKTAEERRMHRSSRRRNERNKFRQRCLEMLFDKEISKTDQSFFQRLHDSSLWEEDKSVAGKYSLFNDEDFTDKKYYETYPTVYHLRRALIENKQPFDLRLVYLAISHIIKNRGHFLFDSDMLGDGGTLPFEEVWGELMAYLDDVFDIQLDYNYDIPLDDVLKDKHLTVTARKEILLKAFAVGKKEQPASSIIGLLAGGTVSSAELFGDEALKSSEAPKITLSGGYEEKASVYESVFGDRFELVEKLKAVYDWALLADILHGYSYISFAKCDVYENHKNDLRELKGFVKKYVPEKYKLIFDENKKGVCNYLAYSGHCSKGGVDKKCQKEDFIDFLKKQLPKECPAKKYAGMYEKIQSGSFMPKIVSKDNAVIPMQVNRAELSAILKNASGYIPLLNQKDGSGKTVSEKIMDIFSFRIPYYVGPLNMHSKNAWLERTGEKVYPWNFDSVVDIDKSAERFIENLTSKCTYIFGADVLPKNSLLYSKFSVLNELNNLKLDGKEISVELKQKIYHELFERNNKVTFSRLCKFLKSYYCFDGEVTGIDGDFKSSLKPYRDLYGFALTDAEKEEVIKSITIFGDDKGLLKKRLNALFGEKLSKDDIAKISKLKYSGWGRLSHEFLSGVKAPCIETDKLNNIIGFMWDTNCNLMQLLSNNYGFIKAIDEINGNNNFTTLRKEVESLYVSPKVKRPIYQAMQIVEELVKINGCQPEKIFVEVARGEQEKKRTVSRKNRLLDLYKSCKKDNGELYKSLADSNENDFRRDALYLYYTQLGRCMYTGKIIPIEDIFNRNLYDVDHIFPRSKIKDDSLDNRVLVTKQANEDKGNVYPVAQSIREDRLSFWKTLVDKELISQKKFERLTRNTELTDDELSSFISRQLVETRQSTKAIAQLLKKRYKSEVVYVKANLISEFRQQYDFVKCREINDFHHAKDAYLNVVVGNVYNTRFNHNKAVFISDLQTGKVSLNRMFDYPTKNAWSVDENNSSIVTVKNIMSKNNIRFTRYSFKQKGGLFDQNILKKGNGQVPIKRSKIGDIDKYGGYNNAKSTCFALVSYADEKGNDIKHFVPIDLYEENKYIKNPKAYIDGKLGCDCAVILPCVKYNALVSVDGFRMHISSKSGGGSAIIYKPAMQLVLDISSEKYVRKIANYLNKCIELKKEKPITEHDGITYSDNIKLYDELLNKIINTVFYVKFANVAKKMSDKKTVFEKLSIKDQCEVIMQILNILHSNVRSGDLSLLGESKQSGIVTTSSKIAPVKSIKSFKLINQSITGLFEQETELLDK

SEQ ID NO: 20538 - protein, 1345 aa, unidentified
  REGION 1..1345: note = Cas Enzyme sequence
MGNKLRNVDDYYLGLDISTESVGWAVTDKDYVIPKFKGNAMWGVHLFDEGETSVKRRGFRSARRRTQRKRERLALLEALFDEEICKKDCTFFRRLHESDLWPEDKSGDDKYAVFADENYTDKDFHKEYPTIYHLRYELIKNKEPHDVRLVFLALHHIIKNRGHFLFDSLSSAEDFNSAYETMCSYLSDNEIQLNCSDIEQFKAILKDRRQGKIEKTKNLASLFGITKKSDPVSYAVMAVLSGSTVKMCDLFGDDELKTVEKNNISFASGYEENEEIYASVLGDRFELVNILKAVYDWAVLADILDGKKYISEAKVAVYEKHKNDLKTLKKYVKTYLPEKYNEIFKISDGKKDNYVAYSGHIKESGKTGELKKTCDSENFCAYLKKTLGKNADLSYKEMFDEIENKTFMPKQVTKSNGVVPMQVNEEELKAILDNAKDYLPFLNSCDENGVSVYDKIIKIFEYRIPYYVGPLNTHTEKSWLKRKDGVKIYPWNFDDVVDIDSSAEKFINNLTSKCTYLPECDVIPKCSLLYSKFTVLNEINNLKLNGEDIPVELKQGIYNDLFMTRRKVTVKQIKDYLKARGCYDNNDVLSGIDTTVKSSLKSYFDFKDFESLTFDDKESIIASSVIFGDDKKLLKKRLKKLFPEKLTDEDIKKICKLKYTGWSRLSKEFLCDVEFTYKKTGEVMNVITALWETNYNLMQILYSEDFCCDGDEKKNLNDKLDELSYTGDQHSLRKAVDALYVSPKVKRPILRALLIAKEIEKIQERPPKKIFVEVARGIDNREERHRDSRKSRLMELYKNCKKEAEKFCPYFDALSKKLSDEDESKLRSDKLYFYYIQLGHCMYTGEEISLGELMNGNGRFDIDHIYPQSKIKDDSLTNRVLVNRTVNADKTNVYPIDSAVQAKMSPYWQMLRSSGLISEETYKRLTRKTPLTDDELSAFVSRQLTETQQSTKAVAHILEQLYPKPKTEIVYVKAALAHAFRQSNDMLKCREVNDLHHAKDAYLNIVVGNAYNVKVTHNKVNFIKGLQNNDKGYTVNPEKFFSHDIPGAWSVKDSMNTVRRFMNKNNIRYTRFPRKKQGGLFKINPLKKGNGQVPLKASGARSCIEKYGGYDKATSAYFSYVEYTDKKGKAVRQMFPVNLYEVKEYEADMQGFVTSCIAEASNVKILIPCVKYDACISFDGCRMFISNKTGNQIGYKPGMQLVLGYKYEKYIRNITNYLTKHKDREIIPRDNISAEENTELYDVLTGKMLNTVLSVRFSGIGKKLEKRREKFVLCSPEEQCCVLNEILKILHANVLSGDLSLIGESPNTGTMKINAKLSEIKDVHSIKLINQSVTGLFEQEIDLLK

SEQ ID NO: 20539 - protein, 1345 aa, unidentified
  REGION 1..1345: note = Cas Enzyme sequence
MGNKLRNVDDYYLGLDIGTESVGWAVTDKDYVIPKFKGNAMWGVHLFDEGETSVKRRGFRSARRRTQRKRERLALLEALFDEEISKKDCTFFRRLHESDLWPEDKSGDDKYAVFADENYTDKDFHKEYPTIYHLRYELIKNKEPHDVRLVFLALHHIIKNRGHFLFDSLSSAEDFNSAYETMCSYLSDNEIQLNCSDIEQFKAILKDRRQGKIEKTKNLASLFGITKKSDPVSYAVMAVLSGSTVKMCDLFGDDELKTVEKNNISFASGYEENEEIYASVLGDRFELVNILKAVYDWAVLADILDGKKYISEAKVAVYEKHKNDLKTLKKYVKTYLPEKYNEIFKISDGKKDNYVAYSGHIKESGKTGELKKTCDSENFCAYLKKTLGKNADLSYKEMFDEIENKTFMPKQVTKSNGVVPMQVNEEELKAILDNAKDYLPFLNSCDENGVSVYDKIIKIFEYRIPYYVGPLNTHTEKSWLKRKDGVKIYPWNFDDVVDIDSSAEKFINNLTSKCTYLPECDVIPKCSLLYSKFTVLNEINNLKLNGEDIPVELKQGIYNDLFMTRRKVTVKQIKDYLKARGCYDNNDVLSGIDTTVKSSLKSYFDFKDFESLTFDDKESIIASSVIFGDDKKLLKKRLKKLFPEKLTDEDIKKICKLKYTGWSRLSKEFLCDVEFTYKKTGEVMNVITALWETNYNLMQILYSEDFCCDGDEKKNLNDKLDELSYTGDQHSLRKAVDALYVSPKVKRPILRALLIAKEIEKIQERPPKKIFVEVARGIDNREERHRDSRKSRLMELYKNCKKEAEKFCPYFDALSKKLSDEDESKLRSDKLYFYYIQLGHCMYTGEEISLGELMNGNGRFDIDHIYPQSKIKDDSLTNRVLVNRTVNADKTNVYPIDSAVQAKMSPYWQMLRSSGLISEETYKRLTRKTPLTDDELSAFVSRQLTETQQSTKAVAHILEQLYPKPKTEIVYVKAALAHAFRQSNDMLKCREVNDLHHAKDAYLNIVVGNAYNVKVTHNKVNFIKGLQNNDKGYTVNPEKFFSHDIPGAWSVKDSMNTVRRFMNKNNIRYTRFPRKKQGGLFKINPLKKGNGQVPLKASGARSCIEKYGGYDKATSAYFSYVEYTDKKGKAVRQMFPVNLYEVKEYEADMQGFVTSRIAEASNVKILIPCVKYDACISFDGCRMFISNKNGNQIGYKPGMQLVLGYKYEKYIRNITNYLTKHKDREIIPRDNISAEENVELYDILTGKMLNTVLSVRFSGIGKKLEKRREKFVLCSPEEQCCVLNEILKILHANVLSGDLSLIEESHNTGTMKTNAKFSEIKDVHSIKLINQSVTGLFEQEIDLLK

SEQ ID NO: 20540 - protein, 1345 aa, unidentified
  REGION 1..1345: note = Cas Enzyme sequence
MGNKLRNVDDYYLGLDIGTESVGWAVTDKDYVIPKFKGNAMWGVHLFDEGETSVKRRGFRSARRRTQRKRERLALLEALFDEEICKKDCTFFRRLHESDLWPEDKSGDDKYAVFADENYTDKDFHKEYPTIYHLRYELIKNKEPHDVRLVFLALHHIIKNRGHFLFDSLSSAEDFNSAYETMRSYLSDNEIQLNCSDIEQFKAILKDRRQGKIEKTKNLASLFGITKKSDPVSYAVMAVLSGSTVKMCDLFGDDELKTVEKNNISFASGYEENEEIYASVLGDRFELVKILKAVYDWAVLADILDGKKYISEAKVAVYEKHKNDLKTLKKYVKTYLPEKYNEIFKISDGKKDNYVAYSGHIKESGKTGELKKTCNSENFCAYLKKTLGKNADLSYKEMFDEIENKTFMPKQVTKSNGVVPMQVNEEELKAILDNAKDYLPFLNSCDENGVSVYDKIIKIFEYRIPYYVGPLNTHTEKSWLKRKDGVKIYPWNFDDVVDIDSSAEKFINNLTSKCTYLPECDVIPKCSLLYSKFTVLNEMNNLKLNGEDIPVELKQGIYNDLFMTRRKVTVKQIKDYLKARGCYDNNDVLSGIDTTVKSSLKSYFDFKDFESLTFDDKESIIASSVIFGDDKKLLKKRLKKLFPEKLTDEDIKKICKLKYTGWSRLSKEFLCDVEFTYKKTGEVMNVITALWETNYNLMQILYSEDFCCDGDEKKNLNDKLDELSYTGDQHSLRKAVDALYVSPKVKRPILRALLIAKEIEKIQERPPKKIFVEVARGIDNREERRRDSRKNRLMELYKNCKKEAEKFCPYFDALSKKLSDEDESKLRSDKLYFYYIQLGKCMYTGEEISLGELMNGNGRFDIDHIYPRSKIKDDSLTNKVLVNKTVNNNKTNVYPIDAAIQSKMSPYWQMLRSSGLISEETYKRLTRKTPLTDDELSAFVSRQLTETQQSTKAVAHILEQLYPKPKTEIVYVKAALVHAFRQSNDMLKCREVSDLHHAKDAYLNIVVGNAYNVKVTHNKVNFIKGLQNNDKGYTVNPEKFFSHDIPGAWSVKDSMNTVRRFMNKNNIRYTRFPRKKQGGLFKINPLKKGNGQVPLKASGARSCIEKYGGYDKATSAYFSYVEYTDKKGKAVRQMFPVNLYEVKEYEADMQGFVTSRIAEASNVKILIPCVKYDACISFDGCRMFMSNKNGNQIGYKPGMQLVLGYKYEKYIRNITNYLTKHKDREIIPRDNISAEENVELYDILTGKMLNTVLSVRFSGIGKKLEKRREKFVLCSPEEQCCVLNEILKILHANVLSGDLSLIEESHNTGTMKTNAKFSEIKDVHSIKLINQSVTGLFEQEIDLLK

SEQ ID NO: 20541 - protein, 1345 aa, unidentified
  REGION 1..1345: note = Cas Enzyme sequence
MGNKLRNVDDYYLGLDIGTESVGWAVTDKDYVIPKFKGNAMWGVHLFDEGETSVKRRGFRSARRRTQRKRERLALLEALFDEEICKKDCTFFRRLHESDLWPEDKSGDDKYAVFADENYTDKDFHKEYPTIYHLRYELIKNKEPHDVRLVFLALHHIIKNRGHFLFDSLSSAEDFNSAYETMRSYLSDNEIQLNCSDIEQFKAILKDRRQGKIEKTKNLASLFGITKKSDPVSYAVMAVLSGSTVKMCDLFGDDELKTVEKNNISFASGYEENEEIYASVLGDRFELVKILKAVYYWAVLADILDGKKYISEAKVAVYEKHKNDLKTLKKYVKTYLPEKYNEIFKISDGKKDNYVAYSGHIKESGKTGELKKTCNSENFCAYLKKTLGKNADLSYKEMFDEIENKTFMPKQVTKSNGVVPMQVNEEELKAILDNAKDYLPFLNSCDENGVSVYDKIIKIFEYRIPYYVGPLNTHTQKSWLKRKDGVKIYPWNFDDVVDIDSSAEKFINNLTSKCTYLPECDVIPKCSLLYSKFTVLNEINNLKLNGEDIPVELKQGIYNDLFMTRRKVTVKQIKDYLKARGCYNNNDVLSGIDTTVKSSLKSYFDFKDFESLTFDDKESIIASSVIFGDDKKLLKKRLKKLFPEKLTDEDIKKICKLKYTGWSRLSKEFLCDVEFTYKKTGEVMNVITALWETNYNLMQILYSEDFCCDGDEKKNLNDKLDELSYTGDQHSLRKAVDALYVSPKVKRPILRALLIAKEIEKIQGRPPKKIFVEVARGIDNREERHRDSRKNRLMELYKNCKKEAEKFCPYFDALSKKLSDEDESKLRSDKLYFYYIQLGKCMYTGEEISLGELMNGNGRFDIDHIYPRSKIKDDSLTNKVLVNKTVNNNKTNVYPIDAAIQSKMSPYWQMLRSSGLISEETYKRLTRKTPLTDDELSAFVSRQLTETQQSTKAVAHILEQLYPKPKTEIVYVKAALVHAFRQSNDMLKCREVNDLHHAKDAYLNIVVGNAYNVKVTHNKVNFIKGLQNNDKGYTVNPEKFFSHDIPSAWSVKDSMNTVRRFMNKNNIRYTRFPRKKQGGLFKINPLKKGNGQVPLKASGARSCIEKYGGYDKATSAYFSYVEYTDKKGKAVRQMFPVNLYEVKEYAADMQGFVTSRIAEASNVKILIPCVKYDACISFDGCRMFITKKAGNQIGYKPGIQLVLGYKYEKYIRNITNYLTKHKDREIIPRDNISAEENTELYDVLTGKMLNTVLSVRFSGIGKKLEKRREKFVLCSPEEQCYVLNEILKILHANVLLGDLRLIGESPNAGAMLTNAKFSEIKDVHSIKLINQSVTGLFEQEIDLLK

SEQ ID NO: 20542 - protein, 1345 aa, unidentified
  REGION 1..1345: note = Cas Enzyme sequence
MGNKLRNVDDYYLGLDIGTESVGWAVTDKDYVIPKFKGNAMWGVHLFDEGETSVKRRGFRSARRRTQRKRERLALLEALFDEEICKKDCTFFRRLHESDLWPEDKSGDDKYAVFADENYTDKDFHKEYPTIYHLRYELIKNKEPHDVRLVFLALHHIIKNRGHFLFDSLSSAEDFNSAYETMCSYLSDNEIQLNCSDIEQFKAILKDRRQGKIEKTKNLASLFGITKKSDPVSYAVMAVLSGSTVKMCDLFGDDELKTVEKNNISFASGYEENEEIYASVLGDRFELVNILKAVYDWAVLADILDGKKYISEAKVAVYEKHKNDLKTLKKYVKTYLPEKYNEIFKISDGKKDNYVAYSGHIKESGKTGELKKTCDSENFCAYLKKTLGKNADLSYKEMFDEIENKTFMPKQVTKSNGVVPMQVNEEELKAILDNAKDYLPFLNSCDENGVSVYDKIIKIFEYRIPYYVGPLNTHTEKSWLKRKDGVKIYPWNFDDVVDIDSSAEEFINNLTSKCTYLPECDVIPKCSLLYSKFTVLNEINNLKLNGEDVPVELKQGIYNDLFMTRRKVTVKQIKDYLKARGCYDNNDVLSGIDTTVKSSLKSYFDFKDFESLTFDDKESIIASSVIFGDDKKLLKKRLKKLFSEKLTDEDIKKICKLKYTGWSRLSKEFLCDVEFTYKKTGEVMNVITALWETNYNLMQILYSEDFCCDGDEKKNLNDKLDELSYTGDQHSLRKAVDALYVSPKVKRPILRALLIAKEIEKIQERPPKKIFVEVARGIDNREERHRDSRKNRLMELYKNCKKEAEKFCPYFDAMSKKLSDEDESKLRSDKLYFYYIQLGKCMYTGEEISLGELMNGNGRFDIDHIYPQSKIKDDSLTNRVLVNRTVNADKTNVYPIDSAVQAKMSPYWQMLRSSGLISEETYKRLTRKTPLTDDELSAFVSRQLTETQQSTKAVAHILEQLYPKPKTEIVYVKAALAHAFRQSNDMLKCREVNDLHHAKDAYLNIVVGNAYNVKVTHNKVNFIKGLQNNDKGYTVNPEKFFSHDIPGAWSVKDSMNTVCRFMNKNNIRYTRFPRKKQGGLFKINPLKKGNGQVPLKASGARSCIKKYGGYDKATSAYFSYVEYTDKKGKAVRQMFPVNLYEVKEYEADMQGFVTSRIDGASNVKILIPCVKYDACISFDGCRMFITKKAGNQIGYKPGIQLVLGYKYEKYIRNITNYLTKHKDREIIPRDNISSEENIELYDVLTGKMLNTVLSVRFSGIGKKLEKRREKFVLCSPEEQCYVLNEILKILHANVLLGDLRLIGESPNAGAMLTNAKFSEIKDVHSIKLINQSVTGLFEQEIDLLK

SEQ ID NO: 20543 - protein, 1345 aa, unidentified
  REGION 1..1345: note = Cas Enzyme sequence
MGNKLRNVDDYYLGLDIGTESVGWAVTDKDYVIPKFKGNAMWGVHLFDEGETSVKRRGFRSARRRTQRKRERLALLEALFDEEICKKDCTFFRRLHESDLWPEDKSGDDKYAVFADENYTDKDFHKEYPTIYHLRYELIKNKEPHDVRLVFLALHHIIKNRGHFLFDSLSSAEDFNSAYETMCSYLSDNEIQLNCSDIEQFKAILKDRRQGKIEKTKNLASLFGITKKSDPVSYAVMAVLSGSTVKMCDLFGDDELKTVEKNNISFASGYEENEEIYASVLGDRFELVKILKAVYDWAVLADILDGKKYISEAKVAVYEKHKNDLKTLKKYVKTYLPEKYNEIFKISDGKKDNYVAYSGHIKESGKTGELKKTCNSENFCAYLKKTLGKNADLSYKEMFDDIENKTFMPKQVTKSNGVVPMQVNEEELKAILDNAKDYLPFLNSCDENGVSVYDKIIKIFEYRIPYYVGPLNTHTPKSWLKRKDGVKIYPWNFDDVVDIDSSAEKFINNLTSKCTYLPECDVIPKCSLLYSIFTVLNEINNLKLNGEDIPVELKQGIYNDLFMTRRKVTVKQIKDYLKARGCYDNNDVLSGIDTTVKSSLKSYFDFKDFESLTFDDKESIIASSVIFGDDKKLLKKRLKKLFPEKLTDEDIKKICKLKYTGWSRLSKEFLCDVEFTYKKTGEVMNVITALWETNYNLMQILYSEDFCCDGDEKKNLNDKLDELSYTGDQHSLRKAVDALYVSPKVKRPILRALLIAKEIEKIQERPPKKIFVEVARGIDNREERHRDSRKNRLMELYKNCKKEAEKFCPYFDALSKKLSDEDESKLRSDKLYFYYIQLGKCMYTGEEISLGELMNGNGRFDIDHIYPRSKIKDDSLTNKVLVNKTVNNNKTNVYPIDAAIQSKMSPYWQMLRSSGLISEETYKRLTRKTPLTDDELSAFVSRQLTETQQSTKAVAHILEQLYPKPKTEIVYVKAALVHAFRQSNDMLKCREVNDLHHAKDAYLNIVVGNAYNVKVTHNKVNFIKGLQNNDKGYTVNPEKFFSHDIPGAWSVNDSMNTVRRFMNKNNIRYTRFPRKKQGGLFKINPLKKGNGQVPLKASGARSCIEKYGGYDKATSAYFSYVEYTDKKGKAVRQMFPVNLYEVKEYEADMQGFVTSHIAEASNVKILIPCVKYDACISFDGCRMFITKKTGNQIGYKPGMQLVLGYKYEKYIRNITNYLTKHKDREIIPRDNISAEENIELYDILTGKMLNTVLSVKFSGIGKKLEKRRGKFVLCSPEEQCYVLNEILKILHANVLLGDLKLIDESGQAGVMVTNAKLSEIKDVHSIKLINQSVTGLFEQEIDLLK

SEQ ID NO: 20544 - protein, 1345 aa, unidentified; identical to SEQ ID NO: 19921
  REGION 1..1345: note = Cas Enzyme sequence

SEQ ID NO: 20545 - protein, 1345 aa, unidentified
  REGION 1..1345: note = Cas Enzyme sequence
MGNKLRNVDDYYLGLDIGTESVGWAVTDKDYVIPKFKGNAMWGVHLFDEGETSVKRRGFRSARRRTQRKRERLALLEALFDEEICKKDCTFFRRLHESDLWPEDKSGDDKYAVFADENYTDKDFHKEYPTIYHLRYELIKNKDPHDVRLVFLALHHIIKNRGHFLFDSLSSAEDFNSAYETMRSYLSDNEIQLNCSDIEQFKAILKDRRQGKIEKTKNLASLFGITKKSDPVSYAVMAVLSGSTVKMCDLFGDDELKTVEKNNISFASGYEENEEIYASVLGDRFELVKILKAVYDWAVLADILDGKKYISEAKVAVYEKHKNDLKTLKKYVKTYLPEKYNEIFKISDGKKDNYVAYSGHIKESGKTGELKKTCNSENFCAYLKKTLGKNADLSYKEMFDEIENKTFMPKQVTKSNGVVPMQVNEEELKAILDNAKDYLPFLNSCDENGVSVYDKIIKIFEYRIPYYVGPLNTHTEKSWLKRKDGVKIYPWNFDDVVDIDSSAEKFINNLTSKCTYLPECDVIPKCSLLYSKFTVLNEINNLKLNGEDIPVELKQGIYNDLFMTRRKVTVKQIKDYLKARGCYDNNDVLSGIDTAVKSSLKSYFDFKDFESLTFDDKESIIASSVIFGDDKKLLKKRLKKLFPEKLTDEDIKKICKLKYTGWSRLSKEFLCDVEFTYKKTGEVMNVITALWETNYNLMQILYSEDFCCDGDEKKNLNDKLDELSYTGDQHSLRKAVDALYVSPKVKRPILRALLIAKEIEKIQERPPKKIFVEVARGIDNREERHRDSRKNRLMELYKNCKKEAEKFCPYFDALSKKLSDEDESKLRSDKLYFYYIQLGKCMYTGEEISLGELMNGNGRFDIDHIYPRSKIKDDSLTNKVLVNKTVNNNKTNVYPIDAAIQSKMSPYWQMLRSSGLISEETYKRLTRKTPLTDDELSAFVSRQLTETQQSTKAVAHILEQLYPKPKTEIVYVKAALAHAFRQSNDMLKCREVNDLHHAKDAYLNIVVGNAYNVKVTHNKVNFIKGLQNNDKGYTVNPEKFFSHDIPGAWSVKDSMNTVCRFMNKNNIRYTRFPRKKQGGLFKINPLKKGNGQVPLKASGARSCIEKYGGYDKATSAYFSYVEYTDKKGKAVRQMFPVNLYEVKEYEADMQGFVTSRIAEASNVKILIPCVKYDACISFDGCRMFITKKAGNQIGYKPGIQLVLGYKYEKYIRNITNYLTKHKDREIIPRDNISAEENTELYDVLTGKMLNTVLSVRFSGIGKKLEKRRGKFVLCSPEEQCYVLNEILKILHANVLLGDLRLIGESPNAGAMLTNAKFSEIKDIHSIKLINQSVTGLFEQEIDLLK

SEQ ID NO: 20546 - protein, 1345 aa, unidentified
  REGION 1..1345: note = Cas Enzyme sequence
MGNKLRNVDDYYLGLDIGTESVGWAVTDKYYVIPKFKGNAMWGVHLFDEGETSVKRRGFRSARRRTQRKRERLALLEALFDEEICKKDCTFFRRLHESDLWPEDKSGDDKYAVFADENYTDKDFHKEYPTIYHLRYELIKNKEPHDVRLVFLALHHIIKNRGHFLFDSLSSAEDFNSAYETMCSYLSDNEIQLNCSDIEQFKAILKDRRQGKIEKTKNLASLFGITKKSDPVSYAVMAVLSGSTVKMCDLFGDDELKTVEKNNISFASGYEENEEIYASVLGDRFELVKILKAVYDWAVLADILDGKKYISEAKVAVYEKHKNDLKTLKKYVKTYLPEKYNEIFKISDGKKDNYVAYSGHIKESGKTGELKKTCNSENFCAYLKKTLGKNADLSYKEMFDEIENKTFMPKQVTKSNGVVPMQVNEEELKAILDNAKDYLSFLNSCDENGVSVYDKIIKIFEYRIPYYVGPLNTHTENSWLKRKDGVKIYPWNFDDVVDIDSSAEKFINNLTSKCTYLPECDVIPKCSLLYSKFTVLNEINNLKLNGEDIPVELKQGIYKDLFMTRRKVTVKQIKDYLKARGCYDNNDVLSGIDTTVKSSLKSYFDFKGFESLTFDDKESIIASSVIFGDDKKLLKKRLKKLFPEKLTDEDIKKICKLKYTGWSRLSKEFLCDVEFTYKKTGEVMNVITALWETNYNLMQILYSEDFCCDGDEKKNLNDKLDELSYTGDQHSLRKAVDALYVSPKVKRPILRALLIAKEIEKIQERPPKKIFVEVARGIDNREERHRDSRKNRLMELYKNCKKEAEKFCPYFDALSKKLSDEDESKLRRDKLYFYYIQLGKCMYTGEEISLGELMNGNGRFDIDHIYPRSKIKDDSLTNKVLVNKTVNNNKTNVYPIDAAIQSKMSPYWQMLRSSGLISEETYKRLTRKTPLTDDELSAFVSRQLTETQQSTKAVAHILEQLYPKPKTEIVYVKAALVHAFRQSNDMLKCREVNDLHHAKDAYLNIVVGNAYNVKVTHNKVNFIKGLQNNDKGYTVNPEKFFSHDIPGAWSVKDSMNTVRRFMNKNNIRYTRFPRKKQGGLFKINPLKKGNGQVPLKASGARSCIEKYGGYDKATSAYFSYVEYTDKKGKAVRQMFPVNLYEVKEYEADMQGFVTSRIAEASNVKILIPCVKYDACISFDGCRMFITQKTGNRIGYKPGMQLVLGYKYEKYIRNIENYLTKHKDREIIPRDNISAEENIELYDILTGKMLNTVLSVKFSGIGKKLEKRREKFVLCSPEEQCCVLNEILKILHANVLSGDLSLIGESPNTGTMKTNAKFSEIKDVHSIKLINQSVTGLFEQEIDLLK

SEQ ID NO: 20547 - protein, 1345 aa, unidentified
  REGION 1..1345: note = Cas Enzyme sequence
MGNKLRNVDDYYLGLDIGTESVGWAVTDKDYVIPKFKGNAMWGVHLFDEGETSVKRRGFRSARRRTQRKRERLALLEALFDEEICKKDCTFFRRLHESDLWPEDKSGDDKYAVFADENYTDKDFHKEYPTIYHLRYELIKNKEPHDVRLVFLALHHIIKNRGHFLFDSLSSAEDFNSAYETMRSYLSDNEIQLNCSDIEQFKAILKDRRQGKIEKTKNLASLFGITKKSDPVSYAVMAVLSGSTVKMCDLFGDDELKTVEKNNISFASGYEENEEIYASVLGDRFELVKILKAVYDWAVLADILDGKKYISEAKVAVYEKHKNDLKTLKKYVKTYLPEKYNEIFKISDGKKDNYVAYSGHIKEGGKTGELKKTCNSENFCAYLKKTLGSCADLSYKEMFDEIENKTFMPKQVTKSNGVVPMQVNEEELKAILDNAKDYLTFLKSCDENGVSVYDKIIKIFEYRIPYYVGPLNTHTQKSWLKRKDGVKIYPWNFDDVVDVDSSAEKFINNLTSKCTYLPECDVIPKCSLLYSKFTVLNEINNLKLNGEDIPVELKQGIYNDLFMTRRKVTVKQIKDYLKARGCYNNNDVLSGIDTTVKSSLKSYFDFKDFESLTFDDKESIIASSVIFGDDKKLLKKRLKKLFPEKLTDEDIKKICKLKYTGWSRLSKEFLCDVEFTYKKTGEVMNVITALWETNYNLMQILYSEDFCCDGDEKKNLNDKLDELSYTGDQHSLRKAVDALYVSPKVKRPILRALLIAKEIEKIQGRPPKKIFVEVARGIDNREERHRDSRKNRLMELYKNCKKEAEKFCPYFDALSKKLSDEDESKLRSDKLYFYYIQLGKCMYTGEEISLGELMNGNGRFDIDHIYPRSKIKDDSLTNKVLVNKTVNNNKTNVYPIDAAIQSKMSPYWQMLRSSGLISEETYKRLTRKTPLTDDELSAFVSRQLTETQQSTKAVAHILEQLYPKPKTEIVYVKAALVHAFRQSNDMLKCREVNDLHHAKDAYLNIVVGNAYNVKVTHNKVNFIKGLQNNDKGYTVNPEKFFSHDIPGAWSVKDSMNTVRRFMNKNNIRYTRFPRKKQGGLFKINPLKKGNGQVPLKASGARSCIEKYGGYDKATSAYFSYVEYTDKKGKVVRQMFPVNLYEVKEYEADMQGFVTSRIAEASNVNILIPCVKYDACISFDGCRMFITKKAGNQIGYKPGIQLVLGYKYEKYIRNITNYLTKHKDREIIPRDNISSEENIELYDVLTGKMLNTVLSVRFSGIGKKLEKRREKFVLCSPEEQCYVLNEILKILHANVLLGDLRLIGESPNAGAMLTNAKFSEIKDVHSIKLINQSVTGLFEQEIDLLK

SEQ ID NO: 20548 - protein, 1345 aa, unidentified; identical to SEQ ID NO: 20542
  REGION 1..1345: note = Cas Enzyme sequence

SEQ ID NO: 20549 - protein, 1345 aa, unidentified
  REGION 1..1345: note = Cas Enzyme sequence
MGNKLRNVDDYYLGLDIGTESVGWAVTDKDYVIPKFKGNAMWGVHLFDEGETSVKRRGFRSARRRTQRKRERLALLEALFDEEICKKDCTFFRRLHESDLWPEDKSGDDKYAVFADENYTDKDFHKEYPTIYHLRYELIKNKEPHDVRLVFLALHHIIKNRGHFLFDSLSSAEDFNSAYETMCSYLSDNEIQLNCSDIEQFKAILKDRRQGKIEKTKNLASLFGITKKSDPVSYAVMAVLSGSTVKMCDLFGDDELKTVEKNNISFASGYEENEEIYASVLGDRFELVKILKAVYDWAVLADILDGKKYISEAKVAVYEKHKNDLKTLKKYVKTYLPEKYNEIFKISDGKKDNYVAYSGHIKESGKTGELKKTCNSESFCAYLKKTLGSCADLSYKEMFDEIENKTFMPKQVTKSNGVVPMQVNEEELKAILDNAKDYLPFLNSCDENGVSVYDKIIKIFEYRIPYYVGPLNTHTEKSWLKRKDGVKIYPWNFDDVVDIDSSAEKFINNLTSKCTYLPECDVIPKCSLLYSKFTVLNEINNLKLNGEDISVELKQGIYNDLFMTRRKVTVKQIKDYLKARGCYDNNDVLSGIDTTVKSSLKSYFDFKDFESLTFDDKESIIASSVIFGDDKKLLKKRLIKLFPEKLTDEDIKKICKLKYTGWSRLSKEFLCDVEFTYKKTGEVMNVITALWETNYNLMQILYSEDFCCDGDEKKNLNDKLDELSYTGDQHSLRKAVDALYVSPKVKRPILRALLIAKEIEKIQERPPKKIFVEVARGIDNREERHRDSRKNRLMELYKNCKKEAEKFCPYFDALSKKLSDEDESKLRSDKLYFYYIQLGKCMYTGEEISLGELMNGNGRFDIDHIYPRSKIKDDSLTNKVLVNKTVNNNKTNVYPIDAAIQSKMSPYWQMLRSSGLISEETYKRLTRKTPLTDDELSAFVSRQLTETQQSTKAVAHILEQLYPKPKTEIVYVKAALVHAFRQSNDMLKCREVNDLHHAKDAYLNIVVGNAYNVKVTHNKVNFIKGLQNNDKGYTVNPEKFFSHDIPGAWSVKDSMNTVRRFMNKNNIRYTRFPRKKQGGLFKINPLKKGNGQVPLKASGARSCIEKYGGYDKATSAYFSYVEYTDKKGKAVRQMFPVNLYEVKEYEADMQGFVTSRIAEASNVNILIPCVKYDACISFDGCRMYVSNKTENRIGYKPGIQLVLGYKYEKYIRNITNYLTKHKDREIIPRDNISAEENTELYDVLTGKMLNTVLSVRFSGIGKKLEKRREKFVLCSPEEQCCVLNEILKILHANILLGDLSLIGESPNTGTMKINAKLSEIKDVHSIKLINQSVTGLFEQEIDLLK

SEQ ID NO: 20550 - protein, 1345 aa, unidentified
  REGION 1..1345: note = Cas Enzyme sequence
MGNKLRNVDDYYLGLDIGTESVGWAVTDKDYVIPKFKGNAMWGVHLFDEGETSVKRRGFRSARRRTQRKRERLALLEALFDEEICKKDCTFFRRLHESDLWPEDKSGDDKYAVFADENYTDKDFHKEYPTIYHLRYELIKNKEPHDVRLVFLALHHIIKNRGHFLFDSLSSAEDFNSAYETMCSYLSDNEIQLNCSDIEQFKAILKDRRQGKIEKTKNLASLFGITKKSDPVSYAVMAVLSGSTVKICDLFGDDELKTVEKNNISFASGYEENEEIYASVLGDRFELVNILKAVYDWAVLADILDGKKYISEAKVAVYEKHKNDLKTLKKYVKTYLPEKYNEIFKISDGKKDNYVAYSGHIKESGKTGELKKTCDSENFCAYLKKTLGKNADLSYKEMFDEIENKTFMPKQVTKSNGVVPMQVNEEELKAILDNAKDYLPFLNSCDENGVSVYDKIIKIFEYRIPYYVGPLNTHTEKSWLKRKDGVKIYPWNFDDVVDIDSSAEEFINNLTSKCTYLPECDVIPKCSLLYSKFTVLNEINNLKLNGEDIPVELKQGIYNDLFMTRRKVTVKQIKDYLKARGCYDNNDVLSGIDTTVKSSLKSYFDFKDFESLTFDDKESIIASSVIFGDDKKLLKKRLKKLFSEKLTDEDIKKICKLKYTGWSRLSKEFLCDIEFTYKKTGEVMNVITALWETNYNLMQILYSEDFCCDGDEKKNLNDKLDELSYTGDQHSLRKAVDALYVSPKVKRPILRALLIAKEIEKIQERPPKKIFVEVARGIDNREERHRDSRKSRLMELYKNCKKEAEKFCPYFDALSKKLSDEDESKLRSDKLYFYYIQLGKCMYTGEEISLGELMNGNGRFDIDHIYPQSKIKDDSLTNRVLVNRTVNADKTNVYPIDSAVQAKMSPYWRMLRSSGLISEETYKRLTRKTPLTDDELSAFVSRQLTETQQSTKAVAHILEQLYPKPKTEIVYVKAALAHAFRQSNDMLKCREVNDLHHAKDAYLNIVVGNAYNVKVTHNKVNFIKGLQNNDKGYTVNPEKFFSHDIPGAWSVKDSMNTVRRFMNKNNIRYTRFPRKKQGGLFKINPLKKGNGQVPLKASGARSCIEKYGGYDKATSAYFSYVEYTDKKGKVVCQMFPVNLYEVKEYEADMQGFVTSRIDGASNVKILIPCVKYDACISFDGCRMFITKKAGNQIGYKPGIQLVLGYKYEKYIRNITNYLTKHKDREIIPRDNISAEENIELYDVLTGKMLNTVLSVRFSGIGKKLEKRREKFVLCSREEQCYVLNEILKILHANVLLGDLRLIGESPNAGAMLTNAKFSEIKDVHSIKLINQSVTGLFEQEIDLLK

SEQ ID NO: 20551 - protein, 1345 aa, unidentified
  REGION 1..1345: note = Cas Enzyme sequence
MGNKLRNVDDYYLGLDIGTESVGWAVTDKDYVIPKFKGNAMWGVHLFDEGETSVKRRGFRSARRRTQRKRERLALLEALFDEEICKKDCTFFRRLHESNLWPEDKSGDDKYAVFADENYTDKDFHKEYPTIYHLRYELIKNKEPHDVRLVFLALHHIIKNRGHFLFDSLSSAEDFNSAYETMCSYLSDNEIQLNCSDIEQFKAILKDRRQGKIEKTKNLASLFGITKKSDPVSYAVMAVLSGSTVKMCDLFGDDELKTVEKNNISFASGYEENEEIYASVLGDRFELVKILKAVYDWAVLADILDGKKYISEAKVAVYEKHKNDLKTLKKYVKTYLPEKYNEIFKISDGKKDNYVAYSGHIKESGKTGELKKTCDSENFCAYLKKTLGKNADLSYKEMFDEIENKTFMPKQVTKSNGVVPMQVNEEELKAILDNAKDYLPFLNSCDENGVSVYDKIIKIFEYRIPYYVGPLNTHTEKSWLKRKDGVKIYPWNFDDVVDIDSSAEEFINNLTSKCTYLPECDVIPKCSLLYSKFTVLNEINNLKLNGEDIPVELKQGIYNDLFMTRRKVTVKQIKDYLKARGCYDNNDVLSGIDTAVKSSLKSYFDFKEFESLTFDDKESIIASSVIFGDDKKLLKKRLKKLFPEKLTDEDIKKICKLKYTGWSRLSKEFLCDVEFTYKKTGEVMNVITALWETNYNLMQILYSEDFCCDGDEKKNLNDKLDELSYTENQHSLRKAVDALYVSPKVKRPILRALLIAKEIEKIQERPPKKIFVEVARGIDNREERHRDSRKSRLMELYKNCKKEAEKFCPYFDALSKKLSDEDESKLRSDKLYFYYIQLGKCMYTGEEISLGELMNGNGRFDIDHIYPQSKIKDDSLTNRVLVNRTVNADKTNVYPIDSAVQAKMSPYWRMLRSSGLISEETYKRLTRKTPLTDDELSAFVSRQLTETQQSTKAVAHILEQLYPKPKTEIVYVKAALAHAFRQSNDMLKCREVNDLHHAKDAYLNIVVGNAYNVKVTHNKVNFIKGLQNNDKGYTVNPEKFFSHDIPGAWSVKDSMNTVRRFMNKNNIRYTRFPRKKQGGLFKINPLKKGNGQVPLKASGARSCIEKYGGYDKATSAYFSYVEYTDKKGKAVRQMFPVNLYEVKEYEADMQGFVTSRIAEASNVKILIPCVKYDACISFDGCRMFMSNKTGNQIGYKPGIQLVLGYKYEKYIRNITNYLTKHKDREIIPRDNISSEENIELYDALTGKMLNTVLSVRFSGIGKKLEKRREKFVLCSPEEQCYVLNEILKILHANVLSGDLKLIDESGQAGVMVTNVKFSEIKGIHSIKLINQSVTGLFEQEIDLLK

SEQ ID NO: 20552 - protein, 1345 aa, unidentified
  REGION 1..1345: note = Cas Enzyme sequence
MGNKLRNVDDYYLGLDIGTESVGWAVTDKDYVIPKFKGNAMWGVHLFDEGETSVKRRGFRSARRRTQRKRERLALLEALFDEEICKKDCTFFRRLHESDLWPEDKSGDDKYAVFADENYTDKDFHKEYPTIYHLRYELIKNKEPHDVRLVFLALHHIIKNRGHFLFDSLSSAEDFNSAYETMCSYLSDNEIQLNCSDIEQFKAILKDRRQGKIEKTKNLASLFGITKKSDPVSYAVMAVLSGSTVKMCDLFGDDELKTVEKNNISFASGYEENEEIYASVLGDRFELVNILKAVYDWAVLADILDGKKYISEAKVAVYEKHKNDLKTLKKYVKTYLPEKYNEIFKISDGKKDNYVAYSGHIKESGKTGELKKTCDSENFCAYLKKTLGKNADLSYKEMFDEIENKTFMPKQVTKSNGVVPMQVNEEELKAILDNAKDYLPFLNSCDENGVSVYDKIIKIFEYRIPYYVGPLNTHTEKSWLKRKDGVKIYPWNFDDVVDIDSSAEKFINNLTSKCTYLPECDVIPKCSLLYSKFTVLNEINNLKLNGEDIPVELKQGIYNDLFMTRRKVTVKQIKDYLKARGCYDNNDVLSGIDTTVKSSLKSYFDFKDFESLTFDDKESIIASSVIFGDDKKLLKKRLKKLFSEKLTDEDIKKICKLKYTGWSRLSKEFLCDVEFTYKKTGEVMNVITALWETNYNLMQILYSEDFCCDGDEKKNLNDKLDELSYTENQHSLRKAVDALYVSPKGKRPILRALLIAKEIEKIQERPPKKIFVEVARGIDNREERHRDSRKNRLMELYKNCKKEAEKFCPYFDALSKKLSDEDESKLRSDKLYFYYIQLGKCMYTGEEISLGELMNGNGRFDIDHIYPQSKIKDDSLTNRVLVNRTVNADKTNVYPIDSAVQAKMSQYWRMLRSSGLISEETYKRLTRKTPLTDDELSAFVSRQLTETQQSTKAVAHILEQLYPKPKTEIVYVKAALAHAFRQSNDMLKCREVNDLHHAKDAYLNIVVGNAYNVKVTHNKVNFIKGLQNNDKGYTVNPEKFFSHDIPGAWSVKDSMNTVRRFMNKNNIRYTRFPRKKQGGLFKINPLKKGNGQVPLKASGARSCIEKYGGYDKATSAYFSYVEYTDKKGKAVRQMFPVNLYEVKEYEADMQGFVTSRIAEASNVKILIPCVKYDACISFDGCRMFITKKTESRIGYKPGMQLVLGYKYEKYIRNITNYLTKHKDREIIPRDNISAEENIELYDILTGKMLNTVLSVKFSGIGKKLEKRREKFVLCSPEEQCCVLNEILKILHANVLLGDLRLIGESPNAGAMLTNAKFSEIKDVHSIKLINQSVTGLFEQEIDLLK

SEQ ID NO: 20553 - protein, 1345 aa, unidentified
  REGION 1..1345: note = Cas Enzyme sequence
MGNKLRNVDDYYLGLDIGTESVGWAVTDKDYVIPKFKGNAMWGVHLFDEGETSVKRRGFRSARRRTQRKRERLALLEALFDEEICKKDCTFFRRLHESDLWPEDKSGDDKYAVFADENYTDKDFHKEYPTIYHLRYELIKNKEPHDVRLVFLALHHIIKNRGHFLFDSMSSAEDFNSAYETMRSYLSDNEIQLNCSDIEQFKAILKDRRQGKIEKTKNLASLFGITKKSDPVSYAVMAVLSGSTVKMCDLFGDDELKTVEKNNISFASGYEENEEIYASVLGDRFELVKILKAVYDWAVLADILDGKKYISEAKVAVYEKHKNDLKTLKKYVKTYFPEKYNEIFKISDGKKDNYVAYSGHIKESGKTGELKKTCNSENFCAYLKKTLGSCADLSYKEMFDEIENKTFMPKQVTKSNGVVPMQVNEEELKAILDNAKDYLPFLNSCDENGVSVYDKIIKIFEYRIPYYVGPLNTHTEKSWLKRKDSVKIYPWNFDDVVDIDSSAEKFINNLTSKCTYLPECDVIPKCSLLYSKFTVLNEINNLKLNGEDIPVELKQEIYNDLFMTRRKVTVKQIKDYLKARGCYDNNDVLSGIDTTVKSSLKSYFDFKDFESLTFDDKESIIASSVIFGDDKKLLKKRLKKLFPEKLTDEDIKKICKLKYTGWSRLSKEFLCDVEFTYKKTGEVMNVITALWETNYNLMQILYSEDFCCDGDEKKNLNDKLDELSYTGDQHSLRKAVDALYVSPKVKRPILRALLIAKEIEKIQERPPKKIFVEVARGIDNREERHRDSRKNRLMELYKNCKKEAEKFCPYFDALSKKLSDEDESKLRSDKLYFYYIQLGKCMYTGEEISLGELMNGNGRFDIDHIYPRSKIKDDSLTNKVLVNKTVNNNKTNVYPIDAAIQSKMSPYWQMLRSSGLISEETYKRLTRKTPLTDDELSAFVSRQLTETQQSTKAVAHILEQLYPKPKTEIVYVKAALAHAFRQSNDMLKCREVNDLHHAKDAYLNIVVGNAYNVKVTHNKVNFIKGLQNNDKGYTVNPEKFFSHDIPGAWSVKDSMNTVRRFMNKNNIRYTRFPRKKQGGLFKINPLKKGNGQVPLKASGARSCIKKYGGYDKATSAYFSYVEYTDKKGKAVRQMFPVNLYEVKEYEADMQGFVTSHIAEASNVKILIPCVKYDACISFDGCRMFMSNKTGNQIGYKPGIQLVLGYKYEKYIRNIENYLTKHKDREIIPRDNISAEENTELYDVLTGKMLNTVLSVRFSGIGKKLEKRREKFVLCSPEKQCYVLNEILKILHANVLSGDLKLIDESGQAGVMVTNVKFSEIKGIHSIKLINQSVTGLFEQEIDLLK

SEQ ID NO: 20554 - protein, 1345 aa, unidentified
  REGION 1..1345: note = Cas Enzyme sequence
MGNKLRNVDDYYLGLDIGTESVGWAVTDKDYVIPKFKGNAMWGVHLFDEGETSVKRRGFRSARRRTQRKRERLALLEALFDEEICKKDCTFFRRLHESNLWPEDKSGDDKYAVFADENYTDKDFHKEYPTIYHLRYELIKNKEPHDVRLVFLALHHIIKNRGHFLFDSLSSAEDFNSAYETMCSYLSDNEIQLNCSDIEQFKAILKDRRQGKIEKTKNLASLFGITKKSDPVSYAVMAVLSGSTVKMCDLFGDDELKTVEKNNISFASGYEENEEIYASVLGDRFELVKILKAVYDWAVLADILDGKKYISEAKVAVYEKHKNDLKTLKKYVKTYLPEKYNEIFKISDGKKDNYVAYSGHIKESGKTGELKKTCDSENFCAYLKKTLGKNADLSYKEMFDEIENKTFMPKQVTKSNGVVPMQVNEEELKAILDNAKDYLPFLNSCDENGVSVYDKIIKIFEYRIPYYVGPLNTHTEKSWLKRKDGVKIYPWNFDDVVDIDSSAEEFINNLTSKCTYLPECDVIPKCSLLYSKFTVLNEINNLKLNGEDIPVELKQGIYNDLFMTRRKVTVKQIKDYLKARGCYDNNDVLSGIDTAVKSSLKSYFDFKEFESLTFDDKESIIASSVIFGDDKKLLKKRLKKLFPEKLTDEDIKKICKLKYTGWSRLSKEFLCDVEFTYKKTGEVMNVITALWETNYNLMQILYSEDFCCDGDEKKNLNDKLDELSYTGDQHSLRKAVDALYVSPKVKRPILRALLIAKEIEKIQERPPKKIFVEVARGIDNREERHRDSRKSRLMELYKNCKKEAEKFCPYFDALSKKLSNEDESKLRSDKLYFYYIQLGKCMYTGEEISLGELMNGNGRFDIDHIYPQSKIKDDSLTNRVLVNKTVNNNKTNVYPIDAAIQSKMSPYWQMLRSSGLISEETYKRLTRKTPLTDDELSAFVSRQLTETQQSTKAVAHILEQLYPKPKTEIVYVKAALAHAFRQSNDMLKCREVNDLHHAKDAYLNIVVGNAYNVKVTHNKVNFIKGLQNNDKGYTVNPEKFFSHDIPGAWSVKDSMNTVRRFMNKNNIRYTRFPRKKQGGLFKINPLKKGNGQVPLKASGARSCIKKYGGYDKATSAYFSYVEYTDKKGKAVRRMFPVNLYEVKEYEADMQGFVTSHIAEASNVKILIPCVKYDACISFDGCRMYVSNKTGNQIGYKPGIQLVLGYKYEKYIRNIENYLSKHKDREIIPRDNILSEENIELYDVLTGKMLNTVLSVKFSGIGKKLEKRREKFVLCSPEEQCYVLNEILKILHANVLLGDLKLIDESGQAGVMVTNVKFSEIKGIHSIKLINQSVTGLFEQEIDLLK

SEQ ID NO: 20555 - protein, 1345 aa, unidentified; identical to SEQ ID NO: 20539
  REGION 1..1345: note = Cas Enzyme sequence

SEQ ID NO: 20556 - protein, 1345 aa, unidentified
  REGION 1..1345: note = Cas Enzyme sequence
MGNKLRNVDDYYLGLDIGTESVGWAVTDKYYVIPKFKGNAMWGVHLFDEGETSVKRRGFRSARRRTQRKRERLALLEALFDEEICKKDCTFFRRLHESDLWPEDKSGDDKYAVFADENYTDKDFHKEYPTIYHLRYELIKNKEPHDVRLVFLALHHIIKNRGHFLFDSLSSAEDFNSAYETMCSYLSDNEIQLNCSDIEQFKAILKDRRQGKIEKTKNLASLFGITKKSDPVSYAVMAVLSGSTVKMCDLFGDDELKTVEKNNISFASGYEENEEIYASVLGDRFELVKILKAVYDWAVLADILDGKKYISEAKVAVYEKHKNDLKTLKKYVKTYLPEKYNEIFKISDGKKDNYVAYSGHIKESGKTGELKKTCNSENFCAYLKKTLGKNADLSYKEMFDEIENKTFMPKQVTKSNGVVPMQVNEEELKAILDNAKDYLSFLNSCDENGVSVYDKIIKIFEYRIPYYVGPLNTHTENSWLKRKDGVKIYPWNFDDVVDIDSSAEKFINNLTSKCTYLPECDVIPKCSLLYSKFTVLNEINNLKLNGEDIPVELKQGIYKDLFMTRRKVTVKQIKDYLKARGCYDNNDVLSGIDTTVKSSLKSYFDFKGFESLTFDDKESIIASSVIFGDDKKLLKKRLKKLFPEKLTDEDIKKICKLKYTGWSRLSKEFLCDVEFTYKKTGEVMNVITALWETNYNLMQILYSEDFCCDGDEKKNLNDKLDELSYTGDQHSLRKAVDALYVSPKVKRPILRALLIAKEIEKIQERPPKKIFVEVARGIDNREERHRDSRKNRLMELYKNCKKEAEKFCPYFDALSKKLSDEDESKLRRDKLYFYYIQLGKCMYTGEEISLGELMNGNGRFDIDHIYPRSKIKDDSLTNKVLVNKTVNNNKTNVYPIDAAIQSKMSPYWQMLRSSGLISEETYKRLTRKTPLTDDELSAFVSRQLTETQQSTKAVAHILEQLYPKPKTEIVYVKAALVHAFRQSNDMLKCREVNDLHHAKDAYLNIVVGNAYNVKVTHNKVNFIKGLQNNDKGYTVNPEKFFSHDIPGAWSVKDSMNTVRRFMNKNNIRYTRFPRKKQGGLFKINPLKKGNGQVPLKASGARSCIEKYGGYDKATSAYFSYVEYTDKKGKAVRQMFTVNLYEVKEYEADMQGFVTSRIAEASNVKILIPCVKYDACISFDGCRMFITKKTGNRIGYKPGMQLVLGYKYEKYIRNIENYLTKHKDREIIPRDNISAEENIELYDILTGKMLNTVLSVKFSGIGKKLEKRREKFVLCSPEEQCCVLNEILKILHANVLSGDLSLIGESPNTGTMKTNAKFSEIKDVHSIKLINQSVTGLFEQEIDLLK

SEQ ID NO: 20557 - protein, 1345 aa, unidentified
  REGION 1..1345: note = Cas Enzyme sequence
MGNKLRNVDDYYLGLDIGTESVGWAVTDKDYVIPKFKGNAMWGVHLFDEGETSVKRRGFRSARRRTQRKRERLALLEALFDEEISKKDCTFFRRLHESDLWPEDKSGDDKYAVFADENYTDKDFHKEYPTIYHLRYELIKNKEPHDVRLVFLALHHIIKNRGHFLFDSLSSAEDFNSAYETMCSYLSDNEIQLNCSDIEQFKAILKDRRQGKIEKTKNLASLFGITKKSDPVSYAVMAVLSGSTVKMCDLFGDDELKTVEKNNISFASGYEENEEIYASVLGDRFELVNILKAVYDWAVLADILDGKKYISEAKVAVYEKHKNDLKTLKKYVKTYLPEKYNEIFKISDGKKDNYVAYSGHIKESGKTGELKKTCDSENFCAYLKKTLGKNADLSYKEMFDEIENKTFMPKQVTKSNGVVPMQVNEEELKAILDNAKDYLPFLNSCDENGVSVYDKIIKIFEYRIPYYVGPLNTHTEKSWLKRKDGVKIYPWNFDDVVDIDSSAEKFINNLTSKCTYLPECDVIPKCSLLYSKFTVLNEINNLKLNGEDIPVELKQGIYNDLFMTRRKVTVKQIKDYLKARGCYDNNDVLSGIDTTVKSSLKSYFDFKDFESLTFDDKESIIASSVIFGDDKKLLKKRLKKLFPEKLTDEDIKKICKLKYTGWSRLSKEFLCDVEFTYKKTGEVMNVITALWETNYNLMQILYSEDFCCDGDEKKNLNDKLDELSYTGDQHSLRKAVDALYVSPKVKRPILRALLIAKEIEKIQERPPKKIFVEVARGIDNREERHRDSRKSRLMELYKNCKKEAEKFCPYFDALSKKLSDEDESKLRSDKLYFYYIQLGHCMYTGEEISLGELMNGNGRFDIDHIYPQSKIKDDSLTNRVLVNRTVNADKTNVYPIDSAVQAKMSPYWQMLRSSGLISEETYKRLTRKTPLTDDELSAFVSRQLTETQQSTKAVAHILEQLYPKPKTEIVYVKAALAHAFRQSNDMLKCREVNDLHHAKDAYLNIVVGNAYNVKVTHNKVNFIKGLQNNDKGYTVNPEKFFSHDIPGAWSVKDSMNTVRRFMNKNNIRYTRFPRKKQGGLFKINPLKKGNGQVPLKASGARSCIKKYGGYDKATSAYFSYVEYTDKKGKAVRQMFPVNLYEVKEYEADMQGFVTSRIDGASNVKILIPCVKYDACISFDGCRMFMSNKTGNRIGYKPGIQLVLGYKYEKYIRNITNYLTKHKDREIIPRDNISAEENTELYDVLTGKMLNTVLSVKFSGIGKKLEKHREEFVLCSPEEQCYVLNEILKILHANVLLGDLRLIGESPNAGVMLTNAKFSEIKDVHSIKLINQSVTGLFEQEIDLLK

SEQ ID NO: 20558 - protein, 1345 aa, unidentified
  REGION 1..1345: note = Cas Enzyme sequence
MGNKLRNVDDYYLGLDIGTESVGWAVTDKDYVIPKFKGNAMWGVHLFDEGETSVKRRGFRSARRRTQRKRERLALLEALFDEEICKKDCTFFRRLHESDLWPEDKSGDDKYAVFADENYTDKDFHKEYPTIYHLRYELIKNKEPHDVRLVFLALHHIIKNRGHFLFDSLSSAEDFNSAYETMCSYLSDNEIQLNCSDIEQFKAILKDRRQGKIEKTKNLASLFGITKKSDPVSYAVMAALSGSTVKMCDLFGDDELKTVEKNNISFASGYEENEEIYASVLGDRFELVKILKAVYDWAVLADILDGKKYISEAKVAVYEKHKNDLKTLKKYVKTYLPEKYNEIFKISDGKKDNYVAYSGHIKESGKTGELKKTCNSESFCAYLKKTLGSCADLSYKEMFDEIENKTFMPKQVTKSNGVVPMQVNEEELKAILDNAKDYLPFLNSCDENGVSVYDKIIKIFEYRIPYYVGPLNTHTEKSWLKRKDGVKIYPWNFDDVVDIDSSAEKFINNLTSKCTYLPECDVIPKCSLLYSKFTVLNEINNLKLNGEDIPVELKQGIYNDLFMTRRKVTVKQIKDYLKARGCYDNNDVLSGIDTTVKSSLKSYFDFKDFESLTFDDKESIIASSVIFGDDKKLLKKRLKKLFPEKLTDEDIKKICKLKYTGWSRLSKEFLCDVEFTYKKTGEVMNVITALWETNYNLMQILYSEDFCCDGDEKKNLNDKLDELSYTGDQHSLRKAVDALYVSPKVKRPILRALLIAKEIEKIQERPPKKIFVEVARGIDNREERHRDSRKSRLMELYKNCKKEAEKFCPYFDALSKKLSDEDESKLRSDKLYFYYIQLGHCMYTGEEISLGELMNGNGRFDIDHIYPQSKIKDDSLTNRVLVNRTVNADKTNVYPIDSAVQAKMSPYWQMLRSSGLISEETYKRLTRKTPLTDDELSAFVSRQLTETQQSTKAVAHILEQLYPKPKTEIVYVKAALAHAFRQSNDMLKCREVNDLHHAKDAYLNIVVGNAYNVKVTHNKVNFIKGLQNNDKGYTVNPEKFFSHDIPGAWSVKDSMNTVRRFMNKNNIRYTRFPRKKQGGLFKINPLKKGNGQVPLKASGARSCIKKYGGYDKATSAYFSYVEYTDKKGKAVRQMFPVNLYEVKEYEADMQGFVTSRIDGASNVKILIPCVKYDACISFDGCRMFMSNKTGNRIGYKPGIQLVLGYKYEKYIRNITNYLTKHKDREIIPRDNISAEENTELYDVLTGKMLNTVLSVKFSGIGKKLEKHREEFVLCSPEEQCYVLNEILKILHANVLLGDLRLIGESPNAGVMLTNAKFSEIKDVHSIKLINQSVTGLFEQEIDLLK

SEQ ID NO: 20559 - protein, 1345 aa, unidentified
  REGION 1..1345: note = Cas Enzyme sequence
MGNKLRNVDDYYLGLDIGTESVGWAVTDKDYVIPKFKGNAMWGVHLFDEGETSVKRRGFRSARRRTQRKRERLALLEALFDEEISKKDCTFFRRLHESDLWPEDKSGDDKYAVFADENYTDKDFHKEYPTIYHLRYELIKNKEPHDVRLVFLALHHIIKNRGHFLFDSLSSAEDFNSAYETMCSYLSDNEIQLNCSDIEQFKAILKDRRQGKIEKTKNLASLFGITKKSDPVSYAVMAVLSGSTVKMCDLFGDDELKTVEKNNISFASGYEENEEIYASVLGDRFELVNILKAVYDWAVLADILDGKKYISEAKVAVYEKHKNDLKTLKKYVKTYLPEKYNEIFKISDGKKDNYVAYSGHIKESGKTGELKKTCDSENFCAYLKKTLGKNADLSYKEMFDEIENKTFMPKQVTKSNGVVPMQVNEKELKAILDNAKDYLPFLNSCDENGVSVYDKIIKIFEYRIPYYVGPLNTHTEKSWLKRKDGVKIYPWNFDDVVDIDSSAEEFINNLTSKCTYLPECDVIPKCSLLYSKFTVLNEINNLKLNGEDIPVELKQGIYNDLFMTRRKVTVKQIKDYLKARGCYDNNDVLSGIDTAVKSSLKSYFDFKEFESLTFDDKESIIASSVIFGDDKKLLKKRLKKLFSEKLTDEDIKKICKLKYTGWSRLSKEFLCDIEFTYKKTGEVMNVITALWETNYNLMQILYSEDFCCDGDEKKNLNDKLDELSYTGDQHSLRKAVDALYVSPKVKRPILRALLIAKEIEKIQERPPKKIFVEVARGIDNREERHRDSRKNRLMELYKNCKKEAEKFCPYFDAMSKKLSDEDESKLRSDKLYFYYIQLGKCMYTGEEISLGELMNGNGRFDIDHIYPQSKIKDDSLTNRVLVNRTVNADKTNVYPIDSAVQAKMSPYWQMLRSSGLISEETYKRLTRKTPLTDDELSAFVSRQLTETQQSTKAVAHILEQLYPKPKTEIVYVKAALAHAFRQSNDMLKCREVNDLHHAKDAYLNIVVGNAYNVKVTHNKVNFIKGLQNNDKGYTVNPEKFFSHDIPGAWSVKDSMNTVCRFMNKNNIRYTRFPRKKQGGLFKINPLKKGNGQVPLKASGARSCIKKYGGYDKATSAYFSYVEYTDKKGKAVRRMFPVNLYEVKEYEADMQGFVTSRIAEASNVKILIPCVKYDACISFDGCRMFMSNKTGNQIGYKPGIQLVLGYKYEKYIRNIENYLSKHKDREIIPRDNISSEENIELYDVLMGKMLNTVLSVKFSGIGKKLEKRREKFVLCSPEEQCYVLNEILKILHANVLLGDLKLIDESGQAGVMVTNVKFSEIKGIHSIKLINQSVTGLFEQEIDLLK

SEQ ID NO: 20560 - protein, 1345 aa, unidentified
  REGION 1..1345: note = Cas Enzyme sequence
MGNKLRNVDDYYLGLDIGTESVGWAVTDKDYVIPKFKGNAMWGVHLFDEGETSVKRRGFRSARRRTQRKRERLALLEALFDEEICKKDCTFFRRLHESDLWPEDKSGDDKYAVFADENYTDKDFHKEYPTIYHLRYELIKNKEPHDVRLVFLALHHIIKNRGHFLFDSLSSAEDFNSAYETMCSYLSDNEIQLNCSDIEQFKAILKDRRQGKIEKTKNLASLFGITKKSDPVSYAVMAVLSGSTVKMCDLFGDDELKTVEKNNISFASGYEENEEIYASVLGDRFELVKILKAVYDWAVLADILDGKKYISEAKVAVYEKHKNDLKTLKKYVKTYLPEKYNEIFKISDGKKDNYVAYSGHIKESGKTGELKKTCNSENFCAYLKKTLGKNADLSYKEMFDDIENKTFMPKQVTKSNGVVPMQVNEEELKAILDNAKDYLPFLNSCDENGVSVYDKIIKIFEYRIPYYVGPLNTHTPKSWLKRKDGVKIYPWNFDDVVDIDSSAEKFINNLTSKCTYLPECDVIPKCSLLYSKFTVLNEINNLKLNGEDIPVELKQGIYNDLFMTRRKVTVKQIKDYLKARGCYDNNDVLSGIDTTVKSSLKSYFDFKDFESLTFDDKESIIASSVIFGDDKKLLKKRLKKLFPEKLTDEDIKKICKLKYTGWSRLSKEFLCDVEFTYKKTGEVMNVITALWETNYNLMQILYSEDFCCDGDEKKNLNDKLDELSYTGDQHSLRKAVDALYVSPKVKRPILRALLIAKEIEKIQERPPKKIFVEVARGIDNREERHRDSRKNRLMELYKNCKKEAEKFCPYFDALSKKLSDEDESKLRSDKLYFYYIQLGKCMYTGEEISLGELMNGNGRFDIDHIYPRSKIKDDSLTNKVLVNKTVNNNKTNVYPIDAAIQSKMSPYWQMLRSSGLISEETYKRLTRKTPLTDDELSAFVSRQLTETQQSTKAVAHILEQLYPKPKTEIVYVKAALVHAFRQSNDMLKCREVNDLHHAKDAYLNIVVGNAYNVKVTHNKANFIKGLQNNDKGYTVNPEKFFSHDIPGAWSVKDSMNTVRRFMNKNNIRYTRFPRKKQGGLFKINPLKKGNGQVPLKASGARSCIEKYGGYDKATSAYFSYVEYTDKKGKAVRQMFPVNLYEVKEYEADMQGFVTSRIAEASNVNILIPCVKYDACISFDGCRMYVSNKTENRIGYKPGIQLVLGYKYEKYIRNITNYLTKHKDREIIPRDNISAEENTELYDVLTGKMLNTVLSVRFSGIGKKLEKRREKFVLCSPEEQCCVLNEILKILHANILLGDLSLIGESPNTGTMKINAKLSEIKDVHSIKLINQSVTGLFEQEIDLLK

SEQ ID NO: 20561 - protein, 1345 aa, unidentified
  REGION 1..1345: note = Cas Enzyme sequence
MGNKLRNVDDYYLGLDIGTESVGWAVTDKDYVIPKFKGNAMWGVHLFDEGETSVKRRGFRSARRRTQRKRERLALLEALFDEEICKKDCTFFRRLHESDLWPEDKSGDDKYAVFADENYTDKDFHKEYPTIYHLRYELIKNKEPHDVRLVFLALHHIIKNRGHFLFDSLSSAEDFNSAYETMCSYLSDNEIQLNCSDIEQFKAILKDRRQGKIEKTKNLASLFGITKKSDPVSYAVMAVLSGSTVKMCDLFGDDELKTVEKNNISFASGYEENEEIYASVLGDRFELVKILKAVYDWAVLADILDGKKYISEAKVAVYEKHKNDLKTLKKYVKTYLPEKYNEIFKISDGKKDNYVAYSGHIKESGKTGELKKTCNSENFCAYLKKTLGKNADLSYKEMFDEIENKTFMPKQVTKSNGVVPMQVNEEELKAILDNAKDYLPFLNSCDENGVSVYDKIIKIFEYRIPYYVGPLNTHTQKSWLKRKDGVKIYPWNFDDVVDIDSSAEKFINNLTSKCTYLPECDVIPKCSLLYSKFTVLNEINNLKLNGEDIPVELKQGIYNDLFMTRRKVTVKQIKDYLKARGCYDNNDVLSGIDTTVKSSLKSYFDFKDFESLTFDDKESIIASSVIFGDDKKLLKKRLKKLFPEKLTDEDIKKICKLKYTGWSRLSKEFLCDVEFTYKKTGEVMNVITALWETNYNLMQILYSEDFCCDGDEKKNLNDKLDELSYTGDQHSLRKAVDALYVSPKVKRPILRALLIAKEIEKIQERPPKKIFVEVARGIDNREERHRDSRKNRLMELYKNCKKEAEKFCPYFDALSKKLSDEDESKLRSDKLYFYYIQLGKCMYTGEEISLGELMNGNGRFDIDHIYPRSKIKDDSLTNKVLVNKTVNNNKTNVYPIDAAIQSKMSPYWQMLRSSGLISEETYKRLTRKTPLTDDELSAFVSRQLTETQQSTKAVAHILEQLYPKPKTEIVYVKAALVHAFRQSNDMLKCREVNDLHHAKDAYLNIVVGNAYNVKVTHNKVNFIKGLQNNDKGYTVNPEKFFSHDIPGAWSVKDSMNTVRRFMNKNNIRYTRFPRKKQGGLFKINPLKKGNGQVPLKASGARSCIKKYGGYDKATSAYFSYVEYTDKKGKAVRHMFPVNLYEVKEYEADMQGFVTSRIAEASNVKILIPCVKYDACISFDGCRMFITKKAGNQIGYKPGIQLVLGYKYEKYIRNITNYLTKHKDREIIPRDNISAEENTELYDVLTGKMLNTVLSVRFSGIGKKLEKRREKFVLCSPEEQCYVLNEILKILHANVLLGDLRLIGESPNAGAMLTNAKFSEIKDVHSIKLINQSVTGLFEQEIDLLK

SEQ ID NO: 20562 - protein, 1345 aa, unidentified
  REGION 1..1345: note = Cas Enzyme sequence
MGNKLRNVDDYYLGLDIGTESVGWAVTDKDYVIPKFKGNAMWGVHLFDEGETSVKRRGFRSARRRTQRKRERLALLEALFDEEICKKDCTFFRRLHESDLWPEDKSGDDKYAVFADENYTDKDFHKEYPTIYHLRYELIKNKEPHDVRLVFLALHHIIKNRGHFLFDSLSSAEDFNSAYETMCSYLSDNEIQLNCSDIEQFKAILKDRRQGKIEKTKNLASLFGITKKSDPVSYAVMAVLSGSTVKMCDLFGDDELKTVEKNNISFASGYEENEEIYASVLGDRFELVKILKAVYDWAVLADILDGKKYISEAKVAVYEKHKNDLKTLKKYVKTYLPEKYNEIFKISDGKKDNYVAYSGHIKESGKTGELKKTCNSENFCAYLKKTLGKNADLSYKEMFDEIENKTFMPKQVTKSNGVVQMQVNEEELKAILDNAKDYLPFLNSCDENGVSVYDKIIKIFEYRIPYYVGPLNTHTENSWLKRKDGVKIYPWNFDDVVDIDSSAEKFINNLTSKCTYLPECDVIPKCSLLYSKFTVLNEINNLKLNGEDIPVELKQGIYNDLFMTHRKVTVKQIKDYLKARGCYDNNDVLSGIDTTVKSSLKSYFDFKDFESLTFDDKESIIASSVIFGDDKKLLKKRLKKLFPEKLTDEDIKKICKLKYTGWSRLSKEFLCDVEFTYKKTGEVMNVITALWETNYNLMQILYSEDFCCDGDEKKNLNDKLDELSYTGDQHSLRKAVDALYVSPKVKRPILRALLIAKEIEKIQERPPKKIFVEVARGIDNREERHRASRKKRLMELYKNCKKEAEKFCPYFDALSKKLSDEDEAKLRSDKLYFYYIQLGHCMYTGEEISLGELMNGNGRFDIDHIYPRSKIKDDSLTNKVLVNKTVNNNKTNVYPIDAAIQSKMSPYWQMLRSSGLISEETYKRLTRKTPLTDDELSAFVSRQLTETQQSTKAVAHILEQLYPKPKTEIVYVKATLVHAFRQSNDMLKCREVNDLHHAKDAYLNIVVGNAYNVKVTHNKVNFIKGLQNNDKGYTVNPEKFFSHDIPGAWSVKDSMNTVRRFMNKNNIRYTRFPRKKQGGLFKINPLKKGNGQVPLKASGARSCIEKYGGYDKATSAYFSYVEYTDKKGKAVRQMFPVNLYEVKEYEADMQGFVTSRIAEASNVKILIPCVKYDACISFDGCRMFISNKTENRIGYKPGIQLVLGYKYEKYIRNITNYLTKHKDREIIPRDNISAEENTELYDVLTGKMLNTVLSVRFSGIGKKLEKRREKFVLCSPEEQCCVLNEILKILHANILLGDLSLIGESPNTGTMKINAKLSEIKDVHSIKLINQSVTGLFEQEIDLLK

SEQ ID NO: 20563 - protein, 1345 aa, unidentified
  REGION 1..1345: note = Cas Enzyme sequence
MGNKLRNVDDYYLGLDIGTESVGWAVTDKDYVIPKFKGNAMWGVHLFDEGETSVKRRGFRSARRRTQRKRERLALLEALFDEEICKKDCTFFRRLHESDLWPEDKSGDDKYAVFADENYTDKDFHKEYPTIYHLRYELIKNKEPHDVRLVFLALHHIIKNRGHFLFDSLSSAEDFNSAYETMRSYLSDNEIQLNCSDIEQFKAILKDRRQGKIEKTKNLASLFGITKKSDPVSYAVMAVLSGSTVKMCDLFGDDELKTVEKNNISFASGYEENEEIYASVLGDRFELVKILKAVYDWAVLADILDGKKYISEAKVAVYEKHKNDLKTLKKYVKTYLPEKYNEIFKISDGKKDNYVAYSGHIKEGGKTGELKKTCNSENFCAYLKKTLGSCADLSYKEMFDEIENKTFMPKQVTKSNGVVPMQVNEEELKAILDNAKDYLTFLKSCDENGVSVYDKIIKIFEYRIPYYVGPLNTHTQKSWLKRKDGVKIYPWNFDDVVDVDSSAEKFINNLTSKCTYLPECDVIPKCSLLYSKFTVLNEINNLKLNGEDIPVELKQGIYNDLFMTRRKVTVKQIKDYLKARGCYNNNDVLSGIDTTVKSSLKSYFDFKDFESLTFDDKESIIASSVIFGDDKKLLKKRLKKLFPEKLTDEDIKKICKLKYTGWSRLSKEFLCDVEFTYKKTGEVMNVITALWETNYNLMQILYSEDFCCDGDEKKNLNDKLDELSYTGDQHSLRKAVDALYVSPKVKRPILRALLIAKEIEKIQERPPKKIFVEVARGIDNREERHRDSRKNRLMELYKNCKKEAEKFCPYFDVLSKKLSDEDESKLRSDKLYFYYIQLGKCMYTGEEISLGELMNGNGRFDIDHIYPRSKIKDDSLTNKVLVNKTVNNNKTNVYPIDAAIQSKMSPYWQMLRSSGLISEETYKRLTRKTPLTDDELSAFVSRQLTETQQSTKAVAHILEQLYPKPKTEIVYVKAALVHAFRQSNDMLKCREVNDLHHAKDAYLNIVVGNAYNVKVTHNKVNFIKGLQNNDKGYTVNPEKFFSHDIPGAWSVNDSMNTVRRFMNKNNIRYTRFPRKKQGGLFKINPLKKGNGQVPLKASGARSCIEKYGGYDKATSAYFSYVEYTDKKGKAVRQMFPVNLYEVKEYEADMQGFVTSHIAEASNVKILIPCVKYDACISFDGCRMFITKKTGNQIGYKPGMQLVLGYKYEKYIRNITNYLTKHKDREIIPRDNISAEENIELYDILTGKMLNTVLSVKFSGIGKKLEKRRGKFVLCSPEEQCYVLNEILKILHANVLLGDLKLIDESGQAGVMVTNAKLSEIKDVHSIKLINQSVTGLFEQEIDLLK

SEQ ID NO: 20564 - protein, 1345 aa, unidentified
  REGION 1..1345: note = Cas Enzyme sequence
MGNKLRNVDDYYLGLDIGTESVGWAVTDKDYVIPKFKGNAMWGVHLFDEGETSVKRRGFRSARRRTQRKRERLALLEALFDEEICKKDCTFFKRLHESNLWPEDKSGDDKYAVFADENYTDKDFHKEYPTIYHLRYELIKNKEPHDVRLVFLALHHIIKNRGHFLFDSLSSAEDFNSAYETMCSYLSDNEIQLNCSDIEQFKAILKDRRQGKIEKTKNLASLFGITKKSDPVSYAVMAVLSGSTVKMCDLFGDDELKTVEKNNISFASGYEENEEIYASVLGDRFELVKILKAVYDWAVLADILDGKKYISEAKVAVYEKHKNDLKTLKKYVKTYLPEKYNEIFKISDGKKDNYVAYSGHIKESGKTGELKKTCDSENFCAYLKKTLGKNADLSYKEMFDEIENKTFMPKQVTKSNGVVPMQVNEEELKAILDNAKDYLPFLNSCDENGVSVYDKIIKIFEYRIPYYVGPLNTHTEKSWLKRKDGVKIYPWNFDDVVDIDSSAEEFINNLTSKCTYLPECDVIPKCSLLYSKFTVLNEINNLKLNGEDIPVELKQGIYNDLFMTRRKVTVKQIKDYLKARGCYDNNDVLSGIDTAVKSSLKSYFDFKEFESLTFDDKESIIASSVIFGDDKKLLKKRLKKLFSEKLTDEDIKKICKLKYTGWSRLSKEFLCDVEFTYKKTGEVMNVITALWETNYNLMQILYSEDFCCDGDEKKNLNDKLDELSYTENQHSLRKAVDALYVSPKVKRPILRALLIAKELEKIQERPPKKIFVEVARGIDNREERHRDSRKSRLMELYKNCKKEAEKFCPYFDALSKKLSDEDESKLRSDKLYFYYIQLGKCMYTGEEISLGELMNGNGRFDIDHIYPQSKIKDDSLTNRVLVNRTVNADKTNVYPIDSAVQAKMSPYWQMLRSSGLISEETYKRLTRKTPLTDDELSAFVSRQLTETQQSTKAVAHILEQLYPKPKTEIVYVKAALAHAFRQSNDMLKCREVNDLHHAKDAYLNIVVGNAYNVKVTHNKVNFIKGLQNNDKGYTVNPEKFFSHDIPGAWSVKDSMNTVRRFMNKNNIRYTRFPRKKQGGLFKINPLKKGNGQVPLKASGARSCIEKYGGYDKATSAYFSYVEYTDKKGKAVRQMFPVNLYEVKEYEADMQGFVTSRIDGASNVKILIPCVKYDACISFDGCRMFMSNKTGNQIGYKPGIQLVLGYKYEKYIRNIENYLSKHKDREIIPRDNISSEENIELYDVLMGKMLNTVLSVKFSGIGKKLEKRREKFVLCSPEEQCYVLNEILKILHANVLSGDLKLIDESGQAGVMVTNVKFSEIKGIHSIKLINQSVTGLFEQEIDLLK

SEQ ID NO: 20565 - protein, 1345 aa, unidentified
  REGION 1..1345: note = Cas Enzyme sequence
MGNKLRNVDDYYLGLDIGTESVGWAVTDKDYVIPKFKGNAMWGVHLFDEGETSVKRRGFRSARRRTQRKRERLALLEALFDEEICKKDCTFFRRLHESDLWPEDKTGDDKYAVFADENYTDKDFHKEYPTIYHLRYELIKNKEPHDVRLVFLALHHIIKNRGHFLFDSLSSAEDFNSAYETMRSYLSDNEIQLNCSDIEQFKAILKDRRQGKIEKTKNLSSLFGITKKSDLVSYAVMAVLSGSTVKMCDLFGDDELKTVEKNNISFASGYEENEEIYASVLGDRFELVKILKAVYDWAVLADILDGKKYISEAKVAVYEKHKNDLKTLKKYVKTYLPEKYNEIFKISDGKKDNYVAYSGHIKESGKTGELKKTCNSENFCAYLKKTLGKNADLSYKEMFDEIENKTFMPKQVTKSNGVVPMQVNEEELKAILDNAKDYLPFLNSCDENGVSVYDKIIKIFEYRIPYYVGPLNTHTEKSWLKRKDGVKIYPWNFDDVVDIDSSAEKFINNLTSKCTYLPECDVIPKCSLLYSKFTVLNEINNLKLNGEDIPVELKQGIYNDLFMTRRKVTVKQIKDYLKARGCYDNNDVLSGIDTTVKSSLKSYFDFEDFESLTFDDKESIIASSVIFGDDKKLLKKRLKKLFLEKLTDEDIKKICKLKYTGWSRLSKEFLCDVEFTYKKTGEVMNVITALWETNYNLMQILYSEDFCCDGDEKKNLNDKLDELSYTGDQHSLRKAVDALYVSPKVKRPILRALLIAKEIEKIQERPPKKIFVEVARGIDNREERHRDSRKNRLMELYKNCKKEAEKFCPYFDALSKKLSDEDESKLRSDKLYFYYIQLGKCMYTGEEISLGELMNGNGRFDIDHIYPRSKIKDDSLTNKVLVNKTVNNNKTNVYPIDAAIQSKMSPYWQMLRSSGLISEETYKRLTRKTPLTDDELSAFVSRQLTETQQSTKAVAHILEQLYPKPKTEIVYVKAALAHAFRQSNDMLKCREVNDLHHAKDAYLNIVVGNAYNVKVTHNKVNFIKGLQNNDKGYTVNPEKFFSHDIPGAWAVKDSMNTVRRFMNKNNIRYTRFPRKKQGGLFKINPLKKGNGQVPLKASGARSCIEKYGGYDKATSAYFSYVEYTDKKGKAVRQMFPVNLYEVKEYEADMQGFVTSHIAKASNVKILIPCVKYDACISFDGCRMFITKKAGNQIGYKPGIQLVLGYKYEKYIRNITNYLTKHKDREIIPRDNISAEENTELYDVLTGKMLNTVLSVRFSGIGKKLEKRREKFVLCSPEEQCYVLNEILKILHANVLLGDLRLIGESPNAGAMLTNAKFSEIKDVHSIKLINQSVTGLFEQEIDLLK

SEQ ID NO: 20566 - protein, 1345 aa, unidentified
  REGION 1..1345: note = Cas Enzyme sequence
MGNKLRNVDDYYLGLDIGTESVGWAVTDKDYVIPKFKGNAMWGVHLFDEGETSVKRRGFRSARRRTQRKRERLALLEALFDEEICKKDCTFFRRLHESDLWPEDKSGDDKYAVFADENYTDKDFHKEYPTIYHLRYELIKNKEPHDVRLVFLALHHIIKNRGHFLFDSLSSAEDFNSAYETMRSYLSDNEIQLNCSDIEQFKAILKDRRQGKIEKTKNLASLFGITKKSDPVSYAVMAVLSGSTVKMCDLFGDDELKTVEKNNISFASGYEENEEIYASVLGDRFELVNILKAVYDWAVLADILDGKKYISEAKVAVYEKHKNDLKTLKKYVKTYLPEKYNEIFKISDGKKDNYVAYSGHIKESGKTGELKKTCDSENFCAYLKKTLGKNADLSYKEMFDEIENKTFMPKQVTKSNGVVPMQVNEEELKAILDNAKDYLPFLNSCDENGVSVYDKIIKIFEYRIPYYVGPLNTHTEKSWLKRKDGVKIYPWNFDDVVDIDSSAEKFINNLTSKCTYLPECDVIPKCSLLYSKFTVLNEINNLKLNGEDIPVELKQGIYNDLFMTRRKVTVKQIKDYLKARGCYDNNDVLSGIDTTVKSSLKSYFDFKDFESLTFDDKESIIASSVIFGDDKKLLKKRLKKLFPEKLTDEDIKKICKLKYTGWSRLSKEFLCDVEFTYKKTGEVMNVITALWETNYNLMQILYSEDFCCDGDEKKNLNDKLDELSYTGDQHSLRKAVDALYVSPKVKRPILRALLIAKEIEKIQERPPKKIFVEVARGIDNREERHRDSRKSRLMELYKNCKKEAEKFCPYFDALSKKLSDEDESKLRSDKLYFYYIQLGHCMYTGEEISLGELMNGNGRFDIDHIYPQSKIKDDSLTNRVLVNRTVNADKTNVYPIDSAVQAKMSPYWQMLRSSGLISEETYKRLTRKTPLTDDELSAFVSRQLTETQQSTKAVAHILEQLYPKPKTEIVYVKAALAHAFRQSNDMLKCREVNDLHHAKDAYLNIVVGNAYNVKVTHNKVNFIKGLQNNDKGYTVNPEKFFSHDIPGAWSVKDSMNTVRRFMNKNNIRYTRFPRKKQGGLFKINPLKKGNGQVPLKASGARSCIEKYGGYDKATSAYFSYVEYTDKKGKAVRQMFPVNLYEVKEYEADMQGFVTSRIAEASNVKILIPCVKYDACISFDGCRMFISNKNGNQIGYKPGMQLVLGYKYEKYIRNITNYLTKHKDREIIPRDNISAEENVELYDILTGKMLNTVLSVRFSGIGKKLEKRREKFVLCSPEEQCCVLNEILKILHANVLSGDLSLIEESHNTGTMKTNAKFSEIKDVHSIKLINQSVTGLFEQEIDLLK

SEQ ID NO: 20567 - protein, 1345 aa, unidentified
  REGION 1..1345: note = Cas Enzyme sequence
MGNKLRNVDDYYLGLDIGTESVGWAVTDKDYVIPKFKGNAMWGVHLFDEGETSVKRRGFRSARRRTQRKRERLALLEALFDEEISKKDCTFFRRLHESNLWPEDKSGDDKYAVFADENYTDKDFHKEYPTIYHLRYELIKNKEPHDVRLVFLALHHIIKNRGHFLFDSLSSAEDFNSAYETMCSYLSDNEIQLNCSDIEQFKAILKDRRQGKIEKTKNLASLFGITKKSDPVSYAVMAVLSGSTVKMCDLFGDDELKTVEKNNISFASGYEENEEIYASVLGDRFELVNILKAVYDWAVLADILDGKKYISEAKVAVYEKHKNDLKTLKKYVKTYLPEKYNEIFKISDGKKDNYVAYSGHIKESGKTGELKKTCDSENFCAYLKKTLGKNADLSYKEMFDEIENKTFMPKQVTKSNGVVPMQVNEEELKAILDNAKDYLPFLNSCDENGISVYDKIIKIFEYRIPYYVGPLNTHTEKSWLKRKDGVKIYPWNFDDVVDIDSSAEEFINNLTSKCTYLPECDVIPKCSLLYSKFTVLNEINNLKLNGEDVPVELKQGIYNDLFMTRRKVTVKQIKDYLKARGCYDNNDVLSGIDTTVKSSLKSYFDFKDFESLTFDDKESIIASSVIFGDDKKLLKKRLKKLFSEKLTDEDIKKICKLKYTGWSRLSKEFLCDVEFTYKKTGEVMNVITALWETNYNLMQILYSEDFCCDGDEKKNLNDKLDELSYTGDQHSLRKAVDALYVSPKVKRPILRALLIAKEIEKIQERPPKKIFVEVARGIDNREERHRDSRKNRLMELYKNCKKEAEKFCPYFDAMSKKLSDEDESKLRSDKLYFYYIQLGKCMYTGEEISLGELMNGNGRFDIDHIYPQSKIKDDSLTNRVLVNRTVNADKTNVYPIDSAVQAKMSPYWQMLRSSGLISEETYKRLTRKTPLTDDELSAFVSRQLTETQQSTKAVAHILEQLYPKPKTEIVYVKAALAHAFRQSNDMLKCREVNDLHHAKDAYLNIVVGNAYNVKVTHNKVNFIKGLQNNDKGYTVNPEKFFSHDIPGAWSVKDSMNTVCRFMNKNNIRYTRFPRKKQGGLFKINPLKKGNGQVPLKASGARSCIKKYGGYDKATSAYFSYVEYTDKKGKAVRQMFPVNLYEVKEYEADMQGFVTSRIDGASNVKILIPCVKYDACISFDGCRMFITKKAGNQIGYKPGIQLVLGYKYEKYIRNITNYLTKHKDREIIPRDNISSEENIELYDVLTGKMLNTVLSVRFSGIGKKLEKRREKFVLCSPEEQCYVLNEILKILHANVLLGDLRLIGESPNAGAMLTNAKFSEIKDVHSIKLINQSVTGLFEQEIDLLK

SEQ ID NO: 20568 - protein, 1345 aa, unidentified
  REGION 1..1345: note = Cas Enzyme sequence
MGNKLLNVDDYYLGLDIGTESVGWAVTDKDYVIPKFKGNAMWGVHLFDEGETSVKRRGFRSARRRTQRKRERLALLEALFDEEICKKDCTFFRRLHESDLWPEDKSGDDKYAVFADENYTDKDFHKEYPTIYHLRYELIKNKEPHDVRLVFLALHHIIKNRGHFLFDSLSSAEDFNSAYETMCSYLSDNEIQLNCSDIEQFKAILKDRRQGKIEKTKNLASLFGITKKSDPVSYAVMAVLSGSTVKMCDLFGDDELKTVEKNNISFASGYEENEEIYASVLGDRFELVNILKAVYDWAVLADILDGKKYISEAKVAVYEKHKNDLKTLKKYVKTYLPEKYNEIFKISDGKKDNYVAYSGHIKESGKTGELKKTCDSENFCAYLKKTLGKNADLSYKEMFDEIENKTFMPKQVTKSNGVVPMQVNEEELKAILDNAKDYLPFLNSCDENGVSVYDKIIKIFEYRIPYYVGPLNTHTEKSWLKRKDGVKIYPWNFDDVVDIDSSAEEFINNLTSKCTYLPECDVIPKCSLLYSKFTVLNEINNLKLNGEDVPVELKQGIYNDLFMTRRKVTVKQIKDYLKARGCYDNNDVLSGIDTTVKSSLKSYFDFKDFESLTFDDKESIIASSVIFGDDKKLLKKRLKKLFSEKLTDEDIKKICKLKYTGWSRLSKEFLCDVEFTYKKTGEVMNVITALWETNYNLMQILYSEDFCCDGDEKKNLNDKLDELSYTGDQHSLRKAVDALYVSPKVKRPILRALLIAKEIEKIQERPPKKIFVEVARGIDNREERHRDSRKNRLMELYKNCKKEAEKFCPYFDAMSKKLSDEDESKLRSDKLYFYYIQLGKCMYTGEEISLGELMNGNGRFDIDHIYPQSKIKDDSLTNRVLVNRTVNADKTNVYPIDSAVQAKMSPYWQMLRSSGLISEETYKRLTRKTPLTDDELSAFVSRQLTETQQSTKAVAHILEQLYPKPKTEIVYVKAALAHAFRQSNDMLKCREVNDLHHAKDAYLNIVVGNAYNVKVTHNKVNFIKGLQNNDKGYTVNPEKFFSHDIPGAWSVKDSMNTVCRFMNKNNIRYTRFPRKKQGGLFKINPLKKGNGQVPLKASGARSCIKKYGGYDKATSAYFSYVEYTDKKGKAVRQMFPVNLYEVKEYEADMQGFVTSRIDGASNVKILIPCVKYDACISFDGCRMFITKKAGNQIGYKPGIQLVLGYKYEKYIRNITNYLTKHKDREIIPRDNISSEENIELYDVLTGKMLNTVLSVRFSGIGKKLEKRREKFVLCSPEEQCYVLNEILKILHANVLLGDLRLIGESPNAGAMLTNAKFSEIKDVHSIKLINQSVTGLFEQEIDLLK

SEQ ID NO: 20569 - protein, 1345 aa, unidentified
  REGION 1..1345: note = Cas Enzyme sequence
MGNKLRNVDDYYLGLDIGTESVGWAVTDKDYVIPKFKGNAMWGVHLFDEGETSVKRRGFRSARRRTQRKRERLALLEALFDEEICKKDCTFFRRLHESDLWPEDKSGDDKYAVFADENYTDKDFHKEYPTIYHLRYELIKNKEPHDVRLVFLALHHIIKNRGHFLFDSLSSAEDFNSAYETMCSYLSDNEIQLNCSDIEQFKAILKDRRQGKIEKTKNLASLFGITKKSDPVSYAVMAVLSGSTVKICDLFGDDELKTVEKNNISFASGYEENEEIYASVLGDRFELVNILKAVYDWAVLADILDGKKYISEAKVAVYEKHKNDLKTLKKYVKTYLPEKYNEIFKISDGKKDNYVAYSGHIKESGKTGELKKTCDSENFCAYLKKTLGKNADLSYKEMFDEIENKTFMPKQVTKSNGVVPMQVNEEELKAILDNAKDYLPFLNSCDENGVSVYDKIIKIFEYRIPYYVGPLNTHTEKSWLKRKDGVKIYPWNFDDVVDIDSSAEEFINNLTSKCTYLPECDVIPKCSLLYSKFTVLNEINNLKLNGEDIPVELKQGIYNDLFMTRRKVTVKQIKDYLKARGCYDNNDVLSGIDTTVKSSLKSYFDFKDFESLTFDDKESIIASSVIFGDDKKLLKKRLKKLFSEKLTDEDIKKICKLKYTGWSRLSKEFLCDIEFTYKKTGEVMNVITALWETNYNLMQILYSEDFCCDGDEKKNLNDKLDELSYTGDQHSLRKAVDALYVSPKVKRPILRALLIAKEIEKIQERPPKKIFVEVARGIDNREERHRDSRKSRLMELYKNCKKEAEKFCPYFDALSKKLSDEDESKLRSDKLYFYYIQLGKCMYTGEEISLGELMNGNGRFDIDHIYPRSKIKDDSLTNKVLVNKTVNNNKTNVYPIDAAIQSKMSPYWQMLRSSGLISEETYKRLTRKTPLTDDELSAFVSRQLTETQQSTKAVAHILEQLYPKPKTEIVYVKAALAHAFRQSNDMLKCREVNDLHHAKDAYLNIVVGNAYNVKVTHNKVNFIKGLQNNDKGYTVNPEKFFSHDIPGAWSVKDSMNTVRRFMNKNNIRYTRFPRKKQGGLFKINPLKKGNGQVPLKASGARSCIEKYGGYDKATSAYFSYVEYTDKKGKAVRQMFPVNLYEVKEYEADMQGFVTSRIAEASNVKILIPCVKYDACISFDGCRMFMSNKTGNQIGYKPGIQLVLGYKYEKYIRNITNYLTKHKDREIIPRDNISSEENIELYDVLTGKMLNTVLSVRFSGIGKKLEKRREKFVLCSPEEQCYVLNEILKILHANVLSGDLKLIDESGQAGVMVTNVKFSEIKGIHSIKLINQSVTGLFEQEIDLLK

SEQ ID NO: 20570 - protein, 1345 aa, unidentified
  REGION 1..1345: note = Cas Enzyme sequence
MGNKLRNVDDYYLGLDIGTESVGWAVTDKDYVIPKFKGNAMWGVHLFDEGETSVKRRGFRSARRRTQRKRERLALLEALFDEEICKKDCTFFRRLHESDLWPEDKSGDDKYAVFADENYTDKDFHKEYPTIYHLRYELIKNKEPHDVRLVFLALHHIIKNRGHFLFDSLSSAEDFNSAYETMRSYLSDNEIQLNCSDIEQFKAILKDRRQGKIEKTKNLASLFGITKKSDPVSYAVMAVLSGSTVKMCDLFGDDELKTVEKNNISFASGYEENEEIYASVLGDRFELVKILKAVYDWAVLADILDGKKYISEAKVAVYEKHKNDLKTLKKYVKTYLPEKYNEIFKISDGKKDNYVAYSGHIKEGGKTGELKKTCNSENFCAYLKKTLGSCADLSYKEMFDEIENKTFMPKQVTKSNGVVPMQVNEEELKAILDNAKDYLTFLKSCDENGVSVYDKIIKIFEYRIPYYVGPLNTHTQKSWLKRKDGVKIYPWNFDDVVDVDSSAEKFINNLTSKCTYLPECDVIPKCSLLYSKFTVLNEINNLKLNGEDIPVELKQGIYNDLFMTRRKVTVKQIKDYLKARGCYNNNDVLSGIDTTVKSSLKSYFDFKDFESLTFDDKESIIASSVIFGDDKKLLKKRLKKLFPEKLTDEDIKKICKLKYTGWSRLSKEFLCDVEFTYKKTGEVMNVITALWETNYNLMQILYSEDFCCDGDEKKNLNDKLDELSYTGDQHSLRKAVDALYVSPKVKRPILRALLIAKEIEKIQGRPPKKIFVEVARGIDNREERHRDSRKNRLMELYKNCKKEAEKFCPYFDALSKKLSDEDESKLRSDKLYFYYIQLGKCMYTGEEISLGELMNGNGRFDIDHIYPRSKIKDDSLTNKVLVNKTVNNNKTNVYPIDAAIQSKMSPYWQMLRSSGLISEETYKRLTRKTPLTDDELSAFVSRQLTETQQSTKAVAHILEQLYPKPKTEIVYVKAALVHAFRQSNDMLKCREVNDLHHAKDAYLNIVVGNAYNVKVTHNKVNFIKGLQNNDKGYTVNPEKFFSHDIPGAWSVKDSMNTVRRFMNKNNIRYTRFPRKKQGGLFKINPLKKGNGQVPLKASGARSCIEKYGGYDKATSAYFSYVEYTDKKGKVVRQMFPVNLYEVKEYEADMQGFVTSRIAEASNVNILIPCVKYDACISFDGCRMYVSNKTENRIGYKPGIQLVLGYKYEKYIRNITNYLTKHKDREIIPRDNISAEENTELYDVLTGKMLNTVLSVRFSGIGKKLEKRREKFVLCSPEEQCCVLNEILKILHANVLSGDLSLIGESPNTGTMKINAKLSEIKDVHSIKLINQSVTGLFEQEIDLLK

SEQ ID NO: 20571 - protein, 1172 aa, unidentified
  REGION 1..1172: note = Cas Enzyme sequence
VFLALHHIIKNRGHFLFDNDDLGKNGNFDFTAIFTELNEYIKSNSNYESEGFSCNDLKPVEDIIKNSSLTSSKKKEALIKEFALNKKVDVFEVAIVTLLSGATAKAKDLFNTDKYDDTEGKSICFKSGYDDKATTYESVFGENFELIEKLKAIYDWAILADILNGKEYISYAKVDTYEKHKRDLKLLKEYVKAYVPEKYSHIFNENSDKVSNYLSYSGYSSKNPVMKKCDQETFCDFLRKQLPKELLDEKYAQMYKEIETSSFMPKAVTKDNSVIPMQLNRAELEAILSNAKNYLPFLADRDSSGKTVSEKIIDIFKYRIPYYVGPLNKHSEKSWLVRTGEKIYPWNFENVVDADNSAEKFINNLTSKCTYLPKEDVIPKNSLLYSAFTVLNEINNIKIDGEEISVELKQGIYKDLFEKSNKVKVFDLKKYLASNGYMNIEITGIDTTIKGSLKPFIDLQNIDLSYSDKEEIIKSVTIFGDDKKLLKNRLKRLYGDRLTADDIKKISKLKYTGWSRLSEKLLTGIEAVLPSTGEYTNIIHALWETNDNLMQLLSSNYDFRKKIDEENGDSTFTSLREEIDNLYVSPKIKRPIYQAMQIVEEIVKIQGHDPKKIFIEVARDESEKKRTVSRKQKLIELYKYCKKDEQKLYEQLCNTDENDFRRDALYLYYTQLGKCMYTGKPIELSEIYNNNIYDIDHIFPRSKIKDDSLNNRVLVLKAENAKKGNIYPINSSIRNNMLPFWKTLFDKGLISKEKFERLVRNQPLTDEELSSFVSRQLVETRQSTKAVAQLLKKRYHDTAVEYIKASLVSDFRQENDFVKSRDVNDFHHAKDAYLNIVVGNVYTVRSHLAHFIDNVQSGKWSVNKMFDYTTNGAWIVENNKSINIVKSNMAKNNIRFTRYAFKQTGGLFDQNPLKKGLGQVPRKKDMDIDKYGGYNKPSSAYFAFVEYKNSKGEIVRSFEPVDLYAEKEYIRNPQEFIKRKLGVDYVKIIIPCVKYNALISINGFRMHISSKSSGGANLICKPAVQLVVSQEQEKYIKKISSYLAKCAELRKEKEITSFDGITEKDNADLYEALKHKTNHTIYNVKFSKLANILIDKQCEFEGLSLYEQCYILMQIINILHANVMSGDLSAIGEAKKSGVTTISNKMQPSYKTVKLINQSISGLFEQEIDLLK

SEQ ID NO: 20572 - protein, 1172 aa, unidentified
  REGION 1..1172: note = Cas Enzyme sequence
VFLALHHIIKNRGHFLFDNDDLGKNGNFDFTAIFTELNEYIKSNSNYESEGFSCNDLKPVEDIIKNSSLTSSKKKEALIKEFALNKKVDVFEVAIVTLLSGATAKAKDLFNTDKYDDTEGKSICFKSGYDDKATTYESVFGENFELIEKLKAIYDWAILADILNGKEYISYAKVDTYEKHKRDLKLLKEYVKAYVPEKYSHIFNENSDKVSNYLSYSGYSSKNPVMKKCDQETFCDFLRKQLPKELLDEKYAQMYKEIETSSFMPKAVTKDNSVIPMQLNRAELEAILSNAKNYLPFLADRDSSGKTVSEKIIDIFKYRIPYYVGPLNKHSEKSWLVRTGEKIYPWNFENVVDADNSAEKFINNLTSKCTYLPKEDVIPKNSLLYSAFTVLNEINNIKIDGEEISVELKQGIYKDLFEKSNKVKVLDLKKYLASNGYMNIEITGIDTTIKGSLKPFIDLQNIDLSYSDKEEIIKSVTIFGDDKKLLKNRLKRLYGDRLTADDIKKISKLKYTGWSRLSEKLLTGIEAVLPSTGEYTNIIHALWETNDNLMQLLSSNYDFRKKIDEENGDSTFTSLREEIDNLYVSPKIKRPIYQAMQIVEEIVKIQGHDPKKIFIEVARDESEKKRTVSRKQKLIELYKYCKKDEQKLYEQLCNTDENDFRRDALYLYYTQLGKCMYTGKPIELSEIYNNNIYDIDHIFPRSKIKDDSLNNRVLVLKAENAKKGNIYPINSSIRNNMLPFWKTLFDKGLISKEKFERLVRNQPLTDEELSSFVSRQLVETRQSTKAVAQLLKKRYHDTAVEYIKASLVSDFRQENDFVKSRDVNDFHHAKDAYLNIVVGNVYTVRSHLAHFIDNVQSGKWSVNKMFDYTTNGAWIVENNKSINIVKSNMAKNNIRFTRYAFKQTGGLFDQNPLKKGLGQVPRKKDMDIDKYGGYNKPSSAYFAFVEYKNSKGEIVRSFEPVDLYAEKEYIRNPQEFIKRKLGVDYVKIIIPCVKYNALISINGFRMHISSKSSGGANLICKPAVQLVVSQEQEKYIKKISSYLAKCAELRKEKEITSFDGITEKDNADLYEALKHKTNHTIYNVKFSKLANILIDKQCEFEGLSLYEQCYILMQIINILHANVMSGDLSAIGEAKKSGVTTISNKMQPSYKTVKLINQSISGLFEQEIDLLK

SEQ ID NO: 20573 - protein, 1320 aa, unidentified
  REGION 1..1320: note = Cas Enzyme sequence
LSRGNIMENYYLGLDLGTDSIGWAVTDKNYNIPKFKGNSMWGIRLLEGGNTAVERREFRSSRRRLERNKYRLNCLEMLFNEEISKKDIAFFQRLKDSALYDGDKNVSGKYSLFNDPDYTDKDYYKKYPTIYHLRKELIESVEPHDVRLVFLALHHIIKNRGHFLFDNDDLGKNGNLDFTAIFTELNEYIKSNSNYESEGFSCNDLKPVEDIIKNSSLTSSKKKEALIKEFALNKKVDVFEVAIVTLLSGATAKAKDLFNTDKYDDTEGKSICFKSGYDDKATTYESVFGENFELIEKLKAIYDWAILADILNGKEYISYAKVDTYEKHKRDLKLLKEYVKAYVPEKYSHIFNENSDKVSNYLSYSGYSSKNPVMKKCDQETFCDFLRKQLPKELLDEKYAQMYKEIETSSFMPKAVTKDNSVIPMQLNRAELEAILSNAKNYLPFLADRDSSGKTVSEKIIDIFKYRIPYYVGPLNKHSEKSWLVRTGEKIYPWNFENVVDADNSAEKFINNLTSKCTYLPKEDVIPKNSLLYSAFTVLNEINNIKIDGEEISVELKQGIYKDLFEKSNKVKVFDLKKYLASNGYMNIEITGIDTTIKGSLKPFIDLQNIDLSYSDKEEIIKSVTIFGDDKKLLKNRLKRLYGDRLTADDIKKISKLKYTGWSRLSEKLLTGIEAILPSTGEYTNIINALWETNDNLMQLLSSNYDFRKKIDEENGDSTFTSLRKEIDNLYVSPKIKRPIYQAMQIVEEIVKIQGHDPKKIFIEVARDEGEKKRTVSRKQKLIELYKYCKKGEQKLYEQLCNTDENDFRRDALYLYYTQLGKCMYTGKPIELSEIYNNNIYDIDHIFPRSKIKDDSLNNRVLVLKAENAKKGNIYPINSSIRNNMLPFWKTLFDKGLISKEKFERLVRNQPLTDEELSSFVSRQLVETRQSTKAVAQLLKKRYHDTAVEYIKASLVSDFRQENDFVKSRDVNDFHHAKDAYLNIVVGNVYTVRSHLAHFIDNVQSGKWSVNKMFDYTTNGAWIVENNKSINIVKSNMAKNNIRFTRYAFKQTGGLFDQNPLKKGLGQVPRKKDMDIDKYGGYNKPSSAYFAFVEYKNSKGEIVRSFEPVDLYAEKEYIRNPQEFIKRKLGVDYVKIIIPCVKYNALISINGFRMHISSKSSGGANLICKPAVQLVVSQEQEKYIKKISSYLAKCAELRKEKEITSFDGITEKDNADLYEALKHKTNHTIYNVKFSKLANILIDKQCEFEGLSLYEQCYILMQIINILHANVMSGDLSAIGEAKKSGVTTISNKMQPSYKTVKLINQSISGLFEQEIDLLK

SEQ ID NO: 20574 - protein, 1314 aa, unidentified
  REGION 1..1314: note = Cas Enzyme sequence
MENYYLGLDLGTDSIGWAVTDKNYNIPKFKGNSMWGIRLLEGGNTAVERREFRSSRRRLERNKYRLNCLEMLFNEEISKKDIAFFQRLKDSALYDGDKNVSGKYSLFNDPDYTDKDYYKKYPTIYHLRKELIESVEPHDVRLVFLALHHIIKNRGHFLFDNDDLGKNGNFDFTAIFTELNEYIKSNSNYESEGFSCNDLKSVEDIIKNSSLTSNKKKEALIKEFALNKKVDVFEVAIVTLLSGATAKAKDLFNTDKYDDTEGKSICFKSGYDDKATTYESVFGENFELIEKLKAIYDWAILADILNGKEYIFYAKVDTYEKHKRDLKLLKEYVKAYVPEKYSHIFNENSDKVSNYLSYSGYSSKNPVMKKCDQETFCDFLRKQLPKELLDEKYAQMYKEIETSSFMPKAVTKDNSVIPMQLNRAELEAILSNAKNYLPFLADRDSSGKTVSEKIIDIFKYRIPYYVGPLNKHSEKSWLVRTGEKIYPWNFENVVDADNSAEKFINNLTSKCTYLPKEDVIPKNSLLYSAFTVLNEINNIKIDGEEISVELKQGIYKDLFEKSNKVKVFDLKKYLALNGYMNIEITGIDTTIKGSLKPFIDLQNIDLSYSDKEEIIKSVTIFGDDKKLLKNRLKRLYGDRLTADDIKKISKLKYTGWSRLSEKFLTGIEAVLPSTGEYTNIIHALWETNDNLMQLLSSNYDFRKKIDEENGDSTFTSLRKEIDNLYVSPKIKRPIYQAMQIVEEIVKIQGHDPKKIFIEVARDEGEKKRTVSRKQKLIELYKYCKKDEQKLYEQLCNTDENDFRRDALYLYYTQLGKCMYTGKPIELSEIYNNNIYDIDHIFPRSKIKDDSLNNRVLVLKAENAKKGNIYPINSSIRNNMLPFWKTLFDKGLISKEKFERLVRNQPLTDEELSSFVSRQLVETRQSTKAVAQLLKKRYHDTAVEYIKASLVSDFRQENDFVKSRDVNDFHHAKDAYLNIVVGNVYTVRSHLAHFIDNVQSGKWSVNKMFDYTTNGAWIVENNKSINIVKSNMAKNNIRFTRYAFKQTGGLFDQNPLKKGLGQVPRKKDMDIDKYGGYNKPSSAYFAFVEYKNSKGEIVRSFEPVDLYAEKEYIRNPQEFIKRKLGVDYVKIIIPCVKYNALISINGFRMHISSKSSGGANLICKPAVQLVVSQEQEKYIKKISSYLAKCAELRKEKEITSFDGITEKDNADLYEALKHKTNHTIYNVKFSKLANILIDKQCEFEGLSLYEQCYILMQIINILHANVMSGDLSAIGEAKKSGVTTISNKMQPSYKTVKLINQSISGLFEQEIDLLK

SEQ ID NO: 20575 - protein, 1314 aa, unidentified
  REGION 1..1314: note = Cas Enzyme sequence
MENYYLGLDLGTDSIGWAVTDKNYNIPKFKGNSMWGIRLLEGGNTAVERREFRSSRRRLERNKYRLNCLEMLFNEEISKKDIAFFQRLKDSALYDGDKNVSGKYSLFNDPDYTDKDYYKKYPTIYHLRKELIESVEPHDVRLVFLALHHIIKNRGHFLFDNDDLGKNGNFDFTAIFTELNEYIKSNSNYESEGFSCNDLKPVEDIIKNSSLTSSKKKEALIKEFALNKKVDVFEVAIVTLLSGATAKAKDLFNTDKYDDTEGKSICFKSGYDDKATTYESVFGENFELIEKLKAIYDWAILADILNGKEYISYAKVDTYEKHKRDLKLLKEYVKAYVPEKYSHIFNENSDKVSNYLSYSGYSSKNPVMKKCDQETFCDFLRKQLPKELLDEKYAQMYKEIETSSFMPKAVTKDNSVIPMQLNRAELEAILSNAKNYLPFLADRDSSGKTVSEKIIDIFKYRIPYYVGPLNKHSEKSWLVRTGEKIYPWNFENVVDADNSAEKFINNLTSKCTYLPKEDVIPKNSLLYSAFTVLNEINNIKIDGEEISVELKQGIYKDLFEKSNKVKVFDLKKYLASNGYMNIEITGIDTTIKGSLKPFIDLQNIDLSYSDKEEIIKSVTIFGDDKKLLKNRLKRLYGDRLTADDIKKISKLKYTGWSRLSEKLLTGIETVLPSTGEYTNIIHALWETNDNLMQLLSSNYDFRKKIDEENGDSTFTSLREEIDNLYVSPKIKRPIYQAMQIVEEIVKIQGHDPKKIFIEVARDEGEKKRTVSRKQKLIELYKYCKKDEQKLYEQLCNTDENDFRRDALYLYYTQLGKCMYTGKPIELSEIYNNNIYDIDHIFPRSKIKDDSLNNRVLVLKAENAKKGNIYPINSSIRNNMLPFWKTLFDKGLISKEKFERLVRNQPLTDEELSSFVSRQLVETRQSTKAVAQLLKKRYHNTAVEYIKASLVSDFRQENDFVKSRDVNDFHHAKDAYLNIVVGNVYTVRSHLAHFIDNVQSGKWSVNKMFDYTTNGAWIVENNKSINIVKSNMAKNNIRFTRYAFKQTGGLFDQNPLKKGLGQVPRKKDMDIDKYGGYNKPSSAYFAFVEYKNSKGEIVRSFEPVDLYAEKKYIRNPQEFIKRKLGVDYVKIIIPCVKYNALISINGFRMHISSKSSGGANLICKPAVQLVVSQEQEKYIKKISSYLAKCAELRKEKEITSFDGITEKDNADLYEALKHKTNHTIYNVKFSKLANILIDKQCEFEGLSLYEQCYILMQIINILHANVMSGDLSAIGEAKKSGVTTISNKMQPSYKTVKLINQSISGLFEQEIDLLK

SEQ ID NO: 20576 - protein, 1314 aa, unidentified
  REGION 1..1314: note = Cas Enzyme sequence
MENYYLGLDLGTDSIGWAVTDKNYNIPKFKGNSMWGIRLLEGGNTAVERREFRSSRRRLERNKYRLNCLEMLFNEEISKKDIAFFQRLKDSALYDGDKNVSGKYSLFNDPDYTDKDYYKKYPTIYHLRKELIESVEPHDVRLVFLALHHIIKNRGHFLFDNDDLGKNGNFDFTAIFTELNEYIKSNSNYESEGFSCNDLKPVEDIIKNSSLTSSKKKEALIKEFALNKKVDVFEVAIVTLLSGATAKAKDLFNTDKYDDTEGKSICFKSGYDDKATTYESVFGENFELIEKLKAIYDWAILADILNGKEYISYAKVDTYEKHKRDLKLLKEYVKAYVPEKYSHIFNENSDKVSNYLSYSGYSSKNPVMKKCDQETFCDFLRKQLPKELLDEKYAQMYKEIETSSFMPKAVTKDNSVIPMQLNRAELEAILSNAKNYLPFLADRDSSGKTVSEKIIDIFKYRIPYYVGPLNKHSEKSWLVRTGEKIYPWNFENVVDADNSAEKFINNLTSKCTYLPKEDVIPKNSLLYSAFTVLNEINNIKIDGEEISVELKQGIYKDLFEKSNKVKVFDLKKYLASNGYMNIEITGIDTTIKGSLKPFIDLQNIDLSYSDKEEIIKSVTIFGDDKKLLKNRLKRLYGDRLTADDIKKISKLKYTGWSRLSEKFLTGIEAVLPSTGEYTNIIHALWETNDNLMQLLSSNYDFRKKIDEENGDSTFTSLRKEIDNLYVSPKIKRPIYQAMQIVEEIVKIQGHDPKKIFIEVARDEGEKKRTVSRKQKLIELYKYCKKDEQKLYEQLCNTDENDFRRDALYLYYTQLGKCMYTGKPIELSEIYNNNIYDIDHIFPRSKIKDDSLNNRVLVLKAENAKKGNIYPINSSIRNNMLPFWKTLFDKGLISKEKFERLVRNQPLTDEELSSFVSRQLVETRQSTKAVAQLLKKRYHDTAVEYIKASLVSDFRQENDFVKSRDVNDFHHAKDAYLNIVVGNVYTVRSHLAHFIDNVQSGKWSVNKMFDYTTNGAWIVENNKSINIVKSNMAKNNIRFTRYAFKQTGGLFDQNPLKKGLGQVPRKKDMDIDKYGGYNKPSSAYFAFVEYKNSKGEFVRSFEPVDLYAEKEYIRNPQEFIKRKLGVDYVKIIIPCVKYNALISINGFRMHISSKSSGGANLICKPAVQLVVSQEQEKYIKKISSYLAKCAELRKEKEITSFDGITEKDNADLYEALKHKTNHTIYNVKFSKLANILIDKQCEFEGLSLYEQCYILMQIINILHANVMSGDLSAIGEAKKSGVTTISNKMQPSYKTVKLINQSISGLFEQEIDLLK

SEQ ID NO: 20577 - protein, 1172 aa, unidentified
  REGION 1..1172: note = Cas Enzyme sequence
VFLALHHIIKNRGHFLFDNDDLGKNGNFDFTAIFTELNEYIKSNSNYESEGFSCNDLKPVEDIIKNSSLTSSKKKEALIKEFALNKKVDVFEVAIVTLLSGATAKAKDLFNTDKYDDTEGKSICFKSGYDDKATTYESVFGENFELIEKLKAIYDWAILADILNGKEYISYAKVDTYEKHKRDLKLLKEYVKAYVPEKYSHIFNENSDKVSNYLSYSGYSSKNPVMKKCDQETFCDFLRKQLPKELLDEKYAQMYKEIETSSFMPKAVTKDNSVIPMQLNRAELEAILSNAKNYLPFLADRDSSGKTVSEKIIDIFKYRIPYYVGPLNKHSEKSWLVRTGEKIYPWNFENVVDADNSAEKFINNLTSKCTYLPKEDVIPKNSLLYSAFTVLNEINNIKIDGEEISVELKQGIYKDLFEKSNKVKVFDLKKYLASNGYMNIEITGIDTTIKGSLKPFIDLQNIDLSYSDKEEIIKSVTIFGDDKKLLKNRLKRLYGDRLTADDIKKISKLKYTGWSRLSEKLLTGIEAVLPSTGEYTNIIHALWETNDNLMQLLSSNYDFRKKIDEENGDSTFTSLRKEIDNLYVSPKIKRPIYQAMQIVEEIVKIQGHDPKKIFIEVARDEGEKKRTVSRKQKLIELYKYCKKDEQKLYEQLCNTDENDFRRDALYLYYTQLGKCMYTGKPIELSEIYNNNIYDIDHVFPRSKIKDDSLNNRVLVLKAENAKKGNIYPINSSIRNNMLPFWKTLFDKGLISKEKFERLVRNQPLTDEELSSFVSRQLVETRQSTKAVAQLLKKRYHDTAVEYIKASLVSDFRQENDFVKSRDVNDFHHAKDAYLNIVVGNVYTVRSHLAHFIDNVQSGKWSVNKMFDYTTNGAWIVENNKSINIVKSNMAKNNIRFTRYAFKQTGGLFDQNPLKKGLGQVPRKKDMDIDKYGGYNKPSSAYFAFVEYKNSKGEIVRSFEPVDLYAEKEYIRNPQEFIKRKLGVDYVKIIIPCVKYNALISINGFRMHISSKSSGGANLICKPAVQLVVSQEQEKYVKKISSYLAKCAELRKEKEITSFDGITEKDNADLYETLKYKTNHTIYNVKFSKLANILIDKQCEFEGLSLYEQCYILMQIINILHANVMSGDLSAIGEAKKSGVTTISNKMQPSYKTVKLINQSISGLFEQEIDLLK

SEQ ID NO: 20578 - protein, 1324 aa, unidentified
  REGION 1..1324: note = Cas Enzyme sequence
MKDYYVGFDIGTESVGWAVSDFYYNLCKFHGKSMWGYELFDECNTAVDRRTFRNSRKRIDRKKQRIAWLQMLFNEEISKVDIAFFQRLKESNLYLEDKSTNVPYAVFADKNYTDVDYHNAYPTIYHLRKDLIEREDPHDIRLVYLALHHLIKNRGHFLFDNLNSDYDSDSSFDFLYDDLVTYLSEEMGIVLECSDSSNVADVLKDKSKSRSVKKKELSNYFQITKKNNPQEVEIITLLCGLKGTLSTIFSDKTLDDAEKNKIVFDNSFDENEDDYIAILQDRYELIEKVKAIYDWAVLADILNGESYISFAKVKTYEEHKNDLRMLKDYVKERCFDKYDEIFRVSSDIPNYTSYSGKYKENGKTGVLARKNKATQEEFCSYLLKSFKNLDHSGYEDMFLKIENNTFMPKIVVKDNGVIPMQVNEKEVKMILNNASKYLPFLSEKDCDGISVSDKILKIFQFRIPYYVGPLNTHSDNSWLIRGKEKIYPWNFDKVVDVEKSAEAFITNLTSKCTYLFDRDVIPKNSILYSKFMVLNELNNLRLDGKKPDVQFKQDIFNDLFMHHKKVTRKSLVNYIKSKTGETPDITGIDGDFKTSMRSAIELSSYDLALEEKEMIISSINIFGDDKKLLKKRLKKNFADKLSDDDIKKISKLKYKDWGRFSKDLLTEIYDFDENTGEVKDNIINSLWNTNDNFMELLGSKYNFQKSIENANREIQNSTSIRKMVEALYVSPKIKRPIYQSLLIMKEIEKIQKSQPKKIFVEMTRSDGVKGDKGRKHSRKKRLEELYKNCKEDSGELWESLEKTPDNEFQQDKLYLYYTQFGKCMYTGESIDISDLFNQNIYDIDHIFPRSKVKDDSLDNRVLVKRTVNSHKDNDYPLDKSIRDKMKSFWYVLYSKELISKKKFERLTRSTSLTDSELSDFIARQLVETSQSTKAVADILKILYPNTEIVYVKARYASEFRKKYDMLKCRTVNDMHHAKDAYLNIVVGNVYNERFTHNRINFIKGLQTKKYSMNKMFSYDVKNAWIAEDNYSLNIVKKTMNKNNPIYRRYSFVQHGALFKVLPLKKGKGQAPLKENSPLSNINKYGGYDKPTSSYFSYVEFEGKKGKKSRQFVPIDSYLRKEYEGNPIQYLTERLGLVNPKILIPIVKYNACIEIDGFRMNISSKSNGGKTIVYKSAMLLVLGYQGELYVRNITKLLESPEDHTITEFDGVSFDENIDLFDSLVNKMCNTILKVKYSDMGKKINQKRDVFLSLDLRTQCFVLNEILKILHCNVLMGDLSKIGLAKKSGALTSNSVLTEIKNVKSIYLVNQSVTGLFEKKIDLLNM

SEQ ID NO: 20579 - protein, 1324 aa, unidentified
  REGION 1..1324: note = Cas Enzyme sequence
MKDYYVGFDIGTESVGWAVSDFYYNLCKFHGKSMWGYELFDECNTAVDRRTFRNSRKRIDRKKQRIAWLQLLFNEEISKVDIAFFQRLKESNLYLEDKSTNVPYAVFADKNYTDVDYHNAYPTIYHLRKDLIEREDPHDIRLVYLALHHLIKNRGHFLFDNLNSDYDSDSSFDFLYDDLVTYLSEEMGIVLECSDSSNVADVLKDKSKSRSVKKKELSNYFQITKKNNPQEVEIITLLCGLKGTLSTIFSDKTLDDAEKNKIVFDNSFDENEDDYIAILQDRYELIEKVKAIYDWAVLADILNGESYISFAKVKTYEEHKNDLRMLKDYVKERCFDKYDEIFRVSSDIPNYTSYSGKYKENGKTGVLARKNKATQEEFCSYLLKSFKNLDHSGYEDMFLKIENNTFMPKIVVKDNGVIPMQVNEKEVKMILNNASKYLPFLSEKDCDGISVSDKILKIFQFRIPYYVGPLNTHSDNSWLIRGKEKIYPWNFDKVVDVEKSAEAFITNLTSKCTYLFDRDVIPKNSILYSKFMVLNELNNLRLDGEKPDVQFKQDIFNDLFMHHKKVTRKSLVNYIKSKTGETPDITGIDGDFKTSMRSAIELSSYDLALEEKEMIISSITIFGDDKKLLKKRLKKNFADKLSDDDIKKISKLKYKDWGRFSKDLLTEIYDFDENTGEVKDNIINSLWNTNDNFMELLGSKYNFQKSIENANRGIQNSTSIRKMVEALYVSPKIKRPIYQSLLIMKEIEKIQKNQPKKIFVEMTRSDGVKGDKGRKHSRKKCLEKLYKNCKEDSGELWESLEKTPDNEFQQDKLYLYYTQFGKCMYTGESIDISDLFNQNIYDIDHIFPRSKVKDDSLDNRVLVKRTVNSHKDNDYPLDKSIRDKMKSFWYVLYSKELISKKKFERLTRSTSLTDSELSDFIARQLVETSQSTKAVADILKILYPNTEIVYVKARYASEFRKKYDMLKCRTVNDMHHAKDAYLNIVVGNVYNERFTHNRINFIKGLQTKKYSMNKMFSYDVKNAWIAEDNYSLNIVKKTMNKNNPIYRRYSFVQHGALFKVLPLKKGKGQAPLKENSPLSNINKYGGYDKPTSSYFSYVEFEGKKGKKSRQFVPIDSYLRKEYEGNPIQYLTERLGLVNPKILIPIVKYNACIEIDGFRMNISSKSNGGKTIVYKSAMLLVLGYQGELYVRNITKLLESPEDHTITEFDGVSFDENIDLFDSLVNKMCNTILKVKYSDMGKKINQKRDVFLSLDLRTQCFVLNEILKILHCNVLMGDLSKIGLAKKSGALTSNSVLTEIKNVKSIYLVNQSVTGLFEKKIDLLNM

SEQ ID NO: 20580 - protein, 1324 aa, unidentified
  REGION 1..1324: note = Cas Enzyme sequence
MKDYYVGFDIGTESVGWAVSDFYYNLCKFHGKSMWGYELFDECNTAVDRRTFRNSRKRIDRKKQRIAWLQLLFNEEISKVDIAFFQRLKESNLYLEDKSTNVPYAVFADKNYTDVDYHNAYPTIYHLRKDLIEREDPHDIRLVYLALHHLIKNRGHFLFDNLNSDYDSDSSFDFLYDDLVTYLSEEMGIVLECSDSSNVADVLKDKSKSRSVKKKELSNYFQITKKNNPQEVEIITLLCGLKGTLSTIFSDKTLDDAEKNKIVFDNSFDENEDDYIAILQDRYELIEKVKAIYDWAVLADILNGESYISFAKVKTYEEHKNDLRMLKDYVKERCFDKYDEIFRVSSDIPNYTSYSGKYKENGKTGVLARKNKATQEEFCSYLLKSFKNLDHSGYEDMFLKIENNTFMPKIVVKDNGVIPMQVNEKEVKMILNNASKYLPFLSEKDCDGISVSDKILKIFQFRIPYYVGPLNTHSDNSWLIRGKEKIYPWNFDKVVDVEKSAEAFITNLTSKCTYLFDRDVIPKNSILYSKFMVLNELNNLRLDGEKPDVQFKQDIFNDLFMHHKKVTRKSLVNYIKSKTGETPDITGIDGDFKTSMRSAIELSSYDLALEEKEMIISSITIFGDDKKLLKKRLKKNFADKLSDDDIKKISKLKYKDWGRFSKDLLTEIYDFDENTGEVKDNIINSLWNTNDNFMELLGSKYNFQKSIENANREIQNSTSIRKMVEALYVSPKIKRPIYQSLLIMKEIEKIQKSQPKKIFVEMTRSDGVKGDKGRKHSRKKRLEELYKNCKEDSGELWESLEKTPDNEFQQDKLYLYYTQFGKCMYTGESIDISDLFNQNIYDIDHIFPRSKVKDDSLDNRVLVKRTVNSHKDNDYPLDKSIRDKMKSFWYVLYSKELISKKKFEKLTRSTSLTDSELSDFIARQLVETSQSTKAVADILKILYPNTEIVYVKARYASEFRKKYDMLKCRTVNDMHHAKDAYLNIVVGNVYNERFTHNRINFIKGLQTKKYSMNKMFSYDVKNAWIAEDNYSLNIVKKTMNKNNPIYRRYSFVQHGALFKVLPLKKSKGQAPLKGNSPLSNINKYGGYDKPTSSYFSYVEFEGKKGKKSRQLVPIDSYLRKEYEGNPIQYLTERLGLVNPKILIPVVKYNACIEIDGFRMNISSKSNGGKTIVYKSAMLLVLGYKGELYVRNITKLLESPEDHTITEFDGVSFDENIDLFDSLVNKMCNTILKVKYSDMGKKINQKRDVFLSLDLRTQCFVLNEILKILHCNVLMGDLSKIGLAKKSGALTSNSVLTEIKNVKSIYLVNQSVTGLFEKKIDLLNM

SEQ ID NO: 20581 - protein, 1352 aa, unidentified
  REGION 1..1352: note = Cas Enzyme sequence
MNKKYYLGLDIGTNSVGWAVTDENYNLYKYAGKRMWGIRLFEAADTAAERRMKRSNRRRLSRKKQRIDLLQELFSKEIAKKDPTFFIRLNESGLHLEDKSTGEKYPLFVDKEYTDIDYHKEYPTMYHLRKELIENPEPHDIRLVYLACHHILKNRGHFLINGSISDVKNLSFVCGEMIKEFNSVSEYEISLTDIRELERILSDKKTAKSVKAKQVAQLFECIPAEDKEQQKCAKAIITNLSKLIVGLKGDISKMFHQPLEEISTKSFKFTEAKYEDEIMPAIEENYPDYASVIDRIKGVYDWSVLVEILDGEDYLSFAKVKAYEKHGKNLHILKNIMKKYCKDEVYQAFFNGINEKNGYGNYIGAIRKNGHTYKMDQCKSEEDFYKGLQKILSTIVPDQEDEELLEKLKAEVENQTLLPLARSKENGTIPNQVHLQELMKILDNAKEYLDFLKKEDEYGTIAEKIISIAKFRIPYYVGPLSRRHKEEGSNSWMIRKEEGRIYPWNFGDKVDVEQSNKEFIERMTNKCTYLIGEDVLPKNSLLYSKYMVLNELNNLKIRGNKISVELKQRIYKDLFCTMAKVTGKRILEYLKMEDPEIVQEDISGFDIDFKSALTSYLDFKKQVVGNEIEKDHYKEIIEEIIKWKTIYDDDSKMMRRMIEREYPEVFDKEQIKKICQLKYSGWGNFSDRFLNGVRGADKETGESYTIIEALWKTNYNLMQLLSKQFSFKEEIDQINAEKAGDVGKINYENTVKDLIVSPSNKRAIWQTIQIAEEIKKVMKCEPERIFIEMARGGEKEKKRTVSRKTRLQELYAGCKDDTRNWMKEIGDREEREFNSRKLYLYYTQMGKCMYTGDEIDVDALMKGNSNWDIDHIYPQSRIKDDSLDNMVLVRKDVNNKKRNKILSPKIREDMKGYWTMLCQKGLISKRKYDRLTRTTDFTDEELSGFIERQLVETRQSSKAVAELLNRLYKDSEVVYVKAGLVSDFRHDNDLLKSRRVNDYHHAKDAFLNIVVGNVYHARFTSNPRKWIKDNRDSNYSIRRVFNYDVKQGDKIVWHGSENGGHSIDQIKKIMSRNDILYTEYTYCEKGQLFNETLAKKGNEKAIALKKNLDPVKYGGYTTPKTSAFAFVEFDGKKKERKNHIVEIPVYVVNIAKREPDAVKKYLEERKGYSNVVIKKYPIKKNSLIKMDGYLARLRGANEKDIILKNAVQLILNKDLYEIVRKIEKYLEYNSQYQADAKFEGFTMKDLNMIYEELYLKLKESIFQKRPAQQMKTLEKGKEAFISIENLGEKAKVINEIIAMFRCDATTVANLKVINGSQNAGSMKVNKNTLTSKSLKLVHQSITGLFETEEELV

SEQ ID NO: 20582 - protein, 1397 aa, unidentified
  REGION 1..1397: note = Cas Enzyme sequence
MWNPKKGDYENSLFEPCSVISYGNQLRYFYYKKIDFFCQEWRGTKMNKKYYLGLDIGTNSVGWAVTDENYNLYKYAGKRMWGIRLFEAADTAAERRMKRSNRRRLSRKKQRIDLLQELFSKEIAKKDPTFFIRLNESGLHLEDKSTGEKYPLFVDKEYTDIDYHKEYPTMYHLRKELIENPEPHDIRLVYLACHHILKNRGHFLINGSISDVKNLSFVCGEMIKEFNSVSEYEISLTDIRELERILSDKKTAKSVKAKQVAQLFECIPAEDKEQQKCAKAIITNLSKLIVGLKGDISKMFHQPLEEISTKSFKFTEAKYEDEIMPAIEENYPDYASVIDRIKGVYDWSVLVEILDGEDYLSFAKVKAYEKHGKNLHILKNIMKKYCKDEVYQAFFNGINEKNGYGNYIGAIRKNGHTYKMDQCKSEEDFYKGLQKILSTIVPDQEDEELLEKLKAEVENQTLLPLARSKENGTIPNQVHLQELMKILDNAKEYLDFLKKEDEYGTIAEKIISIAKFRIPYYVGPLSRRHKEEGSNSWMIRKEEGRIYPWNFGDKVDVEQSNKEFIERMTNKCTYLIGEDVLPKNSLLYSKYMVLNELNNLKIRGNKISVELKQRIYKDLFCTMAKVTGKRILEYLKMEDPEIVQEDISGFDIDFKSALTSYLDFKKQVVGNEIEKDHYKEIIEEIIKWKTIYDDDSKMMRRMIEREYPEVFDKEQIKKICQLKYSGWGNFSDRFLNGVRGADKETGESYTIIEALWKTNYNLMQLLSKQFSFKEEIDQINAEKAGDVGKINYENTVKDLIVSPSNKRAIWQTIQIAEEIKKVMKCEPERIFIEMARGGEKEKKRTVSRKTRLQELYAGCKDDTRNWMKEIGDREEREFNSRKLYLYYTQMGKCMYTGDEIDVDALMKGNSNWDIDHIYPQSRIKDDSLDNMVLVRKDVNNKKRNKILSPKIREDMKGYWTMLCQKGLISKRKYDRLTRTTDFTDEELSGFIERQLVETRQSSKAVAELLNRLYKDSEVVYVKAGLVSDFRHDNDLLKSRRVNDYHHAKDAFLNIVVGNVYHARFTSNPRKWIKDNRDSNYSIRRVFNYDVKQGDKIVWHGSENGGHSIDQIKKIMSRNDILYTEYTYCEKGQLFNETLAKKGNEKAIALKKNLDPVKYGGYTTPKTSAFAFVEFDGKKKERKNHIVEIPVYVVNIAKREPDAVKKYLEERKGYSNVVIKKYPIKKNSLIKMDGYLARLRGANEKDIILKNAVQLILNKDLYEIVRKIEKYLEYNSQYQADAKFEGFTMKDLNMIYEELYLKLKESIFQKRPAQQMKTLEKGKEAFISIENLGEKAKVINEIIAMFRCDATTVANLKVINGSQNAGSMKVNKNTLTSKSLKLVHQSITGLFETEEELV

SEQ ID NO: 20583 - protein, 978 aa, unidentified
  REGION 1..978: note = Cas Enzyme sequence
MDRCKSEEDFYKGLQKTLSMIVPDQEDEELLEKLKTEVENQTLLPLARSKENGTIPNQVHLQELMKILDNAKGYLDFLKKEDEYGTIAEKIISIAKFRIPYYVGPLSRRHKGEGSNSWMIRKEEGRIYPWNFGDKVDVEQSNKEFIERMTNKCTYLIGEDVLPKNSLLYSKYMVLNELNNLKIRGNKISVELKQRIYKDLFCTMAKVTGKRILEYLKMEDPEIVQEDISGFDIDFKSALTSYLDFKKQVVGNEIEKDHYKEIIEEIIKWKTIYDDDSKMMRRMIEREYPEVFDKEQIKKICQLKYSGWGNFSDRFLNGVRGADKETGESYTIIEALWKTNYNLMQLLSKQFSFKEEIDQINAEKAGDVGKINYKNTVKDLIVSPSNKRAIWQTIQIAEEIKKVMKCEPERIFIEMARGGEKEKKRTVSRKTRLQELYAGCKDDTRNWMKEIGDREEREFNSRKLYLYYTQMGKCMYTGDEIDVDALMKGNSNWDIDHIYPQSRIKDDSLDNMVLVRKDVNNKKRNKILSPKIREDMKQYWKMLYQKELISKKKYDRLTRTTDFTDEELSGFIERQLVETRQSSKAVAELLQRLYKDSEVVYVKAGLVSDFRHDNDLLKSRRVNDYHHAKDAFLNIVVGNVYHARFTSNPRKWIKDNRDSNYSIRRVFNYDVKQGDKIVWHGSENGGHSIDHIKKTMSRNDILYTEYTYCEKGQLFNETLAKKGNEKAIALKKNLDPVKYGGYTTPKTSAFAFIEFDGKKKERKNHIVGIPVYVVNIAKREPDAVKKYLEERKGYSNVVIKKYPIKKNSLIKMDGYLARLRGANETDIILKNAVQLILNKDLYEIVRKIEKYLEYNSQYQADAKFEGFTMKDLNMIYEELYLKLKESIFQKRPAQQMKTLEKGKEAFISIDNLGEKAKVINEIITMFRCDATTVANLKAINGSQNAGSMKVKKNTLTSKSLKVVHQSITGLFETEEELV

SEQ ID NO: 20584 - protein, 1140 aa, unidentified
  REGION 1..1140: note = Cas Enzyme sequence
  REGION 1132..1135: note = misc_feature - Xaa can be any naturally occurring amino acid
DYHKEYPTMYHLRKELIENPEPHDIRLVYLACHHILKNRGHFLINGSISDVKNLSFVCGEMIKEFNSVSEYEISLTDIRELERILSDKKTAKSVKAKQVAQLFECTPAEDKEQQKCAKAIITNLSKLIVGLKGDISKMFHQPLEEISTKSFKFTEAKYEDEIMPAIEENYPDYASVIDRIKGVYDWSVLVEILDGEDYLSFAKVKAYEKHGKNLHILKNIMKKYCKDEVYQAFFNGINEKNGYGNYIGAIRKNGHTYKMDRCKSEEDFYKGLQKILSTIVPDQEDEELLEKLKAEVENQTLLPLARSKENGTIPNQVHLQELMKILDNAKEYLDFLKKEDEYGTIAEKIISIAKFRIPYYVGPLSRRHKEEGSNSWMIRKEEGRIYPWNFGDKVDVEQSNKEFIERMTNKCTYLIGEDVLPKNSLLYSKYMVLNELNNLKIRGNKISVELKQRIYKDLFCTMAKVTGKRILEYLKMEDPEIVQEDISGFDIDFKSALTSYLDFKKQVVGNEIEKDHYKEIIEEIIKWKTIYDDDSKMMRRMIEREYPEVFDKEQIKKICQLKYSGWGNFSDRFLNGVRGADKETGESYTIIEALWKTNYNLMQLLSKQFSFKEEIDQINAEKAGDVGKINYENTVKDLIVSPSNKRAIWQTIQIAEEIKKVMKCEPERIFIEMARGGEKEKKRTVSRKTRLQELYAGCKDDTRNWMKEIGDREEREFNSRKLYLYYTQMGKCMYTGDEIDVDALMKGNSNWDIDHIYPQSRIKDDSLDNMVLVRKDVNNKKRNKILSPKIREDMKGYWTMLCQKGLISKRKYDRLTRTTDFTDEELSGFIERQLVETRQSSKAVAELLNRLYKDSEVVYVKAGLVSDFRHDNNLLKSRRVNDYHHAKDAFLNIVVGNVYHARFTSNPRKWIKDNRDSNYSIRRVFNYDVKQGDKIVWHGSENGGHSIDQIKKIMSRNDILYTEYTYCEKGQLFNETLAKKGNEKAIALKKNLDPVKYGGYTTPKTSAFAFVEFDGKKKERKNHIVEIPVYVVNIAKREPDAVKKYLEERKGYSNVVIKKYPIKKNSLIKMDGYLARLRGANEKDIILKNAVQLILNKDLYEIVRKIEKYLEYNSQYQADAKFEGFTMKDLNXXXXMKNCI
